United States Patent Application Publication US 2006/0150283 A1 - sequence listing, part 25

SEQ ID NO: 96236 - DNA, 1914 bp, Arabidopsis thaliana
  misc_feature (1)..(1914): Ceres Seq. ID no. 12732552
  misc_feature (1)..(1914): Ortholog of  Ceres SEQ ID NO 13582619 as cited in SEQ ID NO 56520
  misc_feature (1)..(1914): Ortholog of  Ceres SEQ ID NO 13660872 as cited in SEQ ID NO 60830
  misc_feature (1)..(1914): Ortholog of  Ceres SEQ ID NO 12616221 as cited in SEQ ID NO 63291
atgacgacggagcaagctttgttgtctatggaagctttacctttaggtttcagattcagaccaacggatgaagaactcatcaatcattacctaaggttaaaaatcaacggccgtgatttagaggttagagtcatccctgagatcgatgtttgcaagtgggaaccatgggacttacctgggctatcggtgataaagacagatgatcaagaatggttctttttttgtcctcgtgatcgaaagtatccgagtggtcatcgttctaatagagctactgatattggttactggaaagctactgggaaagatcgaactattaagtctaagaagatgattattggtatgaagaagactcttgttttctatcgtggaagagctcctagaggagagcgtactaattggattatgcatgagtatcgtgctacagacaaggaactagatggtactggacctggtcagaatccgtatgttttgtgtcgcttgttccacaagcctagtgatagttgtgatcctgcacactgtgaggaaatagagaaagttaattttactccaaccaccaccactagatgctctcctgatgacacatcttctgaaatggtccaagaaacagctacatctggtgtacatgctctagatagatcagatgacactgagaggtgtttaagtgacaagggcaataatgatgtgaaacctgatgtttcagtgataaacaatacttctgtcaatcacgctgaaacttctcgtgccaaagaccgtaatttgggcaagacgttagtagaggaaaatccacttctaagggacgttccaactcttcatggacccatcttgagtgagaaatcatattatccaggacagtcaagcatcggttttgctacatctcacatggattctatgtattctagtgattttggaaactgtgattatgggctacattttcaagatggtgcctctgaacaagatgcatctttaacagatgtcttggatgaagtattccataaccataatgaatcctctaatgacaggaaagactttgtacttccgaatatgatgcattggcctggtaatacaagactgttgtctactgagtacccatttctcaaagattctgttgcttttgttgacggcagtgctgaagtttccggctcacagcaatttgttcctgacattttagcttctagatgggtcagtgaacagaacgttgatagcaaggaggcagtagagattctatcttcaaccgggtcctctcggaccttgacgccacttcataacaacgtttttgggcaatatgcttcatcgtcttacgcagctatcgatccatttaactataatgtcaatcagcctgaacagtcatcctttgagcaaagccatgttgaccgcaacattagtcccagtaacatttttgagttcaaggctaggtctcgagagaatcagagagatctggactctgttgtggaccaaggcactgctcctagaagaattcggctgcagatcgaacagccattgacgccagttaccaacaagaaagagagagatgcggacaactatgaagaagaagatgaagtacaatctgccatgtccaaggtcgtagaggaagaaccggctaatttaagtgctcaggggactgctcagaggagaatccgcctgcagacgagattgaggaagcctctcataaccctaaacaatacaaaaagaaactcaaatggcagagaaggagaagcaagccataggaaggaaaaagaagatatatcatcatcatcatcatggcagaaacagaagaagagcttggtgcagtttagtagtgtggtgataatagtggcggtgatagttgttttagtagaaatatggaaagagtcaagagatgcgaaatgtagcttcttgtttcatcaattagattccttcaaaggcatgtttacttga

SEQ ID NO: 96237 - protein, 637 aa, Arabidopsis thaliana
  peptide (1)..(637): Ceres Seq. ID no. 12732553
MTTEQALLSMEALPLGFRFRPTDEELINHYLRLKINGRDLEVRVIPEIDVCKWEPWDLPGLSVIKTDDQEWFFFCPRDRKYPSGHRSNRATDIGYWKATGKDRTIKSKKMIIGMKKTLVFYRGRAPRGERTNWIMHEYRATDKELDGTGPGQNPYVLCRLFHKPSDSCDPAHCEEIEKVNFTPTTTTRCSPDDTSSEMVQETATSGVHALDRSDDTERCLSDKGNNDVKPDVSVINNTSVNHAETSRAKDRNLGKTLVEENPLLRDVPTLHGPILSEKSYYPGQSSIGFATSHMDSMYSSDFGNCDYGLHFQDGASEQDASLTDVLDEVFHNHNESSNDRKDFVLPNMMHWPGNTRLLSTEYPFLKDSVAFVDGSAEVSGSQQFVPDILASRWVSEQNVDSKEAVEILSSTGSSRTLTPLHNNVFGQYASSSYAAIDPFNYNVNQPEQSSFEQSHVDRNISPSNIFEFKARSRENQRDLDSVVDQGTAPRRIRLQIEQPLTPVTNKKERDADNYEEEDEVQSAMSKVVEEEPANLSAQGTAQRRIRLQTRLRKPLITLNNTKRNSNGREGEASHRKEKEDISSSSSWQKQKKSLVQFSSVVIIVAVIVVLVEIWKESRDAKCSFLFHQLDSFKGMFT

SEQ ID NO: 96238 - protein, 628 aa, Arabidopsis thaliana
  peptide (1)..(628): Ceres Seq. ID no. 12732554
MEALPLGFRFRPTDEELINHYLRLKINGRDLEVRVIPEIDVCKWEPWDLPGLSVIKTDDQEWFFFCPRDRKYPSGHRSNRATDIGYWKATGKDRTIKSKKMIIGMKKTLVFYRGRAPRGERTNWIMHEYRATDKELDGTGPGQNPYVLCRLFHKPSDSCDPAHCEEIEKVNFTPTTTTRCSPDDTSSEMVQETATSGVHALDRSDDTERCLSDKGNNDVKPDVSVINNTSVNHAETSRAKDRNLGKTLVEENPLLRDVPTLHGPILSEKSYYPGQSSIGFATSHMDSMYSSDFGNCDYGLHFQDGASEQDASLTDVLDEVFHNHNESSNDRKDFVLPNMMHWPGNTRLLSTEYPFLKDSVAFVDGSAEVSGSQQFVPDILASRWVSEQNVDSKEAVEILSSTGSSRTLTPLHNNVFGQYASSSYAAIDPFNYNVNQPEQSSFEQSHVDRNISPSNIFEFKARSRENQRDLDSVVDQGTAPRRIRLQIEQPLTPVTNKKERDADNYEEEDEVQSAMSKVVEEEPANLSAQGTAQRRIRLQTRLRKPLITLNNTKRNSNGREGEASHRKEKEDISSSSSWQKQKKSLVQFSSVVIIVAVIVVLVEIWKESRDAKCSFLFHQLDSFKGMFT

SEQ ID NO: 96239 - protein, 528 aa, Arabidopsis thaliana
  peptide (1)..(528): Ceres Seq. ID no. 12732555
MIIGMKKTLVFYRGRAPRGERTNWIMHEYRATDKELDGTGPGQNPYVLCRLFHKPSDSCDPAHCEEIEKVNFTPTTTTRCSPDDTSSEMVQETATSGVHALDRSDDTERCLSDKGNNDVKPDVSVINNTSVNHAETSRAKDRNLGKTLVEENPLLRDVPTLHGPILSEKSYYPGQSSIGFATSHMDSMYSSDFGNCDYGLHFQDGASEQDASLTDVLDEVFHNHNESSNDRKDFVLPNMMHWPGNTRLLSTEYPFLKDSVAFVDGSAEVSGSQQFVPDILASRWVSEQNVDSKEAVEILSSTGSSRTLTPLHNNVFGQYASSSYAAIDPFNYNVNQPEQSSFEQSHVDRNISPSNIFEFKARSRENQRDLDSVVDQGTAPRRIRLQIEQPLTPVTNKKERDADNYEEEDEVQSAMSKVVEEEPANLSAQGTAQRRIRLQTRLRKPLITLNNTKRNSNGREGEASHRKEKEDISSSSSWQKQKKSLVQFSSVVIIVAVIVVLVEIWKESRDAKCSFLFHQLDSFKGMFT

SEQ ID NO: 96240 - DNA, 1631 bp, Arabidopsis thaliana
  misc_feature (1)..(1631): Ceres Seq. ID no. 12732556
  misc_feature (1)..(1631): Ortholog of  Ceres SEQ ID NO 13660287 as cited in SEQ ID NO 67316
gctccatgccttctctactctctcttcattctctcctaagctatggcgagaagagaaggagaagtgacggagacccttctgaaaaagtcgacggagaatcgcggagaagatcgggatgggttagggatgaaggagaaggtttggagggaatctaaaaagctatgggttgtggctgggccggcgatctttacgaggttctccacgtccggactatctttgataagtcaagctttcattggccatcttggctctaccgagttggccgcttactccatcactctcaccgttctcctccgttttagtaatggtatcttgttaggcatggctagtgcgctagaaacactatgtggtcaagcctatggagcaaaacaatatcatatgcttgggatctacctccaaagatcatggatcgtcctcacaggctgtaccatttgccttatgcccatctacatctttgcaggccctattctcttggctttaggtcaagaggaacgccttgttcgtgtggctcggatcatagctctatgggtcataggcatcaacatctcctttgtgccttccttcacttgccaaatgttcctccaagctcagagtaagaacaagatcatcgcctacgttgctgctgtttcgttaggagtccatgtcttcttgtcgtggcttctagtggttcattttgatttcgggatcgctggtgccatgacctcttcgctcgtagcacattggttgcctaacattgcgcaggttttatttgtcacatgcggtggatgtacggaaacgtggagaggattctcttggttggctttcaaggatctttggcccgtttttaaactatctgtatcttccggtggcatgatttgcttggagctatggtacaactcgatcttgattctgctcacgggaaacttgaaaaacgctgaggttgctcttaacgcacttgcaatctgcatcaatataaatgcactggagatgatggtagccttcggcttcatggcagcagcaagtgtaagagtttcaaacgagatcgggagtgggaattctaatggagccaaatttgcaacaatggttgtggtttcgacatcactttcgataggaatcatcttcttctttatcttcctgtttttaagagaaagggtttcatacatttttacaacaagtgaagctgttgccacacaagtagccgatctttctccactcttggccttctccattctcttgaacagtattcaaccagttctctctggagttgctgttggagcgggatggcagaaatatgttacggtcgttaaccttgcttgctattaccttgttggaattccttccggtctttttcttggctatgtcgttggtttacaagtcaaaggtgtttggttaggaatgattttcggaatcttcgttcagacttgcgtgcttacagtaatgactatgagaacagactgggatcaacaggtgtcttcgtcgttgaaacgtttgaaccgttgggttgaaccagaatccccaagtcgaaaccaaactttacaaaacgaatgatggtgaagattgaagtaaaacttgagtttgtattcgaattttgaatttctacttcaccctcgaatgtacacacttgcgtaaaatgtaaatgtgaaacaagtggt

SEQ ID NO: 96241 - protein, 494 aa, Arabidopsis thaliana
  peptide (1)..(494): Ceres Seq. ID no. 12732557
MARREGEVTETLLKKSTENRGEDRDGLGMKEKVWRESKKLWVVAGPAIFTRFSTSGLSLISQAFIGHLGSTELAAYSITLTVLLRFSNGILLGMASALETLCGQAYGAKQYHMLGIYLQRSWIVLTGCTICLMPIYIFAGPILLALGQEERLVRVARIIALWVIGINISFVPSFTCQMFLQAQSKNKIIAYVAAVSLGVHVFLSWLLVVHFDFGIAGAMTSSLVAHWLPNIAQVLFVTCGGCTETWRGFSWLAFKDLWPVFKLSVSSGGMICLELWYNSILILLTGNLKNAEVALNALAICININALEMMVAFGFMAAASVRVSNEIGSGNSNGAKFATMVVVSTSLSIGIIFFFIFLFLRERVSYIFTTSEAVATQVADLSPLLAFSILLNSIQPVLSGVAVGAGWQKYVTVVNLACYYLVGIPSGLFLGYVVGLQVKGVWLGMIFGIFVQTCVLTVMTMRTDWDQQVSSSLKRLNRWVEPESPSRNQTLQNE

SEQ ID NO: 96242 - protein, 466 aa, Arabidopsis thaliana
  peptide (1)..(466): Ceres Seq. ID no. 12732558
MKEKVWRESKKLWVVAGPAIFTRFSTSGLSLISQAFIGHLGSTELAAYSITLTVLLRFSNGILLGMASALETLCGQAYGAKQYHMLGIYLQRSWIVLTGCTICLMPIYIFAGPILLALGQEERLVRVARIIALWVIGINISFVPSFTCQMFLQAQSKNKIIAYVAAVSLGVHVFLSWLLVVHFDFGIAGAMTSSLVAHWLPNIAQVLFVTCGGCTETWRGFSWLAFKDLWPVFKLSVSSGGMICLELWYNSILILLTGNLKNAEVALNALAICININALEMMVAFGFMAAASVRVSNEIGSGNSNGAKFATMVVVSTSLSIGIIFFFIFLFLRERVSYIFTTSEAVATQVADLSPLLAFSILLNSIQPVLSGVAVGAGWQKYVTVVNLACYYLVGIPSGLFLGYVVGLQVKGVWLGMIFGIFVQTCVLTVMTMRTDWDQQVSSSLKRLNRWVEPESPSRNQTLQNE

SEQ ID NO: 96243 - protein, 401 aa, Arabidopsis thaliana
  peptide (1)..(401): Ceres Seq. ID no. 12732559
MASALETLCGQAYGAKQYHMLGIYLQRSWIVLTGCTICLMPIYIFAGPILLALGQEERLVRVARIIALWVIGINISFVPSFTCQMFLQAQSKNKIIAYVAAVSLGVHVFLSWLLVVHFDFGIAGAMTSSLVAHWLPNIAQVLFVTCGGCTETWRGFSWLAFKDLWPVFKLSVSSGGMICLELWYNSILILLTGNLKNAEVALNALAICININALEMMVAFGFMAAASVRVSNEIGSGNSNGAKFATMVVVSTSLSIGIIFFFIFLFLRERVSYIFTTSEAVATQVADLSPLLAFSILLNSIQPVLSGVAVGAGWQKYVTVVNLACYYLVGIPSGLFLGYVVGLQVKGVWLGMIFGIFVQTCVLTVMTMRTDWDQQVSSSLKRLNRWVEPESPSRNQTLQNE

SEQ ID NO: 96244 - DNA, 1712 bp, Arabidopsis thaliana
  misc_feature (1)..(1712): Ceres Seq. ID no. 12732560
  misc_feature (1)..(1712): Ortholog of  Ceres SEQ ID NO 13660287 as cited in SEQ ID NO 67316
aaaccaattcatacacaaacactctagtctcctctctttttctctgccttctctcttttatttattccctccttccctctggtcctccatcagatacaacaacagagactccaagatggccggaggaggaggagagctcacggcggctttgttgaaaaagacggcggagaacggcggagaagagaaggatgagttagggttgaagcaaaaggtttggattgaatcaaagaagctatggattgtggcggcgccagcgatcttcacgagattctcaacgttcggagtttcaataataagtcaatctttcatcggccatcttggtcctatagagttggctgcttactctatcaccttcaccgttctcctccggtttagtaatggtatcttgttaggtatggccagtgcattggaaacactatgtggtcaagcctacggagctaaacaaaatcatatgctcgggatctacctccaaaggtcatggatcgtccttacaggttgtaccatttgcctcacgcccgtctatatcttctctggccctatcctcttagccttaggtcaagaggaacgcattgtccgtgtggctcggatcatagccctatgggtcataggcatcaacttctcttttgtgccttccttcacttgccaaatgttcctccaagctcagagcaagaacaagatcattgcctacgtggctgctgtctccttaggggtccatgtcttcttgtcgtggctacttatggttcatttcaattttgggatcactggtgctatgacctctacgctagttgcgttctggttgcctaatattgcccaactcttgttcgtcacgtgcggtgggtgtaaggacacatggagaggattctctatgatggccttcaaagatttatggcccgtcttcaaactttctatgtcttccggtggaatgctttgcttggaactatggtacaactcaatcttggtactgctcactggaaatttgaaaaacgcagaagtggctcttgatgcactagcaatctgcctcaacataaatggactggagatgatgatagcacttgggtttttggcagctgcaagcgtaagagtgtccaacgagctcggtagtggaaaccccaaaggagccaagtttgcaacactaaccgcggttttcacatcactctctttaggaatagttctattcttcgtcttcttgtttctgagaggaagagtttcctacattttcactacaagtgaagctgtcgcagccgaagttgccgatctttctccgcttttagccttttccatcctcatgaatagtgttcaacccgttctctctggagttgccgtcggagctggatggcaaggatatgttacttacgttaaccttgcttgctattaccttgtcggaattcctattggtattatccttggttatgtcgttggtttgcaagtgaaaggcgtatggatcggaatgctctttggaatattcgttcagacttgtgtgcttaccgtcatgactctgagaacagattgggatcaacaggtgtcaacgtcgttgagacgtttaaatcggtgggttgtaccagaatctagagacgtaaaccaagtatcatcagaggaataaattggattctagattgtctttagcaccgtcacattttattcttaaaagctaaaatgtaacttttaggctatgttccaagattgtgaagacaagaatatgacaaatttgggtc

SEQ ID NO: 96245 - protein, 532 aa, Arabidopsis thaliana
  peptide (1)..(532): Ceres Seq. ID no. 12732561
NQFIHKHSSLLSFSLPSLFYLFPPSLWSSIRYNNRDSKMAGGGGELTAALLKKTAENGGEEKDELGLKQKVWIESKKLWIVAAPAIFTRFSTFGVSIISQSFIGHLGPIELAAYSITFTVLLRFSNGILLGMASALETLCGQAYGAKQNHMLGIYLQRSWIVLTGCTICLTPVYIFSGPILLALGQEERIVRVARIIALWVIGINFSFVPSFTCQMFLQAQSKNKIIAYVAAVSLGVHVFLSWLLMVHFNFGITGAMTSTLVAFWLPNIAQLLFVTCGGCKDTWRGFSMMAFKDLWPVFKLSMSSGGMLCLELWYNSILVLLTGNLKNAEVALDALAICLNINGLEMMIALGFLAAASVRVSNELGSGNPKGAKFATLTAVFTSLSLGIVLFFVFLFLRGRVSYIFTTSEAVAAEVADLSPLLAFSILMNSVQPVLSGVAVGAGWQGYVTYVNLACYYLVGIPIGIILGYVVGLQVKGVWIGMLFGIFVQTCVLTVMTLRTDWDQQVSTSLRRLNRWVVPESRDVNQVSSEE

SEQ ID NO: 96246 - protein, 494 aa, Arabidopsis thaliana
  peptide (1)..(494): Ceres Seq. ID no. 12732562
MAGGGGELTAALLKKTAENGGEEKDELGLKQKVWIESKKLWIVAAPAIFTRFSTFGVSIISQSFIGHLGPIELAAYSITFTVLLRFSNGILLGMASALETLCGQAYGAKQNHMLGIYLQRSWIVLTGCTICLTPVYIFSGPILLALGQEERIVRVARIIALWVIGINFSFVPSFTCQMFLQAQSKNKIIAYVAAVSLGVHVFLSWLLMVHFNFGITGAMTSTLVAFWLPNIAQLLFVTCGGCKDTWRGFSMMAFKDLWPVFKLSMSSGGMLCLELWYNSILVLLTGNLKNAEVALDALAICLNINGLEMMIALGFLAAASVRVSNELGSGNPKGAKFATLTAVFTSLSLGIVLFFVFLFLRGRVSYIFTTSEAVAAEVADLSPLLAFSILMNSVQPVLSGVAVGAGWQGYVTYVNLACYYLVGIPIGIILGYVVGLQVKGVWIGMLFGIFVQTCVLTVMTLRTDWDQQVSTSLRRLNRWVVPESRDVNQVSSEE

SEQ ID NO: 96247 - protein, 401 aa, Arabidopsis thaliana
  peptide (1)..(401): Ceres Seq. ID no. 12732563
MASALETLCGQAYGAKQNHMLGIYLQRSWIVLTGCTICLTPVYIFSGPILLALGQEERIVRVARIIALWVIGINFSFVPSFTCQMFLQAQSKNKIIAYVAAVSLGVHVFLSWLLMVHFNFGITGAMTSTLVAFWLPNIAQLLFVTCGGCKDTWRGFSMMAFKDLWPVFKLSMSSGGMLCLELWYNSILVLLTGNLKNAEVALDALAICLNINGLEMMIALGFLAAASVRVSNELGSGNPKGAKFATLTAVFTSLSLGIVLFFVFLFLRGRVSYIFTTSEAVAAEVADLSPLLAFSILMNSVQPVLSGVAVGAGWQGYVTYVNLACYYLVGIPIGIILGYVVGLQVKGVWIGMLFGIFVQTCVLTVMTLRTDWDQQVSTSLRRLNRWVVPESRDVNQVSSEE

SEQ ID NO: 96248 - DNA, 1050 bp, Arabidopsis thaliana
  misc_feature (1)..(1050): Ceres Seq. ID no. 12732571
  misc_feature (1)..(1050): Ortholog of  Ceres SEQ ID NO 13654989 as cited in SEQ ID NO 63117
  misc_feature (1)..(1050): Ortholog of  Ceres SEQ ID NO 13584744 as cited in SEQ ID NO 69137
atgtcttgtttcttaagctgtgtccgtttcgaaacaaccaccgacaacaacaaacccacgagtacagaatctggttctgtctccggtgttacctgttatacctgggatgatgttgagtctctcacttccaatttctctagacttattggtactggtggctatagtagtatctacttagctcgtgtgtctggttctatcaacgcagctctcaaggttcatgtcagtagtcatcgtctttatcaagtgtttaggtctgagcttgagattttgcttcgtcttcaacatcctcacattgttaagcttcttggttactttgacgattcagaagaaagtggagcactattactagagtaccttcctcaaggtaaccttcaagagaagcttaaccggaacagcaaacaagtgttaccatggagaaacagaaccgctattgcgtttcaggttgcgcaagcaattgaacatattcatgagaaatgtagtcctcagattgtgcacggtgacatcaaatcttccaacatacttcttgacaaacatttcaactccaagctttgtgatttcggatcagctaaagttggtttctcgtctatggttcagccttctaagacgacgtcaactatgtcaccacgatccaagcaagtgatgatgattggttctccagggtacacagatcctcattacttgagaactggtattgcttcgaagaagatggatatgtatgggtttggagtggtggttcttgagttggtttcgggtaaagaagcggttagttctgagagaggtgagatgttggtgcattcaacagcttcgttgatacatgagattcttgattcgaatggagatattggagaagagaaagtgagacagttcttggatccaaggttgtccagggatggtagtattgatttggaagaggttaagacaatgctacgtgtggctgctttctgtcttcgtagccctccatcgctgagaccctctgcttctcaagtagttcaaactcttaacaagaagataccgtctctatctttcctcggttgtggtaaaaaagagtga

SEQ ID NO: 96249 - protein, 349 aa, Arabidopsis thaliana
  peptide (1)..(349): Ceres Seq. ID no. 12732572
MSCFLSCVRFETTTDNNKPTSTESGSVSGVTCYTWDDVESLTSNFSRLIGTGGYSSIYLARVSGSINAALKVHVSSHRLYQVFRSELEILLRLQHPHIVKLLGYFDDSEESGALLLEYLPQGNLQEKLNRNSKQVLPWRNRTAIAFQVAQAIEHIHEKCSPQIVHGDIKSSNILLDKHFNSKLCDFGSAKVGFSSMVQPSKTTSTMSPRSKQVMMIGSPGYTDPHYLRTGIASKKMDMYGFGVVVLELVSGKEAVSSERGEMLVHSTASLIHEILDSNGDIGEEKVRQFLDPRLSRDGSIDLEEVKTMLRVAAFCLRSPPSLRPSASQVVQTLNKKIPSLSFLGCGKKE

SEQ ID NO: 96250 - DNA, 984 bp, Arabidopsis thaliana
  misc_feature (1)..(984): Ceres Seq. ID no. 12732577
  misc_feature (1)..(984): Ortholog of  Ceres SEQ ID NO 12609045 as cited in SEQ ID NO 51314
  misc_feature (1)..(984): Ortholog of  Ceres SEQ ID NO 14316312 as cited in SEQ ID NO 60042
  misc_feature (1)..(984): Ortholog of  Ceres SEQ ID NO 13595877 as cited in SEQ ID NO 67702
  misc_feature (1)..(984): Ortholog of  Ceres SEQ ID NO 13654367 as cited in SEQ ID NO 67993
atgtccgaaccaagtccaatcgctgatccttatgcttatcttaacatcgtaaataatccagatggttcaatcactcgcgacctcagcaacttcccctgcaccgcagctacacctgatccttccccactaaaccccgccgtttcaaaagatcttcccgttaaccaattaaagtcaacgtggctccgtctctaccttccctcctccgccgtcaacgagggtaacgtttcgtctcagaaactccccattgttgtgtattaccatggcggaggattcatcctctgcagcgtcgatatgcaactcttccacgatttctgctccgaggtggctcgtgatctcaacgccatcgtcgtatctccttcgtaccgattagctccagagcatcgattaccggcggcgtatgacgacggagttgaggcgttggattggattaaaacctccgacgatgagtggatcaaatctcacgccgatttctcaaatgtgtttcttatgggaactagcgccggagggaatttggcttacaacgtcggactaagatccgtcgattccgtctccgatctgagtccgttacagatccgtggattgattctacaccatccattcttcggcggagaagagcgaagtgaatctgagattagacttatgaacgatcaggtttgtcctcccatagtcaccgatgtaatgtgggatctgtctcttcccgtcggcgttgaccgagatcatgagtattcgaatccgacggttggagatggatcggagaagttggaaaaaatcggacggttgagatggaaagtgatgatgattggaggagaggatgatccgatgatagatctgcagaaagatgtggcaaagctgatgaagaagaaaggagtagaagtggtggagcattataccggcggccatgttcacggtgctgaaatcagagatccttctaaacgtaaaactctgtttctttccatcaaaaacttcatattctctgttctgtaa

SEQ ID NO: 96251 - protein, 327 aa, Arabidopsis thaliana
  peptide (1)..(327): Ceres Seq. ID no. 12732578
MSEPSPIADPYAYLNIVNNPDGSITRDLSNFPCTAATPDPSPLNPAVSKDLPVNQLKSTWLRLYLPSSAVNEGNVSSQKLPIVVYYHGGGFILCSVDMQLFHDFCSEVARDLNAIVVSPSYRLAPEHRLPAAYDDGVEALDWIKTSDDEWIKSHADFSNVFLMGTSAGGNLAYNVGLRSVDSVSDLSPLQIRGLILHHPFFGGEERSESEIRLMNDQVCPPIVTDVMWDLSLPVGVDRDHEYSNPTVGDGSEKLEKIGRLRWKVMMIGGEDDPMIDLQKDVAKLMKKKGVEVVEHYTGGHVHGAEIRDPSKRKTLFLSIKNFIFSVL

SEQ ID NO: 96252 - protein, 230 aa, Arabidopsis thaliana
  peptide (1)..(230): Ceres Seq. ID no. 12732579
MQLFHDFCSEVARDLNAIVVSPSYRLAPEHRLPAAYDDGVEALDWIKTSDDEWIKSHADFSNVFLMGTSAGGNLAYNVGLRSVDSVSDLSPLQIRGLILHHPFFGGEERSESEIRLMNDQVCPPIVTDVMWDLSLPVGVDRDHEYSNPTVGDGSEKLEKIGRLRWKVMMIGGEDDPMIDLQKDVAKLMKKKGVEVVEHYTGGHVHGAEIRDPSKRKTLFLSIKNFIFSVL

SEQ ID NO: 96253 - protein, 165 aa, Arabidopsis thaliana
  peptide (1)..(165): Ceres Seq. ID no. 12732580
MGTSAGGNLAYNVGLRSVDSVSDLSPLQIRGLILHHPFFGGEERSESEIRLMNDQVCPPIVTDVMWDLSLPVGVDRDHEYSNPTVGDGSEKLEKIGRLRWKVMMIGGEDDPMIDLQKDVAKLMKKKGVEVVEHYTGGHVHGAEIRDPSKRKTLFLSIKNFIFSVL

SEQ ID NO: 96254 - DNA, 573 bp, Arabidopsis thaliana
  misc_feature (1)..(573): Ceres Seq. ID no. 12732581
  misc_feature (1)..(573): Ortholog of  Ceres SEQ ID NO 15178899 as cited in SEQ ID NO 0
atggcgtccgtacgactcttcttcactttaatctccttcgtcttcattatatccacctctgtttacgaatcaaaagtattggatcctcctcacgtcgctgaatcattcaacgttagcctcatccagaaattggggaatacttgtgcttacacagtgatcatctcgacgagctgttcgtcgactaggtacacgcgcgatcagatcagcgtcgctttcggcgatggctatggtaaccagatatacgcaccaaggcttgatgatccatctacaaaaacgtttgagcaatgttcatcagatacatttcagataaacggaccatgtacataccagatatgctatgtatatctctacaggtctggtccagatggttggatcccaaacactgtaaagatatatagccatggctctaaagcggtcaccttcccatataacacatatgttcctgagagtgtatggtatggtttcaattactgcaacagcgcctcagattctaatgtccttgccattggtctcagaaggagcgtgatcatactcctaggttttgttgtcgccggtaccacattgctcttgtaa

SEQ ID NO: 96255 - protein, 190 aa, Arabidopsis thaliana
  peptide (1)..(190): Ceres Seq. ID no. 12732582
MASVRLFFTLISFVFIISTSVYESKVLDPPHVAESFNVSLIQKLGNTCAYTVIISTSCSSTRYTRDQISVAFGDGYGNQIYAPRLDDPSTKTFEQCSSDTFQINGPCTYQICYVYLYRSGPDGWIPNTVKIYSHGSKAVTFPYNTYVPESVWYGFNYCNSASDSNVLAIGLRRSVIILLGFVVAGTTLLL

SEQ ID NO: 96256 - DNA, 890 bp, Arabidopsis thaliana
  misc_feature (1)..(890): Ceres Seq. ID no. 12732590
  misc_feature (1)..(890): Ortholog of  Ceres SEQ ID NO 12611159 as cited in SEQ ID NO 59821
atgggtggtcgtaaaccatgttgtgatgaggttggattaagaaagggtccatggacagtggaagaagatgggaaactagttgatttcttaagggcacgtggcaactgcggtggtggtggaggaggatggtgctggagagacgtgccaaaactggcggggctaaggaggtgtggcaaaagttgccgtctccggtggactaattatctccggccagatctcaagagaggtctttttactgaagaagaaatccaactagtcattgatcttcatgctcgccttggcaatagatggtcgaagattgcagtggagttaccaggaagaacagacaacgatatcaaaaattattggaacactcatataaagaggaagcttataagaatgggtattgatccaaacacacatcgtcgatttgaccaacaaaaagtcaacgaggaggaaacgatattggtcaacgatccaaagcctctgtctgagaccgaggtatctgttgctttgaagaatgacacgtcagcagtgttatcaggaaatctaaaccaattggctgacgtggacggtgatgatcagccgtggagctttctaatggaaaatgacgaaggaggaggtggcgacgccgccggagagcttacgatgctattgtccggtgacattacgtcatcatgttcttcttcgtcatctttgtggatgaagtatggagaattcggatacgaagatttagaacttggatgtttcgatgtttagagattcaagtatgtttaattaggccgtaggttgattaatcataaggttcattgacttcattctagaattgtgtagttggaccagtataaagaatcaaagttataaaacattgtaatttgatttccaaattaatctaatgaataaatgtgctt

SEQ ID NO: 96257 - protein, 245 aa, Arabidopsis thaliana
  peptide (1)..(245): Ceres Seq. ID no. 12732591
MGGRKPCCDEVGLRKGPWTVEEDGKLVDFLRARGNCGGGGGGWCWRDVPKLAGLRRCGKSCRLRWTNYLRPDLKRGLFTEEEIQLVIDLHARLGNRWSKIAVELPGRTDNDIKNYWNTHIKRKLIRMGIDPNTHRRFDQQKVNEEETILVNDPKPLSETEVSVALKNDTSAVLSGNLNQLADVDGDDQPWSFLMENDEGGGGDAAGELTMLLSGDITSSCSSSSSLWMKYGEFGYEDLELGCFDV

SEQ ID NO: 96258 - DNA, 546 bp, Arabidopsis thaliana
  misc_feature (1)..(546): Ceres Seq. ID no. 12732596
  misc_feature (1)..(546): Ortholog of  Ceres SEQ ID NO 12474478 as cited in SEQ ID NO 96
atgctcaaattggttcatacaacaacaacaacaactacaacaacaacaacaaacaccgagttcgtaaaatcatcatgcactttcacaacgtacccaagactctgtttctcttcactctcaactcatgctagtctcatccaaacaagccccaagctcatggctcatgcggctctcaacatcacattagcctcggctaaagtaacttcagcaatgatggtgcgtctctcgaatagtcggctcaagcctaaagaagtctcggccatgagagactgcgtcgaggagttaggtgacacgttggaggagcttaggaaatcgattggtgagatgtgtcagctaagtggctcgaactatgaagtttacataagcgatatacagacttgggtcagtgcggctttgacagatgtgaacacatgtactgacggatttgaaggagaagatatggacgggaaggttaaggttttggttagagggaggattttggttattgctcatttaacaagtaatgctttagctttgattaatcactttgcttctattcatggctaa

SEQ ID NO: 96259 - protein, 181 aa, Arabidopsis thaliana; identical to SEQ ID NO: 86782
  peptide (1)..(181): Ceres Seq. ID no. 12732597

SEQ ID NO: 96260 - protein, 129 aa, Arabidopsis thaliana; identical to SEQ ID NO: 26452
  peptide (1)..(129): Ceres Seq. ID no. 12732598

SEQ ID NO: 96261 - protein, 111 aa, Arabidopsis thaliana
  peptide (1)..(111): Ceres Seq. ID no. 12732599
MMVRLSNSRLKPKEVSAMRDCVEELGDTLEELRKSIGEMCQLSGSNYEVYISDIQTWVSAALTDVNTCTDGFEGEDMDGKVKVLVRGRILVIAHLTSNALALINHFASIHG

SEQ ID NO: 96262 - DNA, 951 bp, Arabidopsis thaliana
  misc_feature (1)..(951): Ceres Seq. ID no. 12732604
  misc_feature (1)..(951): Ortholog of  Ceres SEQ ID NO 12474685 as cited in SEQ ID NO 88
  misc_feature (1)..(951): Ortholog of  Ceres SEQ ID NO 13638574 as cited in SEQ ID NO 51223
  misc_feature (1)..(951): Ortholog of  Ceres SEQ ID NO 12610790 as cited in SEQ ID NO 56123
  misc_feature (1)..(951): Ortholog of  Ceres SEQ ID NO 14315399 as cited in SEQ ID NO 57112
  misc_feature (1)..(951): Ortholog of  Ceres SEQ ID NO 13655636 as cited in SEQ ID NO 63519
  misc_feature (1)..(951): Ortholog of  Ceres SEQ ID NO 13655896 as cited in SEQ ID NO 64970
atgaggagtgacgtggcacgtctcaggtgtggggagacgattccattgcttggaatgggaacttattgtcctcaaaaagatcgagagagcaccatatcagccgtccatcaagctattaagatagggtacagacattttgacacagcaaagatatatggatcagaagaagctcttggaactgcattgggacaagctatctcctatgggactgtccaaagagatgatctttttgtcacttcaaagttatggtctagtgatcaccatgaccctatctctgccctcatacaaactctcaagacaatgggtctagactatcttgacaactacttggtgcattggccaataaagctaaagccgggagttagtgagcctataccaaaggaagatgagtttgagaaagatttgggaattgaagaaacttggcaaggcatggagagatgcttggagatgggtttgtgcagatctattggtgttagcaacttctcttctaagaagatctttgatctccttgatttcgcttctgtctctccatcggtgaatcaggtggaaatgcatccattgtggagacaaagaaagctaaggaaagtgtgtgaagagaacaatatccatgtaagtggatactccccacttggtgggccagggaattgttggggatcaacggctgtgattgaacatcctatcatcaaatccattgctctcaagcataatgccactcctgctcaggtggctctaagatggggaatgtcaaaaggagcaagtgtgatcgtcaagagttttaatggagcaagaatgatagagaacaagagagccttagagattaaattggatgatcaagacttgtcactcattgaccatttggaggaatggaagatcatgagaggagacttccttgttaatcaaaccacaagcccttacaaatccatccaacaactttgggataatgagatttaa

SEQ ID NO: 96263 - protein, 316 aa, Arabidopsis thaliana
  peptide (1)..(316): Ceres Seq. ID no. 12732605
MRSDVARLRCGETIPLLGMGTYCPQKDRESTISAVHQAIKIGYRHFDTAKIYGSEEALGTALGQAISYGTVQRDDLFVTSKLWSSDHHDPISALIQTLKTMGLDYLDNYLVHWPIKLKPGVSEPIPKEDEFEKDLGIEETWQGMERCLEMGLCRSIGVSNFSSKKIFDLLDFASVSPSVNQVEMHPLWRQRKLRKVCEENNIHVSGYSPLGGPGNCWGSTAVIEHPIIKSIALKHNATPAQVALRWGMSKGASVIVKSFNGARMIENKRALEIKLDDQDLSLIDHLEEWKIMRGDFLVNQTTSPYKSIQQLWDNEI

SEQ ID NO: 96264 - protein, 298 aa, Arabidopsis thaliana
  peptide (1)..(298): Ceres Seq. ID no. 12732606
MGTYCPQKDRESTISAVHQAIKIGYRHFDTAKIYGSEEALGTALGQAISYGTVQRDDLFVTSKLWSSDHHDPISALIQTLKTMGLDYLDNYLVHWPIKLKPGVSEPIPKEDEFEKDLGIEETWQGMERCLEMGLCRSIGVSNFSSKKIFDLLDFASVSPSVNQVEMHPLWRQRKLRKVCEENNIHVSGYSPLGGPGNCWGSTAVIEHPIIKSIALKHNATPAQVALRWGMSKGASVIVKSFNGARMIENKRALEIKLDDQDLSLIDHLEEWKIMRGDFLVNQTTSPYKSIQQLWDNEI

SEQ ID NO: 96265 - protein, 216 aa, Arabidopsis thaliana
  peptide (1)..(216): Ceres Seq. ID no. 12732607
MGLDYLDNYLVHWPIKLKPGVSEPIPKEDEFEKDLGIEETWQGMERCLEMGLCRSIGVSNFSSKKIFDLLDFASVSPSVNQVEMHPLWRQRKLRKVCEENNIHVSGYSPLGGPGNCWGSTAVIEHPIIKSIALKHNATPAQVALRWGMSKGASVIVKSFNGARMIENKRALEIKLDDQDLSLIDHLEEWKIMRGDFLVNQTTSPYKSIQQLWDNEI

SEQ ID NO: 96266 - DNA, 1851 bp, Arabidopsis thaliana
  misc_feature (1)..(1851): Ceres Seq. ID no. 12732627
  misc_feature (1)..(1851): Ortholog of  Ceres SEQ ID NO 12613725 as cited in SEQ ID NO 68196
  misc_feature (1)..(1851): Ortholog of  Ceres SEQ ID NO 14301486 as cited in SEQ ID NO 69222
atggagagaaagcctcttgaacttgagtcgacggataaccaccagaatccttcctccgccgtatacggtggctctgttacggcggttgactctgttgaagaagatgttcagaatcagaagaaagtcgtttatagaggctggaaagtcatgccctttattattggaaatgagacatttgagaagcttgggatcattggaacactatcaaaccttctggtttatttaactgcagtcttcaacctgaagagtattacagctgcaaccatcattaacgcctttagtggcacaattaatttcggaactttcgttgctgcttttctctgtgacacttacttcggtcgatacaagactctaagtgtcgcggtcatcgcatgttttcttggatcatttgtgatactattgactgcagcagtgccacaactgcatccagctgcatgtggaacagcggcggatagcatatgtaacgggccaagtggaggccagatagcgtttctactgatgggtctcgggttccttgtagtgggagcgggcggtattagaccgtgtaacttagcttttggggctgatcagtttaacccgaaaagcgaatcagggaaaagagggattgacagtttctttaattggtatttctttaccttcactttcgcgcagatcctgtcgctgactctagtcgtctacgttcagtctaatgtcagttggacgatcggtctaaccatccctgccgttctaatgtttttggcctgcttgattttctttgcgggcgataagttgtatgtgaagatcaaagcctcgggtagtccattggccggtatagctcaagttatagcggttgcgatcaagaaacgcggattaaagcccgcgaaacagccttggcttaacctttacaattactacccaccaaaatacgcaaactccaagctcaaatacacagaccaattcagatttcttgataaagccgctatcttgactcctgaagacaagttgcagccagatggtaagcctgctgatccttggaagctctgtacaatgcaacaagttgaagaagtgaagtgcatcgtgagagtgcttcctatatggtttgcatcatcaatttactacttaaccataactcaacaaatgacttatcccgtcttccaagcccttcagagcgaccgtcgcttaggctcaggaggttttgtgattcccgcagccacctacgtggttttcttgatgacgggaatgacagttttcatcgtagtctacgaccgtgtacttgtgccaaccatgagaagaattactggtctagacaccgggataacgctcttgcagagaattggaactggcattttcttcgctaccgcgagtttagtagtcgcgggatttgtcgaggaacgaaggagaacattcgctctgactaaaccaacactcggtatggcgccaagaaagggagaaatctcgtcgatgtcagctatgtggctgattccgcagctctcactggcgggtgtagcagaggcatttgcagccattggacaaatggagttttactacaagcagtttcccgagaacatgaggagtttcgctggatccatcttttacgttggaggaggagtttcgagttaccttggtagcttcttgattgcaacagttcacaggacaacacagaactcgtcagggggtaactggttagctgaggatttgaacaaaggaagattggatctcttctatttcatgatcgctggaatcctggcagttaattttgcttatttcttggtgatgtcaagatggtataggtacaaaggaagtgatgacgaagtgacaacatatgaaaccaatgaaaatatcatcaaacagcaagacaagaacgttgcctga

SEQ ID NO: 96267 - protein, 616 aa, Arabidopsis thaliana
  peptide (1)..(616): Ceres Seq. ID no. 12732628
MERKPLELESTDNHQNPSSAVYGGSVTAVDSVEEDVQNQKKVVYRGWKVMPFIIGNETFEKLGIIGTLSNLLVYLTAVFNLKSITAATIINAFSGTINFGTFVAAFLCDTYFGRYKTLSVAVIACFLGSFVILLTAAVPQLHPAACGTAADSICNGPSGGQIAFLLMGLGFLVVGAGGIRPCNLAFGADQFNPKSESGKRGIDSFFNWYFFTFTFAQILSLTLVVYVQSNVSWTIGLTIPAVLMFLACLIFFAGDKLYVKIKASGSPLAGIAQVIAVAIKKRGLKPAKQPWLNLYNYYPPKYANSKLKYTDQFRFLDKAAILTPEDKLQPDGKPADPWKLCTMQQVEEVKCIVRVLPIWFASSIYYLTITQQMTYPVFQALQSDRRLGSGGFVIPAATYVVFLMTGMTVFIVVYDRVLVPTMRRITGLDTGITLLQRIGTGIFFATASLVVAGFVEERRRTFALTKPTLGMAPRKGEISSMSAMWLIPQLSLAGVAEAFAAIGQMEFYYKQFPENMRSFAGSIFYVGGGVSSYLGSFLIATVHRTTQNSSGGNWLAEDLNKGRLDLFYFMIAGILAVNFAYFLVMSRWYRYKGSDDEVTTYETNENIIKQQDKNVA

SEQ ID NO: 96268 - protein, 567 aa, Arabidopsis thaliana
  peptide (1)..(567): Ceres Seq. ID no. 12732629
MPFIIGNETFEKLGIIGTLSNLLVYLTAVFNLKSITAATIINAFSGTINFGTFVAAFLCDTYFGRYKTLSVAVIACFLGSFVILLTAAVPQLHPAACGTAADSICNGPSGGQIAFLLMGLGFLVVGAGGIRPCNLAFGADQFNPKSESGKRGIDSFFNWYFFTFTFAQILSLTLVVYVQSNVSWTIGLTIPAVLMFLACLIFFAGDKLYVKIKASGSPLAGIAQVIAVAIKKRGLKPAKQPWLNLYNYYPPKYANSKLKYTDQFRFLDKAAILTPEDKLQPDGKPADPWKLCTMQQVEEVKCIVRVLPIWFASSIYYLTITQQMTYPVFQALQSDRRLGSGGFVIPAATYVVFLMTGMTVFIVVYDRVLVPTMRRITGLDTGITLLQRIGTGIFFATASLVVAGFVEERRRTFALTKPTLGMAPRKGEISSMSAMWLIPQLSLAGVAEAFAAIGQMEFYYKQFPENMRSFAGSIFYVGGGVSSYLGSFLIATVHRTTQNSSGGNWLAEDLNKGRLDLFYFMIAGILAVNFAYFLVMSRWYRYKGSDDEVTTYETNENIIKQQDKNVA

SEQ ID NO: 96269 - protein, 450 aa, Arabidopsis thaliana
  peptide (1)..(450): Ceres Seq. ID no. 12732630
MGLGFLVVGAGGIRPCNLAFGADQFNPKSESGKRGIDSFFNWYFFTFTFAQILSLTLVVYVQSNVSWTIGLTIPAVLMFLACLIFFAGDKLYVKIKASGSPLAGIAQVIAVAIKKRGLKPAKQPWLNLYNYYPPKYANSKLKYTDQFRFLDKAAILTPEDKLQPDGKPADPWKLCTMQQVEEVKCIVRVLPIWFASSIYYLTITQQMTYPVFQALQSDRRLGSGGFVIPAATYVVFLMTGMTVFIVVYDRVLVPTMRRITGLDTGITLLQRIGTGIFFATASLVVAGFVEERRRTFALTKPTLGMAPRKGEISSMSAMWLIPQLSLAGVAEAFAAIGQMEFYYKQFPENMRSFAGSIFYVGGGVSSYLGSFLIATVHRTTQNSSGGNWLAEDLNKGRLDLFYFMIAGILAVNFAYFLVMSRWYRYKGSDDEVTTYETNENIIKQQDKNVA

SEQ ID NO: 96270 - DNA, 947 bp, Arabidopsis thaliana
  misc_feature (1)..(947): Ceres Seq. ID no. 12732671
  misc_feature (1)..(947): Ortholog of  Ceres SEQ ID NO 13597506 as cited in SEQ ID NO 64713
aaaacaaactgtaaagtttattaagaaataataatgaagacattagttgtgaaatgtttccttctattggctcttgtatgtagctgcagagcagcagattcaatatggcaactctgcaacacaaattcaaacatctcagcaagcagccaagtctccaagaacatcgattctcttctcgcgacgcttgtctcaaagactccttcaaaaggtttcaagaccacaacttcttcaagttacaacaacaaagagaaagtgtatggacttgctcaatgtagaggagatatcagcaataccgattgctccacgtgtatccaagacgcggccaagaaaatccgtgaagtgtgtcagaaccaatccgactcaaggatcttgtacgatttctgcttcttacgttatagccaagagaatttcatagggaagcttgacacgggggctggtcttatatacttcaacgtcgctaacgtaaccgaaatcgaccccaaaaagttcgataatgagctcggggcactctttgacaaaattaggtctgaggctgttttacctaagaataaaggtttaggtaaaggtaagacaaaattgacaccttttgtgacactaaacggtttggtccaatgcacgagagacttaagcgaattggattgcgctcaatgctttgcaactgcggtcgggagcttcatgacaacttgccacaacaagaaaggttgtcgtgttttgtatagtagttgctatgtccggtacgagttttatccgttttacttccctcttgatccggctaaaaccggtcctagtgttggtagaatttcttccgttcatctctctccgtaatcgcatagtctaataaaagagtaagtttgtttctaaagagtatatgtatatgtgtgcaaaataaggctctttgcttatgtttctttctttaagatgcaagacaattaagtaaccaagttatt

SEQ ID NO: 96271 - protein, 263 aa, Arabidopsis thaliana
  peptide (1)..(263): Ceres Seq. ID no. 12732672
MKTLVVKCFLLLALVCSCRAADSIWQLCNTNSNISASSQVSKNIDSLLATLVSKTPSKGFKTTTSSSYNNKEKVYGLAQCRGDISNTDCSTCIQDAAKKIREVCQNQSDSRILYDFCFLRYSQENFIGKLDTGAGLIYFNVANVTEIDPKKFDNELGALFDKIRSEAVLPKNKGLGKGKTKLTPFVTLNGLVQCTRDLSELDCAQCFATAVGSFMTTCHNKKGCRVLYSSCYVRYEFYPFYFPLDPAKTGPSVGRISSVHLSP

SEQ ID NO: 96272 - DNA, 780 bp, Arabidopsis thaliana
  misc_feature (1)..(780): Ceres Seq. ID no. 12732689
  misc_feature (1)..(780): Ortholog of  Ceres SEQ ID NO 15171884 as cited in SEQ ID NO 54505
  misc_feature (1)..(780): Ortholog of  Ceres SEQ ID NO 13596515 as cited in SEQ ID NO 62306
  misc_feature (1)..(780): Ortholog of  Ceres SEQ ID NO 14308999 as cited in SEQ ID NO 0
  misc_feature (1)..(780): Ortholog of  Ceres SEQ ID NO 15225075 as cited in SEQ ID NO 0
atggctgccaatttctggaattcatctcactataaacagcttttggatccagaagaagtcgacgtagttcatgatctcgataaagaacgtggaatctcaattgatgattttaagctcatcaagttccatatgtctaatcatattatgaaattggctcagcacattaaagtgaggcaaagggttgtagctactgcaattacgtatatgagacgggtttatatcagaaagagtatggtagagtttgagcctcgacttgttgctcttacgtgcttgtacctggcatctaaagctgaagaaagcatagtgcaggccaggaatcttgttttttacatcaaaagattgtgtaatatcttcttcttctatcctgatgagtacaacaaatatgaactaaaggatatattaggaatggagatgaaggtgttagaagcactagattattatctggttgtgtttcacccttaccggtcattatcggagtttttgcaagatgctgcattaaacgatgtaaatatgaaccagattacatggggaattgttaatgatacttataagatggacctcattcttgtacaccctccctaccgcatagcgctagcatgcatatacatagcaagtgtccacagagagaaagatatcactgcatggtttgaagatcttcatgaggacatgaacttggtaaagaatattgccatggagatactggacttctatgagaactacagaacaatcacagaggaaaaagtgaattctgccttcagcaaattggctttgaagctgtag

SEQ ID NO: 96273 - protein, 259 aa, Arabidopsis thaliana
  peptide (1)..(259): Ceres Seq. ID no. 12732690
MAANFWNSSHYKQLLDPEEVDVVHDLDKERGISIDDFKLIKFHMSNHIMKLAQHIKVRQRVVATAITYMRRVYIRKSMVEFEPRLVALTCLYLASKAEESIVQARNLVFYIKRLCNIFFFYPDEYNKYELKDILGMEMKVLEALDYYLVVFHPYRSLSEFLQDAALNDVNMNQITWGIVNDTYKMDLILVHPPYRIALACIYIASVHREKDITAWFEDLHEDMNLVKNIAMEILDFYENYRTITEEKVNSAFSKLALKL

SEQ ID NO: 96274 - protein, 216 aa, Arabidopsis thaliana
  peptide (1)..(216): Ceres Seq. ID no. 12732691
MSNHIMKLAQHIKVRQRVVATAITYMRRVYIRKSMVEFEPRLVALTCLYLASKAEESIVQARNLVFYIKRLCNIFFFYPDEYNKYELKDILGMEMKVLEALDYYLVVFHPYRSLSEFLQDAALNDVNMNQITWGIVNDTYKMDLILVHPPYRIALACIYIASVHREKDITAWFEDLHEDMNLVKNIAMEILDFYENYRTITEEKVNSAFSKLALKL

SEQ ID NO: 96275 - protein, 211 aa, Arabidopsis thaliana
  peptide (1)..(211): Ceres Seq. ID no. 12732692
MKLAQHIKVRQRVVATAITYMRRVYIRKSMVEFEPRLVALTCLYLASKAEESIVQARNLVFYIKRLCNIFFFYPDEYNKYELKDILGMEMKVLEALDYYLVVFHPYRSLSEFLQDAALNDVNMNQITWGIVNDTYKMDLILVHPPYRIALACIYIASVHREKDITAWFEDLHEDMNLVKNIAMEILDFYENYRTITEEKVNSAFSKLALKL

SEQ ID NO: 96276 - DNA, 660 bp, Arabidopsis thaliana
  misc_feature (1)..(660): Ceres Seq. ID no. 12732697
  misc_feature (1)..(660): Ortholog of  Ceres SEQ ID NO 13595341 as cited in SEQ ID NO 56398
  misc_feature (1)..(660): Ortholog of  Ceres SEQ ID NO 15173764 as cited in SEQ ID NO 57550
  misc_feature (1)..(660): Ortholog of  Ceres SEQ ID NO 15227118 as cited in SEQ ID NO 59038
  misc_feature (1)..(660): Ortholog of  Ceres SEQ ID NO 13597299 as cited in SEQ ID NO 63785
  misc_feature (1)..(660): Ortholog of  Ceres SEQ ID NO 13663895 as cited in SEQ ID NO 66923
atgattcagttactgtttctagttctatttgtggaaggtgcgattgcattcttactgttgataaagattggtcctttgagagagcttgtgattaaaagtcttgaccagatgaagatgggtaaaggtcctgccactgtgaaaacaatcgctggaactatgtctgttattctcttttctaatcttatgagcattgtcaagatccagaataaaggtgcaaagcttgggacaatgtctcctatggatcaggttctttggagaacacacttgcttgaagcttctttattgggagtcgtactttttctcggctttataattgacagaatgcatcactacctcagaaagctaatcaatttgagaagcaacgtcggatcatcgaaagaagaacttgaacagctccagaaagaaagaaccgaactgaaggagaaagaggagaaagcatccaaggaaatcaagcagttgcaagtaaaattgtcatctattacagagagactaaagaaagcagagactgagtcaaaagagaaagagaagaaactcgaaactgctgaaacacatgttacggcgttacagaaacagtctgcagagctgcttctagagtatgatagattgctagaagataaccaacatctccaaagccaaatcttggggaaaaccaagagctga

SEQ ID NO: 96277 - protein, 219 aa, Arabidopsis thaliana
  peptide (1)..(219): Ceres Seq. ID no. 12732698
MIQLLFLVLFVEGAIAFLLLIKIGPLRELVIKSLDQMKMGKGPATVKTIAGTMSVILFSNLMSIVKIQNKGAKLGTMSPMDQVLWRTHLLEASLLGVVLFLGFIIDRMHHYLRKLINLRSNVGSSKEELEQLQKERTELKEKEEKASKEIKQLQVKLSSITERLKKAETESKEKEKKLETAETHVTALQKQSAELLLEYDRLLEDNQHLQSQILGKTKS

SEQ ID NO: 96278 - protein, 183 aa, Arabidopsis thaliana
  peptide (1)..(183): Ceres Seq. ID no. 12732699
MKMGKGPATVKTIAGTMSVILFSNLMSIVKIQNKGAKLGTMSPMDQVLWRTHLLEASLLGVVLFLGFIIDRMHHYLRKLINLRSNVGSSKEELEQLQKERTELKEKEEKASKEIKQLQVKLSSITERLKKAETESKEKEKKLETAETHVTALQKQSAELLLEYDRLLEDNQHLQSQILGKTKS

SEQ ID NO: 96279 - protein, 181 aa, Arabidopsis thaliana
  peptide (1)..(181): Ceres Seq. ID no. 12732700
MGKGPATVKTIAGTMSVILFSNLMSIVKIQNKGAKLGTMSPMDQVLWRTHLLEASLLGVVLFLGFIIDRMHHYLRKLINLRSNVGSSKEELEQLQKERTELKEKEEKASKEIKQLQVKLSSITERLKKAETESKEKEKKLETAETHVTALQKQSAELLLEYDRLLEDNQHLQSQILGKTKS

SEQ ID NO: 96280 - DNA, 966 bp, Arabidopsis thaliana
  misc_feature (1)..(966): Ceres Seq. ID no. 12732701
  misc_feature (1)..(966): Ortholog of  Ceres SEQ ID NO 14314042 as cited in SEQ ID NO 52238
atgacaagaaagaaagtgaaacttgcttacatttccaacgattcttcaagaaaagcgactttcaaaaaaagaaagaagggtttgatgaagaaggtacacgaactctcgactctttgtggcatcactgcatgtgcgatcatctacagcccgtatgataccaaccctgaagtgtggccatcaaattccggtgtgcaaagggtggtttcagaatttaggacactcccagagatggatcaacacaaaaagatggtagatcaagagggttttctcaaacaaagaatcgcgaaagcgacagaaactttgaggagacaaagaaaggatagtagggagctagagatgactgaagtcatgttccaatgtttgattggaaacatggagatgtttcatttgaatattgtggatcttaatgatttgggttatatgattgagcaatatcttaaagatgttaatcgcaggattgagattttacgaaattctggtacggagattggtgaatcttcttctgttgcggtagctgcttctgaagggaatataccaatgccgaatttggtcgctacaacagctcccaccactacaatttatgaggtgggttcttcttcctcatttgcggctgtcgcgaattttgttaatcctattgatcttcaacaatttcgtcatccggcggctcaacatgttggacttaatgagcaacctcaaaatctaaatctgaatttaaatcagaactataatcaaaatcaagaatggtttatggaaatgatgaaccatcctgagcaaatgaggtatcagacagagcaaatgggatatcaattcatggatgataaccaccacaaccacatccatcaccagccacaggagcaccaacatcagatccatgacgaatcttccaacgctcttgatgccgccaactcaagcagcatcatccctgttactagttcaagtattaccaataaaacatggttccattag

SEQ ID NO: 96281 - protein, 321 aa, Arabidopsis thaliana
  peptide (1)..(321): Ceres Seq. ID no. 12732702
MTRKKVKLAYISNDSSRKATFKKRKKGLMKKVHELSTLCGITACAIIYSPYDTNPEVWPSNSGVQRVVSEFRTLPEMDQHKKMVDQEGFLKQRIAKATETLRRQRKDSRELEMTEVMFQCLIGNMEMFHLNIVDLNDLGYMIEQYLKDVNRRIEILRNSGTEIGESSSVAVAASEGNIPMPNLVATTAPTTTIYEVGSSSSFAAVANFVNPIDLQQFRHPAAQHVGLNEQPQNLNLNLNQNYNQNQEWFMEMMNHPEQMRYQTEQMGYQFMDDNHHNHIHHQPQEHQHQIHDESSNALDAANSSSIIPVTSSSITNKTWFH

SEQ ID NO: 96282 - protein, 293 aa, Arabidopsis thaliana
  peptide (1)..(293): Ceres Seq. ID no. 12732703
MKKVHELSTLCGITACAIIYSPYDTNPEVWPSNSGVQRVVSEFRTLPEMDQHKKMVDQEGFLKQRIAKATETLRRQRKDSRELEMTEVMFQCLIGNMEMFHLNIVDLNDLGYMIEQYLKDVNRRIEILRNSGTEIGESSSVAVAASEGNIPMPNLVATTAPTTTIYEVGSSSSFAAVANFVNPIDLQQFRHPAAQHVGLNEQPQNLNLNLNQNYNQNQEWFMEMMNHPEQMRYQTEQMGYQFMDDNHHNHIHHQPQEHQHQIHDESSNALDAANSSSIIPVTSSSITNKTWFH

SEQ ID NO: 96283 - protein, 245 aa, Arabidopsis thaliana
  peptide (1)..(245): Ceres Seq. ID no. 12732704
MDQHKKMVDQEGFLKQRIAKATETLRRQRKDSRELEMTEVMFQCLIGNMEMFHLNIVDLNDLGYMIEQYLKDVNRRIEILRNSGTEIGESSSVAVAASEGNIPMPNLVATTAPTTTIYEVGSSSSFAAVANFVNPIDLQQFRHPAAQHVGLNEQPQNLNLNLNQNYNQNQEWFMEMMNHPEQMRYQTEQMGYQFMDDNHHNHIHHQPQEHQHQIHDESSNALDAANSSSIIPVTSSSITNKTWFH

SEQ ID NO: 96284 - DNA, 1245 bp, Arabidopsis thaliana
  misc_feature (1)..(1245): Ceres Seq. ID no. 12732717
  misc_feature (1)..(1245): Ortholog of  Ceres SEQ ID NO 13599602 as cited in SEQ ID NO 0
atggctgcttttggagatgacattgtgattgtagcggcatatcgtaccgccatttgcaaagcgagacgtggaggtttcaaagacactcttcctgatgatcttcttgcttctgttcttaaggctgtagtggaaagaacatctttggatccaagtgaagttggtgatatcgttgttggtaccgtgatagcgcctggttctcagagagcaatggagtgtagagttgcagcttattttgctggttttcctgactccgtgccagttagaactgtcaatagacaatgctcatcaggactacaagcagttgctgatgttgctgcttccattagagctggttattacgacattggtattggtgctggagtggaatcaatgtcaactgatcatattcctggaggcggctttcatggctctaatccaagagcacaggatttcccaaaagcccgtgattgtttgcttccaatgggaattacttctgaaaacgttgcagaaaggttcggtgtcacaagagaagagcaagatatggctgcggtggagtctcacaaacgcgctgcagctgcaatcgcgtctggtaaactcaaggatgaaatcattcctgttgctactaagattgtggaccctgagactaaagcagagaaggcaatcgtcgtatctgttgatgacggtgtacgtccaaactcaaacatggcagatttggcaaagctgaagactgtctttaaacagaacggttccaccacagctggcaatgctagtcagatcagtgatggtgctggagcagtactgctaatgaagagaagtttggctatgaagaagggacttcccattcttggagtattcaggagttttgctgttactggtgtggaaccatctgtaatgggtattggtccagctgttgccattcccgctgcaactaagctcgcagggctcaacgtcagcgatattgatctattcgagatcaatgaggcatttgcatctcagtatgtgtactcttgcaagaagttagagctggatatggaaaaggtcaatgttaatggaggagccattgctattggccatcccctgggtgctacaggagctcgatgtgttgcgacattgttgcacgagatgaagcggagaggaaaagattgccgctttggagtaatctcaatgtgcataggcactggaatgggagctgcagctgtttttgagaggggagactctgttgataacttgtccaacgctcgtgtggctaacggggatagtcattag

SEQ ID NO: 96285 - protein, 414 aa, Arabidopsis thaliana; identical to SEQ ID NO: 29323
  peptide (1)..(414): Ceres Seq. ID no. 12732718

SEQ ID NO: 96286 - protein, 345 aa, Arabidopsis thaliana; identical to SEQ ID NO: 29324
  peptide (1)..(345): Ceres Seq. ID no. 12732719

SEQ ID NO: 96287 - protein, 291 aa, Arabidopsis thaliana; identical to SEQ ID NO: 29325
  peptide (1)..(291): Ceres Seq. ID no. 12732720

SEQ ID NO: 96288 - DNA, 2063 bp, Arabidopsis thaliana
  misc_feature (1)..(2063): Ceres Seq. ID no. 12732721
  misc_feature (1)..(2063): Ortholog of  Ceres SEQ ID NO 12586556 as cited in SEQ ID NO 64667
  misc_feature (1)..(2063): Ortholog of  Ceres SEQ ID NO 14316045 as cited in SEQ ID NO 66810
  misc_feature (1)..(2063): Ortholog of  Ceres SEQ ID NO 13660894 as cited in SEQ ID NO 67475
acgtaggaatctttgttgattctcaatgaacccaacacagacacttttctctcccggcggtaactcgccggcgtcttctccggcgagtcatccatcttcactctttcctcaaatcaacaactgtcgaactataagagacctctctcaaatccatgccgttttcattaaatctggtcaaatgcgagacactctcgccgccgcagagattctccgattctgtgctacctccgatctccaccaccgtgaccttgactacgcacataagatctttaatcaaatgcctcaacgaaattgcttctcttggaatactataatcagaggtttcagtgagagtgacgaagacaaagctctgatcgcaatcacattattctacgagatgatgagtgatgagtttgttgaaccgaatcggtttacgtttccctctgttcttaaggcttgtgcgaaaactgggaagattcaagaaggtaagcagattcatggtttggctttgaagtatggatttggtggtgatgaatttgtgatgagtaatcttgttagaatgtatgtgatgtgtggttttatgaaagatgctcgtgtgttgttttataagaacattatagagaaagatatggtggtgatgactgatagaagaaagagagatggtgaaatagttttgtggaatgttatgattgatggttatatgagacttggtgattgtaaagctgcacggatgttgtttgataaaatgcgtcaaagaagcgttgtttcgtggaatacgatgatatcgggttattcgctgaacgggtttttcaaagatgctgttgaggtttttcgtgagatgaagaaaggggatattagaccgaattatgttactttggttagtgttcttcctgctatttcacggcttgggtctttagagttgggagaatggttgcatttgtatgcagaggatagtggaattaggattgatgatgtgcttggctctgctttgattgatatgtattcgaaatgtgggatcattgagaaagcgattcatgtatttgagaggttacctagagagaacgtgattacttggagtgcgatgattaacgggtttgctatacatggccaggcaggtgatgctattgactgtttttgtaaaatgaggcaggctggagttcgacctagtgatgttgcctacattaatcttttgactgcttgtagccatggcgggttggtagaagaaggaaggagatatttcagtcagatggtgagtgtggatggtttagagcctaggattgaacactacgggtgtatggttgatttattgggtcgttcgggtcttcttgatgaggctgaggagtttatacttaatatgcctataaaaccagatgatgtgatatggaaagcacttttgggtgcttgcagaatgcagggaaatgtcgagatgggcaagcgcgttgccaatattctgatggatatggttcctcatgacagtggagcttatgtcgccctctcaaacatgtatgcttctcaaggaaactggtcagaggtttcagagatgaggctgagaatgaaggagaaggatataagaaaagaccctgggtgtagtttgatcgacattgatggcgtgcttcatgagtttgttgtggaagatgattcacacccaaaagccaaagaaatcaactcaatgctcgtagaaatctcagacaaactgagactagctgggtatagaccaatcaccacacaggttttgttaaacttggaggaagaagataaagaaaatgtacttcattaccacagcgagaagatcgctacagcgtttgggttgataagcacgagccctggcaaaccaatacgcattgttaagaacctacgtatctgtgaggattgtcattcgtccatcaaactcatctccaaagtttacaagagaaaaataacggtacgagaccggaaacgttttcaccatttccaagatggctcatgctcgtgtatggattattggtgaaactaaacataaagacggaagactctttccctgtgtatacacaagctctgttgtttctttactgactccacatttataagaattgaatcttttattc

SEQ ID NO: 96289 - protein, 646 aa, Arabidopsis thaliana
  peptide (1)..(646): Ceres Seq. ID no. 12732722
MNPTQTLFSPGGNSPASSPASHPSSLFPQINNCRTIRDLSQIHAVFIKSGQMRDTLAAAEILRFCATSDLHHRDLDYAHKIFNQMPQRNCFSWNTIIRGFSESDEDKALIAITLFYEMMSDEFVEPNRFTFPSVLKACAKTGKIQEGKQIHGLALKYGFGGDEFVMSNLVRMYVMCGFMKDARVLFYKNIIEKDMVVMTDRRKRDGEIVLWNVMIDGYMRLGDCKAARMLFDKMRQRSVVSWNTMISGYSLNGFFKDAVEVFREMKKGDIRPNYVTLVSVLPAISRLGSLELGEWLHLYAEDSGIRIDDVLGSALIDMYSKCGIIEKAIHVFERLPRENVITWSAMINGFAIHGQAGDAIDCFCKMRQAGVRPSDVAYINLLTACSHGGLVEEGRRYFSQMVSVDGLEPRIEHYGCMVDLLGRSGLLDEAEEFILNMPIKPDDVIWKALLGACRMQGNVEMGKRVANILMDMVPHDSGAYVALSNMYASQGNWSEVSEMRLRMKEKDIRKDPGCSLIDIDGVLHEFVVEDDSHPKAKEINSMLVEISDKLRLAGYRPITTQVLLNLEEEDKENVLHYHSEKIATAFGLISTSPGKPIRIVKNLRICEDCHSSIKLISKVYKRKITVRDRKRFHHFQDGSCSCMDYW

SEQ ID NO: 96290 - protein, 595 aa, Arabidopsis thaliana
  peptide (1)..(595): Ceres Seq. ID no. 12732723
MRDTLAAAEILRFCATSDLHHRDLDYAHKIFNQMPQRNCFSWNTIIRGFSESDEDKALIAITLFYEMMSDEFVEPNRFTFPSVLKACAKTGKIQEGKQIHGLALKYGFGGDEFVMSNLVRMYVMCGFMKDARVLFYKNIIEKDMVVMTDRRKRDGEIVLWNVMIDGYMRLGDCKAARMLFDKMRQRSVVSWNTMISGYSLNGFFKDAVEVFREMKKGDIRPNYVTLVSVLPAISRLGSLELGEWLHLYAEDSGIRIDDVLGSALIDMYSKCGIIEKAIHVFERLPRENVITWSAMINGFAIHGQAGDAIDCFCKMRQAGVRPSDVAYINLLTACSHGGLVEEGRRYFSQMVSVDGLEPRIEHYGCMVDLLGRSGLLDEAEEFILNMPIKPDDVIWKALLGACRMQGNVEMGKRVANILMDMVPHDSGAYVALSNMYASQGNWSEVSEMRLRMKEKDIRKDPGCSLIDIDGVLHEFVVEDDSHPKAKEINSMLVEISDKLRLAGYRPITTQVLLNLEEEDKENVLHYHSEKIATAFGLISTSPGKPIRIVKNLRICEDCHSSIKLISKVYKRKITVRDRKRFHHFQDGSCSCMDYW

SEQ ID NO: 96291 - protein, 562 aa, Arabidopsis thaliana
  peptide (1)..(562): Ceres Seq. ID no. 12732724
MPQRNCFSWNTIIRGFSESDEDKALIAITLFYEMMSDEFVEPNRFTFPSVLKACAKTGKIQEGKQIHGLALKYGFGGDEFVMSNLVRMYVMCGFMKDARVLFYKNIIEKDMVVMTDRRKRDGEIVLWNVMIDGYMRLGDCKAARMLFDKMRQRSVVSWNTMISGYSLNGFFKDAVEVFREMKKGDIRPNYVTLVSVLPAISRLGSLELGEWLHLYAEDSGIRIDDVLGSALIDMYSKCGIIEKAIHVFERLPRENVITWSAMINGFAIHGQAGDAIDCFCKMRQAGVRPSDVAYINLLTACSHGGLVEEGRRYFSQMVSVDGLEPRIEHYGCMVDLLGRSGLLDEAEEFILNMPIKPDDVIWKALLGACRMQGNVEMGKRVANILMDMVPHDSGAYVALSNMYASQGNWSEVSEMRLRMKEKDIRKDPGCSLIDIDGVLHEFVVEDDSHPKAKEINSMLVEISDKLRLAGYRPITTQVLLNLEEEDKENVLHYHSEKIATAFGLISTSPGKPIRIVKNLRICEDCHSSIKLISKVYKRKITVRDRKRFHHFQDGSCSCMDYW

SEQ ID NO: 96292 - DNA, 1395 bp, Arabidopsis thaliana
  misc_feature (1)..(1395): Ceres Seq. ID no. 12732751
  misc_feature (1)..(1395): Ortholog of  Ceres SEQ ID NO 13503610 as cited in SEQ ID NO 62416
  misc_feature (1)..(1395): Ortholog of  Ceres SEQ ID NO 13657610 as cited in SEQ ID NO 66165
  misc_feature (1)..(1395): Ortholog of  Ceres SEQ ID NO 13598312 as cited in SEQ ID NO 68448
  misc_feature (1)..(1395): Ortholog of  Ceres SEQ ID NO 13596100 as cited in SEQ ID NO 68573
atgaatcaaacgatacacagagtttcaccaatctccatgagcatctcagagctgacaacacttctcagctcaggtgtttctgtctttgagatctttgccggtttgctagtagtgcatctgatctaccaaagaattagaacaagagtcaaagtctacttacttgatttcacttgttaccgggcacctgactcaaaccgcgtcccaatgtcaactcttatcgaaaccatctacctcgatgacaagcttgatcaagagagtattgacttccaagcccggattcttgagaggtcctggttaagcaaccaaaccagtattcctcgttccctgatggaaatacccctcaagaaatctctctcctcggtcaaaatagaaaccatgaccactatcttcacctctgttgaggatctcctgaggaaaaacaaactaagcccaagaagcatagacatactgataacaaactgtagtttgcattcgccttcaccgtctctaagtgcaatggtgatcaacaaattccatatgagaagcaatatcaagagctttaacctgtctgggatgggttgtgcggctgggattctatcagtcaatttggctaatgatttgctacaggctcaccgaggctcattggctcttattgttagcaccgaagcgctgaacacacattggtacattggcaaagacagatctatgcttcttactaattgtctcttccgaatgggagcagctgcagttttgatgtctagcaatgatcatgacagagacaatgcaaagtatgagctcttgcatgttgttagaaaaaataaagcgaaagatgatcgagcttaccgatgtatctatcaagacatagactctgatgaaaagcaaggggtgtcgataaccaaagatgtaatcagcgttgctggggatatgctgaagatgaatctaacttcactgggacctctggtattaccttacttagagcaattccaatatgtgatacaacacattctttgcaagaaactaaagatctatgagtcgaattcttcttatacaccaaacttcaagacagcgtttgagcatttctgcattcatacaggaggaagagctgtaattcaagcaatggagatgaacctgaaactgacaaaagtagacatcgagccatcaaagatgactcttcataggtttgggaatacttcttcgtcatccatttggtacgctctctcttacttggaagcaaaaaggagaatgaaaaaaggcgatagggtcttgcagattgcatttggaagtgggttcaagtgtaacagtgcggtgtggagatgcatccgaaaagtggagcccaacacagaaaacaaatggctcgactttatcgactcatatcctgtagacgtacctgactctacaaatatcagaccaggctag

SEQ ID NO: 96293 - protein, 464 aa, Arabidopsis thaliana
  peptide (1)..(464): Ceres Seq. ID no. 12732752
MNQTIHRVSPISMSISELTTLLSSGVSVFEIFAGLLVVHLIYQRIRTRVKVYLLDFTCYRAPDSNRVPMSTLIETIYLDDKLDQESIDFQARILERSWLSNQTSIPRSLMEIPLKKSLSSVKIETMTTIFTSVEDLLRKNKLSPRSIDILITNCSLHSPSPSLSAMVINKFHMRSNIKSFNLSGMGCAAGILSVNLANDLLQAHRGSLALIVSTEALNTHWYIGKDRSMLLTNCLFRMGAAAVLMSSNDHDRDNAKYELLHVVRKNKAKDDRAYRCIYQDIDSDEKQGVSITKDVISVAGDMLKMNLTSLGPLVLPYLEQFQYVIQHILCKKLKIYESNSSYTPNFKTAFEHFCIHTGGRAVIQAMEMNLKLTKVDIEPSKMTLHRFGNTSSSSIWYALSYLEAKRRMKKGDRVLQIAFGSGFKCNSAVWRCIRKVEPNTENKWLDFIDSYPVDVPDSTNIRPG

SEQ ID NO: 96294 - protein, 452 aa, Arabidopsis thaliana
  peptide (1)..(452): Ceres Seq. ID no. 12732753
MSISELTTLLSSGVSVFEIFAGLLVVHLIYQRIRTRVKVYLLDFTCYRAPDSNRVPMSTLIETIYLDDKLDQESIDFQARILERSWLSNQTSIPRSLMEIPLKKSLSSVKIETMTTIFTSVEDLLRKNKLSPRSIDILITNCSLHSPSPSLSAMVINKFHMRSNIKSFNLSGMGCAAGILSVNLANDLLQAHRGSLALIVSTEALNTHWYIGKDRSMLLTNCLFRMGAAAVLMSSNDHDRDNAKYELLHVVRKNKAKDDRAYRCIYQDIDSDEKQGVSITKDVISVAGDMLKMNLTSLGPLVLPYLEQFQYVIQHILCKKLKIYESNSSYTPNFKTAFEHFCIHTGGRAVIQAMEMNLKLTKVDIEPSKMTLHRFGNTSSSSIWYALSYLEAKRRMKKGDRVLQIAFGSGFKCNSAVWRCIRKVEPNTENKWLDFIDSYPVDVPDSTNIRPG

SEQ ID NO: 96295 - protein, 396 aa, Arabidopsis thaliana
  peptide (1)..(396): Ceres Seq. ID no. 12732754
MSTLIETIYLDDKLDQESIDFQARILERSWLSNQTSIPRSLMEIPLKKSLSSVKIETMTTIFTSVEDLLRKNKLSPRSIDILITNCSLHSPSPSLSAMVINKFHMRSNIKSFNLSGMGCAAGILSVNLANDLLQAHRGSLALIVSTEALNTHWYIGKDRSMLLTNCLFRMGAAAVLMSSNDHDRDNAKYELLHVVRKNKAKDDRAYRCIYQDIDSDEKQGVSITKDVISVAGDMLKMNLTSLGPLVLPYLEQFQYVIQHILCKKLKIYESNSSYTPNFKTAFEHFCIHTGGRAVIQAMEMNLKLTKVDIEPSKMTLHRFGNTSSSSIWYALSYLEAKRRMKKGDRVLQIAFGSGFKCNSAVWRCIRKVEPNTENKWLDFIDSYPVDVPDSTNIRPG

SEQ ID NO: 96296 - DNA, 1777 bp, Arabidopsis thaliana
  misc_feature (1)..(1777): Ceres Seq. ID no. 12732772
  misc_feature (1)..(1777): Ortholog of  Ceres SEQ ID NO 15177903 as cited in SEQ ID NO 54993
  misc_feature (1)..(1777): Ortholog of  Ceres SEQ ID NO 15177994 as cited in SEQ ID NO 55641
  misc_feature (1)..(1777): Ortholog of  Ceres SEQ ID NO 13595454 as cited in SEQ ID NO 56502
  misc_feature (1)..(1777): Ortholog of  Ceres SEQ ID NO 13589016 as cited in SEQ ID NO 68472
acttcctcagtttctccaactctgtacttcgtatcatcaagcgaaaccctaaaagaagcaatctttagtctcttctcttctttattttttctggggagaaagaaatttcacttttttttatccgatttctgcttcatctgggttttggatttttgcgatcgattttgagaaattagcaaacaatgtcgggttctggaggagtttcaatcgcacgtacagcgatccgtggtgagaatcggttttataatccacctccgatgcgtaggatgcagcaagaggcccaattgcagcaacagattagggagaagcaacgtcgtgatgatgaagatgaggttttgatggataaggaaaggagaaaggctgctactgttgctccgaggactactaggaaaggtcttggtgtgtcggagagtaagagtcgggttgttgtttcgggttcggaagtatgtgccggttcttctgattcttcttccgggtcgggtcgggttcttagtgatgggtctaacttggatcggttcttggagcatactactcctgttgttcctgctcgtttatttcccatgaggagcaggtgggaacttaaaacccgtgaatcggattgccatacgtattttgttttggaggatctttgggagtcatttgctgaatggagtgcatacggtgctggtgttcctttagagatgcatcctctagaaatgcatgggaatgactccactgtgcagtattatgtgccttacttatccggtattcagttgtatgttgatccgttgaagaagcctagaaatccagttggagataatgaaggaagtagtgaaggaagcagcaacagtaggactttgccggtggacttgagtgtcggtgaactgaatagaattagtctgaaagatcaatctattactggctcgttgtctagtggagaagctgagatcagcaatccgcagggacgattactattcgagtacttggagtatgaacctccatttggcagggaacctctggctaacaaaatctcggatctcgcgtcaagagttcctgagctaatgacataccggagctgtgatcttcttccttcaagttgggtctctgtgtcatggtatccaatatacagaataccggttggtccaacactacaaaatcttgatgcctgctttctaacttttcactctctctcaacagcacctcctcaaagtgctatgggttgtagtgattcacaaccatccacaaagctaccgttgcctacttttggactcgcatcttataagctgaaagtatctgtgtggaaccaaaatagaattcaagagtcccaaaagatgacttctttgctacaagctgcagataaatggctcaagcgtctgcaagttgatcatccagactacagattcttcacctctaacagtccacaaatgaggtgaaaatgaaagatacattcttgaccatggatttggctctggtctgatcaaaagacccattatctgctgctcttacttcacatataaagtctctcttacactgaagaaccaccaaatagtggttagactcttgcgtgtttttcaggcgatttaagagtctctgctgtttcgtttccagaagatgctttgtgaattgtagcctaatcttcctctttcttcttctgaaacttagtcttttgattttccctgaataaggatttgaggagcccatatagtgaaatttgcgaggagtgtttttgtaatgttgagatgcaacactttttgtgatacaatttgattgctgaactgatgaaacacagggttggctt

SEQ ID NO: 96297 - protein, 409 aa, Arabidopsis thaliana
  peptide (1)..(409): Ceres Seq. ID no. 12732773
MSGSGGVSIARTAIRGENRFYNPPPMRRMQQEAQLQQQIREKQRRDDEDEVLMDKERRKAATVAPRTTRKGLGVSESKSRVVVSGSEVCAGSSDSSSGSGRVLSDGSNLDRFLEHTTPVVPARLFPMRSRWELKTRESDCHTYFVLEDLWESFAEWSAYGAGVPLEMHPLEMHGNDSTVQYYVPYLSGIQLYVDPLKKPRNPVGDNEGSSEGSSNSRTLPVDLSVGELNRISLKDQSITGSLSSGEAEISNPQGRLLFEYLEYEPPFGREPLANKISDLASRVPELMTYRSCDLLPSSWVSVSWYPIYRIPVGPTLQNLDACFLTFHSLSTAPPQSAMGCSDSQPSTKLPLPTFGLASYKLKVSVWNQNRIQESQKMTSLLQAADKWLKRLQVDHPDYRFFTSNSPQMR

SEQ ID NO: 96298 - protein, 384 aa, Arabidopsis thaliana
  peptide (1)..(384): Ceres Seq. ID no. 12732774
MRRMQQEAQLQQQIREKQRRDDEDEVLMDKERRKAATVAPRTTRKGLGVSESKSRVVVSGSEVCAGSSDSSSGSGRVLSDGSNLDRFLEHTTPVVPARLFPMRSRWELKTRESDCHTYFVLEDLWESFAEWSAYGAGVPLEMHPLEMHGNDSTVQYYVPYLSGIQLYVDPLKKPRNPVGDNEGSSEGSSNSRTLPVDLSVGELNRISLKDQSITGSLSSGEAEISNPQGRLLFEYLEYEPPFGREPLANKISDLASRVPELMTYRSCDLLPSSWVSVSWYPIYRIPVGPTLQNLDACFLTFHSLSTAPPQSAMGCSDSQPSTKLPLPTFGLASYKLKVSVWNQNRIQESQKMTSLLQAADKWLKRLQVDHPDYRFFTSNSPQMR

SEQ ID NO: 96299 - protein, 381 aa, Arabidopsis thaliana
  peptide (1)..(381): Ceres Seq. ID no. 12732775
MQQEAQLQQQIREKQRRDDEDEVLMDKERRKAATVAPRTTRKGLGVSESKSRVVVSGSEVCAGSSDSSSGSGRVLSDGSNLDRFLEHTTPVVPARLFPMRSRWELKTRESDCHTYFVLEDLWESFAEWSAYGAGVPLEMHPLEMHGNDSTVQYYVPYLSGIQLYVDPLKKPRNPVGDNEGSSEGSSNSRTLPVDLSVGELNRISLKDQSITGSLSSGEAEISNPQGRLLFEYLEYEPPFGREPLANKISDLASRVPELMTYRSCDLLPSSWVSVSWYPIYRIPVGPTLQNLDACFLTFHSLSTAPPQSAMGCSDSQPSTKLPLPTFGLASYKLKVSVWNQNRIQESQKMTSLLQAADKWLKRLQVDHPDYRFFTSNSPQMR

SEQ ID NO: 96300 - DNA, 1374 bp, Arabidopsis thaliana
  misc_feature (1)..(1374): Ceres Seq. ID no. 12732799
  misc_feature (1)..(1374): Ortholog of  Ceres SEQ ID NO 13659033 as cited in SEQ ID NO 66372
  misc_feature (1)..(1374): Ortholog of  Ceres SEQ ID NO 13655724 as cited in SEQ ID NO 68973
  misc_feature (1)..(1374): Ortholog of  Ceres SEQ ID NO 12625899 as cited in SEQ ID NO 69079
atggcggatctaaagaatctcttcctcatcacgaaacatccatcaacaacacagatcttcctaacgtctctcttcttcctttctctcttcctcctctcctcttcttctctctcagatttctctccatcactcatcgtctctagcttcacctctcgtcttctcacagcagcaaacttcttctcttctccttcttcttatacttcctctgcttcagatacaactatgtttctctcttctgtttctcccagaagaatcaacgagccaaagattgattcggagaccaaagaactcgcttcttgcgacatttttgatggaacttgggtctttgacgattctgaaccggtttatcttcctggttattgtcctttcgttgaagataaattcaactgcttcaagaatggtcgacctgattcggggtttctccgtcatcgatggcaacctcatggatgctcgattccaagattcgatgggaagaagatgttgaagatgctgagagggaaaagagttgtttttgttggtgattcattgaatagaaacatgtgggagtctctggtttgttcacttaggtcaacattggaagacaaaaacagagtttctaagattattggaaaacagagtaatcttcctaacgaaggcttttacggtttcaggttcaatgactttgaatgctctattgacttcatcaaatcaccattcctcgttcaagaatcagaagttgtagatgtatacgggaagagaagagagacactgagactcgatatgattcaaagatcgatgacgaagatatacaaaaacgcagacattgttatatttaacactggtcactggtggactcaccagaaaacctacgaagggaaaggttattaccaggaaggaaatagggtttacgaaagattagaagtgaaagaagcttatacaaaagctattcatacatgggctgactgggttgattccaatatcaacagtactaaaaccagagtcttcttcgttggttattcctcttcacattttagaaaaggggcgtggaatagcggaggacaatgcgatggagaaacaagaccgatacagaacgaaacgtacacaggagtgtatccatggatgatgaaagttgtagaatctgtgatctcggaaatgaaaacgcctgtgttttacatgaacattacgaagatgacttggtaccgaacagatggtcatccgtcggtttacagacagcccgccgacccccgaggaacttctcctgcagcgggaatgtaccaagattgtagtcattggtgcttacctggagttcctgattcatggaaccagcttctctacgctactctgctagtttcacatggttccttgcctgacaagtcacttggaagtctcttgtaa

SEQ ID NO: 96301 - protein, 457 aa, Arabidopsis thaliana
  peptide (1)..(457): Ceres Seq. ID no. 12732800
MADLKNLFLITKHPSTTQIFLTSLFFLSLFLLSSSSLSDFSPSLIVSSFTSRLLTAANFFSSPSSYTSSASDTTMFLSSVSPRRINEPKIDSETKELASCDIFDGTWVFDDSEPVYLPGYCPFVEDKFNCFKNGRPDSGFLRHRWQPHGCSIPRFDGKKMLKMLRGKRVVFVGDSLNRNMWESLVCSLRSTLEDKNRVSKIIGKQSNLPNEGFYGFRFNDFECSIDFIKSPFLVQESEVVDVYGKRRETLRLDMIQRSMTKIYKNADIVIFNTGHWWTHQKTYEGKGYYQEGNRVYERLEVKEAYTKAIHTWADWVDSNINSTKTRVFFVGYSSSHFRKGAWNSGGQCDGETRPIQNETYTGVYPWMMKVVESVISEMKTPVFYMNITKMTWYRTDGHPSVYRQPADPRGTSPAAGMYQDCSHWCLPGVPDSWNQLLYATLLVSHGSLPDKSLGSLL

SEQ ID NO: 96302 - protein, 383 aa, Arabidopsis thaliana
  peptide (1)..(383): Ceres Seq. ID no. 12732801
MFLSSVSPRRINEPKIDSETKELASCDIFDGTWVFDDSEPVYLPGYCPFVEDKFNCFKNGRPDSGFLRHRWQPHGCSIPRFDGKKMLKMLRGKRVVFVGDSLNRNMWESLVCSLRSTLEDKNRVSKIIGKQSNLPNEGFYGFRFNDFECSIDFIKSPFLVQESEVVDVYGKRRETLRLDMIQRSMTKIYKNADIVIFNTGHWWTHQKTYEGKGYYQEGNRVYERLEVKEAYTKAIHTWADWVDSNINSTKTRVFFVGYSSSHFRKGAWNSGGQCDGETRPIQNETYTGVYPWMMKVVESVISEMKTPVFYMNITKMTWYRTDGHPSVYRQPADPRGTSPAAGMYQDCSHWCLPGVPDSWNQLLYATLLVSHGSLPDKSLGSLL

SEQ ID NO: 96303 - protein, 298 aa, Arabidopsis thaliana
  peptide (1)..(298): Ceres Seq. ID no. 12732802
MLKMLRGKRVVFVGDSLNRNMWESLVCSLRSTLEDKNRVSKIIGKQSNLPNEGFYGFRFNDFECSIDFIKSPFLVQESEVVDVYGKRRETLRLDMIQRSMTKIYKNADIVIFNTGHWWTHQKTYEGKGYYQEGNRVYERLEVKEAYTKAIHTWADWVDSNINSTKTRVFFVGYSSSHFRKGAWNSGGQCDGETRPIQNETYTGVYPWMMKVVESVISEMKTPVFYMNITKMTWYRTDGHPSVYRQPADPRGTSPAAGMYQDCSHWCLPGVPDSWNQLLYATLLVSHGSLPDKSLGSLL

SEQ ID NO: 96304 - DNA, 2905 bp, Arabidopsis thaliana
  misc_feature (1)..(2905): Ceres Seq. ID no. 12732812
  misc_feature (1)..(2905): Ortholog of  Ceres SEQ ID NO 13593889 as cited in SEQ ID NO 53305
  misc_feature (1)..(2905): Ortholog of  Ceres SEQ ID NO 13581959 as cited in SEQ ID NO 56156
aaagataagcaaattagttttccttctttgttgactctctccagattctgtttcttcttccttaatccatctctcaagcttctccaccattttcaccttgattcagcttctccgattcaaactcagatttgatctccgttgatttgatttgactgcgtttttctggcaatggagaagacgactccaccagcggaggagcttctaaagaagatacgagagttagaagaaagccaagagcatctaaaacgagagatgtcgagacttaaagtatcggcggagatgaagcagcgttcgcattcagcatcgccgcaacgtcctgtgaggagaaacagtaacgacggaactccgatgtggagaaaaaccggtgcggcttcgtttcgtcacgcttctccgttgcgtaaggagagccatgcgaaagttgccggcggcggaggcgaggggcaatcggcaggcaagttcaccgataaacagtatttgaatattttgcagtctatggctcaagctgttcatgtcttcgatctaaatggccaaattatcttttggaactcaatggcggagaagctttatggattctcagcttcagaagcactggggaaggatccgattgatattcttgtagatgttcaggatgcttcggttgcacagaatatcactcggcgttgcagtagtggagagagttggactggtgagtttcctgtaaagaacaaagctggagagaggttttcagttgtgactacgatgtctccttcttatgatgatgatggttgtcttattgggatcatatgtatcacaaatgattcggcactctttcaagacccgagaggctctccggctaagacaaggagggggcaagaaggtgaaacgagctttagtcgggtgactagtagtgttgcatctaagcttggtcttgactcgaaagaggcggttgtatcaaaacttggccttgattctcagcagcctatacaagttgctatagcttcaaagatatcagatttggttagtctaattaggttgcatattctgatcttttcgtaaactgtcgtatgactagtgtagtcaacatttcaggcatctaaggtgggcaacaaggtcaagtcgaaaatgcgagcaggtgataataacgctgcaaaccttgagggtggaagtggggacagtcatcaatctgatcagggtttctttgatgctgctttcgctgaccggagggaggatgcagcaacaagtggtgctgatacacctaggggggattttatccaatctccttttggtgtattcttacgtagcgatgagaaagcttctacaaagcccttcagagattccagtgatgaaagtgatggaaactctgttgtacctaaaacactgacctcaaaagctgaagagtggatggtaaagaaaggattatcatggccatggaaagggaatgaaagggaaggtttggaaggaaggcgtagtcattctgtgtggccttgggtgcggaatgaacaacaaaaacaacaggcttatcaaagcaattctaatcacagtgttaagtctgaaagccaggcatgtgaaagtattaaggcttccagtaacgagcctatggggtattggtcttcctctgttaatgtgaacagcacaagcagtagtagcagctgtggaagtaccagcagcagtgttatgaacaaggtcgatatggatagtgactgcttggattatgaaatcttatgggaagatttgacaattggagaacaaatcgggcaaggttcatgtggaactgtctatcacggtctatggtttggatccgatgtggctgtaaaggtgttttccaaacaagaatattcagaagagatcataacatcttttagacaagaggtatcgttgatgaaaagacttagacatcctaacgttttactgtttatgggagccgtgacatcacctcagcgtctctgtatagtgacagagttccttccacgtggaagtctcttccgtttgctgcagaggaacacgtcaaaactggattggaggcgacgtatccatatggcctcggatattgctcgtggcatgaattatcttcaccattgtactccaccgatcattcaccgagatttgaagtcatcaaatctactggttgataaaaactggaccgtgaaggttgctgactttggtctttcgcgtatcaagcatgagacgtacctcactacaaagacaggaaggggaacgcctcaatggatggcaccggaagttctccgaaatgaggctgctgatgaaaagtctgacgtttacagctttggagtaatactatgggagctggtgactgagaagatcccgtgggaaagtctaaatgctatgcaggtgattggagctgtagggttcatgaaccagagactggaagtcccgaaaaatgttgatcctcagtggatttctttaatggaaagctgctggcatagtgaaccgcaggacagaccatcgttccaagaaattatggagaaactaagagagcttcaaagaaagtacactatacagtttcaggcggctcgtgctgcatcaatagaaaactctgccctcaaggaaaaataaaccattaaatggaccgagcggagtctgattatgcgttgagaaagctgagctacataagcaaagcagaaaggtgtttcatgtttgcgttgaagcgcaatgacgagaagcaccaaaaagaagggttttggtatatgcaaacatattctctcgagccattcttttgtatggaattgattctgaaaacgtcatcgattgcgaggcgagctaaagaggttatttatgtaaaaccattatgcctgtgacagacccaattttttaagaatagtctgtacaggtgaaagtatgagatagaatcaagatttggaacactgattctgagtaaatattgccatttttattggaacatgccttg

SEQ ID NO: 96305 - protein, 483 aa, Arabidopsis thaliana
  peptide (1)..(483): Ceres Seq. ID no. 12732813
MRAGDNNAANLEGGSGDSHQSDQGFFDAAFADRREDAATSGADTPRGDFIQSPFGVFLRSDEKASTKPFRDSSDESDGNSVVPKTLTSKAEEWMVKKGLSWPWKGNEREGLEGRRSHSVWPWVRNEQQKQQAYQSNSNHSVKSESQACESIKASSNEPMGYWSSSVNVNSTSSSSSCGSTSSSVMNKVDMDSDCLDYEILWEDLTIGEQIGQGSCGTVYHGLWFGSDVAVKVFSKQEYSEEIITSFRQEVSLMKRLRHPNVLLFMGAVTSPQRLCIVTEFLPRGSLFRLLQRNTSKLDWRRRIHMASDIARGMNYLHHCTPPIIHRDLKSSNLLVDKNWTVKVADFGLSRIKHETYLTTKTGRGTPQWMAPEVLRNEAADEKSDVYSFGVILWELVTEKIPWESLNAMQVIGAVGFMNQRLEVPKNVDPQWISLMESCWHSEPQDRPSFQEIMEKLRELQRKYTIQFQAARAASIENSALKEK

SEQ ID NO: 96306 - protein, 390 aa, Arabidopsis thaliana
  peptide (1)..(390): Ceres Seq. ID no. 12732814
MVKKGLSWPWKGNEREGLEGRRSHSVWPWVRNEQQKQQAYQSNSNHSVKSESQACESIKASSNEPMGYWSSSVNVNSTSSSSSCGSTSSSVMNKVDMDSDCLDYEILWEDLTIGEQIGQGSCGTVYHGLWFGSDVAVKVFSKQEYSEEIITSFRQEVSLMKRLRHPNVLLFMGAVTSPQRLCIVTEFLPRGSLFRLLQRNTSKLDWRRRIHMASDIARGMNYLHHCTPPIIHRDLKSSNLLVDKNWTVKVADFGLSRIKHETYLTTKTGRGTPQWMAPEVLRNEAADEKSDVYSFGVILWELVTEKIPWESLNAMQVIGAVGFMNQRLEVPKNVDPQWISLMESCWHSEPQDRPSFQEIMEKLRELQRKYTIQFQAARAASIENSALKEK

SEQ ID NO: 96307 - protein, 325 aa, Arabidopsis thaliana
  peptide (1)..(325): Ceres Seq. ID no. 12732815
MGYWSSSVNVNSTSSSSSCGSTSSSVMNKVDMDSDCLDYEILWEDLTIGEQIGQGSCGTVYHGLWFGSDVAVKVFSKQEYSEEIITSFRQEVSLMKRLRHPNVLLFMGAVTSPQRLCIVTEFLPRGSLFRLLQRNTSKLDWRRRIHMASDIARGMNYLHHCTPPIIHRDLKSSNLLVDKNWTVKVADFGLSRIKHETYLTTKTGRGTPQWMAPEVLRNEAADEKSDVYSFGVILWELVTEKIPWESLNAMQVIGAVGFMNQRLEVPKNVDPQWISLMESCWHSEPQDRPSFQEIMEKLRELQRKYTIQFQAARAASIENSALKEK

SEQ ID NO: 96308 - DNA, 1494 bp, Arabidopsis thaliana
  misc_feature (1)..(1494): Ceres Seq. ID no. 12732824
  misc_feature (1)..(1494): Ortholog of  Ceres SEQ ID NO 15175849 as cited in SEQ ID NO 55644
atggtgttggcggagcttggaggtcggattatgagcgccatacagaagatgaacaatgtgacaataatcgatgaaaaggctctgaatgattgcttgaacgagatcactcgtgctctgctccagtccgatgtttctttcccccttgtgaaggagatgcagaccaatattaagaaaatcgtcaaccttgaggatctagcagccggccataacaagcgtcgtatcattgagcaggcgatcttcagtgaactctgtaagatgttggatccaggaaagtctgcatttgctcccaaaaaggccaaacctagtgtagttatgttcgtcggattacaaggtgaggtgctggaaaaaccacaacttgtaccaagtatgcttattatcatcagaagaaaagggtacaaaccagctctagtgtgtgcggatactttcagggcaggtgcttttgatcagctgaaacagaatgccaccaaatctaagatcccctattatggaagttacacaggatccgatcctgtgaaaattgctgttgagggagttgataggttcaagaaagaaaattgtgatcttattattgttgacaccagtggtcgccataaacaacaagcttctctctttgaagaaatgcgtcaaatttctgaagcaacgaaaccagatcttgttatatttgttatggatagcagtattggtcaaactgcgtttgaacaagctcgagcatttaaacaaactgttgctgtgggagctgtaattattactaagatggatggtcatgccaagggtggtgggactcttagcgctgttgcagctacaaaaagtcctgtcatattcattggaacaggagagcatatggatgagtttgaagtttttgatgctaaaccgtttgtcagccgtctcttaggaaatggtgatatgtctggattcgtgaataaactacaagaggtggtacctaaagatcaacagcctgaacttctggaaatgctctctcatggtaaatttacattgagaattatgtacgaccagttccagaacatgctgaacatgggcccacttaaggaggttttctccatgctacctggaatgcgtgctgaaatgatgccagagggacatgagaaagaaagccaggcgaagataaagcgatacatgacaatgatggactctatgactaatgaagaactggacagctcaaatccaaaggtgtttaacgagtcaaggataatgcggatagcaagagggtcagggaggattgtaagagaagtgatggagatgttggaagagtacaaaaggttaacaactatgtgggggaaggtgaaagggcttaagaacctagagaaaggaaatatgagcgcactctcaaaaaacaagaactcgcagcaattgagtaaggtcctaccggctcagatgctaaagcagattggcggcatgagtggtctgcagagtctcatgaagcagatgggttcaggtaaagacctgatgggaatgttcggtggccgagacgagtag

SEQ ID NO: 96309 - protein, 497 aa, Arabidopsis thaliana
  peptide (1)..(497): Ceres Seq. ID no. 12732825
MVLAELGGRIMSAIQKMNNVTIIDEKALNDCLNEITRALLQSDVSFPLVKEMQTNIKKIVNLEDLAAGHNKRRIIEQAIFSELCKMLDPGKSAFAPKKAKPSVVMFVGLQGEVLEKPQLVPSMLIIIRRKGYKPALVCADTFRAGAFDQLKQNATKSKIPYYGSYTGSDPVKIAVEGVDRFKKENCDLIIVDTSGRHKQQASLFEEMRQISEATKPDLVIFVMDSSIGQTAFEQARAFKQTVAVGAVIITKMDGHAKGGGTLSAVAATKSPVIFIGTGEHMDEFEVFDAKPFVSRLLGNGDMSGFVNKLQEVVPKDQQPELLEMLSHGKFTLRIMYDQFQNMLNMGPLKEVFSMLPGMRAEMMPEGHEKESQAKIKRYMTMMDSMTNEELDSSNPKVFNESRIMRIARGSGRIVREVMEMLEEYKRLTTMWGKVKGLKNLEKGNMSALSKNKNSQQLSKVLPAQMLKQIGGMSGLQSLMKQMGSGKDLMGMFGGRDE

SEQ ID NO: 96310 - protein, 487 aa, Arabidopsis thaliana
  peptide (1)..(487): Ceres Seq. ID no. 12732826
MSAIQKMNNVTIIDEKALNDCLNEITRALLQSDVSFPLVKEMQTNIKKIVNLEDLAAGHNKRRIIEQAIFSELCKMLDPGKSAFAPKKAKPSVVMFVGLQGEVLEKPQLVPSMLIIIRRKGYKPALVCADTFRAGAFDQLKQNATKSKIPYYGSYTGSDPVKIAVEGVDRFKKENCDLIIVDTSGRHKQQASLFEEMRQISEATKPDLVIFVMDSSIGQTAFEQARAFKQTVAVGAVIITKMDGHAKGGGTLSAVAATKSPVIFIGTGEHMDEFEVFDAKPFVSRLLGNGDMSGFVNKLQEVVPKDQQPELLEMLSHGKFTLRIMYDQFQNMLNMGPLKEVFSMLPGMRAEMMPEGHEKESQAKIKRYMTMMDSMTNEELDSSNPKVFNESRIMRIARGSGRIVREVMEMLEEYKRLTTMWGKVKGLKNLEKGNMSALSKNKNSQQLSKVLPAQMLKQIGGMSGLQSLMKQMGSGKDLMGMFGGRDE

SEQ ID NO: 96311 - protein, 481 aa, Arabidopsis thaliana
  peptide (1)..(481): Ceres Seq. ID no. 12732827
MNNVTIIDEKALNDCLNEITRALLQSDVSFPLVKEMQTNIKKIVNLEDLAAGHNKRRIIEQAIFSELCKMLDPGKSAFAPKKAKPSVVMFVGLQGEVLEKPQLVPSMLIIIRRKGYKPALVCADTFRAGAFDQLKQNATKSKIPYYGSYTGSDPVKIAVEGVDRFKKENCDLIIVDTSGRHKQQASLFEEMRQISEATKPDLVIFVMDSSIGQTAFEQARAFKQTVAVGAVIITKMDGHAKGGGTLSAVAATKSPVIFIGTGEHMDEFEVFDAKPFVSRLLGNGDMSGFVNKLQEVVPKDQQPELLEMLSHGKFTLRIMYDQFQNMLNMGPLKEVFSMLPGMRAEMMPEGHEKESQAKIKRYMTMMDSMTNEELDSSNPKVFNESRIMRIARGSGRIVREVMEMLEEYKRLTTMWGKVKGLKNLEKGNMSALSKNKNSQQLSKVLPAQMLKQIGGMSGLQSLMKQMGSGKDLMGMFGGRDE

SEQ ID NO: 96312 - DNA, 1791 bp, Arabidopsis thaliana
  misc_feature (1)..(1791): Ceres Seq. ID no. 12732828
  misc_feature (1)..(1791): Ortholog of  Ceres SEQ ID NO 15225707 as cited in SEQ ID NO 54212
  misc_feature (1)..(1791): Ortholog of  Ceres SEQ ID NO 14308608 as cited in SEQ ID NO 58855
  misc_feature (1)..(1791): Ortholog of  Ceres SEQ ID NO 14303684 as cited in SEQ ID NO 66254
aatcacccagaaagctaaagaaaagttttccttttttcccctcacgaaatctcagagaagatgatatatatctataaaagtatcatctcatagattccatcttttctctattacatggagaagaaaaaagaagaggatcatcatcatcaacaacaacaacaacaacaaaaggagatcaagaacacagagacaaagatcgagcaagaacaagaacaagaacaaaaacaagaaatctctcaagcatcatcatcatcaaacatggcgaatctagttacgtcatcagatcatcatccgttggagctagctggaaatctctcaagcatcttcgatacttcatctttaccttttccttattcttatttcgaagatcactcttctaataatcctaattctttcctagacttgctccgacaagatcatcagtttgcttcttcctctaattcctcttctttttcattcgatgcctttcctctccccaataacaacaacaacacctctttttttacggatttgcccttacctcaagctgagtcatcagaagtcgtgaacacaacaccgacttctccaaactcaacctcagtctcatcttcctccaacgaagctgcaaatgataacaacagtggtaaagaagttactgttaaagatcaagaagaaggagatcaacaacaagagcaaaagggtactaagccacagttgaaggcaaagaagaagaatcaaaagaaagctagagaagctaggtttgcgtttctgacgaagagcgatattgataatcttgacgacggttataggtggagaaaatacggccaaaaagctgtcaaaaacagtccttatcccagaagctattaccgttgcaccacagtgggttgcggagtgaagaagagagtggagagatcctccgatgatccttcgatcgtcatgacaacctacgaaggtcagcatacccatcctttccccatgacgccacgtggacacatcggaatgctcacgtcaccaatcctagaccacggtgcaaccaccgcgtcatcatcatcattctccatccctcagccacgttacttgctgactcaacatcaccagccctacaacatgtacaacaacaactctctaagtatgatcaatagaagatcatccgatggcactttcgtaaatccaggtccatcatcatcattccccggctttggttatgatatgtctcaagcttctacttcaacttcttcttccattagagatcatggattgcttcaagatattcttccttcgcagatcagatccgatactattaacactcaaaccaatgaagagaataagaaatgaagaagttttttttcccggggcaattgtttttttctttaggccggatccggtaggtaggtttcatgaggagtttttggtcggtttaggtaaaccgatgttgatggctttctaatgtttttttcttcattacatttagcatcggttttgtttcatcaccacgaaataagcaatcgacgctaagttggaacagaggtttatgtagcatatgtgatataggtataacttcattttttgtttgagtattaataaagatgtatcgttaactttttatgacttcggagagagaagagtttaatctagttatatagtatgtatttagttgtattatagtgtttctagaccatctaatttgtaatcatgctatcactagcccggctcagaatcttacatttattttattttcatatatccatcctaatcgatgtagatttacataacatacagtatacacaaagatacttcgaggtttgttgctat

SEQ ID NO: 96313 - protein, 399 aa, Arabidopsis thaliana
  peptide (1)..(399): Ceres Seq. ID no. 12732829
MEKKKEEDHHHQQQQQQQKEIKNTETKIEQEQEQEQKQEISQASSSSNMANLVTSSDHHPLELAGNLSSIFDTSSLPFPYSYFEDHSSNNPNSFLDLLRQDHQFASSSNSSSFSFDAFPLPNNNNNTSFFTDLPLPQAESSEVVNTTPTSPNSTSVSSSSNEAANDNNSGKEVTVKDQEEGDQQQEQKGTKPQLKAKKKNQKKAREARFAFLTKSDIDNLDDGYRWRKYGQKAVKNSPYPRSYYRCTTVGCGVKKRVERSSDDPSIVMTTYEGQHTHPFPMTPRGHIGMLTSPILDHGATTASSSSFSIPQPRYLLTQHHQPYNMYNNNSLSMINRRSSDGTFVNPGPSSSFPGFGYDMSQASTSTSSSIRDHGLLQDILPSQIRSDTINTQTNEENKK

SEQ ID NO: 96314 - protein, 351 aa, Arabidopsis thaliana
  peptide (1)..(351): Ceres Seq. ID no. 12732830
MANLVTSSDHHPLELAGNLSSIFDTSSLPFPYSYFEDHSSNNPNSFLDLLRQDHQFASSSNSSSFSFDAFPLPNNNNNTSFFTDLPLPQAESSEVVNTTPTSPNSTSVSSSSNEAANDNNSGKEVTVKDQEEGDQQQEQKGTKPQLKAKKKNQKKAREARFAFLTKSDIDNLDDGYRWRKYGQKAVKNSPYPRSYYRCTTVGCGVKKRVERSSDDPSIVMTTYEGQHTHPFPMTPRGHIGMLTSPILDHGATTASSSSFSIPQPRYLLTQHHQPYNMYNNNSLSMINRRSSDGTFVNPGPSSSFPGFGYDMSQASTSTSSSIRDHGLLQDILPSQIRSDTINTQTNEENKK

SEQ ID NO: 96315 - DNA, 825 bp, Arabidopsis thaliana
  misc_feature (1)..(825): Ceres Seq. ID no. 12732835
  misc_feature (1)..(825): Ortholog of  Ceres SEQ ID NO 12472626 as cited in SEQ ID NO 118
  misc_feature (1)..(825): Ortholog of  Ceres SEQ ID NO 13594646 as cited in SEQ ID NO 52196
atgattactcttcctctgcgagacgacgatgaggaaaacgacacatacgaagctaaaatgctcctcataggcgagaatggtctcgacggtgagagtttacctcctactcctctgcgtgacggtgcactggagctccagaagtataacatcagctccatcgagtcaacagtcgtgattcgtgagctgacgtcacaaggtctctcctttcagctctggccagcggcttctactttcgtcacgttgcttgataactaccgacgtgaccctagcaagagtccactcaccgccacactcttgtcgctgaaaaaaccatcgccgttgaacatactcgagctcggatctggaaccggcctcgtcgggatcgctgcggcaatcactctctctgctaacgtcacggtgacggatctcccacacgtcttagataatctcaacttcaacgccgaagcaaacgctgaaattgttgagagattcggcgggaaagtcaacgtggcaccactacgatggggagaagctgatgacgtggaggttctaggtcagaacgttgacttgattctggcttcggacgtggtgtatcatgaccatctctacgagcctctcctcaaaacgctgcgtttgatgcagctagaggggaagaggttaattttcctgatggcgcatctaaggagatggaagaaagaatctgtcttcttcaaaaaagctcgaaagctcttcgatgttgacgttatccactctgatgttcctcaagaaagttctagaatcggtgttgtggtttaccgtttcaccacgaaacagccaaatcagaatggtcggattgtttcgtgttag

SEQ ID NO: 96316 - protein, 274 aa, Arabidopsis thaliana
  peptide (1)..(274): Ceres Seq. ID no. 12732836
MITLPLRDDDEENDTYEAKMLLIGENGLDGESLPPTPLRDGALELQKYNISSIESTVVIRELTSQGLSFQLWPAASTFVTLLDNYRRDPSKSPLTATLLSLKKPSPLNILELGSGTGLVGIAAAITLSANVTVTDLPHVLDNLNFNAEANAEIVERFGGKVNVAPLRWGEADDVEVLGQNVDLILASDVVYHDHLYEPLLKTLRLMQLEGKRLIFLMAHLRRWKKESVFFKKARKLFDVDVIHSDVPQESSRIGVVVYRFTTKQPNQNGRIVSC

SEQ ID NO: 96317 - protein, 255 aa, Arabidopsis thaliana
  peptide (1)..(255): Ceres Seq. ID no. 12732837
MLLIGENGLDGESLPPTPLRDGALELQKYNISSIESTVVIRELTSQGLSFQLWPAASTFVTLLDNYRRDPSKSPLTATLLSLKKPSPLNILELGSGTGLVGIAAAITLSANVTVTDLPHVLDNLNFNAEANAEIVERFGGKVNVAPLRWGEADDVEVLGQNVDLILASDVVYHDHLYEPLLKTLRLMQLEGKRLIFLMAHLRRWKKESVFFKKARKLFDVDVIHSDVPQESSRIGVVVYRFTTKQPNQNGRIVSC

SEQ ID NO: 96318 - DNA, 2088 bp, Arabidopsis thaliana
  misc_feature (1)..(2088): Ceres Seq. ID no. 12732842
  misc_feature (1)..(2088): Ortholog of  Ceres SEQ ID NO 15226728 as cited in SEQ ID NO 1302
atggcacgaaaaggaagtcatcagaagaatggaatggataaccaaacgaagcaaaaaaagaagactgcttctgattctttgctgtctaataagggacaagggaaaaataatgaggctgagagtgttctgaaagagaattgtcaagatgataagcagactaaaagtagtccagtttgtgaaactttagaaagagatatggatgaggcaaaaggcgctgcttctctcaaggatatagatcagtctgttgcttcggagagcgatttagctggaggtagtagacctcgtaatgaacctggttttacaacagaagaaactagatatattccgtttggtcgtgaacacattgacagtgttatgagaagcttgctggatatattgagcacgaatagcccgtcagagaatattgagttagcatataatgcagtactgaggaaactgaggatatccactgctactgtatcaagggaaatgactaagtgtatggaaagacacaggcctttgatagattctgtcaaattacgagtatataaaggtcgtgatcttgttctaacgaaaatgcggcaagtattcccggttgtcttcaggtggcttatgcactttggcagcataattcttcttctatctctggtttggttggactgtgcaatccggggttttgattcattcattcggatgggaacagcatcttttttctctatcatgtggtgtggtctcttttcagcgttttcgatgttcggcatgaccaaatttatactgatttcggttgcaactgttttggtggcattgttcattggcttcgtagttgggtctgttacgcttgccatttctggtttggttttgctatggctctatggtagcttttggacaacactgctcttcctcttctttggaggtctggcattcatgatgaagcacgagcgcgttgcactgtttataatcacagtgtattcagtctatagtgcattgagttatgttggatggctaggtcttctattggcttttaatcttgctttcatctcaaccgatgctctcatatatttcttcaagaataaaataaatcagcagagcactgctgatagacccactgagcccgtaaatgattcatcttttgaaaatggccctggctttccgggagaccgtggcccaggagtcgcgtcaactagcggaacagactctgagttaacatctgaagatgaaattgctcggttactgaattgtcctgaccactattcagctttgggcttagctcgatatgggaatgttgatatggcttatctcaaacgagaatataggaaaaaggcgatgctagtccatcctgataagaatatggggaatgagagagcagctgaagcttttaagaaacttcagaatgcatatgaggtattacttgattctgtaaagcaaaaatcatatgatgatgaattgaagagggaagaactactgaactactttcggaggtttcagaactcttctcaaaaggacactcggggacacggtttctctgggtcgggttttggaagctcagaaggtgaaggagaggaagcatttagagagtgtagacagatagcgtgtaaaaaatgtggcaatctccatgcctggtttcttacaaagaaatcaaaatctacagctagatggtgccaggattgcaaggaattccatcaagcaaaagatggagatggttgggttgaacaagcttcccagcacgtcttgttcgggctatttcaaaaggttgatatgccgcgtgcttatgtttgtgcagacagcaaaatatatgaagcttctcagtggtatatctgtcagggaatgagatgtcctgcaaacacccacaagccgagcttccatgtgaacatgaacgcgacagctgccaaacgaggaacaagtggttcttcagggcaaaaaggaaaccagagaatgccaaacacaaacccggacgaaacaatgacagaggaagagttctatgagtggttgcagaacgcggttcaatctggtatgtttgataatgcaagagagaacccgtcttcagcaaccgccagtagcactagtagtagtagcagcaagaaaaagaaaaagggaaagaagcaatggtga

SEQ ID NO: 96319 - protein, 695 aa, Arabidopsis thaliana
  peptide (1)..(695): Ceres Seq. ID no. 12732843
MARKGSHQKNGMDNQTKQKKKTASDSLLSNKGQGKNNEAESVLKENCQDDKQTKSSPVCETLERDMDEAKGAASLKDIDQSVASESDLAGGSRPRNEPGFTTEETRYIPFGREHIDSVMRSLLDILSTNSPSENIELAYNAVLRKLRISTATVSREMTKCMERHRPLIDSVKLRVYKGRDLVLTKMRQVFPVVFRWLMHFGSIILLLSLVWLDCAIRGFDSFIRMGTASFFSIMWCGLFSAFSMFGMTKFILISVATVLVALFIGFVVGSVTLAISGLVLLWLYGSFWTTLLFLFFGGLAFMMKHERVALFIITVYSVYSALSYVGWLGLLLAFNLAFISTDALIYFFKNKINQQSTADRPTEPVNDSSFENGPGFPGDRGPGVASTSGTDSELTSEDEIARLLNCPDHYSALGLARYGNVDMAYLKREYRKKAMLVHPDKNMGNERAAEAFKKLQNAYEVLLDSVKQKSYDDELKREELLNYFRRFQNSSQKDTRGHGFSGSGFGSSEGEGEEAFRECRQIACKKCGNLHAWFLTKKSKSTARWCQDCKEFHQAKDGDGWVEQASQHVLFGLFQKVDMPRAYVCADSKIYEASQWYICQGMRCPANTHKPSFHVNMNATAAKRGTSGSSGQKGNQRMPNTNPDETMTEEEFYEWLQNAVQSGMFDNARENPSSATASSTSSSSSKKKKKGKKQW

SEQ ID NO: 96320 - protein, 684 aa, Arabidopsis thaliana
  peptide (1)..(684): Ceres Seq. ID no. 12732844
MDNQTKQKKKTASDSLLSNKGQGKNNEAESVLKENCQDDKQTKSSPVCETLERDMDEAKGAASLKDIDQSVASESDLAGGSRPRNEPGFTTEETRYIPFGREHIDSVMRSLLDILSTNSPSENIELAYNAVLRKLRISTATVSREMTKCMERHRPLIDSVKLRVYKGRDLVLTKMRQVFPVVFRWLMHFGSIILLLSLVWLDCAIRGFDSFIRMGTASFFSIMWCGLFSAFSMFGMTKFILISVATVLVALFIGFVVGSVTLAISGLVLLWLYGSFWTTLLFLFFGGLAFMMKHERVALFIITVYSVYSALSYVGWLGLLLAFNLAFISTDALIYFFKNKINQQSTADRPTEPVNDSSFENGPGFPGDRGPGVASTSGTDSELTSEDEIARLLNCPDHYSALGLARYGNVDMAYLKREYRKKAMLVHPDKNMGNERAAEAFKKLQNAYEVLLDSVKQKSYDDELKREELLNYFRRFQNSSQKDTRGHGFSGSGFGSSEGEGEEAFRECRQIACKKCGNLHAWFLTKKSKSTARWCQDCKEFHQAKDGDGWVEQASQHVLFGLFQKVDMPRAYVCADSKIYEASQWYICQGMRCPANTHKPSFHVNMNATAAKRGTSGSSGQKGNQRMPNTNPDETMTEEEFYEWLQNAVQSGMFDNARENPSSATASSTSSSSSKKKKKGKKQW

SEQ ID NO: 96321 - protein, 630 aa, Arabidopsis thaliana
  peptide (1)..(630): Ceres Seq. ID no. 12732845
MDEAKGAASLKDIDQSVASESDLAGGSRPRNEPGFTTEETRYIPFGREHIDSVMRSLLDILSTNSPSENIELAYNAVLRKLRISTATVSREMTKCMERHRPLIDSVKLRVYKGRDLVLTKMRQVFPVVFRWLMHFGSIILLLSLVWLDCAIRGFDSFIRMGTASFFSIMWCGLFSAFSMFGMTKFILISVATVLVALFIGFVVGSVTLAISGLVLLWLYGSFWTTLLFLFFGGLAFMMKHERVALFIITVYSVYSALSYVGWLGLLLAFNLAFISTDALIYFFKNKINQQSTADRPTEPVNDSSFENGPGFPGDRGPGVASTSGTDSELTSEDEIARLLNCPDHYSALGLARYGNVDMAYLKREYRKKAMLVHPDKNMGNERAAEAFKKLQNAYEVLLDSVKQKSYDDELKREELLNYFRRFQNSSQKDTRGHGFSGSGFGSSEGEGEEAFRECRQIACKKCGNLHAWFLTKKSKSTARWCQDCKEFHQAKDGDGWVEQASQHVLFGLFQKVDMPRAYVCADSKIYEASQWYICQGMRCPANTHKPSFHVNMNATAAKRGTSGSSGQKGNQRMPNTNPDETMTEEEFYEWLQNAVQSGMFDNARENPSSATASSTSSSSSKKKKKGKKQW

SEQ ID NO: 96322 - DNA, 1021 bp, Arabidopsis thaliana
  misc_feature (1)..(1021): Ceres Seq. ID no. 12732849
  misc_feature (1)..(1021): Ortholog of  Ceres SEQ ID NO 14313599 as cited in SEQ ID NO 54989
  misc_feature (1)..(1021): Ortholog of  Ceres SEQ ID NO 15176204 as cited in SEQ ID NO 55608
  misc_feature (1)..(1021): Ortholog of  Ceres SEQ ID NO 15225111 as cited in SEQ ID NO 58444
  misc_feature (1)..(1021): Ortholog of  Ceres SEQ ID NO 14313064 as cited in SEQ ID NO 59543
  misc_feature (1)..(1021): Ortholog of  Ceres SEQ ID NO 13661001 as cited in SEQ ID NO 67531
  misc_feature (1)..(1021): Ortholog of  Ceres SEQ ID NO 15178920 as cited in SEQ ID NO 0
atgggtgacaaaggaaggagcttaaagatcaacaagaacatggaggaattcacgaaagtggaagaagaaatggacgtaaggagaggtccatggacagttgaggaagatttagagctcatcaattacattgctagtcatggtgaaggtcgatggaactctctcgctcgttgcgccgaactcaaaaggaccggaaaaagctgcagacttcggtggctgaactatctccgaccagatgtgcgccgtggaaacataaccctcgaagaacaactcttgattcttgaacttcacacacgttggggcaatagatggtctaagattgcacaatatttaccaggaagaacggataacgagatcaaaaactattggagaacacgtgttcaaaagcatgcaaaacagcttaaatgcgacgtgaacagtcaacaatttaaagacaccatgaagtatctttggatgcctcggctcgtagaaaggatccaagccgcgtccatcgggtctgtttccatgtcatcttgcgtcaccacctcctcagatcagttcgtgatcaacaacaacaacaccaacaacgtggataatttggctttaatgagtaaccctaatggttacatcacgccggataattccagcgtggcagtatctcctgtatcagatttgacggagtgtcaagtgagtagtgaagtgtggaagattggtcaggatgagaatttggtggatccaaaaatgacatcgccgaattatatggataatagcagtggactattaaacggagattttacgaagatgcaagatcaaagtgaccttaattggtttgaaaatattaatgggatggtaccaaattattcggacagtttttggaacattggaaatgatgaagacttctggctcttacaacaacatcaacaagtccacgacaatggaagcttctgaatagacaagaagctattttacaaagtaaagggaaaatacaaagcttctgaatttaaaagtgtgaaaggaatttgttataaacaaagctttttatttg

SEQ ID NO: 96323 - protein, 307 aa, Arabidopsis thaliana
  peptide (1)..(307): Ceres Seq. ID no. 12732850
MGDKGRSLKINKNMEEFTKVEEEMDVRRGPWTVEEDLELINYIASHGEGRWNSLARCAELKRTGKSCRLRWLNYLRPDVRRGNITLEEQLLILELHTRWGNRWSKIAQYLPGRTDNEIKNYWRTRVQKHAKQLKCDVNSQQFKDTMKYLWMPRLVERIQAASIGSVSMSSCVTTSSDQFVINNNNTNNVDNLALMSNPNGYITPDNSSVAVSPVSDLTECQVSSEVWKIGQDENLVDPKMTSPNYMDNSSGLLNGDFTKMQDQSDLNWFENINGMVPNYSDSFWNIGNDEDFWLLQQHQQVHDNGSF

SEQ ID NO: 96324 - protein, 294 aa, Arabidopsis thaliana
  peptide (1)..(294): Ceres Seq. ID no. 12732851
MEEFTKVEEEMDVRRGPWTVEEDLELINYIASHGEGRWNSLARCAELKRTGKSCRLRWLNYLRPDVRRGNITLEEQLLILELHTRWGNRWSKIAQYLPGRTDNEIKNYWRTRVQKHAKQLKCDVNSQQFKDTMKYLWMPRLVERIQAASIGSVSMSSCVTTSSDQFVINNNNTNNVDNLALMSNPNGYITPDNSSVAVSPVSDLTECQVSSEVWKIGQDENLVDPKMTSPNYMDNSSGLLNGDFTKMQDQSDLNWFENINGMVPNYSDSFWNIGNDEDFWLLQQHQQVHDNGSF

SEQ ID NO: 96325 - protein, 284 aa, Arabidopsis thaliana
  peptide (1)..(284): Ceres Seq. ID no. 12732852
MDVRRGPWTVEEDLELINYIASHGEGRWNSLARCAELKRTGKSCRLRWLNYLRPDVRRGNITLEEQLLILELHTRWGNRWSKIAQYLPGRTDNEIKNYWRTRVQKHAKQLKCDVNSQQFKDTMKYLWMPRLVERIQAASIGSVSMSSCVTTSSDQFVINNNNTNNVDNLALMSNPNGYITPDNSSVAVSPVSDLTECQVSSEVWKIGQDENLVDPKMTSPNYMDNSSGLLNGDFTKMQDQSDLNWFENINGMVPNYSDSFWNIGNDEDFWLLQQHQQVHDNGSF

SEQ ID NO: 96326 - DNA, 1660 bp, Arabidopsis thaliana
  misc_feature (1)..(1660): Ceres Seq. ID no. 12732853
  misc_feature (1)..(1660): Ortholog of  Ceres SEQ ID NO 14307257 as cited in SEQ ID NO 54628
tcttcttcttattttatcatagctaagctcaaaaacaatcgatagatggagaagaagaagagcatgttcgttgaacagagcttcccggagcatgaaattggcgatactaacaaaaactttgacgaggatggccgcgacaaaagaactgggacatggatgaccgggagtgcacacataataacggccgtgatagggtcgggagtgttgtctttggcgtgggcaatcgcacaacttggatgggtggcaggacccgccgtactaatggctttttctttcataacatattttacatcaaccatgcttgccgattgttaccgttcccctgaccctgttaccggcaaacgcaactacacctacatggaagttgtccgatcctatctaggaggaagaaaagtgcaattatgtggattggctcaatacgggaatctgattggaataacaatcggctacacaatcacagcttcaattagcatggtggcagtgaagaggtcgaattgtttccacaaaaatgggcataatgttaaatgtgccacttcaaacactcccttcatgatcatatttgcaatcatccaaattattcttagccaaatcccaaatttccataacctctcttggctctccattcttgcggccgtaatgtccttttgttatgcctccatcggtgttggtctctccatcgccaaagcggcgggtggcggtgagcacgtaagaacaacactgacaggagttacggtcgggattgatgtatcgggtgccgagaaaatatggagaacgttccaagcgattggggacattgcatttgcctacgcatactcaactgttctcattgaaatacaggacaccttgaaagcaggtcctccatcggagaacaaagccatgaaaagagcaagccttgtgggtgtctccacaacaaccttcttctacatgttatgcggttgtgttggttacgctgcctttggaaatgatgctcctggaaatttcctaactggttttggtttctatgagccattctggctaatcgactttgccaatgtctgcatcgccgtgcaccttatcggcgcctaccaagtcttttgtcaaccaatttttcagttcgtagagagccagagcgcgaaacgttggcctgataacaagtttattacaggagaatacaaaatccatgtcccttgctgtggtgattttagtatcaacttcctcagattggtatggaggacttcatatgttgtggtcaccgcggttgtagccatgatcttccctttcttcaacgatttcttgggtcttattggagcagcttccttctggcctttgactgtttactttcccattgagatgcatattgctcagaagaagataccgaaattctctttcacttggacttggttaaaaatcttgagttggacttgtttcattgtgtccctcgttgctgcagccggatcagtgcaaggactcatacaaagtctcaaggatttcaagcctttccaggctccttagtgaaaatatgtgttctcgccaacgtctccaagaacacaagttccatgcactctcttccctccaataaaagtttctatttctttgtagtttattggtgtgagacaatctcataccaaaatattgtacctctacttgcttgtcttaaacaaatctatcatcagtttatccc

SEQ ID NO: 96327 - protein, 481 aa, Arabidopsis thaliana
  peptide (1)..(481): Ceres Seq. ID no. 12732854
MEKKKSMFVEQSFPEHEIGDTNKNFDEDGRDKRTGTWMTGSAHIITAVIGSGVLSLAWAIAQLGWVAGPAVLMAFSFITYFTSTMLADCYRSPDPVTGKRNYTYMEVVRSYLGGRKVQLCGLAQYGNLIGITIGYTITASISMVAVKRSNCFHKNGHNVKCATSNTPFMIIFAIIQIILSQIPNFHNLSWLSILAAVMSFCYASIGVGLSIAKAAGGGEHVRTTLTGVTVGIDVSGAEKIWRTFQAIGDIAFAYAYSTVLIEIQDTLKAGPPSENKAMKRASLVGVSTTTFFYMLCGCVGYAAFGNDAPGNFLTGFGFYEPFWLIDFANVCIAVHLIGAYQVFCQPIFQFVESQSAKRWPDNKFITGEYKIHVPCCGDFSINFLRLVWRTSYVVVTAVVAMIFPFFNDFLGLIGAASFWPLTVYFPIEMHIAQKKIPKFSFTWTWLKILSWTCFIVSLVAAAGSVQGLIQSLKDFKPFQAP

SEQ ID NO: 96328 - protein, 475 aa, Arabidopsis thaliana
  peptide (1)..(475): Ceres Seq. ID no. 12732855
MFVEQSFPEHEIGDTNKNFDEDGRDKRTGTWMTGSAHIITAVIGSGVLSLAWAIAQLGWVAGPAVLMAFSFITYFTSTMLADCYRSPDPVTGKRNYTYMEVVRSYLGGRKVQLCGLAQYGNLIGITIGYTITASISMVAVKRSNCFHKNGHNVKCATSNTPFMIIFAIIQIILSQIPNFHNLSWLSILAAVMSFCYASIGVGLSIAKAAGGGEHVRTTLTGVTVGIDVSGAEKIWRTFQAIGDIAFAYAYSTVLIEIQDTLKAGPPSENKAMKRASLVGVSTTTFFYMLCGCVGYAAFGNDAPGNFLTGFGFYEPFWLIDFANVCIAVHLIGAYQVFCQPIFQFVESQSAKRWPDNKFITGEYKIHVPCCGDFSINFLRLVWRTSYVVVTAVVAMIFPFFNDFLGLIGAASFWPLTVYFPIEMHIAQKKIPKFSFTWTWLKILSWTCFIVSLVAAAGSVQGLIQSLKDFKPFQAP

SEQ ID NO: 96329 - protein, 444 aa, Arabidopsis thaliana
  peptide (1)..(444): Ceres Seq. ID no. 12732856
MTGSAHIITAVIGSGVLSLAWAIAQLGWVAGPAVLMAFSFITYFTSTMLADCYRSPDPVTGKRNYTYMEVVRSYLGGRKVQLCGLAQYGNLIGITIGYTITASISMVAVKRSNCFHKNGHNVKCATSNTPFMIIFAIIQIILSQIPNFHNLSWLSILAAVMSFCYASIGVGLSIAKAAGGGEHVRTTLTGVTVGIDVSGAEKIWRTFQAIGDIAFAYAYSTVLIEIQDTLKAGPPSENKAMKRASLVGVSTTTFFYMLCGCVGYAAFGNDAPGNFLTGFGFYEPFWLIDFANVCIAVHLIGAYQVFCQPIFQFVESQSAKRWPDNKFITGEYKIHVPCCGDFSINFLRLVWRTSYVVVTAVVAMIFPFFNDFLGLIGAASFWPLTVYFPIEMHIAQKKIPKFSFTWTWLKILSWTCFIVSLVAAAGSVQGLIQSLKDFKPFQAP

SEQ ID NO: 96330 - DNA, 831 bp, Arabidopsis thaliana
  misc_feature (1)..(831): Ceres Seq. ID no. 12732869
  misc_feature (1)..(831): Ortholog of  Ceres SEQ ID NO 13584646 as cited in SEQ ID NO 60715
atgaaaggtgaatacagagagcaaaagagtaacgaaatgttttccaagcttcctcatcatcaacaacaacagcaacaacaacaacaacaacactctcttacctctcacttccacctctcctccaccgtaacccccaccgtcgatgactcctccatcgaagtggtccgacgtccacgtggcagaccaccaggttccaaaaacaaacctaaaccacccgtcttcgtcacacgtgacaccgaccctcctatgagtccttacatcctcgaagttccttcaggaaacgacgtcgtcgaagccatcaaccgtttctgccgccgtaaatccatcggagtctgcgtccttagtggctctggctctgtagctaacgtcactttacgtcagccatcaccggcagctcttggctctaccataactttccatggaaagtttgatctcctctccgtctccgcaacgtttctccctcctccgcctcgtacttccttgtctcctcccgtttctaacttcttcaccgtctctctcgctggacctcaaggacaaatcatcggagggttcgtcgctggtccacttatttcggcaggaacagtttacgtcatcgccgcaagtttcaacaacccttcttatcaccggttaccggcggaagaagagcaaaaacactcggcggggacaggggaaagagagggacaatctccgccggtctctggtggcggtgaagagtcaggacagatggcgggaagtggaggagagtcgtgtggggtatcaatgtacagttgccacatgggtggctctgatgttatttgggcccctacagccagagctccaccgccatactaa

SEQ ID NO: 96331 - protein, 276 aa, Arabidopsis thaliana
  peptide (1)..(276): Ceres Seq. ID no. 12732870
MKGEYREQKSNEMFSKLPHHQQQQQQQQQQHSLTSHFHLSSTVTPTVDDSSIEVVRRPRGRPPGSKNKPKPPVFVTRDTDPPMSPYILEVPSGNDVVEAINRFCRRKSIGVCVLSGSGSVANVTLRQPSPAALGSTITFHGKFDLLSVSATFLPPPPRTSLSPPVSNFFTVSLAGPQGQIIGGFVAGPLISAGTVYVIAASFNNPSYHRLPAEEEQKHSAGTGEREGQSPPVSGGGEESGQMAGSGGESCGVSMYSCHMGGSDVIWAPTARAPPPY

SEQ ID NO: 96332 - protein, 264 aa, Arabidopsis thaliana
  peptide (1)..(264): Ceres Seq. ID no. 12732871
MFSKLPHHQQQQQQQQQQHSLTSHFHLSSTVTPTVDDSSIEVVRRPRGRPPGSKNKPKPPVFVTRDTDPPMSPYILEVPSGNDVVEAINRFCRRKSIGVCVLSGSGSVANVTLRQPSPAALGSTITFHGKFDLLSVSATFLPPPPRTSLSPPVSNFFTVSLAGPQGQIIGGFVAGPLISAGTVYVIAASFNNPSYHRLPAEEEQKHSAGTGEREGQSPPVSGGGEESGQMAGSGGESCGVSMYSCHMGGSDVIWAPTARAPPPY

SEQ ID NO: 96333 - protein, 194 aa, Arabidopsis thaliana
  peptide (1)..(194): Ceres Seq. ID no. 12732872
MSPYILEVPSGNDVVEAINRFCRRKSIGVCVLSGSGSVANVTLRQPSPAALGSTITFHGKFDLLSVSATFLPPPPRTSLSPPVSNFFTVSLAGPQGQIIGGFVAGPLISAGTVYVIAASFNNPSYHRLPAEEEQKHSAGTGEREGQSPPVSGGGEESGQMAGSGGESCGVSMYSCHMGGSDVIWAPTARAPPPY

SEQ ID NO: 96334 - DNA, 2841 bp, Arabidopsis thaliana
  misc_feature (1)..(2841): Ceres Seq. ID no. 12732873
  misc_feature (1)..(2841): Ortholog of  Ceres SEQ ID NO 15168378 as cited in SEQ ID NO 59129
atgaagatgagttcaagaattggattatttaagctcttgatcttgcttttcttccaaatttactctgtttatgcgttcacagatggttcagattttactgctttacaagccctgaagaacgaatgggacacgttatccaagagttggaaaagctctgatccttgtggaaccgaatgggttggaattacatgtaacaacgataaccgtgttgtttcaatatcattaaccaaccgtaacttgaaaggaaagcttcctaccgaaatttcgacattgtctgaattgcaaaccttggatttgactggcaatcctgaattgtctggaccgcttccagcaaatatcggtaacctcaggaagttgactttcttgagccttatgggatgtgcttttaatggtccaatccctgattccatagggaatcttgaacaacttacaagactctctctgaatttaaataaatttagtggaacaattccggcttccatgggacggttatcgaaactatattggttcgacatagctgacaatcagttagaaggaaagcttccagtttctgatggggcttctttacctggacttgacatgcttcttcaaactgggcattttcattttggtaataacaagctttcaggcgaaatcccagagaagctctttagctcagaaatgactttgctacatgtgctgtttgatggaaaccaattcaccggtagcatcccagagagcctcggcctagttcaaaatttgactgtgttacgtcttgataggaatagactaagtggagacattccttcaagtcttaataatctcacaaatcttcaagaactgcatttgtccgacaacaaatttacaggtagtcttccaaatttgaccagcttgaccagtctctacacattggatgtgagcaataacccgttggcgttatcaccggttccatcatggatccctttcttaaactctttgtcaacattaaggttggaagatatccaacttgatggtccagtaccaacctccctttttagccctcttcaattgcaaactgtttccctaaagcacaatcttataaacacaacattggaccttggtaccaactatagcaaacaattggattttgtggatttacgagacaacttcataactggttataaatcaccagctaataaccccgtcaatgtaatgttggcagataatcaagtgtgccaagacccggcgaatcagctgagtggctactgcaatgcagtccaaccaaattccacattttctaccctaacaaaatgtggtaatcattgtggtaaaggtaaggaaccgaatcaaggctgccactgtgtgtatccacttacaggagtattcaccttaaggtctccttcattctccggattttcaaacaacagtaacttcctaaagtttggggagagtttaatgactttctttaagaatggcaagtatcctgtagactctgtggccatgagaaacataagcgagaatccaactgattatcatcttttgataaatctcttgatctttccatcgggacgcgaccgctttaatcagacggaaatggactctattaattctgcatttaccattcaggattataagcctcctccaagatttggtccttatattttcgtcgccgatcagtacaaaacattctctgatttagaagattccaagacagtaagtatgaaagttataattggagtagtagttggtgttgtagttcttctgttgctgttggctttagctgggatttacgctcttagacagaagaagagagctcagagagcaactgatcaaatgaatccttttgccaagtgggatgcggggaagaatgaaatggatgctccacaactaatgggaacaaaagcctttactttcgaagagcttagcaaatgtactaacaacttttcagatgcaaatgatgttggcggtggaggttatggccaggtctacaaaggtacccttcccaatgggcaagtcatagcaatcaaaagagctcaacaaggatccatgcaaggagcgttcgagtttaagaccgagattgagcttctttcaagggtccatcataaaaatgttgttaagcttttgggcttctgttttgatcaaaaagaacaaatgctcgtatacgagtacatacctaatgggtcccttagagacggtctatcagggaagaatggggttaaactggattggacaagaaggctcaaaatagcacttggctcagggaagggtctagcttatcttcatgagcttgctgatcctccaattatacatagagacgtcaaatcaaataacatattacttgatgaacatctaaccgcaaaggttgctgatttcggtctctccaaacttgtgggggaccctgaaaaagctcatgtcacaacacaagtgaaaggaaccatgggctatcttgatcctgagtactacatgacgaatcaattgacggagaagagcgatgtgtatgggtttggtgtggtgatgcttgagttattaaccggtaaaagtccgatagatagaggcagctatgttgtgaaagaggtaaagaagaagatggataaatcgaggaacttgtatgacttacaagaattgttggacacgacaattatccaaaacagcgggaatttgaaagggttcgagaagtatgtagatgtggctctacaatgcgtggagccagagggagttaataggccaacaatgagtgaggtggtgcaagaacttgagagcatattgcggcttgttggattaaaccctaacgccgattcagcaacatacgaggaagcatctggtgatccttatggtagggattcgtttgagtacactggggttttcccaactccaaaaccctaa

SEQ ID NO: 96335 - protein, 946 aa, Arabidopsis thaliana
  peptide (1)..(946): Ceres Seq. ID no. 12732874
MKMSSRIGLFKLLILLFFQIYSVYAFTDGSDFTALQALKNEWDTLSKSWKSSDPCGTEWVGITCNNDNRVVSISLTNRNLKGKLPTEISTLSELQTLDLTGNPELSGPLPANIGNLRKLTFLSLMGCAFNGPIPDSIGNLEQLTRLSLNLNKFSGTIPASMGRLSKLYWFDIADNQLEGKLPVSDGASLPGLDMLLQTGHFHFGNNKLSGEIPEKLFSSEMTLLHVLFDGNQFTGSIPESLGLVQNLTVLRLDRNRLSGDIPSSLNNLTNLQELHLSDNKFTGSLPNLTSLTSLYTLDVSNNPLALSPVPSWIPFLNSLSTLRLEDIQLDGPVPTSLFSPLQLQTVSLKHNLINTTLDLGTNYSKQLDFVDLRDNFITGYKSPANNPVNVMLADNQVCQDPANQLSGYCNAVQPNSTFSTLTKCGNHCGKGKEPNQGCHCVYPLTGVFTLRSPSFSGFSNNSNFLKFGESLMTFFKNGKYPVDSVAMRNISENPTDYHLLINLLIFPSGRDRFNQTEMDSINSAFTIQDYKPPPRFGPYIFVADQYKTFSDLEDSKTVSMKVIIGVVVGVVVLLLLLALAGIYALRQKKRAQRATDQMNPFAKWDAGKNEMDAPQLMGTKAFTFEELSKCTNNFSDANDVGGGGYGQVYKGTLPNGQVIAIKRAQQGSMQGAFEFKTEIELLSRVHHKNVVKLLGFCFDQKEQMLVYEYIPNGSLRDGLSGKNGVKLDWTRRLKIALGSGKGLAYLHELADPPIIHRDVKSNNILLDEHLTAKVADFGLSKLVGDPEKAHVTTQVKGTMGYLDPEYYMTNQLTEKSDVYGFGVVMLELLTGKSPIDRGSYVVKEVKKKMDKSRNLYDLQELLDTTIIQNSGNLKGFEKYVDVALQCVEPEGVNRPTMSEVVQELESILRLVGLNPNADSATYEEASGDPYGRDSFEYTGVFPTPKP

SEQ ID NO: 96336 - protein, 944 aa, Arabidopsis thaliana
  peptide (1)..(944): Ceres Seq. ID no. 12732875
MSSRIGLFKLLILLFFQIYSVYAFTDGSDFTALQALKNEWDTLSKSWKSSDPCGTEWVGITCNNDNRVVSISLTNRNLKGKLPTEISTLSELQTLDLTGNPELSGPLPANIGNLRKLTFLSLMGCAFNGPIPDSIGNLEQLTRLSLNLNKFSGTIPASMGRLSKLYWFDIADNQLEGKLPVSDGASLPGLDMLLQTGHFHFGNNKLSGEIPEKLFSSEMTLLHVLFDGNQFTGSIPESLGLVQNLTVLRLDRNRLSGDIPSSLNNLTNLQELHLSDNKFTGSLPNLTSLTSLYTLDVSNNPLALSPVPSWIPFLNSLSTLRLEDIQLDGPVPTSLFSPLQLQTVSLKHNLINTTLDLGTNYSKQLDFVDLRDNFITGYKSPANNPVNVMLADNQVCQDPANQLSGYCNAVQPNSTFSTLTKCGNHCGKGKEPNQGCHCVYPLTGVFTLRSPSFSGFSNNSNFLKFGESLMTFFKNGKYPVDSVAMRNISENPTDYHLLINLLIFPSGRDRFNQTEMDSINSAFTIQDYKPPPRFGPYIFVADQYKTFSDLEDSKTVSMKVIIGVVVGVVVLLLLLALAGIYALRQKKRAQRATDQMNPFAKWDAGKNEMDAPQLMGTKAFTFEELSKCTNNFSDANDVGGGGYGQVYKGTLPNGQVIAIKRAQQGSMQGAFEFKTEIELLSRVHHKNVVKLLGFCFDQKEQMLVYEYIPNGSLRDGLSGKNGVKLDWTRRLKIALGSGKGLAYLHELADPPIIHRDVKSNNILLDEHLTAKVADFGLSKLVGDPEKAHVTTQVKGTMGYLDPEYYMTNQLTEKSDVYGFGVVMLELLTGKSPIDRGSYVVKEVKKKMDKSRNLYDLQELLDTTIIQNSGNLKGFEKYVDVALQCVEPEGVNRPTMSEVVQELESILRLVGLNPNADSATYEEASGDPYGRDSFEYTGVFPTPKP

SEQ ID NO: 96337 - protein, 822 aa, Arabidopsis thaliana
  peptide (1)..(822): Ceres Seq. ID no. 12732876
MGCAFNGPIPDSIGNLEQLTRLSLNLNKFSGTIPASMGRLSKLYWFDIADNQLEGKLPVSDGASLPGLDMLLQTGHFHFGNNKLSGEIPEKLFSSEMTLLHVLFDGNQFTGSIPESLGLVQNLTVLRLDRNRLSGDIPSSLNNLTNLQELHLSDNKFTGSLPNLTSLTSLYTLDVSNNPLALSPVPSWIPFLNSLSTLRLEDIQLDGPVPTSLFSPLQLQTVSLKHNLINTTLDLGTNYSKQLDFVDLRDNFITGYKSPANNPVNVMLADNQVCQDPANQLSGYCNAVQPNSTFSTLTKCGNHCGKGKEPNQGCHCVYPLTGVFTLRSPSFSGFSNNSNFLKFGESLMTFFKNGKYPVDSVAMRNISENPTDYHLLINLLIFPSGRDRFNQTEMDSINSAFTIQDYKPPPRFGPYIFVADQYKTFSDLEDSKTVSMKVIIGVVVGVVVLLLLLALAGIYALRQKKRAQRATDQMNPFAKWDAGKNEMDAPQLMGTKAFTFEELSKCTNNFSDANDVGGGGYGQVYKGTLPNGQVIAIKRAQQGSMQGAFEFKTEIELLSRVHHKNVVKLLGFCFDQKEQMLVYEYIPNGSLRDGLSGKNGVKLDWTRRLKIALGSGKGLAYLHELADPPIIHRDVKSNNILLDEHLTAKVADFGLSKLVGDPEKAHVTTQVKGTMGYLDPEYYMTNQLTEKSDVYGFGVVMLELLTGKSPIDRGSYVVKEVKKKMDKSRNLYDLQELLDTTIIQNSGNLKGFEKYVDVALQCVEPEGVNRPTMSEVVQELESILRLVGLNPNADSATYEEASGDPYGRDSFEYTGVFPTPKP

SEQ ID NO: 96338 - DNA, 2290 bp, Arabidopsis thaliana
  misc_feature (1)..(2290): Ceres Seq. ID no. 12732900
  misc_feature (1)..(2290): Ortholog of  Ceres SEQ ID NO 12465083 as cited in SEQ ID NO 68239
atcttcttcttcttcatctacctaacttaggttttatcaatctctcatttccaaccatggcttcctccgccgcccaaattcacatcctcggcggaatcggattccctacttcgtcttcttcctcctccaccaaaaacctcgacaacaaaaccaattccattccacgaagcgtcttcttcggcaacagaacaagtcctttcactactccaacctccgccttccttcgtatgggacgaagaaacaacaacgcttcccgatacaccgttggtccagtccgtgtggttaacgagaaagtcgtcggaatcgatttaggcacgacgaattcagctgttgctgctatggaaggaggtaaaccaacgattgtgactaacgctgaaggtcaaagaactacaccttctgttgtggcttatactaagagtaaagatagacttgttggtcagattgctaaacgtcaagctgttgttaatccggagaatactttcttctctgttaagaggtttattggtagaagaatgaatgaagttgctgaagagtctaagcaggtttcttatagagttattaaagatgagaatggtaatgttaagcttgattgtcctgctattggtaaacaatttgctgctgaggagatttctgctcaggttttgaggaagcttgtggatgatgcttcgagatttttgaatgataaagtaacgaaagctgtcatcactgtgcctgcttacttcaatgattcacaaaggacggctactaaagatgctggtcgtattgctggattggaagttcttaggattattaatgagcctactgctgcttctttggcttatgggtttgagaggaaaagcaatgaaactattcttgtttttgatcttggtggtggtacttttgatgtctcagtccttgaggttggtgacggtgtttttgaagtgctttcgacttctggtgatacacatttgggaggtgatgactttgacaagagagtcgttgattggcttgcttcaaccttcaagaaggatgaaggtatagatcttctcaaagacaagcaagcgcttcagaggttgacggaggcagctgaaaaagctaaaattgagctttcctcactgactcagacaaacatgagtttgccttttatcactgcaacggctgatgggcctaagcacattgaaaccactctcaccaggggcaagtttgaagaattgtgctctgacttactcgacagggtcaggacacctgtggagaattccctgagggatgcaaaactcagcttcaaagatattgatgaggtgatccttgttggtggatccacacgtatccctgctgttcaggatcttgtaaggaagctgacaggaaaagaacccaatgtctcagtcaatcctgatgaagttgtagctttaggtgctgcagttcaggccggtgttctatcaggagatgtgagtgacattgttcttcttgatgtgacgccgctatcgcttggtttggaaactcttggtggtgtcatgaccaagatcattccaagaaacaccacacttccaacttctaagtcagaagtcttctcaactgctgcagatggacagacaagcgttgagattaatgtgttacagggtgagagagagttcgtaagagataacaagtctattggtagcttccgtcttgatggtattccacctgcaccacgtggagttccacaaatcgaggtcaaattcgacattgatgccaatggaattctatctgtcagtgcttcggacaaaggtacaggaaagaagcaggacatcaccattactggtgctagtaccttaccaaaggatgaggtagacacaatggtgcaagaagcagagaggtttgcaaaggaagacaaagaaaagagagatgcgattgacacaaagaaccaggctgactccgtcgtttaccagacagagaagcagcttaaagaacttggagagaaaattccaggtccagtgaaagaaaaggttgaggctaagctccaagagctgaaggagaagatagcaagcggatcaactcaagaaatcaaagacaccatggcagctcttaaccaagaagtgatgcagattggccagtctctgtacaaccaaccccaaccaggtggtgctgattctcctcctggaggtgaagcttcctcgtcgtctgacacatcatcctcagccaaaggtggagacaacggcggtgatgtgattgacgctgacttcacagacagcaattaatacgaattggattcatacaaggattatttatggggtttgtccatgattttgtaggaatgataatgtgatttgttggc

SEQ ID NO: 96339 - protein, 736 aa, Arabidopsis thaliana
  peptide (1)..(736): Ceres Seq. ID no. 12732901
LLLLHLPNLGFINLSFPTMASSAAQIHILGGIGFPTSSSSSSTKNLDNKTNSIPRSVFFGNRTSPFTTPTSAFLRMGRRNNNASRYTVGPVRVVNEKVVGIDLGTTNSAVAAMEGGKPTIVTNAEGQRTTPSVVAYTKSKDRLVGQIAKRQAVVNPENTFFSVKRFIGRRMNEVAEESKQVSYRVIKDENGNVKLDCPAIGKQFAAEEISAQVLRKLVDDASRFLNDKVTKAVITVPAYFNDSQRTATKDAGRIAGLEVLRIINEPTAASLAYGFERKSNETILVFDLGGGTFDVSVLEVGDGVFEVLSTSGDTHLGGDDFDKRVVDWLASTFKKDEGIDLLKDKQALQRLTEAAEKAKIELSSLTQTNMSLPFITATADGPKHIETTLTRGKFEELCSDLLDRVRTPVENSLRDAKLSFKDIDEVILVGGSTRIPAVQDLVRKLTGKEPNVSVNPDEVVALGAAVQAGVLSGDVSDIVLLDVTPLSLGLETLGGVMTKIIPRNTTLPTSKSEVFSTAADGQTSVEINVLQGEREFVRDNKSIGSFRLDGIPPAPRGVPQIEVKFDIDANGILSVSASDKGTGKKQDITITGASTLPKDEVDTMVQEAERFAKEDKEKRDAIDTKNQADSVVYQTEKQLKELGEKIPGPVKEKVEAKLQELKEKIASGSTQEIKDTMAALNQEVMQIGQSLYNQPQPGGADSPPGGEASSSSDTSSSAKGGDNGGDVIDADFTDSN

SEQ ID NO: 96340 - protein, 718 aa, Arabidopsis thaliana
  peptide (1)..(718): Ceres Seq. ID no. 12732902
MASSAAQIHILGGIGFPTSSSSSSTKNLDNKTNSIPRSVFFGNRTSPFTTPTSAFLRMGRRNNNASRYTVGPVRVVNEKVVGIDLGTTNSAVAAMEGGKPTIVTNAEGQRTTPSVVAYTKSKDRLVGQIAKRQAVVNPENTFFSVKRFIGRRMNEVAEESKQVSYRVIKDENGNVKLDCPAIGKQFAAEEISAQVLRKLVDDASRFLNDKVTKAVITVPAYFNDSQRTATKDAGRIAGLEVLRIINEPTAASLAYGFERKSNETILVFDLGGGTFDVSVLEVGDGVFEVLSTSGDTHLGGDDFDKRVVDWLASTFKKDEGIDLLKDKQALQRLTEAAEKAKIELSSLTQTNMSLPFITATADGPKHIETTLTRGKFEELCSDLLDRVRTPVENSLRDAKLSFKDIDEVILVGGSTRIPAVQDLVRKLTGKEPNVSVNPDEVVALGAAVQAGVLSGDVSDIVLLDVTPLSLGLETLGGVMTKIIPRNTTLPTSKSEVFSTAADGQTSVEINVLQGEREFVRDNKSIGSFRLDGIPPAPRGVPQIEVKFDIDANGILSVSASDKGTGKKQDITITGASTLPKDEVDTMVQEAERFAKEDKEKRDAIDTKNQADSVVYQTEKQLKELGEKIPGPVKEKVEAKLQELKEKIASGSTQEIKDTMAALNQEVMQIGQSLYNQPQPGGADSPPGGEASSSSDTSSSAKGGDNGGDVIDADFTDSN

SEQ ID NO: 96341 - protein, 661 aa, Arabidopsis thaliana
  peptide (1)..(661): Ceres Seq. ID no. 12732903
MGRRNNNASRYTVGPVRVVNEKVVGIDLGTTNSAVAAMEGGKPTIVTNAEGQRTTPSVVAYTKSKDRLVGQIAKRQAVVNPENTFFSVKRFIGRRMNEVAEESKQVSYRVIKDENGNVKLDCPAIGKQFAAEEISAQVLRKLVDDASRFLNDKVTKAVITVPAYFNDSQRTATKDAGRIAGLEVLRIINEPTAASLAYGFERKSNETILVFDLGGGTFDVSVLEVGDGVFEVLSTSGDTHLGGDDFDKRVVDWLASTFKKDEGIDLLKDKQALQRLTEAAEKAKIELSSLTQTNMSLPFITATADGPKHIETTLTRGKFEELCSDLLDRVRTPVENSLRDAKLSFKDIDEVILVGGSTRIPAVQDLVRKLTGKEPNVSVNPDEVVALGAAVQAGVLSGDVSDIVLLDVTPLSLGLETLGGVMTKIIPRNTTLPTSKSEVFSTAADGQTSVEINVLQGEREFVRDNKSIGSFRLDGIPPAPRGVPQIEVKFDIDANGILSVSASDKGTGKKQDITITGASTLPKDEVDTMVQEAERFAKEDKEKRDAIDTKNQADSVVYQTEKQLKELGEKIPGPVKEKVEAKLQELKEKIASGSTQEIKDTMAALNQEVMQIGQSLYNQPQPGGADSPPGGEASSSSDTSSSAKGGDNGGDVIDADFTDSN

SEQ ID NO: 96342 - DNA, 1167 bp, Arabidopsis thaliana
  misc_feature (1)..(1167): Ceres Seq. ID no. 12732919
  misc_feature (1)..(1167): Ortholog of  Ceres SEQ ID NO 15171438 as cited in SEQ ID NO 51665
  misc_feature (1)..(1167): Ortholog of  Ceres SEQ ID NO 15170804 as cited in SEQ ID NO 52653
  misc_feature (1)..(1167): Ortholog of  Ceres SEQ ID NO 15170203 as cited in SEQ ID NO 53291
  misc_feature (1)..(1167): Ortholog of  Ceres SEQ ID NO 14303083 as cited in SEQ ID NO 66573
atgatacaatttcaagaatccgaagaagaaccagatttttctcaagaagatcatctaacatcttcttctcaaccacttcatcaatgtattgccactcttgtatgtcacacagcatcctacatttcatctctaactcttgcaggaaagagactttacacaggctccaacgacggggttgttagattatggaatgcaaacacgttggaaacattagccgaagcatcaagcaacggcgatgtaataacaggggagagaggaggtggaggagcagtgaaatctttggtaatcttggctgataaactctttacagcacaccaagatcataagatacgtgtgtggaagataaacgacgtcgttgaagaagacgtgggtggtaaaaagtacatgcatttagcgacgatgccaacgattagcgatcgttttgcaaagtgtttgatgccaaagaaccaagttgaaataaggaggcataagaaagcttcatgggttcaccatgtagacgcggtttcgggtttagccttatcaagagatggaacactactctactctgtctcatgggacaggacgcttaaaatctggcgaaccaccgattttaaatgcctagagtcattcacaaacgcccacgatgatgcaatcaatgcggttgcattatccgaaaatggtgatatatatacaggatcttctgaccaaagaatcaaagtgtggaggaagaacatcaatgaagagaatgtaaagaagaagaggaaacattctttagttgcaatattgtcagaacataattcaggtattaacgcattggcattgagcggtactaatggctctcttttgcattccggtggatctgatggatcgatattggtgtgggaacgtgacgatggtggagacattgtagttgttggaatgcttagaggtcacacagagtctgttctatgcctcgcggttgtttcggacatactttgtagtggctcagcagataagacagtgaggttgtggaaatgttcagccaaggattattcatgcttggctatgttagagggacatttaggaccggttaagtgcttgacaggggcatttcgtgattcgcgtaaagcagatgaggcttcttatcatatttatagtggaggactagactctcaagttaaggtttggcaggttttggtgccggcctaa

SEQ ID NO: 96343 - protein, 388 aa, Arabidopsis thaliana
  peptide (1)..(388): Ceres Seq. ID no. 12732920
MIQFQESEEEPDFSQEDHLTSSSQPLHQCIATLVCHTASYISSLTLAGKRLYTGSNDGVVRLWNANTLETLAEASSNGDVITGERGGGGAVKSLVILADKLFTAHQDHKIRVWKINDVVEEDVGGKKYMHLATMPTISDRFAKCLMPKNQVEIRRHKKASWVHHVDAVSGLALSRDGTLLYSVSWDRTLKIWRTTDFKCLESFTNAHDDAINAVALSENGDIYTGSSDQRIKVWRKNINEENVKKKRKHSLVAILSEHNSGINALALSGTNGSLLHSGGSDGSILVWERDDGGDIVVVGMLRGHTESVLCLAVVSDILCSGSADKTVRLWKCSAKDYSCLAMLEGHLGPVKCLTGAFRDSRKADEASYHIYSGGLDSQVKVWQVLVPA

SEQ ID NO: 96344 - protein, 260 aa, Arabidopsis thaliana
  peptide (1)..(260): Ceres Seq. ID no. 12732921
MHLATMPTISDRFAKCLMPKNQVEIRRHKKASWVHHVDAVSGLALSRDGTLLYSVSWDRTLKIWRTTDFKCLESFTNAHDDAINAVALSENGDIYTGSSDQRIKVWRKNINEENVKKKRKHSLVAILSEHNSGINALALSGTNGSLLHSGGSDGSILVWERDDGGDIVVVGMLRGHTESVLCLAVVSDILCSGSADKTVRLWKCSAKDYSCLAMLEGHLGPVKCLTGAFRDSRKADEASYHIYSGGLDSQVKVWQVLVPA

SEQ ID NO: 96345 - protein, 255 aa, Arabidopsis thaliana
  peptide (1)..(255): Ceres Seq. ID no. 12732922
MPTISDRFAKCLMPKNQVEIRRHKKASWVHHVDAVSGLALSRDGTLLYSVSWDRTLKIWRTTDFKCLESFTNAHDDAINAVALSENGDIYTGSSDQRIKVWRKNINEENVKKKRKHSLVAILSEHNSGINALALSGTNGSLLHSGGSDGSILVWERDDGGDIVVVGMLRGHTESVLCLAVVSDILCSGSADKTVRLWKCSAKDYSCLAMLEGHLGPVKCLTGAFRDSRKADEASYHIYSGGLDSQVKVWQVLVPA

SEQ ID NO: 96346 - DNA, 1806 bp, Arabidopsis thaliana
  misc_feature (1)..(1806): Ceres Seq. ID no. 12732937
  misc_feature (1)..(1806): Ortholog of  Ceres SEQ ID NO 14311028 as cited in SEQ ID NO 54464
  misc_feature (1)..(1806): Ortholog of  Ceres SEQ ID NO 14313654 as cited in SEQ ID NO 59598
acgcacaattaaatatatattcaaagaagaaacgtgcctttaatccaaatatcgttagttatcacttctatatcagcatacatggccaaggagaagcaaccgctgatggaggatctagaacaaggaatacagctaagtacgagggagaatgaaaccggatctggtaaagtgggtagatggagcgaaggatttcgtgatccattggtttctaaacacggaacagctgagaaagcaaagattgtttctgtcacgactaaaccgtataaaccggattcttgctatgaatctgagatttccggtatatggccttcttcgtttagcaaagagtattgttgcatctatagagtacctaaccggttaaggagagttaatccagaggcatacactcctcagatgcttctcatcggtccacttcaacattctaagaaagctaatgcccttgagctttccaaaaccgatttaagatatttggactatatgaacatggagcttcacaagaagaagtaccttaatgctattgcaaataaatatggggatcaaattatcgaagttttcaaggagatcatagaaacaagtgagaaattcgttagagaaagctacgccgagtcaacggactggatcaaacctcaagatttcgttgatatgatccttctcgactcggtgttcatactaggggtctttattcaggctgaaactactcaaaacatcaagaagaaagaagaaattcttttccatgaagaagatattattttccaggagccttgtctcataaccactattttagaagacctaatcttactcgagaaccaactcccttatgtccttttagagaaactctctaaaccttttttcgcaaatcttaaaaccaaggaaactttccgtgacattatccttcgagcttttaggttgaaaggagagatcaaagaaggaacgaatttccgtcattttacagatttgttcagacgtgtccgtgtggaaacactttgtttgacaaaagaacaaatcaaaagcgcaaaggataagccaccggagatcataaagagtctgcacaacgcagacaaactagacagtgctggagtggattttgtgcgtctggaaagaaaaaacgatttatcgttggtgataactttcgaacgcggaatcttggaaataccttgtttcttagcggacgacaacaccgagaggattatgaggaacttaatggccctcgagcaatgtcattaccctctcactgcttatgtttgtaactacatagctttcttggattttcttatcgacaccgaccaagacgttgacttgctcgtcaagaaaggagttataaagaactggttaggacatcaagcatcggtggcggaaatggtaaacaagctgtgtttagggcttgtggattttggatctcactattacggtatagccgatagactcaacaaacactacgaaagccgtcgcaatagatccatagccacactccggcgagtttactttaaagatctttggaccggaactgccaccattgccgccgccgttatcctcgtgttgactttgattgggacggttgcttccgtactccaggtgacgcagaaggataataattctccaccgcctccggctatgttccgaggaccgtagattgtctcttgttatatacgaaacaaacaatagttgttttttttctccaatgtttaatttggttttctctttgctcgactttgttccacaaataatgcttctttttcatattttctttatttagtccatcatggctaacgtcatcttttgattatgtatcttcaagttaaaattctc

SEQ ID NO: 96347 - protein, 515 aa, Arabidopsis thaliana
  peptide (1)..(515): Ceres Seq. ID no. 12732938
MAKEKQPLMEDLEQGIQLSTRENETGSGKVGRWSEGFRDPLVSKHGTAEKAKIVSVTTKPYKPDSCYESEISGIWPSSFSKEYCCIYRVPNRLRRVNPEAYTPQMLLIGPLQHSKKANALELSKTDLRYLDYMNMELHKKKYLNAIANKYGDQIIEVFKEIIETSEKFVRESYAESTDWIKPQDFVDMILLDSVFILGVFIQAETTQNIKKKEEILFHEEDIIFQEPCLITTILEDLILLENQLPYVLLEKLSKPFFANLKTKETFRDIILRAFRLKGEIKEGTNFRHFTDLFRRVRVETLCLTKEQIKSAKDKPPEIIKSLHNADKLDSAGVDFVRLERKNDLSLVITFERGILEIPCFLADDNTERIMRNLMALEQCHYPLTAYVCNYIAFLDFLIDTDQDVDLLVKKGVIKNWLGHQASVAEMVNKLCLGLVDFGSHYYGIADRLNKHYESRRNRSIATLRRVYFKDLWTGTATIAAAVILVLTLIGTVASVLQVTQKDNNSPPPPAMFRGP

SEQ ID NO: 96348 - protein, 507 aa, Arabidopsis thaliana
  peptide (1)..(507): Ceres Seq. ID no. 12732939
MEDLEQGIQLSTRENETGSGKVGRWSEGFRDPLVSKHGTAEKAKIVSVTTKPYKPDSCYESEISGIWPSSFSKEYCCIYRVPNRLRRVNPEAYTPQMLLIGPLQHSKKANALELSKTDLRYLDYMNMELHKKKYLNAIANKYGDQIIEVFKEIIETSEKFVRESYAESTDWIKPQDFVDMILLDSVFILGVFIQAETTQNIKKKEEILFHEEDIIFQEPCLITTILEDLILLENQLPYVLLEKLSKPFFANLKTKETFRDIILRAFRLKGEIKEGTNFRHFTDLFRRVRVETLCLTKEQIKSAKDKPPEIIKSLHNADKLDSAGVDFVRLERKNDLSLVITFERGILEIPCFLADDNTERIMRNLMALEQCHYPLTAYVCNYIAFLDFLIDTDQDVDLLVKKGVIKNWLGHQASVAEMVNKLCLGLVDFGSHYYGIADRLNKHYESRRNRSIATLRRVYFKDLWTGTATIAAAVILVLTLIGTVASVLQVTQKDNNSPPPPAMFRGP

SEQ ID NO: 96349 - protein, 411 aa, Arabidopsis thaliana
  peptide (1)..(411): Ceres Seq. ID no. 12732940
MLLIGPLQHSKKANALELSKTDLRYLDYMNMELHKKKYLNAIANKYGDQIIEVFKEIIETSEKFVRESYAESTDWIKPQDFVDMILLDSVFILGVFIQAETTQNIKKKEEILFHEEDIIFQEPCLITTILEDLILLENQLPYVLLEKLSKPFFANLKTKETFRDIILRAFRLKGEIKEGTNFRHFTDLFRRVRVETLCLTKEQIKSAKDKPPEIIKSLHNADKLDSAGVDFVRLERKNDLSLVITFERGILEIPCFLADDNTERIMRNLMALEQCHYPLTAYVCNYIAFLDFLIDTDQDVDLLVKKGVIKNWLGHQASVAEMVNKLCLGLVDFGSHYYGIADRLNKHYESRRNRSIATLRRVYFKDLWTGTATIAAAVILVLTLIGTVASVLQVTQKDNNSPPPPAMFRGP

SEQ ID NO: 96350 - DNA, 1030 bp, Arabidopsis thaliana
  misc_feature (1)..(1030): Ceres Seq. ID no. 12732944
  misc_feature (1)..(1030): Ortholog of  Ceres SEQ ID NO 14313170 as cited in SEQ ID NO 20674
caagagagaacaataccactcaatcataatctataacaatggacgtctatggcttatcttcaccagacttacttcgaatcgacgaccttcttgatttctccaacgaagacatcttctccgcttcttcttccggtggttccaccgccgctacttcctcttcttctttccctcctcctcaaaaccctagtttccaccaccaccatctcccttcctccgccgatcatcactccttcctccacgacatttgcgttcccagtgatgacgcagctcatcttgaatggctttcgcaattcgtggacgattctttcgctgattttccggcgaatccattaggaggaactatgacttctgtcaaaactgaaacttcctttccggggaaaccaagaagcaaacgatcaagagctcctgctcctttcgccggaacatggtctccgatgccactggaatccgagcatcagcagcttcactccgccgccaaattcaagccaaagaaagaacaatccggcggaggaggaggaggaggaggaagacatcagtcatcgtcatcggagactacggaaggaggaggaatgaggagatgtactcactgtgcatcggagaaaacgccacagtggaggacaggaccacttggacctaaaacactatgtaacgcttgtggagtccggtttaaatccggtagacttgtaccggaatatagaccggcttcgagtcctacttttgttttgactcagcattcaaactctcaccggaaagtgatggagcttcgacggcagaaagaagttatgagacaaccacaacaagttcaacttcatcaccaccaccacccgttttagttttcacttttcactgcctcgtccgtcgtcactcttttttttgtttttctttttggttcttggggttgggttttgggtaacgtcacgtgatgatgacgtgtcgcgatcctagcggcgttaatcacgtgaccgacgacgacgggagcctaaaatttttagtgaacgttggaaaatcaaacctcatttaattgttaatt

SEQ ID NO: 96351 - protein, 264 aa, Arabidopsis thaliana
  peptide (1)..(264): Ceres Seq. ID no. 12732945
MDVYGLSSPDLLRIDDLLDFSNEDIFSASSSGGSTAATSSSSFPPPQNPSFHHHHLPSSADHHSFLHDICVPSDDAAHLEWLSQFVDDSFADFPANPLGGTMTSVKTETSFPGKPRSKRSRAPAPFAGTWSPMPLESEHQQLHSAAKFKPKKEQSGGGGGGGGRHQSSSSETTEGGGMRRCTHCASEKTPQWRTGPLGPKTLCNACGVRFKSGRLVPEYRPASSPTFVLTQHSNSHRKVMELRRQKEVMRQPQQVQLHHHHHPF

SEQ ID NO: 96352 - protein, 163 aa, Arabidopsis thaliana; identical to SEQ ID NO: 85496
  peptide (1)..(163): Ceres Seq. ID no. 12732946

SEQ ID NO: 96353 - protein, 132 aa, Arabidopsis thaliana; identical to SEQ ID NO: 85497
  peptide (1)..(132): Ceres Seq. ID no. 12732947

SEQ ID NO: 96354 - DNA, 1774 bp, Arabidopsis thaliana
  misc_feature (1)..(1774): Ceres Seq. ID no. 12732964
  misc_feature (1)..(1774): Ortholog of  Ceres SEQ ID NO 14311131 as cited in SEQ ID NO 53729
  misc_feature (1)..(1774): Ortholog of  Ceres SEQ ID NO 13594037 as cited in SEQ ID NO 55666
  misc_feature (1)..(1774): Ortholog of  Ceres SEQ ID NO 13657707 as cited in SEQ ID NO 66407
atcaatcaaaatcttcaaacacaaacttctcgtttctcaaaacatttggtcttatgatggcttttcgagcttatattattaactttgtgatcttatgcattctcgtggcatcgaccgtttccgggtacaaccagaaagacgtgaaagcatggtgcagccaaactccaaaccctaaaccttgcgagtatttcttaacccataactcaaacaatgaacccataaagtctgaatccgagtttctcaaaatctcaatgaaactcgtattagaccgagccatcctcgccaaaacccacgcgttcacactaggaccaaagtgccgtgacacacgtgaaaaagcagcgtgggaagattgtatcaagctctacgacctcaccgtctctaaaatcaacgagacaatggacccaaacgtgaagtgctcaaaactcgacgcgcaaacatggctaagcacggctctaaccaatcttgacacatgtcgagctgggttcttagagcttggtgttaccgatattgtccttcctttgatgtcaaacaacgtctcgaatcttctatgcaacacactcgccattaacaaagttcctttcaactacaccccacccgagaaagacgggttcccttcgtgggtcaaacctggtgaccggaaacttttgcaaagctcgacgccaaaagataacgcagtggtggcgaaagacggatctggcaattttaagacgataaaagaagcgattgatgctgcttcggggagtggtaggttcgttatatatgtgaagcaaggcgtttacagtgagaaccttgagattcggaaaaagaatgtcatgttgagaggtgatggtatagggaagacgattattaccggaagcaaaagtgttggaggaggaacgacaacctttaactcagctactgtcgcggcggtcggagacgggtttatagctcgtgggatcacgtttcgaaacacggcgggtgcaagcaacgaacaagcggtagctctaagatccgggtcggatctgtcagttttttaccaatgcagtttcgaagcttaccaagacacactctacgttcactccaaccgtcagttttaccgcgattgcgacgtttatggaactgtcgattttatcttcggaaacgcagccgcggttctccagaactgcaacattttcgcacgtcgtcctcgtagtaagaccaacacaatcacagctcaaggaagatccgacccgaatcaaaacacggggattattatccacaactctcgggtcacggccgcttcggatcttcgacccgttttgggatccacaaagacttatttgggtagaccttggagacaatattctaggacggtttttatgaagacttctcttgatagtttgattgatccacgtggctggctcgagtgggatggtaatttcgctttgaagactttgttctatgctgagtttcaaaatacgggtccgggtgcttcaacttcgggtcgggtcacatggccagggtttcgggtccttggttctgcttcagaggcttccaagtttactgttggtactttcctcgccggtggctcttggattccatctagcgtgccgttcacttctggtctctagtgaatatatggtatgatgcaaagttgtatatacaacgcaattgattcgtctattacaaagaataaatattgtttgttacattatagaaactattgtataattttatgtattacaatcatttatgcaatttcatttttctgtaaagatattgtattctttctcatctgaaatataatgtcatatga

SEQ ID NO: 96355 - protein, 528 aa, Arabidopsis thaliana
  peptide (1)..(528): Ceres Seq. ID no. 12732965
QSKSSNTNFSFLKTFGLMMAFRAYIINFVILCILVASTVSGYNQKDVKAWCSQTPNPKPCEYFLTHNSNNEPIKSESEFLKISMKLVLDRAILAKTHAFTLGPKCRDTREKAAWEDCIKLYDLTVSKINETMDPNVKCSKLDAQTWLSTALTNLDTCRAGFLELGVTDIVLPLMSNNVSNLLCNTLAINKVPFNYTPPEKDGFPSWVKPGDRKLLQSSTPKDNAVVAKDGSGNFKTIKEAIDAASGSGRFVIYVKQGVYSENLEIRKKNVMLRGDGIGKTIITGSKSVGGGTTTFNSATVAAVGDGFIARGITFRNTAGASNEQAVALRSGSDLSVFYQCSFEAYQDTLYVHSNRQFYRDCDVYGTVDFIFGNAAAVLQNCNIFARRPRSKTNTITAQGRSDPNQNTGIIIHNSRVTAASDLRPVLGSTKTYLGRPWRQYSRTVFMKTSLDSLIDPRGWLEWDGNFALKTLFYAEFQNTGPGASTSGRVTWPGFRVLGSASEASKFTVGTFLAGGSWIPSSVPFTSGL

SEQ ID NO: 96356 - protein, 511 aa, Arabidopsis thaliana
  peptide (1)..(511): Ceres Seq. ID no. 12732966
MMAFRAYIINFVILCILVASTVSGYNQKDVKAWCSQTPNPKPCEYFLTHNSNNEPIKSESEFLKISMKLVLDRAILAKTHAFTLGPKCRDTREKAAWEDCIKLYDLTVSKINETMDPNVKCSKLDAQTWLSTALTNLDTCRAGFLELGVTDIVLPLMSNNVSNLLCNTLAINKVPFNYTPPEKDGFPSWVKPGDRKLLQSSTPKDNAVVAKDGSGNFKTIKEAIDAASGSGRFVIYVKQGVYSENLEIRKKNVMLRGDGIGKTIITGSKSVGGGTTTFNSATVAAVGDGFIARGITFRNTAGASNEQAVALRSGSDLSVFYQCSFEAYQDTLYVHSNRQFYRDCDVYGTVDFIFGNAAAVLQNCNIFARRPRSKTNTITAQGRSDPNQNTGIIIHNSRVTAASDLRPVLGSTKTYLGRPWRQYSRTVFMKTSLDSLIDPRGWLEWDGNFALKTLFYAEFQNTGPGASTSGRVTWPGFRVLGSASEASKFTVGTFLAGGSWIPSSVPFTSGL

SEQ ID NO: 96357 - protein, 510 aa, Arabidopsis thaliana
  peptide (1)..(510): Ceres Seq. ID no. 12732967
MAFRAYIINFVILCILVASTVSGYNQKDVKAWCSQTPNPKPCEYFLTHNSNNEPIKSESEFLKISMKLVLDRAILAKTHAFTLGPKCRDTREKAAWEDCIKLYDLTVSKINETMDPNVKCSKLDAQTWLSTALTNLDTCRAGFLELGVTDIVLPLMSNNVSNLLCNTLAINKVPFNYTPPEKDGFPSWVKPGDRKLLQSSTPKDNAVVAKDGSGNFKTIKEAIDAASGSGRFVIYVKQGVYSENLEIRKKNVMLRGDGIGKTIITGSKSVGGGTTTFNSATVAAVGDGFIARGITFRNTAGASNEQAVALRSGSDLSVFYQCSFEAYQDTLYVHSNRQFYRDCDVYGTVDFIFGNAAAVLQNCNIFARRPRSKTNTITAQGRSDPNQNTGIIIHNSRVTAASDLRPVLGSTKTYLGRPWRQYSRTVFMKTSLDSLIDPRGWLEWDGNFALKTLFYAEFQNTGPGASTSGRVTWPGFRVLGSASEASKFTVGTFLAGGSWIPSSVPFTSGL

SEQ ID NO: 96358 - DNA, 954 bp, Arabidopsis thaliana
  misc_feature (1)..(954): Ceres Seq. ID no. 12733000
  misc_feature (1)..(954): Ortholog of  Ceres SEQ ID NO 13584646 as cited in SEQ ID NO 60715
atggatcaggtctctcgctctcttcctccaccttttctctcaagagatctccatcttcacccacaccatcaattccagcatcagcagcagcagcagcaacagaatcacggccacgatatagaccagcaccgaatcggtgggctaaaacgtgaccgagatgctgatatcgatcccaacgagcactcttcagccggaaaagatcaaagtactcctggctccggtggagaaagcggcggcggaggaggaggagataatcacatcacgagaaggccacgtggcagaccagcgggatctaagaacaaaccaaaaccgccaatcatcatcactcgagacagcgcaaacgctctcaaatctcatgtcatggaagtagcaaacggatgtgacgtcatggaaagtgtcaccgtcttcgctcgccgtcgccaacgtggcatctgcgttttgagcggaaacggcgccgttaccaacgttaccataagacaaccagcttcagtacctggtggtggctcatctgtcgttaacttacacggacgtttcgagattctttctctctcgggatcattccttcctcctccggctccaccagctgcgtcaggtctaacgatttacttagccggtggtcagggacaggttgttggaggaagcgtggttggtccactcatggcttcaggacctgtagtgattatggcagcttcgtttggaaacgctgcgtatgagagactgccgttggaggaagacgatcaagaagagcaaacagctggagcggttgctaataatatcgatggaaacgcaacaatgggtggtggaacgcaaacgcaaactcagacgcagcagcaacagcaacaacagttgatgcaagatccgacgtcgtttatacaagggttgcctccgaatcttatgaattctgttcaattgccagctgaagcttattggggaactccgagaccatctttctaa

SEQ ID NO: 96359 - protein, 317 aa, Arabidopsis thaliana
  peptide (1)..(317): Ceres Seq. ID no. 12733001
MDQVSRSLPPPFLSRDLHLHPHHQFQHQQQQQQQNHGHDIDQHRIGGLKRDRDADIDPNEHSSAGKDQSTPGSGGESGGGGGGDNHITRRPRGRPAGSKNKPKPPIIITRDSANALKSHVMEVANGCDVMESVTVFARRRQRGICVLSGNGAVTNVTIRQPASVPGGGSSVVNLHGRFEILSLSGSFLPPPAPPAASGLTIYLAGGQGQVVGGSVVGPLMASGPVVIMAASFGNAAYERLPLEEDDQEEQTAGAVANNIDGNATMGGGTQTQTQTQQQQQQQLMQDPTSFIQGLPPNLMNSVQLPAEAYWGTPRPSF

SEQ ID NO: 96360 - protein, 197 aa, Arabidopsis thaliana
  peptide (1)..(197): Ceres Seq. ID no. 12733002
MEVANGCDVMESVTVFARRRQRGICVLSGNGAVTNVTIRQPASVPGGGSSVVNLHGRFEILSLSGSFLPPPAPPAASGLTIYLAGGQGQVVGGSVVGPLMASGPVVIMAASFGNAAYERLPLEEDDQEEQTAGAVANNIDGNATMGGGTQTQTQTQQQQQQQLMQDPTSFIQGLPPNLMNSVQLPAEAYWGTPRPSF

SEQ ID NO: 96361 - protein, 188 aa, Arabidopsis thaliana
  peptide (1)..(188): Ceres Seq. ID no. 12733003
MESVTVFARRRQRGICVLSGNGAVTNVTIRQPASVPGGGSSVVNLHGRFEILSLSGSFLPPPAPPAASGLTIYLAGGQGQVVGGSVVGPLMASGPVVIMAASFGNAAYERLPLEEDDQEEQTAGAVANNIDGNATMGGGTQTQTQTQQQQQQQLMQDPTSFIQGLPPNLMNSVQLPAEAYWGTPRPSF

SEQ ID NO: 96362 - DNA, 1693 bp, Arabidopsis thaliana
  misc_feature (1)..(1693): Ceres Seq. ID no. 12733016
  misc_feature (1)..(1693): Ortholog of  Ceres SEQ ID NO 14307964 as cited in SEQ ID NO 66191
  misc_feature (1)..(1693): Ortholog of  Ceres SEQ ID NO 13502874 as cited in SEQ ID NO 66298
  misc_feature (1)..(1693): Ortholog of  Ceres SEQ ID NO 12614124 as cited in SEQ ID NO 68392
actcatttgaaagaaaatatcacttgagaaaaaattatggatatcatctttgaacaagctttgttccctctattttgctttgtcttatcatttttcataatcttcttcactacaacaagaccccggagctctcgcaaggtcgttccatctccgccgggacctccgcgactgcccatcatcggaaacattcaccttgtcggtagaaacccacaccattcattcgctgacctctcaaaaacatatggaccaatcatgagccttaaatttggaagtttaaacacagtggtcgtaacttcacctgaggctgcaagagaggttctaagaacatacgaccaaatcctctctagccgtacccccactaactcgatacggtccattaatcacgacaaggtttccgttgtctggcttccaccatcgtcgtctcgttggagacttttgagaaaactgtcggcgactcagctcttctcgcctcagcgtatcgaagccacgaaaacgttgagggagaacaaggtgaaggaactcgtgagcttcatgagtgaaagcagcgagagagaagaagctgttgatatatctcgtgctaccttcatcactgctcttaatatcatatcaaacattctgttttctgtcgatctcggtaactacgactcgaataaatccggtgtgtttcaagacacggtgattggtgtcatggaagctgtcgggaatccagacgctgctaacttctttccatttctggggttccttgatctgcaaggtaatagaaagactctgaaggcttgttccgagagattgtttaaggttttccgtgggttcattgatgctaaattagcggaaaaatcattgcgggatactaactctaaagatgtccgggagagagattttgtggatgtgcttctcgatcttaccgaaggagatgaagcagagctcaacactaacgatattgtacaccttctcttggacctgtttggagcgggcacagacacaaactctagtaccgtggaatgggcaatggcagagttacttcgaaaccctgaaacaatggtgaaagctcaggctgagatcgactgtgtgattggtcagaaaggtgttgttgaagagtctgatatctcggcacttccctatctacaagcagtggtgaaggaaactttccggttacatccggctgctccgctactagtcccccgaaaagctgaatcagatgtggaggttcttgggttcatggtgcctaaagacactcaggtatttgtgaacgtgtgggccataggaagagacccgaacgtgtgggagaattcgtcccggtttaagccagagaggtttttagggaaagatatcgacctgagaggtagagattatgagcttacaccattcggagccggacgtagaatatgcccgggattgcctttggctgtgaaaacagtgcctcttatgcttgcttctcttctttattcatttgactggaagcttccaaacggtgtcggttcagaggatttggacatggacgagactttcggtctcacattgcacaagaccaacccgttacatgccgtacccgtcaagaaacgtggccgtaattagccatttagtataagttttctttaaagtacaaatatgcttttcttatcggttgacataagatgcaatttcatgctctgattttacgattctattcttcagattctatagttcgtttacc

SEQ ID NO: 96363 - protein, 512 aa, Arabidopsis thaliana
  peptide (1)..(512): Ceres Seq. ID no. 12733017
MDIIFEQALFPLFCFVLSFFIIFFTTTRPRSSRKVVPSPPGPPRLPIIGNIHLVGRNPHHSFADLSKTYGPIMSLKFGSLNTVVVTSPEAAREVLRTYDQILSSRTPTNSIRSINHDKVSVVWLPPSSSRWRLLRKLSATQLFSPQRIEATKTLRENKVKELVSFMSESSEREEAVDISRATFITALNIISNILFSVDLGNYDSNKSGVFQDTVIGVMEAVGNPDAANFFPFLGFLDLQGNRKTLKACSERLFKVFRGFIDAKLAEKSLRDTNSKDVRERDFVDVLLDLTEGDEAELNTNDIVHLLLDLFGAGTDTNSSTVEWAMAELLRNPETMVKAQAEIDCVIGQKGVVEESDISALPYLQAVVKETFRLHPAAPLLVPRKAESDVEVLGFMVPKDTQVFVNVWAIGRDPNVWENSSRFKPERFLGKDIDLRGRDYELTPFGAGRRICPGLPLAVKTVPLMLASLLYSFDWKLPNGVGSEDLDMDETFGLTLHKTNPLHAVPVKKRGRN

SEQ ID NO: 96364 - protein, 440 aa, Arabidopsis thaliana
  peptide (1)..(440): Ceres Seq. ID no. 12733018
MSLKFGSLNTVVVTSPEAAREVLRTYDQILSSRTPTNSIRSINHDKVSVVWLPPSSSRWRLLRKLSATQLFSPQRIEATKTLRENKVKELVSFMSESSEREEAVDISRATFITALNIISNILFSVDLGNYDSNKSGVFQDTVIGVMEAVGNPDAANFFPFLGFLDLQGNRKTLKACSERLFKVFRGFIDAKLAEKSLRDTNSKDVRERDFVDVLLDLTEGDEAELNTNDIVHLLLDLFGAGTDTNSSTVEWAMAELLRNPETMVKAQAEIDCVIGQKGVVEESDISALPYLQAVVKETFRLHPAAPLLVPRKAESDVEVLGFMVPKDTQVFVNVWAIGRDPNVWENSSRFKPERFLGKDIDLRGRDYELTPFGAGRRICPGLPLAVKTVPLMLASLLYSFDWKLPNGVGSEDLDMDETFGLTLHKTNPLHAVPVKKRGRN

SEQ ID NO: 96365 - protein, 347 aa, Arabidopsis thaliana
  peptide (1)..(347): Ceres Seq. ID no. 12733019
MSESSEREEAVDISRATFITALNIISNILFSVDLGNYDSNKSGVFQDTVIGVMEAVGNPDAANFFPFLGFLDLQGNRKTLKACSERLFKVFRGFIDAKLAEKSLRDTNSKDVRERDFVDVLLDLTEGDEAELNTNDIVHLLLDLFGAGTDTNSSTVEWAMAELLRNPETMVKAQAEIDCVIGQKGVVEESDISALPYLQAVVKETFRLHPAAPLLVPRKAESDVEVLGFMVPKDTQVFVNVWAIGRDPNVWENSSRFKPERFLGKDIDLRGRDYELTPFGAGRRICPGLPLAVKTVPLMLASLLYSFDWKLPNGVGSEDLDMDETFGLTLHKTNPLHAVPVKKRGRN

SEQ ID NO: 96366 - DNA, 975 bp, Arabidopsis thaliana
  misc_feature (1)..(975): Ceres Seq. ID no. 12733020
  misc_feature (1)..(975): Ortholog of  Ceres SEQ ID NO 12609045 as cited in SEQ ID NO 51314
  misc_feature (1)..(975): Ortholog of  Ceres SEQ ID NO 14316312 as cited in SEQ ID NO 60042
  misc_feature (1)..(975): Ortholog of  Ceres SEQ ID NO 13595877 as cited in SEQ ID NO 67702
atgtcacgtgactctcctcccgcatttgatccatacaaacacctcaacataacaatcaaccccaacggctcttgcacgcgccatttcgtttggccgagggttgaacccgacccggatccatgccccggcaagctcgccgcttccaaagacgtaaccattaaccacgaaaccggcgtgtccgtacgtattttccgaccaactaatctaccatccaatgataacgccgtggctcgtctcccaatcatcatccatctccacggctccggttggatcctttacccggccaattctgccgcaaatgaccgttgttgctctcaaatggccagtgagttaacagtgattgttgtctccgtacactatcgtttgcctccggagcatagactcccagctcaatacgacgacgcattagatgctctgctttgggtcaaacaacaagtcgttgactcaaccaacggcgagccgtggcttaaggactacgccgatttctcacggtgttacatatgcggttcgagtaacggcgctaacatcgctttccaattggcactgagatcgttagaccacgatttaacgccgttacaaatcgacggttgcgtgttttaccaaccgctttttggcggtaaaacgaggacaaaatcggagcttaagaatttcgccgacccggtaatgccggttcctgcggttgacgccatgtgggaactatctttgccggtaggtgttgatcgggatcataggtactgtaatccattgggttacttgccgcaaaaggagaaagttggacggcttggacggtgtttggtgatcggttacggcggagacacgtcgttggatcgacaacaagatttcgtgaatttgttggttgcagctggagttagggttgaagcaaggtttgacgacgccggtttccatagcatcgagctggtcgatccacgacgagccgtcgctcttcttaatatgattagagattttataagttga

SEQ ID NO: 96367 - protein, 324 aa, Arabidopsis thaliana
  peptide (1)..(324): Ceres Seq. ID no. 12733021
MSRDSPPAFDPYKHLNITINPNGSCTRHFVWPRVEPDPDPCPGKLAASKDVTINHETGVSVRIFRPTNLPSNDNAVARLPIIIHLHGSGWILYPANSAANDRCCSQMASELTVIVVSVHYRLPPEHRLPAQYDDALDALLWVKQQVVDSTNGEPWLKDYADFSRCYICGSSNGANIAFQLALRSLDHDLTPLQIDGCVFYQPLFGGKTRTKSELKNFADPVMPVPAVDAMWELSLPVGVDRDHRYCNPLGYLPQKEKVGRLGRCLVIGYGGDTSLDRQQDFVNLLVAAGVRVEARFDDAGFHSIELVDPRRAVALLNMIRDFIS

SEQ ID NO: 96368 - protein, 218 aa, Arabidopsis thaliana
  peptide (1)..(218): Ceres Seq. ID no. 12733022
MASELTVIVVSVHYRLPPEHRLPAQYDDALDALLWVKQQVVDSTNGEPWLKDYADFSRCYICGSSNGANIAFQLALRSLDHDLTPLQIDGCVFYQPLFGGKTRTKSELKNFADPVMPVPAVDAMWELSLPVGVDRDHRYCNPLGYLPQKEKVGRLGRCLVIGYGGDTSLDRQQDFVNLLVAAGVRVEARFDDAGFHSIELVDPRRAVALLNMIRDFIS

SEQ ID NO: 96369 - DNA, 1463 bp, Arabidopsis thaliana
  misc_feature (1)..(1463): Ceres Seq. ID no. 12733027
  misc_feature (1)..(1463): Ortholog of  Ceres SEQ ID NO 13582342 as cited in SEQ ID NO 56382
attgcaaccaggaagagaaagaaaatcagagattgatttaacgtgaatggaattttgttgtttcccaatttcttctgagaaatagcaaagttcagttttgtttctctctatctgaagctcaatggaagcttataagcaatgggtttggagaaatagagagtatgtacaatcctttggatcctttgccaacggattgacatggctgcttcctgagaagttttctgcttcagagattggaccagaagcagtaacggcttttttgggcatattctcaacgataaatgaacacataattgaaaatgctccaacacctcgtggccatgttggatcttccgggaatgatccatccctttcttatccactactcatcgccatcctcaaggatttggaaactgttgtggaagtggcagctgaacacttctatggagacaaaaaatggaactacattattctcactgaagctatgaaggctgtcattaggttagccttgttccggaatagtgggtataagatgcttcttcaaggaggggaaacacctaatgaggagaaagattctaaccaatccgagtcgcaaaatagagctggtaattcgggtagaaatctcgggcctcatggtcttggaaaccaaaatcatcataatccatggaacttggaaggacgggcgatgtctgctttaagttcatttggtcagaatgcaagaacaacaacatcttctacccccggttggtctcgaagaattcaacatcagcaagcagttatagagcctccaatgatcaaggagaggcgaagaacgatgtccgagctacttactgagaagggtgttaatggagcgttgtttgcgattggtgaggttctttacataacgagaccgctcatttacgttcttttcatcagaaaatatggagtccgatcttggattccttgggctatatcgctttctgtggacacactggggatgggtcttcttgcaaattcgaagtggtggggagagaagagcaagcaagtccatttctcaggacctgaaaaggatgagctgaggagacgaaaactgatatgggcattgtacctcatgagagatccattcttcaccaagtacacaaggcagaagctggaaagctctcaaaagaagctggaactaattccattgatcggattcctcacagagaaaattgtggagcttttggagggagctcagtcacggtacacttacatatcgggatcgtgaggttaagcgttttacttatggtttatatgcaacggaagaatattgccattgttggaatgctttttcagatcatcaaaggctcctacagatttcttagggaatggtttcaggcttttgttagaaattgtgtttattgcaacaggtagagaacataaccatagacagatgtatctgaagagataagcttctctatgtctaaagaaatggaccgatacgaataaaacaagcatcattaaag

SEQ ID NO: 96370 - protein, 367 aa, Arabidopsis thaliana
  peptide (1)..(367): Ceres Seq. ID no. 12733028
MEAYKQWVWRNREYVQSFGSFANGLTWLLPEKFSASEIGPEAVTAFLGIFSTINEHIIENAPTPRGHVGSSGNDPSLSYPLLIAILKDLETVVEVAAEHFYGDKKWNYIILTEAMKAVIRLALFRNSGYKMLLQGGETPNEEKDSNQSESQNRAGNSGRNLGPHGLGNQNHHNPWNLEGRAMSALSSFGQNARTTTSSTPGWSRRIQHQQAVIEPPMIKERRRTMSELLTEKGVNGALFAIGEVLYITRPLIYVLFIRKYGVRSWIPWAISLSVDTLGMGLLANSKWWGEKSKQVHFSGPEKDELRRRKLIWALYLMRDPFFTKYTRQKLESSQKKLELIPLIGFLTEKIVELLEGAQSRYTYISGS

SEQ ID NO: 96371 - protein, 253 aa, Arabidopsis thaliana
  peptide (1)..(253): Ceres Seq. ID no. 12733029
MKAVIRLALFRNSGYKMLLQGGETPNEEKDSNQSESQNRAGNSGRNLGPHGLGNQNHHNPWNLEGRAMSALSSFGQNARTTTSSTPGWSRRIQHQQAVIEPPMIKERRRTMSELLTEKGVNGALFAIGEVLYITRPLIYVLFIRKYGVRSWIPWAISLSVDTLGMGLLANSKWWGEKSKQVHFSGPEKDELRRRKLIWALYLMRDPFFTKYTRQKLESSQKKLELIPLIGFLTEKIVELLEGAQSRYTYISGS

SEQ ID NO: 96372 - protein, 237 aa, Arabidopsis thaliana
  peptide (1)..(237): Ceres Seq. ID no. 12733030
MLLQGGETPNEEKDSNQSESQNRAGNSGRNLGPHGLGNQNHHNPWNLEGRAMSALSSFGQNARTTTSSTPGWSRRIQHQQAVIEPPMIKERRRTMSELLTEKGVNGALFAIGEVLYITRPLIYVLFIRKYGVRSWIPWAISLSVDTLGMGLLANSKWWGEKSKQVHFSGPEKDELRRRKLIWALYLMRDPFFTKYTRQKLESSQKKLELIPLIGFLTEKIVELLEGAQSRYTYISGS

SEQ ID NO: 96373 - DNA, 1896 bp, Arabidopsis thaliana
  misc_feature (1)..(1896): Ceres Seq. ID no. 12733035
  misc_feature (1)..(1896): Ortholog of  Ceres SEQ ID NO 14312180 as cited in SEQ ID NO 59480
atgaatttatttacaagaatctcatctcggactaagaaggccaatctttactacgtaaccctagttgctcttctctgcatcgctagctaccttctcggtatttggcaaaacacggcggttaatccacgcgccgccttcgatgattcagacggtacaccgtgcgagggattcaccagacctaattctacgaaagatctcgacttcgacgcgcatcacaacattcaagatccacctccggtgacggaaaccgccgttagtttcccgtcgtgtgccgccgcgttgagcgagcacacgccatgcgaagacgcgaagcgatcgttgaaattctcgagggagagattggagtataggcaaaggcattgtcccgagagagaagaaatcttgaagtgcagaattccggcgccgtacggttacaaaacgccgttccgatggccggcgagtcgtgacgtggcgtggttcgctaatgtgcctcacacggagcttacggttgagaaaaagaatcagaattgggtccggtacgagaatgatcggttttggttccctggtggaggtacgatgtttccacgtggcgctgatgcttacattgatgatatcggacggttgattgatctcagcgacggctctatccgtacagccatcgataccggttgcggggtggctagcttcggtgcatatcttttatcaagaaacattacaacgatgtcatttgcaccaagagacacacacgaagctcaagtccagttcgcactcgagcgtggtgtgccggcgatgatcggaatcatggctacaatccgcctaccgtacccttctagagcctttgatttagcacattgctctcgttgccttattccgtggggccaaaacgatggggcttacttgatggaggtggatagggttttaagaccaggagggtactggatactttctggaccgccgattaattggcagaaacggtggaaagggtgggaacggaccatggatgatttgaatgcagagcagactcagatcgagcaggtcgcgagaagcttgtgttggaagaaagttgttcaaagagatgatcttgctatttggcaaaaaccctttaaccacattgactgtaagaaaaccagagaggttttgaaaaatccggagttttgtcgtcatgatcaagatcccgacatggcctggtatacgaagatggattcttgtttgacaccattacctgaagttgatgacgctgaggatctaaagacggtggccggagggaaggtagaaaagtggccggctagattaaacgcgattcctccgagagtaaacaaaggcgctctcgaggaaatcacacctgaagctttcttggagaacacgaaactgtggaaacagagagtttcttattacaagaagttagattaccagttgggtgaaaccgggagatacagaaacttagtcgacatgaacgcttacctcggtggattcgcggcggctctagcggatgatccggtctgggtcatgaacgttgtcccggtcgaggctaagctcaatacgctcggtgtcatctacgagcgtggtctaatcggaacgtatcaaaactggtgtgaagccatgtcgacgtatccaagaacgtatgattttatccatgctgactcggttttcacattgtaccaaggtcaatgtgaaccggaggagatattgttggagatggaccgaattcttagaccgggtggtggtgtgattataagagatgacgtggacgttttgatcaaggttaaggaattaaccaaaggattagaatgggaaggtagaattgctgaccacgagaagggtcctcatgaaagagagaagatttactatgcggtgaaacagtattggaccgttcctgcgcctgatgaagataaaaacaacactagtgctctctcctga

SEQ ID NO: 96374 - protein, 631 aa, Arabidopsis thaliana
  peptide (1)..(631): Ceres Seq. ID no. 12733036
MNLFTRISSRTKKANLYYVTLVALLCIASYLLGIWQNTAVNPRAAFDDSDGTPCEGFTRPNSTKDLDFDAHHNIQDPPPVTETAVSFPSCAAALSEHTPCEDAKRSLKFSRERLEYRQRHCPEREEILKCRIPAPYGYKTPFRWPASRDVAWFANVPHTELTVEKKNQNWVRYENDRFWFPGGGTMFPRGADAYIDDIGRLIDLSDGSIRTAIDTGCGVASFGAYLLSRNITTMSFAPRDTHEAQVQFALERGVPAMIGIMATIRLPYPSRAFDLAHCSRCLIPWGQNDGAYLMEVDRVLRPGGYWILSGPPINWQKRWKGWERTMDDLNAEQTQIEQVARSLCWKKVVQRDDLAIWQKPFNHIDCKKTREVLKNPEFCRHDQDPDMAWYTKMDSCLTPLPEVDDAEDLKTVAGGKVEKWPARLNAIPPRVNKGALEEITPEAFLENTKLWKQRVSYYKKLDYQLGETGRYRNLVDMNAYLGGFAAALADDPVWVMNVVPVEAKLNTLGVIYERGLIGTYQNWCEAMSTYPRTYDFIHADSVFTLYQGQCEPEEILLEMDRILRPGGGVIIRDDVDVLIKVKELTKGLEWEGRIADHEKGPHEREKIYYAVKQYWTVPAPDEDKNNTSALS

SEQ ID NO: 96375 - protein, 446 aa, Arabidopsis thaliana
  peptide (1)..(446): Ceres Seq. ID no. 12733037
MFPRGADAYIDDIGRLIDLSDGSIRTAIDTGCGVASFGAYLLSRNITTMSFAPRDTHEAQVQFALERGVPAMIGIMATIRLPYPSRAFDLAHCSRCLIPWGQNDGAYLMEVDRVLRPGGYWILSGPPINWQKRWKGWERTMDDLNAEQTQIEQVARSLCWKKVVQRDDLAIWQKPFNHIDCKKTREVLKNPEFCRHDQDPDMAWYTKMDSCLTPLPEVDDAEDLKTVAGGKVEKWPARLNAIPPRVNKGALEEITPEAFLENTKLWKQRVSYYKKLDYQLGETGRYRNLVDMNAYLGGFAAALADDPVWVMNVVPVEAKLNTLGVIYERGLIGTYQNWCEAMSTYPRTYDFIHADSVFTLYQGQCEPEEILLEMDRILRPGGGVIIRDDVDVLIKVKELTKGLEWEGRIADHEKGPHEREKIYYAVKQYWTVPAPDEDKNNTSALS

SEQ ID NO: 96376 - protein, 398 aa, Arabidopsis thaliana
  peptide (1)..(398): Ceres Seq. ID no. 12733038
MSFAPRDTHEAQVQFALERGVPAMIGIMATIRLPYPSRAFDLAHCSRCLIPWGQNDGAYLMEVDRVLRPGGYWILSGPPINWQKRWKGWERTMDDLNAEQTQIEQVARSLCWKKVVQRDDLAIWQKPFNHIDCKKTREVLKNPEFCRHDQDPDMAWYTKMDSCLTPLPEVDDAEDLKTVAGGKVEKWPARLNAIPPRVNKGALEEITPEAFLENTKLWKQRVSYYKKLDYQLGETGRYRNLVDMNAYLGGFAAALADDPVWVMNVVPVEAKLNTLGVIYERGLIGTYQNWCEAMSTYPRTYDFIHADSVFTLYQGQCEPEEILLEMDRILRPGGGVIIRDDVDVLIKVKELTKGLEWEGRIADHEKGPHEREKIYYAVKQYWTVPAPDEDKNNTSALS

SEQ ID NO: 96377 - DNA, 1554 bp, Arabidopsis thaliana
  misc_feature (1)..(1554): Ceres Seq. ID no. 12733039
  misc_feature (1)..(1554): Ortholog of  Ceres SEQ ID NO 12608463 as cited in SEQ ID NO 60238
atgaagaggaacaacaacaatcttctaacgaacaagaataagtatgtctatcttaaaacggcgtcgcatccagcaaaaagcatcgctaaagctactctgttcctcgtcacctctctcttcatatctgctggtctcttagacttattgggttgtttcgatttcacaacttttacaggtctgaagcaggtaacaactagtatcagaaaatcaccaatcacaagccaaagattccctaaccaatgcggcgtcgttcagaaccaaactcaattatttccccaaaatggctcctcgagaaacaacgacaaacccagaagcagccattcaagaatatccacgtgtccttcttacttccgttggatccacgaagatctacggccatggaaagagacaggtgtaacgagagggatgcttgagaaagccaggaggacggcgcatttcagagtagtaatcctcgacgggagagtgtacgttaagaaatatagaaagtcaatccaaacaagagacgtttttactctgtggggcatcgtacagttactacggtggtacccaggtaggttaccggatcttgagctcatgtttgacccagatgatagaccaaccgtccgatctaaagactttcaaggtcaacaacacccggccccgcctcctttgttccgttattgctctgatgacgccagcttggatattgtcttccctgattggtccttctggggctgggctgaggttaatataaagccttgggataaatcgctagtggcgatagaagaagggaataagatgactcaatggaaagaccgcgtggcgtatgcttattggagaggaaaccctaatgtggctccaactagaagagatcttctcagatgtaatgtctcagctcaagaagattggaacacacgtctctacattcaggattgggatagagagtcaagagaaggattcaagaactctaacctagagaaccaatgcacccacaggtacaagatttatatagaaggatgggcatggtcagtgagtgagaaatatataatggcatgtgattcaatgacattgtacgtgagacctatgttctatgatttttacgtacgaggaatgatgccattacaacattactggccaatcagagacacctctaagtgtacttccctcaaattcgccgtacattgggggaatactcatttggaccaggcgagtaagataggagaagaagggagtaggtttattagagaggaagtgaaaatggaatatgtgtatgactacatgttccatttgatgaacgagtatgcaaaacttttgaagtttaaaccagagattccgtggggagccacggagattacgccggatattatgggctgctcggcgacgggacggtggagagatttcatggaggagtctatggttatgtttcctagtgaagagtctccttgtgagatgccttctccttttaaccctcatgatttaaaagagattcttgagagaaaaactaatttgactcgtcaagttgagtggtgggaagatcaatattttcatgatttagccaatatcaagaagccttga

SEQ ID NO: 96378 - protein, 517 aa, Arabidopsis thaliana
  peptide (1)..(517): Ceres Seq. ID no. 12733040
MKRNNNNLLTNKNKYVYLKTASHPAKSIAKATLFLVTSLFISAGLLDLLGCFDFTTFTGLKQVTTSIRKSPITSQRFPNQCGVVQNQTQLFPQNGSSRNNDKPRSSHSRISTCPSYFRWIHEDLRPWKETGVTRGMLEKARRTAHFRVVILDGRVYVKKYRKSIQTRDVFTLWGIVQLLRWYPGRLPDLELMFDPDDRPTVRSKDFQGQQHPAPPPLFRYCSDDASLDIVFPDWSFWGWAEVNIKPWDKSLVAIEEGNKMTQWKDRVAYAYWRGNPNVAPTRRDLLRCNVSAQEDWNTRLYIQDWDRESREGFKNSNLENQCTHRYKIYIEGWAWSVSEKYIMACDSMTLYVRPMFYDFYVRGMMPLQHYWPIRDTSKCTSLKFAVHWGNTHLDQASKIGEEGSRFIREEVKMEYVYDYMFHLMNEYAKLLKFKPEIPWGATEITPDIMGCSATGRWRDFMEESMVMFPSEESPCEMPSPFNPHDLKEILERKTNLTRQVEWWEDQYFHDLANIKKP

SEQ ID NO: 96379 - protein, 382 aa, Arabidopsis thaliana
  peptide (1)..(382): Ceres Seq. ID no. 12733041
MLEKARRTAHFRVVILDGRVYVKKYRKSIQTRDVFTLWGIVQLLRWYPGRLPDLELMFDPDDRPTVRSKDFQGQQHPAPPPLFRYCSDDASLDIVFPDWSFWGWAEVNIKPWDKSLVAIEEGNKMTQWKDRVAYAYWRGNPNVAPTRRDLLRCNVSAQEDWNTRLYIQDWDRESREGFKNSNLENQCTHRYKIYIEGWAWSVSEKYIMACDSMTLYVRPMFYDFYVRGMMPLQHYWPIRDTSKCTSLKFAVHWGNTHLDQASKIGEEGSRFIREEVKMEYVYDYMFHLMNEYAKLLKFKPEIPWGATEITPDIMGCSATGRWRDFMEESMVMFPSEESPCEMPSPFNPHDLKEILERKTNLTRQVEWWEDQYFHDLANIKKP

SEQ ID NO: 96380 - protein, 326 aa, Arabidopsis thaliana
  peptide (1)..(326): Ceres Seq. ID no. 12733042
MFDPDDRPTVRSKDFQGQQHPAPPPLFRYCSDDASLDIVFPDWSFWGWAEVNIKPWDKSLVAIEEGNKMTQWKDRVAYAYWRGNPNVAPTRRDLLRCNVSAQEDWNTRLYIQDWDRESREGFKNSNLENQCTHRYKIYIEGWAWSVSEKYIMACDSMTLYVRPMFYDFYVRGMMPLQHYWPIRDTSKCTSLKFAVHWGNTHLDQASKIGEEGSRFIREEVKMEYVYDYMFHLMNEYAKLLKFKPEIPWGATEITPDIMGCSATGRWRDFMEESMVMFPSEESPCEMPSPFNPHDLKEILERKTNLTRQVEWWEDQYFHDLANIKKP

SEQ ID NO: 96381 - DNA, 1773 bp, Arabidopsis thaliana
  misc_feature (1)..(1773): Ceres Seq. ID no. 12733071
  misc_feature (1)..(1773): Ortholog of  Ceres SEQ ID NO 12586556 as cited in SEQ ID NO 64667
  misc_feature (1)..(1773): Ortholog of  Ceres SEQ ID NO 13660894 as cited in SEQ ID NO 67475
atgcgttttacattcctccgatcaactcggatcttccttgcgaaccatcagaaccacttatcatccttgcaaaacattagaaccattccttcttcttcttcttcacctgtagctatatcctctgtatcgaagttatctgctagcttggatcatctctctgacgtgaaacaagaacatggtttcatggtaaaacaagggatttacaattctctgtttcttcaaaacaagctcttgcaagcttacacgaaaatcagagaattcgatgatgcagataagctcttcgacgaaatgcctttgagaaatattgttacttggaacatactgattcacggggtcattcaacgagacggtgacaccaaccacagagctcatctaggtttttgttatttgagtcggattcttttcactgatgtgagtttggatcatgtgtcgttcatggggttgatacggttgtgtactgattcgaccaatatgaaagctggtatccaattacactgtctgatggtgaaacaaggtcttgaatcgagttgctttccgagtactagtctagttcatttctatgggaaatgtggtctcattgtagaagcaagacgagtttttgaggcggttttggatagagatttagtgctatggaacgctttagtttcgtcgtatgttcttaacggtatgattgatgaagcttttggtttactcaagctgatgggttctgacaaaaacagattcaggggtgattattttactttctcgagtcttctcagtgcatgcaggatcgaacaagggaagcagattcacgccattctcttcaaagtgtcatatcaattcgacattccggtggcgactgcattgctgaatatgtatgctaagagtaaccatttgagtgatgctcgggagtgttttgaatcgatggttgtgagaaatgtagtgtcttggaatgcgatgattgtaggttttgcacaaaatggagaaggaagagaagctatgagactttttggtcaaatgctccttgagaatcttcaaccagatgagcttacctttgcaagtgttctaagttcctgcgccaaattttctgcaatttgggagattaagcaagtgcaagcgatggttactaaaaagggctcagcagattttttgtcggtcgctaattctctgataagttcctactccaggaatggaaatttatctgaagcacttttatgttttcattcgatccgagaacctgatcttgtttcatggacttcagtgataggagctttggcttctcatggattcgcagaagaaagcttgcaaatgtttgaaagtatgctgcagaaacttcaaccagacaagatcacttttttagaggttctgtctgcttgtagccatggaggattagttcaagaagggctccgttgcttcaaacgaatgactgagttttacaagatagaagcagaggatgaacactacacgtgtctgatcgatcttcttggtcgagcaggtttcatcgacgaggcttctgatgttttaaattcaatgcccacagaaccaagcacacatgctttggcagctttcacaggaggatgtaacatccatgagaaaagagaatccatgaaatggggtgcaaagaagcttcttgaaattgaacctaccaaacctgtgaactactccatcctgtcaaacgcttatgtctctgaaggccattggaatcaagcggctctactgcgtaaaagagagaggagaaactgctacaatcccaaaactccaggttgcagttggctaggggactactcaatctag

SEQ ID NO: 96382 - protein, 590 aa, Arabidopsis thaliana
  peptide (1)..(590): Ceres Seq. ID no. 12733072
MRFTFLRSTRIFLANHQNHLSSLQNIRTIPSSSSSPVAISSVSKLSASLDHLSDVKQEHGFMVKQGIYNSLFLQNKLLQAYTKIREFDDADKLFDEMPLRNIVTWNILIHGVIQRDGDTNHRAHLGFCYLSRILFTDVSLDHVSFMGLIRLCTDSTNMKAGIQLHCLMVKQGLESSCFPSTSLVHFYGKCGLIVEARRVFEAVLDRDLVLWNALVSSYVLNGMIDEAFGLLKLMGSDKNRFRGDYFTFSSLLSACRIEQGKQIHAILFKVSYQFDIPVATALLNMYAKSNHLSDARECFESMVVRNVVSWNAMIVGFAQNGEGREAMRLFGQMLLENLQPDELTFASVLSSCAKFSAIWEIKQVQAMVTKKGSADFLSVANSLISSYSRNGNLSEALLCFHSIREPDLVSWTSVIGALASHGFAEESLQMFESMLQKLQPDKITFLEVLSACSHGGLVQEGLRCFKRMTEFYKIEAEDEHYTCLIDLLGRAGFIDEASDVLNSMPTEPSTHALAAFTGGCNIHEKRESMKWGAKKLLEIEPTKPVNYSILSNAYVSEGHWNQAALLRKRERRNCYNPKTPGCSWLGDYSI

SEQ ID NO: 96383 - protein, 529 aa, Arabidopsis thaliana
  peptide (1)..(529): Ceres Seq. ID no. 12733073
MVKQGIYNSLFLQNKLLQAYTKIREFDDADKLFDEMPLRNIVTWNILIHGVIQRDGDTNHRAHLGFCYLSRILFTDVSLDHVSFMGLIRLCTDSTNMKAGIQLHCLMVKQGLESSCFPSTSLVHFYGKCGLIVEARRVFEAVLDRDLVLWNALVSSYVLNGMIDEAFGLLKLMGSDKNRFRGDYFTFSSLLSACRIEQGKQIHAILFKVSYQFDIPVATALLNMYAKSNHLSDARECFESMVVRNVVSWNAMIVGFAQNGEGREAMRLFGQMLLENLQPDELTFASVLSSCAKFSAIWEIKQVQAMVTKKGSADFLSVANSLISSYSRNGNLSEALLCFHSIREPDLVSWTSVIGALASHGFAEESLQMFESMLQKLQPDKITFLEVLSACSHGGLVQEGLRCFKRMTEFYKIEAEDEHYTCLIDLLGRAGFIDEASDVLNSMPTEPSTHALAAFTGGCNIHEKRESMKWGAKKLLEIEPTKPVNYSILSNAYVSEGHWNQAALLRKRERRNCYNPKTPGCSWLGDYSI

SEQ ID NO: 96384 - protein, 494 aa, Arabidopsis thaliana
  peptide (1)..(494): Ceres Seq. ID no. 12733074
MPLRNIVTWNILIHGVIQRDGDTNHRAHLGFCYLSRILFTDVSLDHVSFMGLIRLCTDSTNMKAGIQLHCLMVKQGLESSCFPSTSLVHFYGKCGLIVEARRVFEAVLDRDLVLWNALVSSYVLNGMIDEAFGLLKLMGSDKNRFRGDYFTFSSLLSACRIEQGKQIHAILFKVSYQFDIPVATALLNMYAKSNHLSDARECFESMVVRNVVSWNAMIVGFAQNGEGREAMRLFGQMLLENLQPDELTFASVLSSCAKFSAIWEIKQVQAMVTKKGSADFLSVANSLISSYSRNGNLSEALLCFHSIREPDLVSWTSVIGALASHGFAEESLQMFESMLQKLQPDKITFLEVLSACSHGGLVQEGLRCFKRMTEFYKIEAEDEHYTCLIDLLGRAGFIDEASDVLNSMPTEPSTHALAAFTGGCNIHEKRESMKWGAKKLLEIEPTKPVNYSILSNAYVSEGHWNQAALLRKRERRNCYNPKTPGCSWLGDYSI

SEQ ID NO: 96385 - DNA, 1079 bp, Arabidopsis thaliana
  misc_feature (1)..(1079): Ceres Seq. ID no. 12733091
  misc_feature (1)..(1079): Ortholog of  Ceres SEQ ID NO 13598499 as cited in SEQ ID NO 64013
ggacttgaaaaattatccttaggagatttttcctgacctatcctcgcgtcgcgccttcttgtcttctctctcaatccagcatattcctacgcaaatcccttatcgttttcatgtttgtcctggtttaaatcttcaatctcctacccggtcttttcatcctccgatggcattccttgttcgttcgccggagatacccaccgtctcggcgagaatcttctccgatgcgaattcgagtgttattagtcatgtgtttatgaggaggaaggctacggtttcggcgattgacgccagagatttgcctggtgttaagaatccgaaatcgagattgtactggcaattctcagctccggtgaaagaagactacaagattagcagagaggaggaagaagaagaagaagaagataagcagagttactacgtgaatatgggtcacgccgttcgtagtatcagagaagagtttcctttgttgttctacaaagagcttaattttgacatttacagggatgatattgttttcaaagaccctatgaacactttcatgggaattgataactacaaatccatatttggggccttacgtttccatggaaggatcttcttcagagcactatgtgtggacattgttagtgtttggcaacccacagagaacactctgatgatacgatggactgttcatggaattcctcgtggtccgtgggagactcgtggtcgattcgatggtacttctgagtataaattcgataagaatggcaagatttatgagcataaagtcgataacatagccattaattcgcctccaaagtttcaaatgctcactgttcaagagcttgttgaagccattagctgcccttcgactcccaagccgacctactttgagttcggagattgattcatcatcatcgtctgaaacatcatgctggtgttatgtatactagtagtcttttgtgtggttataaatagagtggtactgtaatatagatgaagaaggaacgatttaaaataaacccaatagcatgaatacattacacgctttttttgcgtataataatcaataaaacgcctatatgtacataaatttg

SEQ ID NO: 96386 - protein, 241 aa, Arabidopsis thaliana
  peptide (1)..(241): Ceres Seq. ID no. 12733092
MAFLVRSPEIPTVSARIFSDANSSVISHVFMRRKATVSAIDARDLPGVKNPKSRLYWQFSAPVKEDYKISREEEEEEEEDKQSYYVNMGHAVRSIREEFPLLFYKELNFDIYRDDIVFKDPMNTFMGIDNYKSIFGALRFHGRIFFRALCVDIVSVWQPTENTLMIRWTVHGIPRGPWETRGRFDGTSEYKFDKNGKIYEHKVDNIAINSPPKFQMLTVQELVEAISCPSTPKPTYFEFGD

SEQ ID NO: 96387 - protein, 211 aa, Arabidopsis thaliana
  peptide (1)..(211): Ceres Seq. ID no. 12733093
MRRKATVSAIDARDLPGVKNPKSRLYWQFSAPVKEDYKISREEEEEEEEDKQSYYVNMGHAVRSIREEFPLLFYKELNFDIYRDDIVFKDPMNTFMGIDNYKSIFGALRFHGRIFFRALCVDIVSVWQPTENTLMIRWTVHGIPRGPWETRGRFDGTSEYKFDKNGKIYEHKVDNIAINSPPKFQMLTVQELVEAISCPSTPKPTYFEFGD

SEQ ID NO: 96388 - protein, 154 aa, Arabidopsis thaliana
  peptide (1)..(154): Ceres Seq. ID no. 12733094
MGHAVRSIREEFPLLFYKELNFDIYRDDIVFKDPMNTFMGIDNYKSIFGALRFHGRIFFRALCVDIVSVWQPTENTLMIRWTVHGIPRGPWETRGRFDGTSEYKFDKNGKIYEHKVDNIAINSPPKFQMLTVQELVEAISCPSTPKPTYFEFGD

SEQ ID NO: 96389 - DNA, 1122 bp, Arabidopsis thaliana
  misc_feature (1)..(1122): Ceres Seq. ID no. 12733099
  misc_feature (1)..(1122): Ortholog of  Ceres SEQ ID NO 14311032 as cited in SEQ ID NO 54590
  misc_feature (1)..(1122): Ortholog of  Ceres SEQ ID NO 15170493 as cited in SEQ ID NO 58432
ttttttcctgatggtggaagaagcacaattggatcctaaatcgaaatcgattccgaatgagaatttgaaatttggagaaagggctttgtctgccggaggcgccgcttttatatcggcggtcatagtcaatcctctcgatgttgttaagacgagattacaagcacaggctgcaggagttccgtatcaaggctcgtgtcgtcttggttgtttcgacacgaattccacgttggtacatgatttgagaagtaattctgctccagggatgtgtagaattactggctctgcatctgtatgctcagataatcagtacaagggaactcttgatgttttctacaaaattatccgccaggaagggttttctaggctttggagaggtacaaacgcaagtttaactttagccattccgactgttgggatctacatgccttgttatgattattttcgcaacataatggaggagttcacgactgagaagtctccatctttgacggtttatgtccctctagttgctgggacaatagcacgctccttggcttgtatctcttgttaccctgttgagttagcaaggacacggatgcaggcatttaagggaacgcaaagaaatgtgaaactgcctggcgtttggaagacattagttgacgtcgtcaatccagtgaagggctcaaataatggatataggatgttatggactggtcttggtgctcaacttgctagggatgttccattctctgcaatctgctggtcgatacttgagcctacccggagaagcattcagtcggccatgggtgaagaaccaagggcaggcagtataataggtgcaaacttcgctgctggttttgttgcgggtgcagttgctgcagcagctacttgccctctagatgttgcaaagactaggcgtcaaatagagaagaacacagatagagccatgacaatgaccacaagacaaaccttggcagagatttggagggacggagggatgagagggatgtttagtggagcaggggctagagtgggacgagcaggaccatctgtagccattgtggtatcgttttacgaagtggtcaagtacggactgcacaacttccaccaacagtaacacttatactagacagattttgtttt

SEQ ID NO: 96390 - protein, 364 aa, Arabidopsis thaliana
  peptide (1)..(364): Ceres Seq. ID no. 12733100
FFLMVEEAQLDPKSKSIPNENLKFGERALSAGGAAFISAVIVNPLDVVKTRLQAQAAGVPYQGSCRLGCFDTNSTLVHDLRSNSAPGMCRITGSASVCSDNQYKGTLDVFYKIIRQEGFSRLWRGTNASLTLAIPTVGIYMPCYDYFRNIMEEFTTEKSPSLTVYVPLVAGTIARSLACISCYPVELARTRMQAFKGTQRNVKLPGVWKTLVDVVNPVKGSNNGYRMLWTGLGAQLARDVPFSAICWSILEPTRRSIQSAMGEEPRAGSIIGANFAAGFVAGAVAAAATCPLDVAKTRRQIEKNTDRAMTMTTRQTLAEIWRDGGMRGMFSGAGARVGRAGPSVAIVVSFYEVVKYGLHNFHQQ

SEQ ID NO: 96391 - protein, 361 aa, Arabidopsis thaliana
  peptide (1)..(361): Ceres Seq. ID no. 12733101
MVEEAQLDPKSKSIPNENLKFGERALSAGGAAFISAVIVNPLDVVKTRLQAQAAGVPYQGSCRLGCFDTNSTLVHDLRSNSAPGMCRITGSASVCSDNQYKGTLDVFYKIIRQEGFSRLWRGTNASLTLAIPTVGIYMPCYDYFRNIMEEFTTEKSPSLTVYVPLVAGTIARSLACISCYPVELARTRMQAFKGTQRNVKLPGVWKTLVDVVNPVKGSNNGYRMLWTGLGAQLARDVPFSAICWSILEPTRRSIQSAMGEEPRAGSIIGANFAAGFVAGAVAAAATCPLDVAKTRRQIEKNTDRAMTMTTRQTLAEIWRDGGMRGMFSGAGARVGRAGPSVAIVVSFYEVVKYGLHNFHQQ

SEQ ID NO: 96392 - protein, 277 aa, Arabidopsis thaliana
  peptide (1)..(277): Ceres Seq. ID no. 12733102
MCRITGSASVCSDNQYKGTLDVFYKIIRQEGFSRLWRGTNASLTLAIPTVGIYMPCYDYFRNIMEEFTTEKSPSLTVYVPLVAGTIARSLACISCYPVELARTRMQAFKGTQRNVKLPGVWKTLVDVVNPVKGSNNGYRMLWTGLGAQLARDVPFSAICWSILEPTRRSIQSAMGEEPRAGSIIGANFAAGFVAGAVAAAATCPLDVAKTRRQIEKNTDRAMTMTTRQTLAEIWRDGGMRGMFSGAGARVGRAGPSVAIVVSFYEVVKYGLHNFHQQ

SEQ ID NO: 96393 - DNA, 1220 bp, Arabidopsis thaliana
  misc_feature (1)..(1220): Ceres Seq. ID no. 12733103
  misc_feature (1)..(1220): Ortholog of  Ceres SEQ ID NO 14303440 as cited in SEQ ID NO 59496
cacatctcccaccaatctcactcaaaagaaaatctaagaaaagattcttaattttctgaagtgaatgcaaagatgatgatggaagagaaacttgtgatcaacgaattggaactagggaaagagcttgctaaccgattgatgaacaatctcaaacacacttcttctgtcgattccaacaaaaccttgatctctgatatcctccgtatttaccagaatgccattttcatgttgagcttcaaccaagacaagaacatccttaagcgaagccttgagatcgatggaaaagattctaaaaacgtcttcaaaaagaggaaagtatcggagaagaacacagagaaagttaaggtttttgttgcaacagaacaagaaaatggctctattgatgatggtcactgctggagaaaatatgggcaaaaagagattcatggatccaaaaatcctagagcatattacagatgcacgcatcgattcacacaagactgtttagcagtgaagcaagttcagaaatcagacacagatccttcccttttcgaagtgaagtatctcggaaaccacacttgtaacaacatcacatccccgaagacgacgacgaacttctctgtttcattgacgaacacgaacatctttgaaggaaacagagtacatgttacagagcaatcggaagacatgaaaccgaccaagtccgaagaagtgatgataagccttgaagatctggagaacaagaagaacattttcagaacgttttctttctctaaccatgagattgagaacggtgtgtggaaaagtaaccttttcttgggaaatttcgtggaagatctttctcctgcaacatcagggtctgcaattaccagcgaggttttatctgcacctgctgctgttgagaattccgaaactgcagattcgtatttctcgtctttggacaatattatcgatttcggacaggattggttgtggtcgtagctttgaataattgatttggtgaatgtaatgtctctctcttaatggcagtaattatagatggtcagtttaatttaagggttattagttattacttattagtatagtaaaaattatttttgccgatggataaaaattggcttataggactaaagttacatgattttggcctttttcattgtttttcagcagggtttatgaattatgatttccctatgaagttggattgtactttatgacaattaataaagaaaggattttat

SEQ ID NO: 96394 - protein, 295 aa, Arabidopsis thaliana; identical to SEQ ID NO: 36841
  peptide (1)..(295): Ceres Seq. ID no. 12733104

SEQ ID NO: 96395 - protein, 294 aa, Arabidopsis thaliana; identical to SEQ ID NO: 36842
  peptide (1)..(294): Ceres Seq. ID no. 12733105

SEQ ID NO: 96396 - protein, 293 aa, Arabidopsis thaliana; identical to SEQ ID NO: 36843
  peptide (1)..(293): Ceres Seq. ID no. 12733106

SEQ ID NO: 96397 - DNA, 2414 bp, Arabidopsis thaliana
  misc_feature (1)..(2414): Ceres Seq. ID no. 12733111
  misc_feature (1)..(2414): Ortholog of  Ceres SEQ ID NO 14313674 as cited in SEQ ID NO 59602
aacttctttgaacttcaaatagtttaaaatttactctgtttcatcaaattactctgtttcgtcaaattactctgttttgtcagcttgctcttttctaaaacgtggaagtaaataaaattttgacataagtatattttctcccacaggttcaagaatctgtggaagaaaacaatcagcgatgatgaatccccaaagaaacaaattcgtaaggtttaatggaaatgatgatgagttttcgaccaaaactactagaccatcagtatcttcagttatgaaaaccgttagacgaagcttcgaaaaggggtcagagaaaatcagaacctttaagcggcccttaagcgttcattcaaataagaataaagaaaataataagaagaagaagatactaagagtgatgaatccgaacgattcatatcttcaaagctggaacaagattttcttgcttctctctgttgtggctttagcctttgatcctctgtttttctatatcccctatgtgaagcccgagcgattttgtcttaatctagacaagaaactccagacaatcgcttgcgttttccgcactttcatcgacgctttctatgtggttcacatgctgtttcagtttcataccggtttcatcactccttcttctagtggtttcggcagaggagagcttaatgagaaacataaagatatcgctttaagatacctcggctcatactttctaatcgatcttctttcgattctccctattcctcaggtagttgttctagctattgttccaaggatgagacgacccgcgtcgctagtagcaaaagagctactgaaatgggtaatcttttgccaatatgttccgaggatagcgagaatctatccgcttttcaaggaagtaacaagaacttctggtttggtaactgaaactgcttgggctggtgctgctttaaacctattcctctacatgttagctagccatgtttttgggtctttttggtacttgatttcgatagaaaggaaagatagatgttggcgtgaggcgtgtgctaagatacagaattgcactcatgcatacttatactgttcaccaacaggggaagacaataggttatttttaaacggttcttgtccgttgatcgatcccgaagaaatcacaaactcgacggttttcaactttggtatattcgctgatgcattgcagtctggagttgtggagtctagagatttccctaagaagtttttctactgtttctggtggggtctccgcaatcttagtgctttgggccaaaacttgaagacgagtgcctttgaaggagagatcatttttgcaatagtcatttgtatttctggactagtcttgtttgctctcctcattggaaatatgcagaaatatttgcaatcaactactgtaagagttgaggaaatgagagtgaaaaggagagatgcagagcaatggatgtctcatcggatgttgccagacgatctgagaaaacgtatccgtaaatacgaacagtataaatggcaagaaaccaaaggagttgaggaagaagctcttctctctagtcttccaaaagatctcagaaaggacattaaacgccatctttgtctcaagttgctcaaaaaggtgccttggttccaagctatggatgatcggttactagatgctctatgtgctcgtctcaaaacggttctttatacagagaagagttacattgtgcgtgaaggtgaaccagtggaggatatgttgtttataatgagaggaaatttaatcagcaccactacttatggtggcagaactggtttcttcaattctgttgacttagttgctggtgatttctgtggagatcttctcacttgggcattagatcctctcagttcccaattccctatctctagtagaaccgttcaagctttgacagaagtcgaaggctttcttctctcagctgatgatctcaagtttgtcgctactcagtatcgtcgcctccatagcaagcaactccgacacatgttcaggttttattcagtgcaatggcagacatgggcagcatgttttatacaagcagcatggaagagacattgtagaaggaagctctcaaaggctttacgtgaagaagaaggcaaactacataacactcttcagaacgatgattcaggaggcaataaacttaacttaggtgctgcgatttatgcgtcgaggtttgcttctcatgctctgaggaatctaagagcaaatgcagcagcccgaaattctagattcccgcacatgttaactttgttgcctcagaaaccagccgatcctgagtttcctatggatgaaacctagttgtgtatatagttgttgactctatctctatgtaatgtgatcgctagtattttttgcaaatgattatgtaaccagtaaagagctttatgtgaaataatcaataggaaaaattctt

SEQ ID NO: 96398 - protein, 706 aa, Arabidopsis thaliana
  peptide (1)..(706): Ceres Seq. ID no. 12733112
MMNPQRNKFVRFNGNDDEFSTKTTRPSVSSVMKTVRRSFEKGSEKIRTFKRPLSVHSNKNKENNKKKKILRVMNPNDSYLQSWNKIFLLLSVVALAFDPLFFYIPYVKPERFCLNLDKKLQTIACVFRTFIDAFYVVHMLFQFHTGFITPSSSGFGRGELNEKHKDIALRYLGSYFLIDLLSILPIPQVVVLAIVPRMRRPASLVAKELLKWVIFCQYVPRIARIYPLFKEVTRTSGLVTETAWAGAALNLFLYMLASHVFGSFWYLISIERKDRCWREACAKIQNCTHAYLYCSPTGEDNRLFLNGSCPLIDPEEITNSTVFNFGIFADALQSGVVESRDFPKKFFYCFWWGLRNLSALGQNLKTSAFEGEIIFAIVICISGLVLFALLIGNMQKYLQSTTVRVEEMRVKRRDAEQWMSHRMLPDDLRKRIRKYEQYKWQETKGVEEEALLSSLPKDLRKDIKRHLCLKLLKKVPWFQAMDDRLLDALCARLKTVLYTEKSYIVREGEPVEDMLFIMRGNLISTTTYGGRTGFFNSVDLVAGDFCGDLLTWALDPLSSQFPISSRTVQALTEVEGFLLSADDLKFVATQYRRLHSKQLRHMFRFYSVQWQTWAACFIQAAWKRHCRRKLSKALREEEGKLHNTLQNDDSGGNKLNLGAAIYASRFASHALRNLRANAAARNSRFPHMLTLLPQKPADPEFPMDET

SEQ ID NO: 96399 - protein, 705 aa, Arabidopsis thaliana
  peptide (1)..(705): Ceres Seq. ID no. 12733113
MNPQRNKFVRFNGNDDEFSTKTTRPSVSSVMKTVRRSFEKGSEKIRTFKRPLSVHSNKNKENNKKKKILRVMNPNDSYLQSWNKIFLLLSVVALAFDPLFFYIPYVKPERFCLNLDKKLQTIACVFRTFIDAFYVVHMLFQFHTGFITPSSSGFGRGELNEKHKDIALRYLGSYFLIDLLSILPIPQVVVLAIVPRMRRPASLVAKELLKWVIFCQYVPRIARIYPLFKEVTRTSGLVTETAWAGAALNLFLYMLASHVFGSFWYLISIERKDRCWREACAKIQNCTHAYLYCSPTGEDNRLFLNGSCPLIDPEEITNSTVFNFGIFADALQSGVVESRDFPKKFFYCFWWGLRNLSALGQNLKTSAFEGEIIFAIVICISGLVLFALLIGNMQKYLQSTTVRVEEMRVKRRDAEQWMSHRMLPDDLRKRIRKYEQYKWQETKGVEEEALLSSLPKDLRKDIKRHLCLKLLKKVPWFQAMDDRLLDALCARLKTVLYTEKSYIVREGEPVEDMLFIMRGNLISTTTYGGRTGFFNSVDLVAGDFCGDLLTWALDPLSSQFPISSRTVQALTEVEGFLLSADDLKFVATQYRRLHSKQLRHMFRFYSVQWQTWAACFIQAAWKRHCRRKLSKALREEEGKLHNTLQNDDSGGNKLNLGAAIYASRFASHALRNLRANAAARNSRFPHMLTLLPQKPADPEFPMDET

SEQ ID NO: 96400 - protein, 675 aa, Arabidopsis thaliana
  peptide (1)..(675): Ceres Seq. ID no. 12733114
MKTVRRSFEKGSEKIRTFKRPLSVHSNKNKENNKKKKILRVMNPNDSYLQSWNKIFLLLSVVALAFDPLFFYIPYVKPERFCLNLDKKLQTIACVFRTFIDAFYVVHMLFQFHTGFITPSSSGFGRGELNEKHKDIALRYLGSYFLIDLLSILPIPQVVVLAIVPRMRRPASLVAKELLKWVIFCQYVPRIARIYPLFKEVTRTSGLVTETAWAGAALNLFLYMLASHVFGSFWYLISIERKDRCWREACAKIQNCTHAYLYCSPTGEDNRLFLNGSCPLIDPEEITNSTVFNFGIFADALQSGVVESRDFPKKFFYCFWWGLRNLSALGQNLKTSAFEGEIIFAIVICISGLVLFALLIGNMQKYLQSTTVRVEEMRVKRRDAEQWMSHRMLPDDLRKRIRKYEQYKWQETKGVEEEALLSSLPKDLRKDIKRHLCLKLLKKVPWFQAMDDRLLDALCARLKTVLYTEKSYIVREGEPVEDMLFIMRGNLISTTTYGGRTGFFNSVDLVAGDFCGDLLTWALDPLSSQFPISSRTVQALTEVEGFLLSADDLKFVATQYRRLHSKQLRHMFRFYSVQWQTWAACFIQAAWKRHCRRKLSKALREEEGKLHNTLQNDDSGGNKLNLGAAIYASRFASHALRNLRANAAARNSRFPHMLTLLPQKPADPEFPMDET

SEQ ID NO: 96401 - DNA, 1593 bp, Arabidopsis thaliana
  misc_feature (1)..(1593): Ceres Seq. ID no. 12733164
  misc_feature (1)..(1593): Ortholog of  Ceres SEQ ID NO 13594209 as cited in SEQ ID NO 59089
  misc_feature (1)..(1593): Ortholog of  Ceres SEQ ID NO 14307964 as cited in SEQ ID NO 66191
  misc_feature (1)..(1593): Ortholog of  Ceres SEQ ID NO 13502874 as cited in SEQ ID NO 66298
  misc_feature (1)..(1593): Ortholog of  Ceres SEQ ID NO 12614124 as cited in SEQ ID NO 68392
atggctacgaaactcgaaagctccttaatctttgcccttttgtccaaatgcagcgttctaagccaaaccaaccttgccttctccctcctcgccgtcacaatcatctggctcgccatatctctcttcttatggacctatcccggtggacctgcttgggggaaatacctcttcggccggttaatatccggttcatacaaaaccggaaacgttattcccggtccaaaaggcttccctttggttggaagcatgtcactcatgtcaagcactctagctcaccgacgaatcgctgatgcagctgagaaattcggagccaagaggctcatggctttcagcttaggagagactcgcgtgatcgtcacgtgcaatcccgacgtagcgaaagagattctgaatagcccggtttttgctgatcgaccggttaaagaatcggcttactcactgatgtttaacagagcaattggttttgcaccacacggtgtttactggcgaacgcttcgccgtatcgcttcgaaccatctctttagtacaaaacaaatcagaagagccgagacgcaacgacgagtgatctcaagccagatggttgagtttcttgaaaaacagagtagtaacgaaccctgttttgttcgtgagttgcttaaaacggcgtcgcttaacaacatgatgtgctctgtattcggacaagagtatgagcttgaaaaaaaccatgttgagttacgtgaaatggtcgaagaaggttatgatttgctcggaacgttgaattggactgatcaccttccttggctatcggagtttgatcctcaaagactccggtctagatgttccacactcgtaccaaaggtaaaccggtttgtatcccggattatatccgaacaccgtaatcaaaccggtgatttgcctcgtgatttcgtcgacgttttgctctccctccatggttcagataaattatccgacccggacataatcgccgttctttgggagatgatattcagaggaacagacacagttgcggtcttaatcgagtggatcctcgctaggatggtccttcatccagatatgcaatcaacggtacaaaacgagctggatcaagtagtcgggaaatcaagagccctagatgaatctgacttggcttcacttccatatctaacggctgtggtgaaagaagtattgaggcttcatcctccaggcccacttctatcatgggcccgtttggccataacagacacgatcgttgatggtcgtcttgttccggcagggaccacagcaatggtgaacatgtgggccgtatcgcatgatccacacgtgtgggttgatcctttggagtttaaacctgagaggttcgtggcaaaagaaggtgaggtggagttttcggttcttgggtcggatttgagacttgcacctttcgggtcgggtcgtcggatttgccccgggaagaatcttggttttactaccgttatgttttggacggcgatgatgttacatgagtttgaatggggaccgtccgatggtaacggcgttgacttatctgagaaactgaggctttcttgcgagatggctaatcctcttcctgctaaattgcgccgtaggcgcagttaa

SEQ ID NO: 96402 - protein, 530 aa, Arabidopsis thaliana
  peptide (1)..(530): Ceres Seq. ID no. 12733165
MATKLESSLIFALLSKCSVLSQTNLAFSLLAVTIIWLAISLFLWTYPGGPAWGKYLFGRLISGSYKTGNVIPGPKGFPLVGSMSLMSSTLAHRRIADAAEKFGAKRLMAFSLGETRVIVTCNPDVAKEILNSPVFADRPVKESAYSLMFNRAIGFAPHGVYWRTLRRIASNHLFSTKQIRRAETQRRVISSQMVEFLEKQSSNEPCFVRELLKTASLNNMMCSVFGQEYELEKNHVELREMVEEGYDLLGTLNWTDHLPWLSEFDPQRLRSRCSTLVPKVNRFVSRIISEHRNQTGDLPRDFVDVLLSLHGSDKLSDPDIIAVLWEMIFRGTDTVAVLIEWILARMVLHPDMQSTVQNELDQVVGKSRALDESDLASLPYLTAVVKEVLRLHPPGPLLSWARLAITDTIVDGRLVPAGTTAMVNMWAVSHDPHVWVDPLEFKPERFVAKEGEVEFSVLGSDLRLAPFGSGRRICPGKNLGFTTVMFWTAMMLHEFEWGPSDGNGVDLSEKLRLSCEMANPLPAKLRRRRS

SEQ ID NO: 96403 - protein, 448 aa, Arabidopsis thaliana
  peptide (1)..(448): Ceres Seq. ID no. 12733166
MSLMSSTLAHRRIADAAEKFGAKRLMAFSLGETRVIVTCNPDVAKEILNSPVFADRPVKESAYSLMFNRAIGFAPHGVYWRTLRRIASNHLFSTKQIRRAETQRRVISSQMVEFLEKQSSNEPCFVRELLKTASLNNMMCSVFGQEYELEKNHVELREMVEEGYDLLGTLNWTDHLPWLSEFDPQRLRSRCSTLVPKVNRFVSRIISEHRNQTGDLPRDFVDVLLSLHGSDKLSDPDIIAVLWEMIFRGTDTVAVLIEWILARMVLHPDMQSTVQNELDQVVGKSRALDESDLASLPYLTAVVKEVLRLHPPGPLLSWARLAITDTIVDGRLVPAGTTAMVNMWAVSHDPHVWVDPLEFKPERFVAKEGEVEFSVLGSDLRLAPFGSGRRICPGKNLGFTTVMFWTAMMLHEFEWGPSDGNGVDLSEKLRLSCEMANPLPAKLRRRRS

SEQ ID NO: 96404 - protein, 445 aa, Arabidopsis thaliana
  peptide (1)..(445): Ceres Seq. ID no. 12733167
MSSTLAHRRIADAAEKFGAKRLMAFSLGETRVIVTCNPDVAKEILNSPVFADRPVKESAYSLMFNRAIGFAPHGVYWRTLRRIASNHLFSTKQIRRAETQRRVISSQMVEFLEKQSSNEPCFVRELLKTASLNNMMCSVFGQEYELEKNHVELREMVEEGYDLLGTLNWTDHLPWLSEFDPQRLRSRCSTLVPKVNRFVSRIISEHRNQTGDLPRDFVDVLLSLHGSDKLSDPDIIAVLWEMIFRGTDTVAVLIEWILARMVLHPDMQSTVQNELDQVVGKSRALDESDLASLPYLTAVVKEVLRLHPPGPLLSWARLAITDTIVDGRLVPAGTTAMVNMWAVSHDPHVWVDPLEFKPERFVAKEGEVEFSVLGSDLRLAPFGSGRRICPGKNLGFTTVMFWTAMMLHEFEWGPSDGNGVDLSEKLRLSCEMANPLPAKLRRRRS

SEQ ID NO: 96405 - DNA, 2150 bp, Arabidopsis thaliana
  misc_feature (1)..(2150): Ceres Seq. ID no. 12733171
  misc_feature (1)..(2150): Ortholog of  Ceres SEQ ID NO 13500385 as cited in SEQ ID NO 67583
attcctttcgtttatcgttttcttcttccaattttggatctctcttccttttgatctgattcgttacttgctctatgttgcttcaattttgaattcttttgatttttgattgtgtgggggagatggggcaatgttacgggaaggttaatcagagtaagcaaaatggtgaagaagaagctaacacgactacttatgttgtttccggcgacgggaatcagattcagcctctaactccggttaattacggtcgagctaagaacactccagctaggtcatcgaatccgagtccttggcctagtcctttccctcacggatcagcgagccctcttccttctggtgtttctccttctccggccagaacttccactccgaggaggtttttccgacggcctttcccgccgccttctccagccaaacacattaaggcttctttgatcaaacgtcttggagtgaagcctaaggaaggtccgatccctgaggagagaggaactgagccggagcagtcgcttgataagagctttggttatggcaagaattttggtgctaagtacgaattggggaaagaagtgggtcgagggcattttggtcatacttgttctggccgtggtaagaagggagatattaaggatcatcctattgctgtcaagatcatctccaaggctaagatgacaacagcaattgcaattgaagatgttcgcagggaggtgaagttactgaaatcattatctggacacaaatatttaatcaaatattatgatgcatgtgaggacgccaataacgtatacatagtcatggagttgtgtgatggtggagaacttttggacagaattttagcaaggggtggtaaatacccggaggatgatgcaaaggcgattgtcgtacaaattctaactgttgtttcattttgtcatctccaaggagttgtgcaccgtgacttaaagccagagaattttctatttacatcaagccgcgaagactcagacttgaaacttattgattttggtctctcagactttattagacctgatgaaagactgaatgatatagttggaagtgcctactatgtcgcgcctgaagttttacacaggtcatatagccttgaggctgatatatggagtattggagttattacatatatactcttatgtggaagccgacctttttgggcacggacagaatctggaatctttcgcactgtactaagaactgaaccaaactatgatgacgtaccttggccttcttgttcatcagaaggtaaagattttgtgaaacgacttctcaacaaagactataggaagcgaatgtctgcagttcaagctttgactcatccgtggttacgggatgatagtcgtgtgattcctttagacattttgatctataagttggtcaaagcctacttgcacgcgacacctcttagacgagctgctttaaaggcgctagcaaaagcattgaccgagaacgagctagtctatcttagagcacagttcatgctgttgggaccaaacaaagatggtagcgtctctctcgaaaacttcaagacggcgcttatgcaaaacgcaacagacgcaatgagagaatcaagagttcctgaaatacttcacactatggaatctctagcgtataggaagatgtatttcgaagagttctgtgcagcagcaattagcatccatcaactagaagctgttgacgcgtgggaagagatagcaacggcaggtttccagcattttgaaaccgagggaaaccgagtgatcacaatcgaagaactagcaagggaactgaatgtgggtgcgtctgcgtatggacacttgagagattgggtaagaagcagtgacgggaagctgagttacttagggttcactaagttcttgcacggagttactcttcgtgctgctcacgcaagacctcgctagtccttctctaattttaggtctttttcttaatattttttttcttcatcagaacagagcaaatagacttctgagagaggtgaggggtattttcgtccgtttgttttgttctttatcgtattatagagtttcaattttatggtacagaaaagaccaaaatgaaaaaaagatataaacatgtgcataaggtagatgggttacagtcatttttttgcaagtataatatatgaacatctatggttc

SEQ ID NO: 96406 - protein, 595 aa, Arabidopsis thaliana
  peptide (1)..(595): Ceres Seq. ID no. 12733172
MGQCYGKVNQSKQNGEEEANTTTYVVSGDGNQIQPLTPVNYGRAKNTPARSSNPSPWPSPFPHGSASPLPSGVSPSPARTSTPRRFFRRPFPPPSPAKHIKASLIKRLGVKPKEGPIPEERGTEPEQSLDKSFGYGKNFGAKYELGKEVGRGHFGHTCSGRGKKGDIKDHPIAVKIISKAKMTTAIAIEDVRREVKLLKSLSGHKYLIKYYDACEDANNVYIVMELCDGGELLDRILARGGKYPEDDAKAIVVQILTVVSFCHLQGVVHRDLKPENFLFTSSREDSDLKLIDFGLSDFIRPDERLNDIVGSAYYVAPEVLHRSYSLEADIWSIGVITYILLCGSRPFWARTESGIFRTVLRTEPNYDDVPWPSCSSEGKDFVKRLLNKDYRKRMSAVQALTHPWLRDDSRVIPLDILIYKLVKAYLHATPLRRAALKALAKALTENELVYLRAQFMLLGPNKDGSVSLENFKTALMQNATDAMRESRVPEILHTMESLAYRKMYFEEFCAAAISIHQLEAVDAWEEIATAGFQHFETEGNRVITIEELARELNVGASAYGHLRDWVRSSDGKLSYLGFTKFLHGVTLRAAHARPR

SEQ ID NO: 96407 - protein, 414 aa, Arabidopsis thaliana
  peptide (1)..(414): Ceres Seq. ID no. 12733173
MTTAIAIEDVRREVKLLKSLSGHKYLIKYYDACEDANNVYIVMELCDGGELLDRILARGGKYPEDDAKAIVVQILTVVSFCHLQGVVHRDLKPENFLFTSSREDSDLKLIDFGLSDFIRPDERLNDIVGSAYYVAPEVLHRSYSLEADIWSIGVITYILLCGSRPFWARTESGIFRTVLRTEPNYDDVPWPSCSSEGKDFVKRLLNKDYRKRMSAVQALTHPWLRDDSRVIPLDILIYKLVKAYLHATPLRRAALKALAKALTENELVYLRAQFMLLGPNKDGSVSLENFKTALMQNATDAMRESRVPEILHTMESLAYRKMYFEEFCAAAISIHQLEAVDAWEEIATAGFQHFETEGNRVITIEELARELNVGASAYGHLRDWVRSSDGKLSYLGFTKFLHGVTLRAAHARPR

SEQ ID NO: 96408 - protein, 372 aa, Arabidopsis thaliana
  peptide (1)..(372): Ceres Seq. ID no. 12733174
MELCDGGELLDRILARGGKYPEDDAKAIVVQILTVVSFCHLQGVVHRDLKPENFLFTSSREDSDLKLIDFGLSDFIRPDERLNDIVGSAYYVAPEVLHRSYSLEADIWSIGVITYILLCGSRPFWARTESGIFRTVLRTEPNYDDVPWPSCSSEGKDFVKRLLNKDYRKRMSAVQALTHPWLRDDSRVIPLDILIYKLVKAYLHATPLRRAALKALAKALTENELVYLRAQFMLLGPNKDGSVSLENFKTALMQNATDAMRESRVPEILHTMESLAYRKMYFEEFCAAAISIHQLEAVDAWEEIATAGFQHFETEGNRVITIEELARELNVGASAYGHLRDWVRSSDGKLSYLGFTKFLHGVTLRAAHARPR

SEQ ID NO: 96409 - DNA, 1854 bp, Arabidopsis thaliana
  misc_feature (1)..(1854): Ceres Seq. ID no. 12733202
  misc_feature (1)..(1854): Ortholog of  Ceres SEQ ID NO 15176053 as cited in SEQ ID NO 57792
  misc_feature (1)..(1854): Ortholog of  Ceres SEQ ID NO 14308023 as cited in SEQ ID NO 65865
  misc_feature (1)..(1854): Ortholog of  Ceres SEQ ID NO 14307972 as cited in SEQ ID NO 66436
  misc_feature (1)..(1854): Ortholog of  Ceres SEQ ID NO 12614670 as cited in SEQ ID NO 68565
aagaacaacaatacacacacacaaacataaggaaaaaaaaacttttccatggggctcgtaattttcttggcactaattgtcttaatccttattattggtctcaggatattcaaagcttttatgattcttgtttggcatccatttgtgttgaccagaagactcaaaaaccaaggaatctcaggcccaaattacagaatcttttacggaaacctcagcgagataaagaagatgaagagagaatctcatctttcgattcttgatcctagctccaatgatattttccctcgtattcttcctcattatcaaaaatggatgtctcaatacggagagacttttctttactggaacggaacagagccaaggatatgcatctcagatcctgaacttgcaaaaactatgttgtcgaacaagttaggtttctttgtcaaatcaaaggcaagacctgaggctgttaaacttgtcggctccaaaggacttgtctttatcgaaggtgctgattgggttcgccatagaagaatcttgaaccctgctttctccatcgataggctcaagatcatgacgaccgtgatggttgattgtacgctcaagatgttagaggagtggagaaaagagagcactaaggaagaaacagagcacccgaagattaaaaaggaaatgaacgaagagttccaaagactaacagctgatataatagcaacctctgcgtttggaagcagttacgtcgaaggaatcgaagtgtttagatcacaaatggagcttaaaaggtgttatacaacttctctcaaccaagtctctatccctggaactcagtaccttcctacgccttcgaacattcgggtatggaagctggagaggaaaatggataactcaattaagagaattataagttcgagactacagtcaaagtcagattatggagacgatcttctcggaatcttgttgaaagcttacaacactgaagggaaggaacggaagatgagcatcgaagagatcatacatgaatgcaggactttcttcttcggaggtcacgaaactacttcgaatttattggcatggacaacgatgttgctgagcttgcaccaagattggcaggagaaactcagagaagagatattcaaagaatgcggtaaagaaaaaaccccagattcagaaactttctccaaactcaagctgatgaacatggtgatcatggagtcgcttcgactttacggaccagtgtcagctttggcccgagaagcatcagtaaatataaagttaggtgacctagagattcccaagggcacaaccgtagtcatcccgcttctgaagatgcatagcgacaagaccctttggggatccgacgccgacaaattcaacccaatgcggtttgcaaacggcgtttcccgagccgccaatcacccaaacgctctcctagcattctccgtcggaccaagagcttgcattggccaaaactttgtcatgatcgaagccaagactgtgctcaccatgattcttcaacggtttcggtttattagcctctgtgacgagtataagcacacccctgtggataacgtcactattcagcctcagtacggcttacccgtaatgcttcagcctctggaagactgaagtaaaatgcccaaataaatcggatgtcttaatgaatatacctcacgtgtgtgacaagtctcctccatataggccggcttattgctgatggtgggggcttaacaaatcatccttgttaagttattgggcttttactatctcagtttggaacccttgatgggctaaatagttattaataatttaatatattgtgacattgcatgtataattgaaaagtggaaggaagtgtgtaacggttatgaattc

SEQ ID NO: 96410 - protein, 519 aa, Arabidopsis thaliana
  peptide (1)..(519): Ceres Seq. ID no. 12733203
MGLVIFLALIVLILIIGLRIFKAFMILVWHPFVLTRRLKNQGISGPNYRIFYGNLSEIKKMKRESHLSILDPSSNDIFPRILPHYQKWMSQYGETFLYWNGTEPRICISDPELAKTMLSNKLGFFVKSKARPEAVKLVGSKGLVFIEGADWVRHRRILNPAFSIDRLKIMTTVMVDCTLKMLEEWRKESTKEETEHPKIKKEMNEEFQRLTADIIATSAFGSSYVEGIEVFRSQMELKRCYTTSLNQVSIPGTQYLPTPSNIRVWKLERKMDNSIKRIISSRLQSKSDYGDDLLGILLKAYNTEGKERKMSIEEIIHECRTFFFGGHETTSNLLAWTTMLLSLHQDWQEKLREEIFKECGKEKTPDSETFSKLKLMNMVIMESLRLYGPVSALAREASVNIKLGDLEIPKGTTVVIPLLKMHSDKTLWGSDADKFNPMRFANGVSRAANHPNALLAFSVGPRACIGQNFVMIEAKTVLTMILQRFRFISLCDEYKHTPVDNVTIQPQYGLPVMLQPLED

SEQ ID NO: 96411 - protein, 495 aa, Arabidopsis thaliana
  peptide (1)..(495): Ceres Seq. ID no. 12733204
MILVWHPFVLTRRLKNQGISGPNYRIFYGNLSEIKKMKRESHLSILDPSSNDIFPRILPHYQKWMSQYGETFLYWNGTEPRICISDPELAKTMLSNKLGFFVKSKARPEAVKLVGSKGLVFIEGADWVRHRRILNPAFSIDRLKIMTTVMVDCTLKMLEEWRKESTKEETEHPKIKKEMNEEFQRLTADIIATSAFGSSYVEGIEVFRSQMELKRCYTTSLNQVSIPGTQYLPTPSNIRVWKLERKMDNSIKRIISSRLQSKSDYGDDLLGILLKAYNTEGKERKMSIEEIIHECRTFFFGGHETTSNLLAWTTMLLSLHQDWQEKLREEIFKECGKEKTPDSETFSKLKLMNMVIMESLRLYGPVSALAREASVNIKLGDLEIPKGTTVVIPLLKMHSDKTLWGSDADKFNPMRFANGVSRAANHPNALLAFSVGPRACIGQNFVMIEAKTVLTMILQRFRFISLCDEYKHTPVDNVTIQPQYGLPVMLQPLED

SEQ ID NO: 96412 - protein, 459 aa, Arabidopsis thaliana
  peptide (1)..(459): Ceres Seq. ID no. 12733205
MKRESHLSILDPSSNDIFPRILPHYQKWMSQYGETFLYWNGTEPRICISDPELAKTMLSNKLGFFVKSKARPEAVKLVGSKGLVFIEGADWVRHRRILNPAFSIDRLKIMTTVMVDCTLKMLEEWRKESTKEETEHPKIKKEMNEEFQRLTADIIATSAFGSSYVEGIEVFRSQMELKRCYTTSLNQVSIPGTQYLPTPSNIRVWKLERKMDNSIKRIISSRLQSKSDYGDDLLGILLKAYNTEGKERKMSIEEIIHECRTFFFGGHETTSNLLAWTTMLLSLHQDWQEKLREEIFKECGKEKTPDSETFSKLKLMNMVIMESLRLYGPVSALAREASVNIKLGDLEIPKGTTVVIPLLKMHSDKTLWGSDADKFNPMRFANGVSRAANHPNALLAFSVGPRACIGQNFVMIEAKTVLTMILQRFRFISLCDEYKHTPVDNVTIQPQYGLPVMLQPLED

SEQ ID NO: 96413 - DNA, 1588 bp, Arabidopsis thaliana
  misc_feature (1)..(1588): Ceres Seq. ID no. 12733212
  misc_feature (1)..(1588): Ortholog of  Ceres SEQ ID NO 15176273 as cited in SEQ ID NO 58534
aaatgcagaaagagaggaaaagagacaaatgaagcaactggctccaatcttggccgtggtaaacttgatcctcctggttcatggagacgagagatcagcggttggagatcctgggatgaagagagacggtctcagagtggcatttgaagcttggaacttctgcaatgaggttggcttcgaagctcctcacatgggtagtcctcgagctgcagattgcttcgatttgtcatctaaatgcatcaaagcatacacagaagaccaatcaaacaaaaccaccagtggatcttccttggtgcacaaggtatcagactcggataatgagctagggattggaaagcctaaaccaggaatcatatcagaatcagcattgcataaccctgacctttacgcggtcgagaaagaactctacctaggctccctctgtcaagtctcagacaaaccaaacccatggagtttctggatggtcatgctcaaaaatggaaactacgacacaaaatctgctctttgccctaaaaacggcaaaaagatcccacctttcaatcaacccggattattcccctgtttcggcagcggttgtatgaaccaaccgacgctgaaccacggaaaaaccgagcttcagagagatggtcaaaccatgaagggatggttcaatggtacgtacgagcaaggggcagattttggaaatgggttggatgggataagttattacgaggttgtgtgggagaagagagtaggcgttggtggttgggtatttaaacataagcttaagacttcagctaagtacccatggcttatgctttaccttagagctgatgccactaaaggattctctggtggataccattatgacactagaggaatgctcaaaacacttccggagtcaccaaactttaaagtgagactaacactaaatgtaaaacaaggaggcggagccaagagtcaattctatcttctcgacatcggaagctgctggaaaaacaacggcaagccctgcgacggtgacgtaaccaccgacgttactcgttactcggagatgatcataaaccctgaaaccccactttggtgcaaccccaagagtcttcacaactgtccaccgtaccacacgtttcggaacggcaccagagttcaccgtacggaccaccggagcttcccttacgaggcttaccacgtttactgtgcgccgggaaacgccgagcatcttgagcttccggtggggacttgtgatgcttatagtaacccacaagctcaggagattcttcagcttttgcctcacccggtttggggtgaatatggatatcctacccggttgggtgatggttgggtgggtgacccgagaacttgggatcttgatgttggtggcttgtccagtaggcttttcttctaaccaggatcccggtacgattccagcgaggaggatttggacatcggtggatgttggcaccgagatttataaagaagatgaagcaattgcagaatgggatctctctgatttcgatgttcttattacttgatttaagtcaattttataatatttgtttttttttgtcgtcaagtcaattttataatataagattcacaactaatttat

SEQ ID NO: 96414 - protein, 460 aa, Arabidopsis thaliana
  peptide (1)..(460): Ceres Seq. ID no. 12733213
NAEREEKRQMKQLAPILAVVNLILLVHGDERSAVGDPGMKRDGLRVAFEAWNFCNEVGFEAPHMGSPRAADCFDLSSKCIKAYTEDQSNKTTSGSSLVHKVSDSDNELGIGKPKPGIISESALHNPDLYAVEKELYLGSLCQVSDKPNPWSFWMVMLKNGNYDTKSALCPKNGKKIPPFNQPGLFPCFGSGCMNQPTLNHGKTELQRDGQTMKGWFNGTYEQGADFGNGLDGISYYEVVWEKRVGVGGWVFKHKLKTSAKYPWLMLYLRADATKGFSGGYHYDTRGMLKTLPESPNFKVRLTLNVKQGGGAKSQFYLLDIGSCWKNNGKPCDGDVTTDVTRYSEMIINPETPLWCNPKSLHNCPPYHTFRNGTRVHRTDHRSFPYEAYHVYCAPGNAEHLELPVGTCDAYSNPQAQEILQLLPHPVWGEYGYPTRLGDGWVGDPRTWDLDVGGLSSRLFF

SEQ ID NO: 96415 - protein, 451 aa, Arabidopsis thaliana
  peptide (1)..(451): Ceres Seq. ID no. 12733214
MKQLAPILAVVNLILLVHGDERSAVGDPGMKRDGLRVAFEAWNFCNEVGFEAPHMGSPRAADCFDLSSKCIKAYTEDQSNKTTSGSSLVHKVSDSDNELGIGKPKPGIISESALHNPDLYAVEKELYLGSLCQVSDKPNPWSFWMVMLKNGNYDTKSALCPKNGKKIPPFNQPGLFPCFGSGCMNQPTLNHGKTELQRDGQTMKGWFNGTYEQGADFGNGLDGISYYEVVWEKRVGVGGWVFKHKLKTSAKYPWLMLYLRADATKGFSGGYHYDTRGMLKTLPESPNFKVRLTLNVKQGGGAKSQFYLLDIGSCWKNNGKPCDGDVTTDVTRYSEMIINPETPLWCNPKSLHNCPPYHTFRNGTRVHRTDHRSFPYEAYHVYCAPGNAEHLELPVGTCDAYSNPQAQEILQLLPHPVWGEYGYPTRLGDGWVGDPRTWDLDVGGLSSRLFF

SEQ ID NO: 96416 - protein, 422 aa, Arabidopsis thaliana
  peptide (1)..(422): Ceres Seq. ID no. 12733215
MKRDGLRVAFEAWNFCNEVGFEAPHMGSPRAADCFDLSSKCIKAYTEDQSNKTTSGSSLVHKVSDSDNELGIGKPKPGIISESALHNPDLYAVEKELYLGSLCQVSDKPNPWSFWMVMLKNGNYDTKSALCPKNGKKIPPFNQPGLFPCFGSGCMNQPTLNHGKTELQRDGQTMKGWFNGTYEQGADFGNGLDGISYYEVVWEKRVGVGGWVFKHKLKTSAKYPWLMLYLRADATKGFSGGYHYDTRGMLKTLPESPNFKVRLTLNVKQGGGAKSQFYLLDIGSCWKNNGKPCDGDVTTDVTRYSEMIINPETPLWCNPKSLHNCPPYHTFRNGTRVHRTDHRSFPYEAYHVYCAPGNAEHLELPVGTCDAYSNPQAQEILQLLPHPVWGEYGYPTRLGDGWVGDPRTWDLDVGGLSSRLFF

SEQ ID NO: 96417 - DNA, 774 bp, Arabidopsis thaliana
  misc_feature (1)..(774): Ceres Seq. ID no. 12733224
  misc_feature (1)..(774): Ortholog of  Ceres SEQ ID NO 13594163 as cited in SEQ ID NO 60426
atgtcgggactcagattggatggcaaaatcgcaataataacaggcggagctagcgggattggagccgaagcggttaggctgttcacggaccacggagctaaggtggtcatcgttgactttcaagaagaacttggtcaaaacgttgccgtttctgtcgggaaagacaaagcaagtttttaccgttgcgatgttacaaacgaaaaggaggtagaaaacgccgttaagttcaccgtcgaaaagtacgggaagcttgacgttctctttagtaacgccggcgttatggaacagccgggaagctttctcgacttgaatctggaacagtttgaccgaaccatggcggtcaacgttcgtggtgcggctgcgtttatcaaacacgctgcacgagccatggtggagaaaggcacgcgtgggtcaatcgtatgtacgaccagcgtcgcgtcggagatcggtggtccaggacctcacgcgtacacggcgtctaagcacgctcttctcgggctggttaaatcggcttgtggcgggctagggaagtacgggattagagtcaacggcgttgcaccatacgcggtggcgacggcgataaatagccgtgacgaggaaacggtgaggatggtggaggaatatagcgcagccacggggattctcaaaggtgtggtgcttaaggctcgccatgtggcagaggcggctttgtttctggcttcggatgattcggcttacgttagcggtcagaatctggctgttgacgggggttatagcgtcgttaagcccatttga

SEQ ID NO: 96418 - protein, 257 aa, Arabidopsis thaliana
  peptide (1)..(257): Ceres Seq. ID no. 12733225
MSGLRLDGKIAIITGGASGIGAEAVRLFTDHGAKVVIVDFQEELGQNVAVSVGKDKASFYRCDVTNEKEVENAVKFTVEKYGKLDVLFSNAGVMEQPGSFLDLNLEQFDRTMAVNVRGAAAFIKHAARAMVEKGTRGSIVCTTSVASEIGGPGPHAYTASKHALLGLVKSACGGLGKYGIRVNGVAPYAVATAINSRDEETVRMVEEYSAATGILKGVVLKARHVAEAALFLASDDSAYVSGQNLAVDGGYSVVKPI

SEQ ID NO: 96419 - protein, 164 aa, Arabidopsis thaliana
  peptide (1)..(164): Ceres Seq. ID no. 12733226
MEQPGSFLDLNLEQFDRTMAVNVRGAAAFIKHAARAMVEKGTRGSIVCTTSVASEIGGPGPHAYTASKHALLGLVKSACGGLGKYGIRVNGVAPYAVATAINSRDEETVRMVEEYSAATGILKGVVLKARHVAEAALFLASDDSAYVSGQNLAVDGGYSVVKPI

SEQ ID NO: 96420 - protein, 146 aa, Arabidopsis thaliana
  peptide (1)..(146): Ceres Seq. ID no. 12733227
MAVNVRGAAAFIKHAARAMVEKGTRGSIVCTTSVASEIGGPGPHAYTASKHALLGLVKSACGGLGKYGIRVNGVAPYAVATAINSRDEETVRMVEEYSAATGILKGVVLKARHVAEAALFLASDDSAYVSGQNLAVDGGYSVVKPI

SEQ ID NO: 96421 - DNA, 1032 bp, Arabidopsis thaliana
  misc_feature (1)..(1032): Ceres Seq. ID no. 12733228
  misc_feature (1)..(1032): Ortholog of  Ceres SEQ ID NO 13594163 as cited in SEQ ID NO 60426
atccttcaaattttcataacgtctcaacaatgtctggaaaaagattggatggcaaaatcgtaattattactggcggagcaagcgggattggggctgagtccgttcgattatttaccgaacacggcgctcgagtcgtgatcgttgatgtacaggatgagctcggtcaaaacgttgcagtttcgatcggtgaagacaaagcgagttactatcattgcgatgtcacgaacgagacggaagttgaaaacgccgttaagttcaccgtcgaaaaatatgggaagcttgacgttctgtttagtaacgccggcgtaatagagccgtttgtgagcatcctcgacttaaacctcaacgagttagaccgaacgatcgccattaacctccgcggcacagccgcattcatcaagcatgctgcacgtgccatggtggagaaaggcatccgcggctccatcgtttgcaccactagcgtcgcggctgagatcgctggcacggcaccacacgggtacacgacgtcgaagcatgggctgttgggtttgatcaaatcggcttctggtggattaggaaaatatggtataagagtaaacggcgttgctccatttggtgtcgcaacaccgttagtttgtaatggtttcaagatggaaccaaacgtggtggagcagaacacgtcagcttcggcgaatctaaagggcattgtattgaaagctcgtcacgtggcagaagctgctctgtttttagcgtccgatgagtcggcttacgttagcggacagaacctggctgttgacggtggttactcggtggtgaagccgtagctataacaacttggccacaaagatcccatgatggaatattggaattttgtttttttggtcaaaagttgacttgacttaattgttgtagaggcatggggattgagaagtttctgaggttgcaaatttccttgaaatgtggatgttgtatttttatatggtaacattcattatccaacatattgcacatctcgaggataatttatttaaacaaatactacaagcttatttg

SEQ ID NO: 96422 - protein, 266 aa, Arabidopsis thaliana
  peptide (1)..(266): Ceres Seq. ID no. 12733229
PSNFHNVSTMSGKRLDGKIVIITGGASGIGAESVRLFTEHGARVVIVDVQDELGQNVAVSIGEDKASYYHCDVTNETEVENAVKFTVEKYGKLDVLFSNAGVIEPFVSILDLNLNELDRTIAINLRGTAAFIKHAARAMVEKGIRGSIVCTTSVAAEIAGTAPHGYTTSKHGLLGLIKSASGGLGKYGIRVNGVAPFGVATPLVCNGFKMEPNVVEQNTSASANLKGIVLKARHVAEAALFLASDESAYVSGQNLAVDGGYSVVKP

SEQ ID NO: 96423 - protein, 257 aa, Arabidopsis thaliana
  peptide (1)..(257): Ceres Seq. ID no. 12733230
MSGKRLDGKIVIITGGASGIGAESVRLFTEHGARVVIVDVQDELGQNVAVSIGEDKASYYHCDVTNETEVENAVKFTVEKYGKLDVLFSNAGVIEPFVSILDLNLNELDRTIAINLRGTAAFIKHAARAMVEKGIRGSIVCTTSVAAEIAGTAPHGYTTSKHGLLGLIKSASGGLGKYGIRVNGVAPFGVATPLVCNGFKMEPNVVEQNTSASANLKGIVLKARHVAEAALFLASDESAYVSGQNLAVDGGYSVVKP

SEQ ID NO: 96424 - DNA, 822 bp, Arabidopsis thaliana
  misc_feature (1)..(822): Ceres Seq. ID no. 12733235
  misc_feature (1)..(822): Ortholog of  Ceres SEQ ID NO 14313599 as cited in SEQ ID NO 54989
  misc_feature (1)..(822): Ortholog of  Ceres SEQ ID NO 15176204 as cited in SEQ ID NO 55608
  misc_feature (1)..(822): Ortholog of  Ceres SEQ ID NO 13595569 as cited in SEQ ID NO 56778
  misc_feature (1)..(822): Ortholog of  Ceres SEQ ID NO 14313064 as cited in SEQ ID NO 59543
  misc_feature (1)..(822): Ortholog of  Ceres SEQ ID NO 13661001 as cited in SEQ ID NO 67531
atggaagattacgagcgaataaactcaaactctccaacacatgaagaagattctgatgtacggaaaggtccatggaccgaggaagaagatgcaatcctagtcaacttcgtctctatccatggcgatgctcgttggaaccacatcgctcgttcctctgggctaaagcgaactggtaagagttgtagattaagatggcttaattacttacgtccagatgttagaagaggcaacatcactctcgaagaacaatttatgatcctcaaactccattctctttggggcaataggtggtcgaagattgcgcaatatctaccgggaagaacagataatgaaataaagaattattggagaactcgagtccaaaagcaagccaaacacctaagatgcgatgttaacagtaatcttttcaaggagactatgagaaatgtttggatgccgagattagtggaacgaatcaacgcccaatcattacccaccacgtgtgaacaagtggagtcaatgatcaccgacccaagtcaaccagttaacgaaccgagtccggtcgagccgggtttcgttcaattcagccagaatcatcatcagcaattcgtaccggctacggaattgtcagcaacgtcttcgaattctccggctgagacgttttcggacgttcgaggtggggtggtgaacgggtcaggttatgatccgtcgggtcaaacgggtttcggagagttcaacgattggggctgtgttggtggggacaacatgtggactgacgaggagagtttttggttcttgcaggaccagttctgccccgatacgacatcgtattcgtataattaa

SEQ ID NO: 96425 - protein, 273 aa, Arabidopsis thaliana
  peptide (1)..(273): Ceres Seq. ID no. 12733236
MEDYERINSNSPTHEEDSDVRKGPWTEEEDAILVNFVSIHGDARWNHIARSSGLKRTGKSCRLRWLNYLRPDVRRGNITLEEQFMILKLHSLWGNRWSKIAQYLPGRTDNEIKNYWRTRVQKQAKHLRCDVNSNLFKETMRNVWMPRLVERINAQSLPTTCEQVESMITDPSQPVNEPSPVEPGFVQFSQNHHQQFVPATELSATSSNSPAETFSDVRGGVVNGSGYDPSGQTGFGEFNDWGCVGGDNMWTDEESFWFLQDQFCPDTTSYSYN

SEQ ID NO: 96426 - protein, 189 aa, Arabidopsis thaliana
  peptide (1)..(189): Ceres Seq. ID no. 12733237
MILKLHSLWGNRWSKIAQYLPGRTDNEIKNYWRTRVQKQAKHLRCDVNSNLFKETMRNVWMPRLVERINAQSLPTTCEQVESMITDPSQPVNEPSPVEPGFVQFSQNHHQQFVPATELSATSSNSPAETFSDVRGGVVNGSGYDPSGQTGFGEFNDWGCVGGDNMWTDEESFWFLQDQFCPDTTSYSYN

SEQ ID NO: 96427 - DNA, 2482 bp, Arabidopsis thaliana
  misc_feature (1)..(2482): Ceres Seq. ID no. 12733250
  misc_feature (1)..(2482): Ortholog of  Ceres SEQ ID NO 14310452 as cited in SEQ ID NO 54426
  misc_feature (1)..(2482): Ortholog of  Ceres SEQ ID NO 15174626 as cited in SEQ ID NO 59393
  misc_feature (1)..(2482): Ortholog of  Ceres SEQ ID NO 15169663 as cited in SEQ ID NO 64659
  misc_feature (1)..(2482): Ortholog of  Ceres SEQ ID NO 13656177 as cited in SEQ ID NO 64997
aaatttcgtcgtaattggcaacagttaagctctttgctaaaagctctagctgagaagcgaaattcgaagtgaagaatgtctaatcgcaaattcggaatggaaggattcggcattaatcggcaaactagctacagtttcgagcgatctcaagcaccgcaacgtctctacgtccctccctcgtctcgcggcggagacaactccgaagatgccgatcttgataacattgattacatggaaaacgaagaagctgaggaagatattgaggaaggcggttctgctgcggctagcggtggcgaggttgatgagatcgatccattagatgcttttatggagggaattcaccaggagatgaaatctgctccacctcctaagccaaaggagaaactagagaggtacaaggacgacgatgacgatcctgttgagagttacctcaaggccaagaaggatttgggcctgacactagccgccgatgcacttaacgccggttataactccgacgaggaggtgtatgctgcagctaaggcggtcgatgcagggatgctagattatgattccgatgataatccgattgttgtggataaaaggaagattgagcctattacagctctggatcatagctccatcgattatgaacctattaataaggacttttacgaggagctagaatcaatatcaggaatgactgagcaagaaaccacggattaccgtcagagattagggattcgggtctcgggttttgatgttcataggccagttaagacctttgaggattgtggattttcctcacagattatgagtgctatcaaaaagcaagcttatgaaaaacctacagcaatccaatgtcaggctttacctattgtgttgtctggtcgagatgttattggcatagccaaaactggttcaggtaagactgcagcgtttgttcttccaatgattgttcatattatggatcagcctgaacttcagagagatgaaggtccaattggtgtcatatgtgctccaaccagagaattggctcatcaaatcttcttggaagccaagaaattttcgaaagcatatggcttacgagtctctgctgtgtatggtggaatgtctaaacatgaacagtttaaggaactcaaggcaggatgcgaaatagttgttgctactcctggaaggttgatagacatgctgaagatgaaggctttgacaatgatgagagccagttatttggttcttgatgaggcagatcggatgtttgaccttggctttgagccacaagtaaggtctattgttggccagattcgtcctgatcgccagactttactattttcagccactatgccttggaaagttgaaaagttagctagggaaatcctttcagatcctattagagtcacagttggtgaagtggggatggccaatgaagatattacgcaggttgtcaatgtcataccttctgatgctgaaaaacttccctggctacttgaaaagctccctggaatgattgatgagggtgacgtattagtgtttgcatctaaaaaggccactgttgatgagattgaagctcaacttactctaaattccttcaaagttgctgctcttcacggtgataaagaccaagcatcacgaatggaaactctgcagaagttcaaatctggagttcaccatgtgctgattgccactgatgttgctgcccgaggtcttgacatcaaatcgcttaagacagtggttaactatgacatcgcaaaagatatggacatgcatgtacatcgtattggtagaacaggccgtgccggtgacagagatggggttgcctacacacttgttacgcagagagaggctagatttgctggtgaattggtaaacagtctggttgctgctggtcaaaatgtgcctccagaactcacagatcttgccatgaaggatggacgattcaagtccaagcgtgacgggagaaaaggaggtaagaaaggccgaggaggaggtggtggaaacaaaggagtacgtggagttgattttggtcttggtattggatttagctcggaatctagtaggacaccttcttctaaagctgcaccaagtagaagtggggcaatcaattcagtgagaactggagtaatggcccaattcaagaatagttttgtcgctgcaacgccatcaaatccacaaaaccaagcttatccaaacaagagaccatccctaatgggctttgtctcaggtggtactattggtggagacatgggtagaactcagagtcaagctcccccagtagcacctactcaaaacgcctcatcacacaactccagccagaatcactcacagagttctgagaatcggcctagagagaggaagagaagatctggttgggataattgagtgagccacgttttgcatgatgatagtggaagtgttttgcacaacaatgtaatgaatgttgtataatttgttttatcctttcccgtttcagcctttgaatatataaattttccatttctaaaac

SEQ ID NO: 96428 - protein, 760 aa, Arabidopsis thaliana
  peptide (1)..(760): Ceres Seq. ID no. 12733251
MSNRKFGMEGFGINRQTSYSFERSQAPQRLYVPPSSRGGDNSEDADLDNIDYMENEEAEEDIEEGGSAAASGGEVDEIDPLDAFMEGIHQEMKSAPPPKPKEKLERYKDDDDDPVESYLKAKKDLGLTLAADALNAGYNSDEEVYAAAKAVDAGMLDYDSDDNPIVVDKRKIEPITALDHSSIDYEPINKDFYEELESISGMTEQETTDYRQRLGIRVSGFDVHRPVKTFEDCGFSSQIMSAIKKQAYEKPTAIQCQALPIVLSGRDVIGIAKTGSGKTAAFVLPMIVHIMDQPELQRDEGPIGVICAPTRELAHQIFLEAKKFSKAYGLRVSAVYGGMSKHEQFKELKAGCEIVVATPGRLIDMLKMKALTMMRASYLVLDEADRMFDLGFEPQVRSIVGQIRPDRQTLLFSATMPWKVEKLAREILSDPIRVTVGEVGMANEDITQVVNVIPSDAEKLPWLLEKLPGMIDEGDVLVFASKKATVDEIEAQLTLNSFKVAALHGDKDQASRMETLQKFKSGVHHVLIATDVAARGLDIKSLKTVVNYDIAKDMDMHVHRIGRTGRAGDRDGVAYTLVTQREARFAGELVNSLVAAGQNVPPELTDLAMKDGRFKSKRDGRKGGKKGRGGGGGNKGVRGVDFGLGIGFSSESSRTPSSKAAPSRSGAINSVRTGVMAQFKNSFVAATPSNPQNQAYPNKRPSLMGFVSGGTIGGDMGRTQSQAPPVAPTQNASSHNSSQNHSQSSENRPRERKRRSGWDN

SEQ ID NO: 96429 - protein, 753 aa, Arabidopsis thaliana
  peptide (1)..(753): Ceres Seq. ID no. 12733252
MEGFGINRQTSYSFERSQAPQRLYVPPSSRGGDNSEDADLDNIDYMENEEAEEDIEEGGSAAASGGEVDEIDPLDAFMEGIHQEMKSAPPPKPKEKLERYKDDDDDPVESYLKAKKDLGLTLAADALNAGYNSDEEVYAAAKAVDAGMLDYDSDDNPIVVDKRKIEPITALDHSSIDYEPINKDFYEELESISGMTEQETTDYRQRLGIRVSGFDVHRPVKTFEDCGFSSQIMSAIKKQAYEKPTAIQCQALPIVLSGRDVIGIAKTGSGKTAAFVLPMIVHIMDQPELQRDEGPIGVICAPTRELAHQIFLEAKKFSKAYGLRVSAVYGGMSKHEQFKELKAGCEIVVATPGRLIDMLKMKALTMMRASYLVLDEADRMFDLGFEPQVRSIVGQIRPDRQTLLFSATMPWKVEKLAREILSDPIRVTVGEVGMANEDITQVVNVIPSDAEKLPWLLEKLPGMIDEGDVLVFASKKATVDEIEAQLTLNSFKVAALHGDKDQASRMETLQKFKSGVHHVLIATDVAARGLDIKSLKTVVNYDIAKDMDMHVHRIGRTGRAGDRDGVAYTLVTQREARFAGELVNSLVAAGQNVPPELTDLAMKDGRFKSKRDGRKGGKKGRGGGGGNKGVRGVDFGLGIGFSSESSRTPSSKAAPSRSGAINSVRTGVMAQFKNSFVAATPSNPQNQAYPNKRPSLMGFVSGGTIGGDMGRTQSQAPPVAPTQNASSHNSSQNHSQSSENRPRERKRRSGWDN

SEQ ID NO: 96430 - protein, 708 aa, Arabidopsis thaliana
  peptide (1)..(708): Ceres Seq. ID no. 12733253
MENEEAEEDIEEGGSAAASGGEVDEIDPLDAFMEGIHQEMKSAPPPKPKEKLERYKDDDDDPVESYLKAKKDLGLTLAADALNAGYNSDEEVYAAAKAVDAGMLDYDSDDNPIVVDKRKIEPITALDHSSIDYEPINKDFYEELESISGMTEQETTDYRQRLGIRVSGFDVHRPVKTFEDCGFSSQIMSAIKKQAYEKPTAIQCQALPIVLSGRDVIGIAKTGSGKTAAFVLPMIVHIMDQPELQRDEGPIGVICAPTRELAHQIFLEAKKFSKAYGLRVSAVYGGMSKHEQFKELKAGCEIVVATPGRLIDMLKMKALTMMRASYLVLDEADRMFDLGFEPQVRSIVGQIRPDRQTLLFSATMPWKVEKLAREILSDPIRVTVGEVGMANEDITQVVNVIPSDAEKLPWLLEKLPGMIDEGDVLVFASKKATVDEIEAQLTLNSFKVAALHGDKDQASRMETLQKFKSGVHHVLIATDVAARGLDIKSLKTVVNYDIAKDMDMHVHRIGRTGRAGDRDGVAYTLVTQREARFAGELVNSLVAAGQNVPPELTDLAMKDGRFKSKRDGRKGGKKGRGGGGGNKGVRGVDFGLGIGFSSESSRTPSSKAAPSRSGAINSVRTGVMAQFKNSFVAATPSNPQNQAYPNKRPSLMGFVSGGTIGGDMGRTQSQAPPVAPTQNASSHNSSQNHSQSSENRPRERKRRSGWDN

SEQ ID NO: 96431 - DNA, 4824 bp, Arabidopsis thaliana
  misc_feature (1)..(4824): Ceres Seq. ID no. 12733263
  misc_feature (1)..(4824): Ortholog of  Ceres SEQ ID NO 15170434 as cited in SEQ ID NO 52810
  misc_feature (1)..(4824): Ortholog of  Ceres SEQ ID NO 14307069 as cited in SEQ ID NO 54322
atggactggatacacaaatctactccttttatggaaccttcgaatttggcaaaactggttcaaggaaatgttcctcttcagccacatgacagccattcttcgctaactgatctagatatggaccttagagaagtctatttcctgattttacattttctttctattggcccctgcgaacgaacctttggccacttgagagacgaaattttggaaaaagggcttttaccccgtagatatcattcctggtggtcaagaagtggcatttatagcgggcgtgctgatgatgatggcatctccctccccttgagttatgataatttgatagagaggtatcctcatatcgaaaaggatcacttggtgaagcttctcaaacaactaattttaaacccgtctttcccttcacacatgagagttgaaggaaatgctcctaatgctgctgatgttccaacactattgggatctggcaccttttcacttgtggatcgtagtaattcttattcatctactttgtccaacatgttcctttggatctgggacttgaaaaaatcccatatatgcatagaacctgatagtggctctaaggctttgcattttagaaatttgtttttctggctttggcaatctttacttggtatcatgacttgtattgggaattctggtgaagtagctcatataggagaagttaagtccaggggtaacaatatagagtctcagaaagctaggcatgttgcgtcatacttacgctggccgcatatgcatgccgatcaagtgcgtggcctaagtctcagagaaattggaggaggtttcaggaaacaccaccgtgctccgtccattctttcagcatgtcatgctattgcaaaaccatcaacaatggttcaaaagatgcaaaatataaagaagctcagaggacatcgtaatgctgtctactgcgctatatttgatcgttctggaagatatgttatcactggctccgatgaccggcttgtcaaaatttggtcaatggaaactgcgctttgcttggctagctgccgtgggcatgaaggtgacattacagacttggccgttagttcaaacaatgctttggttgcttcagcttcaaacgattttgtgattcgagtgtggcggttgcctgatggaatgccaatttctgtattgcggggacacactggagctgttaccgcaattgcattcagtcccagacaggcgtctgtttaccaacttttatcgtcatcagatgatggaacctgtcgtatctgggatgctaggtattctcagtggctcccacgaatctatgttccaagtccttcagatgctaacactggctcattggaagtttctctcttaggcgaaagcacttttacatcttccaacacaggatccacgagcaatgcatctcagagtcatcaaatattatgttgtgcatacaatgctaatggaaccattttcgtcacgggtagctctgacagcaatgcaagggtttggagtgcctcaaaacctaacttggatgatgctgaacagccgactcatgagctggatgttctacggggccatgagaatgatgtcaactatgtgcaatttagtggttgtgctgtggctccaaaatcttcaacagctgatgctctgaaggaagatagctacccaaagtttaagaattcctggttttgtcatgacaatatagtaacctgctctcgcgatggtagtgcaattatatggactccaagatcacgtaaattccatgggaaatctggacgctggatgaaaggatatcatctgaaggttccacctcctccacttcctccacaacctcctcgaggaggcccacgtcaaaggtttcttccaacaccacggggtgttaatatgattatatggagcttggataatcgttttgtacttgccgctatcatggattgcaggatttgtgtttggaatgctgctgatggtagcttagtgcattgtttaactggtcacagtgaatcgtcttatgtcttggatgtccatcctttcaatcctcggattgctatgagcgctggctatgatgggaaaacaatcatctgggatatatgggagggtataccaatcaaagtgtacgaaatcgggagatttaagttggttgatggaaagttttcacaagatgggacatctattgtgctttcagatgatgttggccagatatattttctaaacacaggacaaggagagtctcaaaagaatgcaaaatacgaccagttcttccttggtgattatcgtcctcttattcgagataccaatggacatgttcttgatcaggagacgcagctacttcctcatcggaggaaccttcaggatcttctttgtgattcaagtatgattccgtatccagaacctgaccagacaatgtttcagcaacgcagacttggtgcattaggagttgaatggcgtccttcctcgataaagttttctgttggccctgattttagtttaggtcaagattatataatgcctcctttggctgatctggatagactgattgagccattgcctgagtttatagatgctatgtactgggaaccagaacacgaagttctgagtgacgacaatgattcagagtataatgctgaagtttcctctgatggggctagggcaagcccatgttccaactcttcaaatgaacttgagtgcagctccgaggacagtgacgttgaaaatattcacgaaagtagctatcattggaaaagaagaagaaaacatcctaaggtcaacgtctctacttcatctggaagacgtgataagaggattttggatgagaatgatagctcgaattctggaattaagagaaccaagaaccgaagaattgtcgtgaaggcttcaaaaagaaaacattctgatgtcaaagcatcacggccgcagagagcagcagctcaaaatgctcgatccttgctttctaaaatttctggaagctcttcggatgaagttgatgatgataatgattcatccaacagtgaatctgatagaagcatacccactttgcgacagttggacaaaccatctcagatgctggaatctctttcaaatgacaaacagaagaaaagattgattgtaaagatctctgttaagaagccagcagagtctatgggaagcaagggagatgtgataaatcaggctgatttagagcaactatcttccaaacctttggaggagaatcacagagtgattggtatatattccagagaacccgggtcaagttctgtagatgcaaaaggtgattcagggtgtcagagtattccctactctatgaatacgccacagagagaaaaggccgataatcagttgataagatcttcagatcaagaccagaatatgtgcaagtggagggaagagattcctgtttgtgaacctaccgaattaactgcgcctgagaacatagaagaagcccaaccattttatggggatgaagctgatgagattcttccaaagaaagttcgacgactgaggttaaagcttcggcatcccaacagtcctcgaaaactagaacctgatgaggtggcagatgatttggcagatggtggagatgggtttgcatccatagctccctctttcatgaatccgattatggattctgaacctgtgatagatagcgttagagattcttctgcacataactttgagtttggagaagctacagctgatgtgatacgtaggaaaagatccataagaagtgaatctagtacaagaaatagcgcattacgcataaggttgggctctggatctgtagacaaaataaagaaacaagggattccttccacaagcgtgtatgatgatgcatcacttgaagaatggccttctacctcaaaagctgggtccaggtctagatctgcaagcgtcagcaaaccaagtcttcatactgggataaggttgaatagtgtctcaggaaaaatctcatggttattgttgtctgaacacgaggaaggctgccgttatatacctcagctaggggatgaagttatttacttcaagcagggtcatcaagagttccttaaaactaaagaattaaatgacagggaccgatcaaggtaccttccccgaaacctaggagcagtagagatttgcaaagtcgagaaacttaactatgatacatatcctggttctggagatagctgctgcaaaatgaccctcagggttctggattcttcttcatcacatgcctcccgcaaagagtttcaactgacacttcctgagctcattaatttccctgattttattgtggagaagactcgatacgacgctgcaattcaaacaaactggaaaattggtaatgagtgccgtgtgtggtggagagacgcaaccggtgaaggcggggcttggtgggaaggtaggattgagtcttcacaagtaaaatccactgacttcccagagagtccatgggaaagatacagagttgtctatgaaacaggggaaacgagtcttcacagcccgtgggagtttgacaatcccgagtttccctgggaaaaatctaccatcgaagatgagagaagagagaaactgctttcattatttgctggactagtaaaatcaatcagcaagcatcaggatagttacgggatccaaaagctaaacgaagcagctcaaaagatggatttctgcaataggttcccggttccattataccctgagctgattcacgaaagactagagaatcagtactacagaagtattgaatcgtttaaacacgacgtggatgcaatgctctcaaatgcggagttgtatttcgttagaagtgcacatatgctttcgaagataaagcgactgcgagataaattgacaaaaacgttaagaaagctgatctga

SEQ ID NO: 96432 - protein, 1607 aa, Arabidopsis thaliana
  peptide (1)..(1607): Ceres Seq. ID no. 12733264
MDWIHKSTPFMEPSNLAKLVQGNVPLQPHDSHSSLTDLDMDLREVYFLILHFLSIGPCERTFGHLRDEILEKGLLPRRYHSWWSRSGIYSGRADDDGISLPLSYDNLIERYPHIEKDHLVKLLKQLILNPSFPSHMRVEGNAPNAADVPTLLGSGTFSLVDRSNSYSSTLSNMFLWIWDLKKSHICIEPDSGSKALHFRNLFFWLWQSLLGIMTCIGNSGEVAHIGEVKSRGNNIESQKARHVASYLRWPHMHADQVRGLSLREIGGGFRKHHRAPSILSACHAIAKPSTMVQKMQNIKKLRGHRNAVYCAIFDRSGRYVITGSDDRLVKIWSMETALCLASCRGHEGDITDLAVSSNNALVASASNDFVIRVWRLPDGMPISVLRGHTGAVTAIAFSPRQASVYQLLSSSDDGTCRIWDARYSQWLPRIYVPSPSDANTGSLEVSLLGESTFTSSNTGSTSNASQSHQILCCAYNANGTIFVTGSSDSNARVWSASKPNLDDAEQPTHELDVLRGHENDVNYVQFSGCAVAPKSSTADALKEDSYPKFKNSWFCHDNIVTCSRDGSAIIWTPRSRKFHGKSGRWMKGYHLKVPPPPLPPQPPRGGPRQRFLPTPRGVNMIIWSLDNRFVLAAIMDCRICVWNAADGSLVHCLTGHSESSYVLDVHPFNPRIAMSAGYDGKTIIWDIWEGIPIKVYEIGRFKLVDGKFSQDGTSIVLSDDVGQIYFLNTGQGESQKNAKYDQFFLGDYRPLIRDTNGHVLDQETQLLPHRRNLQDLLCDSSMIPYPEPDQTMFQQRRLGALGVEWRPSSIKFSVGPDFSLGQDYIMPPLADLDRLIEPLPEFIDAMYWEPEHEVLSDDNDSEYNAEVSSDGARASPCSNSSNELECSSEDSDVENIHESSYHWKRRRKHPKVNVSTSSGRRDKRILDENDSSNSGIKRTKNRRIVVKASKRKHSDVKASRPQRAAAQNARSLLSKISGSSSDEVDDDNDSSNSESDRSIPTLRQLDKPSQMLESLSNDKQKKRLIVKISVKKPAESMGSKGDVINQADLEQLSSKPLEENHRVIGIYSREPGSSSVDAKGDSGCQSIPYSMNTPQREKADNQLIRSSDQDQNMCKWREEIPVCEPTELTAPENIEEAQPFYGDEADEILPKKVRRLRLKLRHPNSPRKLEPDEVADDLADGGDGFASIAPSFMNPIMDSEPVIDSVRDSSAHNFEFGEATADVIRRKRSIRSESSTRNSALRIRLGSGSVDKIKKQGIPSTSVYDDASLEEWPSTSKAGSRSRSASVSKPSLHTGIRLNSVSGKISWLLLSEHEEGCRYIPQLGDEVIYFKQGHQEFLKTKELNDRDRSRYLPRNLGAVEICKVEKLNYDTYPGSGDSCCKMTLRVLDSSSSHASRKEFQLTLPELINFPDFIVEKTRYDAAIQTNWKIGNECRVWWRDATGEGGAWWEGRIESSQVKSTDFPESPWERYRVVYETGETSLHSPWEFDNPEFPWEKSTIEDERREKLLSLFAGLVKSISKHQDSYGIQKLNEAAQKMDFCNRFPVPLYPELIHERLENQYYRSIESFKHDVDAMLSNAELYFVRSAHMLSKIKRLRDKLTKTLRKLI

SEQ ID NO: 96433 - protein, 1597 aa, Arabidopsis thaliana
  peptide (1)..(1597): Ceres Seq. ID no. 12733265
MEPSNLAKLVQGNVPLQPHDSHSSLTDLDMDLREVYFLILHFLSIGPCERTFGHLRDEILEKGLLPRRYHSWWSRSGIYSGRADDDGISLPLSYDNLIERYPHIEKDHLVKLLKQLILNPSFPSHMRVEGNAPNAADVPTLLGSGTFSLVDRSNSYSSTLSNMFLWIWDLKKSHICIEPDSGSKALHFRNLFFWLWQSLLGIMTCIGNSGEVAHIGEVKSRGNNIESQKARHVASYLRWPHMHADQVRGLSLREIGGGFRKHHRAPSILSACHAIAKPSTMVQKMQNIKKLRGHRNAVYCAIFDRSGRYVITGSDDRLVKIWSMETALCLASCRGHEGDITDLAVSSNNALVASASNDFVIRVWRLPDGMPISVLRGHTGAVTAIAFSPRQASVYQLLSSSDDGTCRIWDARYSQWLPRIYVPSPSDANTGSLEVSLLGESTFTSSNTGSTSNASQSHQILCCAYNANGTIFVTGSSDSNARVWSASKPNLDDAEQPTHELDVLRGHENDVNYVQFSGCAVAPKSSTADALKEDSYPKFKNSWFCHDNIVTCSRDGSAIIWTPRSRKFHGKSGRWMKGYHLKVPPPPLPPQPPRGGPRQRFLPTPRGVNMIIWSLDNRFVLAAIMDCRICVWNAADGSLVHCLTGHSESSYVLDVHPFNPRIAMSAGYDGKTIIWDIWEGIPIKVYEIGRFKLVDGKFSQDGTSIVLSDDVGQIYFLNTGQGESQKNAKYDQFFLGDYRPLIRDTNGHVLDQETQLLPHRRNLQDLLCDSSMIPYPEPDQTMFQQRRLGALGVEWRPSSIKFSVGPDFSLGQDYIMPPLADLDRLIEPLPEFIDAMYWEPEHEVLSDDNDSEYNAEVSSDGARASPCSNSSNELECSSEDSDVENIHESSYHWKRRRKHPKVNVSTSSGRRDKRILDENDSSNSGIKRTKNRRIVVKASKRKHSDVKASRPQRAAAQNARSLLSKISGSSSDEVDDDNDSSNSESDRSIPTLRQLDKPSQMLESLSNDKQKKRLIVKISVKKPAESMGSKGDVINQADLEQLSSKPLEENHRVIGIYSREPGSSSVDAKGDSGCQSIPYSMNTPQREKADNQLIRSSDQDQNMCKWREEIPVCEPTELTAPENIEEAQPFYGDEADEILPKKVRRLRLKLRHPNSPRKLEPDEVADDLADGGDGFASIAPSFMNPIMDSEPVIDSVRDSSAHNFEFGEATADVIRRKRSIRSESSTRNSALRIRLGSGSVDKIKKQGIPSTSVYDDASLEEWPSTSKAGSRSRSASVSKPSLHTGIRLNSVSGKISWLLLSEHEEGCRYIPQLGDEVIYFKQGHQEFLKTKELNDRDRSRYLPRNLGAVEICKVEKLNYDTYPGSGDSCCKMTLRVLDSSSSHASRKEFQLTLPELINFPDFIVEKTRYDAAIQTNWKIGNECRVWWRDATGEGGAWWEGRIESSQVKSTDFPESPWERYRVVYETGETSLHSPWEFDNPEFPWEKSTIEDERREKLLSLFAGLVKSISKHQDSYGIQKLNEAAQKMDFCNRFPVPLYPELIHERLENQYYRSIESFKHDVDAMLSNAELYFVRSAHMLSKIKRLRDKLTKTLRKLI

SEQ ID NO: 96434 - protein, 1568 aa, Arabidopsis thaliana
  peptide (1)..(1568): Ceres Seq. ID no. 12733266
MDLREVYFLILHFLSIGPCERTFGHLRDEILEKGLLPRRYHSWWSRSGIYSGRADDDGISLPLSYDNLIERYPHIEKDHLVKLLKQLILNPSFPSHMRVEGNAPNAADVPTLLGSGTFSLVDRSNSYSSTLSNMFLWIWDLKKSHICIEPDSGSKALHFRNLFFWLWQSLLGIMTCIGNSGEVAHIGEVKSRGNNIESQKARHVASYLRWPHMHADQVRGLSLREIGGGFRKHHRAPSILSACHAIAKPSTMVQKMQNIKKLRGHRNAVYCAIFDRSGRYVITGSDDRLVKIWSMETALCLASCRGHEGDITDLAVSSNNALVASASNDFVIRVWRLPDGMPISVLRGHTGAVTAIAFSPRQASVYQLLSSSDDGTCRIWDARYSQWLPRIYVPSPSDANTGSLEVSLLGESTFTSSNTGSTSNASQSHQILCCAYNANGTIFVTGSSDSNARVWSASKPNLDDAEQPTHELDVLRGHENDVNYVQFSGCAVAPKSSTADALKEDSYPKFKNSWFCHDNIVTCSRDGSAIIWTPRSRKFHGKSGRWMKGYHLKVPPPPLPPQPPRGGPRQRFLPTPRGVNMIIWSLDNRFVLAAIMDCRICVWNAADGSLVHCLTGHSESSYVLDVHPFNPRIAMSAGYDGKTIIWDIWEGIPIKVYEIGRFKLVDGKFSQDGTSIVLSDDVGQIYFLNTGQGESQKNAKYDQFFLGDYRPLIRDTNGHVLDQETQLLPHRRNLQDLLCDSSMIPYPEPDQTMFQQRRLGALGVEWRPSSIKFSVGPDFSLGQDYIMPPLADLDRLIEPLPEFIDAMYWEPEHEVLSDDNDSEYNAEVSSDGARASPCSNSSNELECSSEDSDVENIHESSYHWKRRRKHPKVNVSTSSGRRDKRILDENDSSNSGIKRTKNRRIVVKASKRKHSDVKASRPQRAAAQNARSLLSKISGSSSDEVDDDNDSSNSESDRSIPTLRQLDKPSQMLESLSNDKQKKRLIVKISVKKPAESMGSKGDVINQADLEQLSSKPLEENHRVIGIYSREPGSSSVDAKGDSGCQSIPYSMNTPQREKADNQLIRSSDQDQNMCKWREEIPVCEPTELTAPENIEEAQPFYGDEADEILPKKVRRLRLKLRHPNSPRKLEPDEVADDLADGGDGFASIAPSFMNPIMDSEPVIDSVRDSSAHNFEFGEATADVIRRKRSIRSESSTRNSALRIRLGSGSVDKIKKQGIPSTSVYDDASLEEWPSTSKAGSRSRSASVSKPSLHTGIRLNSVSGKISWLLLSEHEEGCRYIPQLGDEVIYFKQGHQEFLKTKELNDRDRSRYLPRNLGAVEICKVEKLNYDTYPGSGDSCCKMTLRVLDSSSSHASRKEFQLTLPELINFPDFIVEKTRYDAAIQTNWKIGNECRVWWRDATGEGGAWWEGRIESSQVKSTDFPESPWERYRVVYETGETSLHSPWEFDNPEFPWEKSTIEDERREKLLSLFAGLVKSISKHQDSYGIQKLNEAAQKMDFCNRFPVPLYPELIHERLENQYYRSIESFKHDVDAMLSNAELYFVRSAHMLSKIKRLRDKLTKTLRKLI

SEQ ID NO: 96435 - DNA, 2002 bp, Arabidopsis thaliana
  misc_feature (1)..(2002): Ceres Seq. ID no. 12733271
  misc_feature (1)..(2002): Ortholog of  Ceres SEQ ID NO 13654290 as cited in SEQ ID NO 62197
  misc_feature (1)..(2002): Ortholog of  Ceres SEQ ID NO 14301924 as cited in SEQ ID NO 67731
acttcttttcgctttttgtttttgggattgttttcattgatcctttcaagatggagaaagtgaccaactcagacttgaaatcctctgttgatggtggcgttgttgatgtgtatggagaagattcagccaccattgagcacaacataactccttggtctctctctgtttctagtggatattcattgctgagagatcctcgctacaacaaaggacttgctttcactgagaaagagagagacactcattacttgcgtggtcttctccctccagttgttcttgatcaaaagcttcaggagaagaggctgttgaacaatatccgacaatatcaattcccattacaaaagtacatggctctgacagaacttcaggaaagaaacgagagactgttttacaagctattgatagataatgttgaggagctacttcctattgtttatactccaactgttggtgaagcttgtcagaaatttggaagtattttcaggcgacctcagggtttattcatcagtttaaaagacaagggaaagattctagatgtgttaaagaactggcctgaaaggaacatacaggttattgttgttactgacggtgaaaggattttaggattaggagatcttggatgtcaggggatgggtataccggttggtaagttggcgttatattcagcacttggaggtgttcgtccttcagcgtgtttacctgtcaccattgatgtgggaacaaacaatgagaaactgttgaatgatgagttctacataggactcaggcaaaagagagcaacgggacaggaatatagtgaactcttgaatgaattcatgagtgctgtgaaacagaactatggtgaaaaagttcttattcagtttgaagattttgctaatcataatgcctttgagttgcttgcaaaatacagcgatactcatctcgtcttcaacgatgatatacaggggacagcatcagttgttttagcaggattagtttccgcacagaagttaacgaatagcccacttgcagagcataccttcctctttcttggtgctggtgaagctggaactggaatagcagaactcatagctctctatatgtcaaaacagatgaatgcttcggtagaggaaagccgcaagaaaatctggcttgttgattccaagggattgattgttaactcccgcaaagattcacttcaagactttaagaaaccatgggctcatgaacatgaaccagtcaaagacctcttaggtgctatcaaggcaataaaaccgactgttctgattggatcttctggcgttggacggtcttttacaaaagaagtgatagaagccatgtcctccattaatgagagaccactgataatggctctctctaaccccacaacacaatctgaatgtacagccgaagaagcttatacttggagtaagggccgtgccatttttgctagtggaagcccttttgatccagttgagtatgaaggaaaggtgtttgtatctacacaggcgaacaatgcgtacatattcccgggctttggacttggtttggttatctctggagcaatacgggtacatgacgatatgcttctagctgctgctgaggcattagctggacaagtaagcaaagagaactatgagaaaggaatgatatatccttcattctcttccatccggaaaatatcagctcagattgcagccaatgtagcaactaaggcgtatgaactaggattggcagggcggcttccacggccgaaagatattgtcaaatgtgcagagagtagcatgtacagccccacataccgtctctaccgttgaaagttgaaactcaagagtctatactttgtgtgcttctcatcctttgttcagttattcccatgtctttctgtaatttccagtattaaattagtctttcaagttgagatttcaaacacatgccaagatctctcatttaactttgcaactctgaaagttaaagactatatgaagtgaatttgtttaatagaaaacgatgaaaatgttat

SEQ ID NO: 96436 - protein, 597 aa, Arabidopsis thaliana
  peptide (1)..(597): Ceres Seq. ID no. 12733272
FFSLFVFGIVFIDPFKMEKVTNSDLKSSVDGGVVDVYGEDSATIEHNITPWSLSVSSGYSLLRDPRYNKGLAFTEKERDTHYLRGLLPPVVLDQKLQEKRLLNNIRQYQFPLQKYMALTELQERNERLFYKLLIDNVEELLPIVYTPTVGEACQKFGSIFRRPQGLFISLKDKGKILDVLKNWPERNIQVIVVTDGERILGLGDLGCQGMGIPVGKLALYSALGGVRPSACLPVTIDVGTNNEKLLNDEFYIGLRQKRATGQEYSELLNEFMSAVKQNYGEKVLIQFEDFANHNAFELLAKYSDTHLVFNDDIQGTASVVLAGLVSAQKLTNSPLAEHTFLFLGAGEAGTGIAELIALYMSKQMNASVEESRKKIWLVDSKGLIVNSRKDSLQDFKKPWAHEHEPVKDLLGAIKAIKPTVLIGSSGVGRSFTKEVIEAMSSINERPLIMALSNPTTQSECTAEEAYTWSKGRAIFASGSPFDPVEYEGKVFVSTQANNAYIFPGFGLGLVISGAIRVHDDMLLAAAEALAGQVSKENYEKGMIYPSFSSIRKISAQIAANVATKAYELGLAGRLPRPKDIVKCAESSMYSPTYRLYR

SEQ ID NO: 96437 - protein, 581 aa, Arabidopsis thaliana
  peptide (1)..(581): Ceres Seq. ID no. 12733273
MEKVTNSDLKSSVDGGVVDVYGEDSATIEHNITPWSLSVSSGYSLLRDPRYNKGLAFTEKERDTHYLRGLLPPVVLDQKLQEKRLLNNIRQYQFPLQKYMALTELQERNERLFYKLLIDNVEELLPIVYTPTVGEACQKFGSIFRRPQGLFISLKDKGKILDVLKNWPERNIQVIVVTDGERILGLGDLGCQGMGIPVGKLALYSALGGVRPSACLPVTIDVGTNNEKLLNDEFYIGLRQKRATGQEYSELLNEFMSAVKQNYGEKVLIQFEDFANHNAFELLAKYSDTHLVFNDDIQGTASVVLAGLVSAQKLTNSPLAEHTFLFLGAGEAGTGIAELIALYMSKQMNASVEESRKKIWLVDSKGLIVNSRKDSLQDFKKPWAHEHEPVKDLLGAIKAIKPTVLIGSSGVGRSFTKEVIEAMSSINERPLIMALSNPTTQSECTAEEAYTWSKGRAIFASGSPFDPVEYEGKVFVSTQANNAYIFPGFGLGLVISGAIRVHDDMLLAAAEALAGQVSKENYEKGMIYPSFSSIRKISAQIAANVATKAYELGLAGRLPRPKDIVKCAESSMYSPTYRLYR

SEQ ID NO: 96438 - protein, 482 aa, Arabidopsis thaliana
  peptide (1)..(482): Ceres Seq. ID no. 12733274
MALTELQERNERLFYKLLIDNVEELLPIVYTPTVGEACQKFGSIFRRPQGLFISLKDKGKILDVLKNWPERNIQVIVVTDGERILGLGDLGCQGMGIPVGKLALYSALGGVRPSACLPVTIDVGTNNEKLLNDEFYIGLRQKRATGQEYSELLNEFMSAVKQNYGEKVLIQFEDFANHNAFELLAKYSDTHLVFNDDIQGTASVVLAGLVSAQKLTNSPLAEHTFLFLGAGEAGTGIAELIALYMSKQMNASVEESRKKIWLVDSKGLIVNSRKDSLQDFKKPWAHEHEPVKDLLGAIKAIKPTVLIGSSGVGRSFTKEVIEAMSSINERPLIMALSNPTTQSECTAEEAYTWSKGRAIFASGSPFDPVEYEGKVFVSTQANNAYIFPGFGLGLVISGAIRVHDDMLLAAAEALAGQVSKENYEKGMIYPSFSSIRKISAQIAANVATKAYELGLAGRLPRPKDIVKCAESSMYSPTYRLYR

SEQ ID NO: 96439 - DNA, 1173 bp, Arabidopsis thaliana
  misc_feature (1)..(1173): Ceres Seq. ID no. 12733290
  misc_feature (1)..(1173): Ortholog of  Ceres SEQ ID NO 13594402 as cited in SEQ ID NO 58196
atgaattcaccacaagaaatctccattctcttcttcttcatcatcttcttagactatgtatctgctcaatctcctcctcctcctaatctatacgcaacaagcgaccttttcaagccaagcttagctatcatcaccggagttttctccatcgtcttcactctcacctttgttctcctcgtctacgcgaaatgcttccacaatgacctccgatcagagaccgacagtgatggagaaagaatacgacatgatcgtctctggcaaggacttttcaatcggtcttcaagattctctggtcttgacaagaaagcaatcgaatctcttccctttttcagattctctgctttgaaaggattgaaacaagggcttgaatgttctgtttgtttgtctaaattcgaagatgttgagattcttaggcttttgcctaaatgcagacacgcttttcatattggttgtattgaccagtggcttgagcagcacgctacgtgtcctttgtgtagaaacagagtcaatattgaagacgacctctctgtgttgggtaatagcagcactagtcttaggatcttgaaccaatctgagacaagagaagaagactcgaggttggagatttacattgaacgcgaagaaggaactaatgacgggtcatcaagattcagcagtttccgaaagattctaaagaaatcgttgttgcttgagcgagaaggaaatgagaacatcgatgagaagaaacttatgcacaagttcaatcacaggatcgttgtttcggatgctgtgtttaagaaccgctggagtaatatcacttcatctgatttgacgtttttgacatcagaaatgctgaattcggtgtcaagcgacagattttcgtcggtggatcgagtgcatagaggtaacttgcgggacaaggaagatatggaaatgaaaagaatgttgattaagcacaaagactcatccagaagaacggtttctgagatcacgactgtttcaagagaaaaggcggttggaggaagctacagaggttcaaccgcgtccacttcgcagaattatgccgttactgcgaccacggaagaaagaagacggcggttatggctgccgatcgctagaagaacggctcagtggtttgttaacagagagaaaagtaatgacctaaacacgacacgccaaaatcttaatgtatag

SEQ ID NO: 96440 - protein, 390 aa, Arabidopsis thaliana
  peptide (1)..(390): Ceres Seq. ID no. 12733291
MNSPQEISILFFFIIFLDYVSAQSPPPPNLYATSDLFKPSLAIITGVFSIVFTLTFVLLVYAKCFHNDLRSETDSDGERIRHDRLWQGLFNRSSRFSGLDKKAIESLPFFRFSALKGLKQGLECSVCLSKFEDVEILRLLPKCRHAFHIGCIDQWLEQHATCPLCRNRVNIEDDLSVLGNSSTSLRILNQSETREEDSRLEIYIEREEGTNDGSSRFSSFRKILKKSLLLEREGNENIDEKKLMHKFNHRIVVSDAVFKNRWSNITSSDLTFLTSEMLNSVSSDRFSSVDRVHRGNLRDKEDMEMKRMLIKHKDSSRRTVSEITTVSREKAVGGSYRGSTASTSQNYAVTATTEERRRRLWLPIARRTAQWFVNREKSNDLNTTRQNLNV

SEQ ID NO: 96441 - DNA, 1206 bp, Arabidopsis thaliana
  misc_feature (1)..(1206): Ceres Seq. ID no. 12733308
  misc_feature (1)..(1206): Ortholog of  Ceres SEQ ID NO 13597334 as cited in SEQ ID NO 64244
atgaggtcatgcactaagcttatcctactgaattttttcacaataactctcatcttagttacggagagtcgaagaacaataccattgaaaaatgagaaacaagagctcaagaaactactcaaccatattaataaacccgcaataaaaagtttccaaacgaaacatggttatatattggactgcatcgacattcaaaagcagctcgcctttgatcatcctttgctcaaaaaccattctattcagttgaagcctacaatcatacctaaatggacaagagataaaaacactcaaaaatcaagttctctgccatttcgacaagatgaagacataagttgtccacatggaacagtgattattaaaagaactacacttgaagatcttatacaaattcaacgtttgaaatatttaggggttaagtatacaacttcaaaagacaaggatttcctcaatatgaccggtcgtcattttgctatagctgaatactatagagacaactatggagcaacgggaaacataaatttatgggatccacctgtcaaccctgatcaatttagtcttgcaagtatatatgtcgagaacggttttagagacagtttacagagcatttcagctggatggatagtgtccccgaaactaaatcagaataatagtggcttatttacatattggaccgcagatggacatgagaagacaggttgctacaatacagtatgtccagggtttgtacaagtgagtagcaagctcgcacttggaactcttgccagaccaacttccacttatgatggcgaacaatactatttacaagccatcatttatcaggataatattacaggaaactggtggtttttgataaagaacgagccaattgggtattggccaaaatcattgtttcatgttcaaggtttagcttatggagcaagtcgtgtgttttggggaggagaagttttcagtgcactgagacagagtacaagcccactcatgggaagtggacatttcccaaaagaaggtttcaaaaaggcagcttttgtgaacggccttaaagtgatagatcgtgaaatagaaaaaattagaagtccaccagttaaagatttaagattattcgcaaacagcccaaaatgttataaagtcgaaacaaaaacaggggtcggtgaggagtggtctagtgcaattttctatggaggaccaggaggatgcaccattacttaa

SEQ ID NO: 96442 - protein, 401 aa, Arabidopsis thaliana
  peptide (1)..(401): Ceres Seq. ID no. 12733309
MRSCTKLILLNFFTITLILVTESRRTIPLKNEKQELKKLLNHINKPAIKSFQTKHGYILDCIDIQKQLAFDHPLLKNHSIQLKPTIIPKWTRDKNTQKSSSLPFRQDEDISCPHGTVIIKRTTLEDLIQIQRLKYLGVKYTTSKDKDFLNMTGRHFAIAEYYRDNYGATGNINLWDPPVNPDQFSLASIYVENGFRDSLQSISAGWIVSPKLNQNNSGLFTYWTADGHEKTGCYNTVCPGFVQVSSKLALGTLARPTSTYDGEQYYLQAIIYQDNITGNWWFLIKNEPIGYWPKSLFHVQGLAYGASRVFWGGEVFSALRQSTSPLMGSGHFPKEGFKKAAFVNGLKVIDREIEKIRSPPVKDLRLFANSPKCYKVETKTGVGEEWSSAIFYGGPGGCTIT

SEQ ID NO: 96443 - protein, 251 aa, Arabidopsis thaliana
  peptide (1)..(251): Ceres Seq. ID no. 12733310
MTGRHFAIAEYYRDNYGATGNINLWDPPVNPDQFSLASIYVENGFRDSLQSISAGWIVSPKLNQNNSGLFTYWTADGHEKTGCYNTVCPGFVQVSSKLALGTLARPTSTYDGEQYYLQAIIYQDNITGNWWFLIKNEPIGYWPKSLFHVQGLAYGASRVFWGGEVFSALRQSTSPLMGSGHFPKEGFKKAAFVNGLKVIDREIEKIRSPPVKDLRLFANSPKCYKVETKTGVGEEWSSAIFYGGPGGCTIT

SEQ ID NO: 96444 - DNA, 1473 bp, Arabidopsis thaliana
  misc_feature (1)..(1473): Ceres Seq. ID no. 12733311
  misc_feature (1)..(1473): Ortholog of  Ceres SEQ ID NO 14308698 as cited in SEQ ID NO 58663
atgcatcattttgtccctgacttcgataccgatgatgattatgtcaacaaccataattcttctttgaatcatcttcctagaaaatccattactactatgggtgaagatgatgatcttatggagcttttatggcagaacggtcaagttgttgttcaaaaccagagacttcacaccaagaaaccttcttcttctccaccgaagcttcttccttctatggatcctcagcagcaaccttcttcagatcagaatctttttattcaagaagatgaaatgacttcttggcttcattatcctctccgtgacgatgatttctgctcagatcttctcttctccgccgcacctactgcgacggctaccgcgacggtgagtcaagtcaccgccgcgagaccgccagtatcttcgacgaatgagtcgaggccgccggtgaggaacttcatgaatttctcgaggctgagaggggattttaataacggtagaggtggtgaatctggaccgttgctttcgaaggcggttgtgagagaatctacgcaggtaagtcctagcgcaacaccgtcggcggcggcgagtgaatccggtttaacacggcggacggatggtactgacagttccgccgtagctggaggcggcgcgtataatcggaagggaaaagcagtggctatgacggcgccggcgatcgagataaccggtacatcgtcatctgtagtgtcaaagagcgaaatcgaaccggagaagacgaacgtcgatgataggaaacgaaaagagagagaagccaccactactgatgaaactgaatcccgtagcgaggaaacaaaacaagcacgtgtatcaacaacatctaccaagagatctcgtgctgctgaagttcataatctctctgaaagaaaacggagagataggatcaatgagagaatgaaagctttgcaagaacttatacctcgctgcaacaagtcagataaagcttcgatgctagatgaagctattgagtacatgaaatctcttcagcttcaaatacagatgatgtcaatgggatgtggaatgatgccaatgatgtatccgggcatgcaacagtacatgcctcatatggcgatgggtatgggtatgaaccagcctattcctcctccttccttcatgccattccccaacatgttagccgctcaaagacctttgcctacacaaactcacatggccgggtcaggaccgcaataccctgttcatgcttctgacccgtcaagagtctttgtaccgaaccagcagtatgatccaacctcgggccagcctcagtatccagctggttacacggatccatatcagcagttccgcggtctccacccgacccaaccacctcagtttcagaatcaagcaacatcgtacccaagttcgagcagggtgagtagtagtaaggaatctgaggatcacggaaaccacacaacagaatcaagcaacatcgtatccaagttcgagcagggtgagtag

SEQ ID NO: 96445 - protein, 490 aa, Arabidopsis thaliana
  peptide (1)..(490): Ceres Seq. ID no. 12733312
MHHFVPDFDTDDDYVNNHNSSLNHLPRKSITTMGEDDDLMELLWQNGQVVVQNQRLHTKKPSSSPPKLLPSMDPQQQPSSDQNLFIQEDEMTSWLHYPLRDDDFCSDLLFSAAPTATATATVSQVTAARPPVSSTNESRPPVRNFMNFSRLRGDFNNGRGGESGPLLSKAVVRESTQVSPSATPSAAASESGLTRRTDGTDSSAVAGGGAYNRKGKAVAMTAPAIEITGTSSSVVSKSEIEPEKTNVDDRKRKEREATTTDETESRSEETKQARVSTTSTKRSRAAEVHNLSERKRRDRINERMKALQELIPRCNKSDKASMLDEAIEYMKSLQLQIQMMSMGCGMMPMMYPGMQQYMPHMAMGMGMNQPIPPPSFMPFPNMLAAQRPLPTQTHMAGSGPQYPVHASDPSRVFVPNQQYDPTSGQPQYPAGYTDPYQQFRGLHPTQPPQFQNQATSYPSSSRVSSSKESEDHGNHTTESSNIVSKFEQGE

SEQ ID NO: 96446 - protein, 458 aa, Arabidopsis thaliana
  peptide (1)..(458): Ceres Seq. ID no. 12733313
MGEDDDLMELLWQNGQVVVQNQRLHTKKPSSSPPKLLPSMDPQQQPSSDQNLFIQEDEMTSWLHYPLRDDDFCSDLLFSAAPTATATATVSQVTAARPPVSSTNESRPPVRNFMNFSRLRGDFNNGRGGESGPLLSKAVVRESTQVSPSATPSAAASESGLTRRTDGTDSSAVAGGGAYNRKGKAVAMTAPAIEITGTSSSVVSKSEIEPEKTNVDDRKRKEREATTTDETESRSEETKQARVSTTSTKRSRAAEVHNLSERKRRDRINERMKALQELIPRCNKSDKASMLDEAIEYMKSLQLQIQMMSMGCGMMPMMYPGMQQYMPHMAMGMGMNQPIPPPSFMPFPNMLAAQRPLPTQTHMAGSGPQYPVHASDPSRVFVPNQQYDPTSGQPQYPAGYTDPYQQFRGLHPTQPPQFQNQATSYPSSSRVSSSKESEDHGNHTTESSNIVSKFEQGE

SEQ ID NO: 96447 - protein, 451 aa, Arabidopsis thaliana
  peptide (1)..(451): Ceres Seq. ID no. 12733314
MELLWQNGQVVVQNQRLHTKKPSSSPPKLLPSMDPQQQPSSDQNLFIQEDEMTSWLHYPLRDDDFCSDLLFSAAPTATATATVSQVTAARPPVSSTNESRPPVRNFMNFSRLRGDFNNGRGGESGPLLSKAVVRESTQVSPSATPSAAASESGLTRRTDGTDSSAVAGGGAYNRKGKAVAMTAPAIEITGTSSSVVSKSEIEPEKTNVDDRKRKEREATTTDETESRSEETKQARVSTTSTKRSRAAEVHNLSERKRRDRINERMKALQELIPRCNKSDKASMLDEAIEYMKSLQLQIQMMSMGCGMMPMMYPGMQQYMPHMAMGMGMNQPIPPPSFMPFPNMLAAQRPLPTQTHMAGSGPQYPVHASDPSRVFVPNQQYDPTSGQPQYPAGYTDPYQQFRGLHPTQPPQFQNQATSYPSSSRVSSSKESEDHGNHTTESSNIVSKFEQGE

SEQ ID NO: 96448 - DNA, 3993 bp, Arabidopsis thaliana
  misc_feature (1)..(3993): Ceres Seq. ID no. 12733315
  misc_feature (1)..(3993): Ortholog of  Ceres SEQ ID NO 12618306 as cited in SEQ ID NO 65538
  misc_feature (1)..(3993): Ortholog of  Ceres SEQ ID NO 13658673 as cited in SEQ ID NO 66630
atggaggtttcatctccgacgattatagtggagagagctggttcgtatgcttggatgcataagagttggagagttagggaagagtttgcgcgtactgttacatcggcgattggtcttttcgcatctacggaacttcctcttcagcgtgttatacttgctccgatacttcagatgttaaatgaccctaatcaagcagttagggaagctgctattttgtgcattgaggagatgtatatgcaaggtgggtctcaatttcgagaagagcttcaacgtcaccatcttccatcgtatatggtgaaggacattaatgctagactagaacgtattgagccacaactgcgttctacagatggccgtagtgcccaccatgttgttaatgaggtgaaggcatcaagtgtcaatcccaaaaagagcagtcccagggcaaaggctcctacgagggagaactctttatttgggggagatgccgacatcactgaaaaacccattgagccaatcaaagtgtactcagagaaggagttaatacgagaatttgagaaaattgctgcaacactcgtcccagagaaagactggtcaatgcgtatttcagctatgcggagggttgaaggacttgttgcaggaggtgcgactgattactcctgctttcgaggtctcctgaagcaacttgttggtcctttaagtactcaattagctgaccggagatctaccattgttaagcaggcctgtcatctcttgtgtctcttatcaaaagagctactgggagattttgaggcatgcgctgagacgtttattccagtgcttttcaagctggttgtgattactgtgcttgtaattgcagaatctgctgataactgcataaaaacgatgctgcgtaactgcaaagctgcccgtgtacttcctcgcatagctgaatcagcaaaacatgaccgtaatgcaattctgcgagcaagatgttgtgaatatgcattgttaacacttgaacattggcctgatgctccagaaattcaacgatcagttgatttatatgaagatctgattagatgctgtgttgcagatgctatgagtgaggtgcgggcaactgctagaatgtgctacagaatgtttgcaaaaacttggccggatcgttctcgccggttgttttcgtcctttgaccctgtcattcaaaggctaataaatgaagaagatggtggaattcataggagacacgcctcaccatctgtccgtgagagacattcccagccttcattttctcagacgtctgctccttctaacctacctggctatggaacatcagctatagtcgctatggatagaagttcaaatttatcatctggaggatctctttcttctgggttactcctttcgcaatcaaaggatgtcaataaaggttctgaacgtagtctggaaagtgtgttacaatcaagcaagcagaaggtcagtgcaattgaaagtatgctccgaggactgcatatatctgatagacaaaatcctgcagcccttcgttcaagtagtttggatctaggagttgaccctccatcgtctcgtgatcctcctttccatgctgttgctccagcatccaatagtcacacaagtagcgcagctgctgaatcaacacatagtatcaacaaaggcagtaatcgcaatggtggccttggtttgtcagatatcatcacccaaattcaagcttcaaaggactcaggaagatcatcttaccgtggcaatctgttgtccgagtctcatcctactttttcatccttgaccgctaaacggggctcagagagaaatgagagaagttctcttgaggaaagcaatgatgccagagaggtgaggcggtttatggctggtcattttgaccgacagcagatggatactgcttatagagatttgactttcagggaatcaaacgctagccatgttcccaatttccagaggccacttttgaggaagaatgtagggggaagaatgtctgcaggccggaggaggagttttgatgatagccaactgcaaattggtgacatatcaaattttgttgatggtccagcttccctgaacgaggcccttaacgacggactgaactcaagttctgattggtgtgccagagttgcagcttttaattttctccaaactctgctgcagcaaggcccaaaaggtgctcaagaagtaattcaaagttttgagaaagtaatgaaactatttctccggcatttggatgatcctcaccacaaggtcgcacaagcagcactgtcgacacttgcagatcttataccatcttgccgaaagccttttgagagctacatggaaagagtcctaccccatgtgttttcacggctaattgaccctaaagaagtagttagacaaccttgctcctcaaccttggaaattgtcagcaaaacctacagtgtggattcccttttacctgcattgcttcgttcactggatgaacagagatcaccaaaggctaaattagctgtgattgaatttgccatcaactccttcaacaggtacgctggtaaccctgaaatttcgggtaatagtggcatcttaaagttgtggctggcaaagttgacgccattaacccgcgacaaaaataccaagttgaaagaagcttccattacttgcatcatatctgtttacaatcattatgattctgcgggactgctaaattacattcttagtttgtcggttgaggagcaaaactctctgagaagagccctcaaacaatatactccccgcatcgaggtggacctgttaaactatatgcagagtaaaaaggaaaaacagagaattaagtcttatgacccatctgatgccattgggacatcatctgaggaaggatatgctggtgcctccaagaagaatatattccttggccggtattctgggggttctattgacagtgatagtggcaggaagtggagttcttcccaggagccaacaatgatcactggtggtgttggtcaaaatgtttccagtggaacccaggaaaagctgtatcagaacgttagaactgggatcagttcagctagtgatctgttgaaccccaaggattctgattacacatttgcttcagctggtcagaattcgatatcaagaactagccccaatggaagctcagaaaacatcgaaatcttggatgacttatctccaccacatttggagaaaaatggtctaaatctgacaagcgttgattccttggaaggaagacatgaaaatgaggtctcccgcgaattagatttaggtcactacatgctcacatctattaaggtcaacacaacaccggaatctggacctagcattcctcagattctacatatgatcaacgggagtgatggaagcccttcttctagcaagaaatctggactccagcaattaattgaagcctctgtagctaacgaggaatcagtttggaccaagtacttcaatcaaattttgacggttgttcttgaagtgctcgatgacgaagatttttcaatcaaagagcttgctctttcattgatttctgaaatgctaaagagccagaaagatgccatggaagactctgttgaaatagtgatcgaaaagctgcttcatgtctcaaaggacaccgttccaaaagtttccactgaagctgagcaatgtttgaccacagtcttgtcccaatacgatcctttcagatgcttaagcgttattgtcccattattggtgacggaagatgagaaaactcttgtcgcttgcataaattgtttaacgaagcttgtgggtaggctctcgcaagaggaattaatggatcaattgtcgtcttttttgcctgcggtttttgaagcatttgggagccaaagcgcggatgtccgcaagacagtggtgttctgtctagtagacatatatataatgcttgggaaagcatttttgccgtatttggaaggtctaaacagcacgcaggttcgtctagtgaccatctatgcaaaccggatctcgcaggctagaaacggtgcccctatcgacgcagacacctga

SEQ ID NO: 96449 - protein, 1330 aa, Arabidopsis thaliana
  peptide (1)..(1330): Ceres Seq. ID no. 12733316
MEVSSPTIIVERAGSYAWMHKSWRVREEFARTVTSAIGLFASTELPLQRVILAPILQMLNDPNQAVREAAILCIEEMYMQGGSQFREELQRHHLPSYMVKDINARLERIEPQLRSTDGRSAHHVVNEVKASSVNPKKSSPRAKAPTRENSLFGGDADITEKPIEPIKVYSEKELIREFEKIAATLVPEKDWSMRISAMRRVEGLVAGGATDYSCFRGLLKQLVGPLSTQLADRRSTIVKQACHLLCLLSKELLGDFEACAETFIPVLFKLVVITVLVIAESADNCIKTMLRNCKAARVLPRIAESAKHDRNAILRARCCEYALLTLEHWPDAPEIQRSVDLYEDLIRCCVADAMSEVRATARMCYRMFAKTWPDRSRRLFSSFDPVIQRLINEEDGGIHRRHASPSVRERHSQPSFSQTSAPSNLPGYGTSAIVAMDRSSNLSSGGSLSSGLLLSQSKDVNKGSERSLESVLQSSKQKVSAIESMLRGLHISDRQNPAALRSSSLDLGVDPPSSRDPPFHAVAPASNSHTSSAAAESTHSINKGSNRNGGLGLSDIITQIQASKDSGRSSYRGNLLSESHPTFSSLTAKRGSERNERSSLEESNDAREVRRFMAGHFDRQQMDTAYRDLTFRESNASHVPNFQRPLLRKNVGGRMSAGRRRSFDDSQLQIGDISNFVDGPASLNEALNDGLNSSSDWCARVAAFNFLQTLLQQGPKGAQEVIQSFEKVMKLFLRHLDDPHHKVAQAALSTLADLIPSCRKPFESYMERVLPHVFSRLIDPKEVVRQPCSSTLEIVSKTYSVDSLLPALLRSLDEQRSPKAKLAVIEFAINSFNRYAGNPEISGNSGILKLWLAKLTPLTRDKNTKLKEASITCIISVYNHYDSAGLLNYILSLSVEEQNSLRRALKQYTPRIEVDLLNYMQSKKEKQRIKSYDPSDAIGTSSEEGYAGASKKNIFLGRYSGGSIDSDSGRKWSSSQEPTMITGGVGQNVSSGTQEKLYQNVRTGISSASDLLNPKDSDYTFASAGQNSISRTSPNGSSENIEILDDLSPPHLEKNGLNLTSVDSLEGRHENEVSRELDLGHYMLTSIKVNTTPESGPSIPQILHMINGSDGSPSSSKKSGLQQLIEASVANEESVWTKYFNQILTVVLEVLDDEDFSIKELALSLISEMLKSQKDAMEDSVEIVIEKLLHVSKDTVPKVSTEAEQCLTTVLSQYDPFRCLSVIVPLLVTEDEKTLVACINCLTKLVGRLSQEELMDQLSSFLPAVFEAFGSQSADVRKTVVFCLVDIYIMLGKAFLPYLEGLNSTQVRLVTIYANRISQARNGAPIDADT

SEQ ID NO: 96450 - protein, 1312 aa, Arabidopsis thaliana
  peptide (1)..(1312): Ceres Seq. ID no. 12733317
MHKSWRVREEFARTVTSAIGLFASTELPLQRVILAPILQMLNDPNQAVREAAILCIEEMYMQGGSQFREELQRHHLPSYMVKDINARLERIEPQLRSTDGRSAHHVVNEVKASSVNPKKSSPRAKAPTRENSLFGGDADITEKPIEPIKVYSEKELIREFEKIAATLVPEKDWSMRISAMRRVEGLVAGGATDYSCFRGLLKQLVGPLSTQLADRRSTIVKQACHLLCLLSKELLGDFEACAETFIPVLFKLVVITVLVIAESADNCIKTMLRNCKAARVLPRIAESAKHDRNAILRARCCEYALLTLEHWPDAPEIQRSVDLYEDLIRCCVADAMSEVRATARMCYRMFAKTWPDRSRRLFSSFDPVIQRLINEEDGGIHRRHASPSVRERHSQPSFSQTSAPSNLPGYGTSAIVAMDRSSNLSSGGSLSSGLLLSQSKDVNKGSERSLESVLQSSKQKVSAIESMLRGLHISDRQNPAALRSSSLDLGVDPPSSRDPPFHAVAPASNSHTSSAAAESTHSINKGSNRNGGLGLSDIITQIQASKDSGRSSYRGNLLSESHPTFSSLTAKRGSERNERSSLEESNDAREVRRFMAGHFDRQQMDTAYRDLTFRESNASHVPNFQRPLLRKNVGGRMSAGRRRSFDDSQLQIGDISNFVDGPASLNEALNDGLNSSSDWCARVAAFNFLQTLLQQGPKGAQEVIQSFEKVMKLFLRHLDDPHHKVAQAALSTLADLIPSCRKPFESYMERVLPHVFSRLIDPKEVVRQPCSSTLEIVSKTYSVDSLLPALLRSLDEQRSPKAKLAVIEFAINSFNRYAGNPEISGNSGILKLWLAKLTPLTRDKNTKLKEASITCIISVYNHYDSAGLLNYILSLSVEEQNSLRRALKQYTPRIEVDLLNYMQSKKEKQRIKSYDPSDAIGTSSEEGYAGASKKNIFLGRYSGGSIDSDSGRKWSSSQEPTMITGGVGQNVSSGTQEKLYQNVRTGISSASDLLNPKDSDYTFASAGQNSISRTSPNGSSENIEILDDLSPPHLEKNGLNLTSVDSLEGRHENEVSRELDLGHYMLTSIKVNTTPESGPSIPQILHMINGSDGSPSSSKKSGLQQLIEASVANEESVWTKYFNQILTVVLEVLDDEDFSIKELALSLISEMLKSQKDAMEDSVEIVIEKLLHVSKDTVPKVSTEAEQCLTTVLSQYDPFRCLSVIVPLLVTEDEKTLVACINCLTKLVGRLSQEELMDQLSSFLPAVFEAFGSQSADVRKTVVFCLVDIYIMLGKAFLPYLEGLNSTQVRLVTIYANRISQARNGAPIDADT

SEQ ID NO: 96451 - protein, 1273 aa, Arabidopsis thaliana
  peptide (1)..(1273): Ceres Seq. ID no. 12733318
MLNDPNQAVREAAILCIEEMYMQGGSQFREELQRHHLPSYMVKDINARLERIEPQLRSTDGRSAHHVVNEVKASSVNPKKSSPRAKAPTRENSLFGGDADITEKPIEPIKVYSEKELIREFEKIAATLVPEKDWSMRISAMRRVEGLVAGGATDYSCFRGLLKQLVGPLSTQLADRRSTIVKQACHLLCLLSKELLGDFEACAETFIPVLFKLVVITVLVIAESADNCIKTMLRNCKAARVLPRIAESAKHDRNAILRARCCEYALLTLEHWPDAPEIQRSVDLYEDLIRCCVADAMSEVRATARMCYRMFAKTWPDRSRRLFSSFDPVIQRLINEEDGGIHRRHASPSVRERHSQPSFSQTSAPSNLPGYGTSAIVAMDRSSNLSSGGSLSSGLLLSQSKDVNKGSERSLESVLQSSKQKVSAIESMLRGLHISDRQNPAALRSSSLDLGVDPPSSRDPPFHAVAPASNSHTSSAAAESTHSINKGSNRNGGLGLSDIITQIQASKDSGRSSYRGNLLSESHPTFSSLTAKRGSERNERSSLEESNDAREVRRFMAGHFDRQQMDTAYRDLTFRESNASHVPNFQRPLLRKNVGGRMSAGRRRSFDDSQLQIGDISNFVDGPASLNEALNDGLNSSSDWCARVAAFNFLQTLLQQGPKGAQEVIQSFEKVMKLFLRHLDDPHHKVAQAALSTLADLIPSCRKPFESYMERVLPHVFSRLIDPKEVVRQPCSSTLEIVSKTYSVDSLLPALLRSLDEQRSPKAKLAVIEFAINSFNRYAGNPEISGNSGILKLWLAKLTPLTRDKNTKLKEASITCIISVYNHYDSAGLLNYILSLSVEEQNSLRRALKQYTPRIEVDLLNYMQSKKEKQRIKSYDPSDAIGTSSEEGYAGASKKNIFLGRYSGGSIDSDSGRKWSSSQEPTMITGGVGQNVSSGTQEKLYQNVRTGISSASDLLNPKDSDYTFASAGQNSISRTSPNGSSENIEILDDLSPPHLEKNGLNLTSVDSLEGRHENEVSRELDLGHYMLTSIKVNTTPESGPSIPQILHMINGSDGSPSSSKKSGLQQLIEASVANEESVWTKYFNQILTVVLEVLDDEDFSIKELALSLISEMLKSQKDAMEDSVEIVIEKLLHVSKDTVPKVSTEAEQCLTTVLSQYDPFRCLSVIVPLLVTEDEKTLVACINCLTKLVGRLSQEELMDQLSSFLPAVFEAFGSQSADVRKTVVFCLVDIYIMLGKAFLPYLEGLNSTQVRLVTIYANRISQARNGAPIDADT

SEQ ID NO: 96452 - DNA, 1824 bp, Arabidopsis thaliana
  misc_feature (1)..(1824): Ceres Seq. ID no. 12733326
  misc_feature (1)..(1824): Ortholog of  Ceres SEQ ID NO 15176887 as cited in SEQ ID NO 58804
  misc_feature (1)..(1824): Ortholog of  Ceres SEQ ID NO 15174867 as cited in SEQ ID NO 67357
aaatcaatcagagagagagcttctgagacataaacatcaattcaaatcgacgcaagcaaagaaagcaaaatggaaaatggaagcgggaaggtgttgaagccgatggactcagagcaattgagagagtacggacatctgatggttgatttcattgctgattactacaaaaccatcgaagatttccctgttcttagccaagttcagcctggttatcttcataagcttttgcctgattctgcacctgaccaccctgaaactctggaccaagttcttgatgatgttcgagcaaagatattgcctggagtaacgcattggcaaagcccgagtttctttgcttattatccttctaacagcagtgttgctgggttcttgggtgagatgttgagtgctggtcttggcattgttggttttagttgggttacttctccagctgccacagagctagaaatgatcgttcttgattgggttgctaaacttctcaacctacccgagcagtttatgtccaaaggaaatggaggtggagttatacaagggtcagctagtgaagctgttcttgttgttctgattgctgcacgcgacaaggttttaagaagcgttggcaaaaacgcgcttgagaagctcgttgtctactcctctgaccagactcattcagctttacagaaggcttgccagattgctggaatccatccagagaattgcagggtgctgacaacagactcttctacaaattacgctctgcgtccagaatcgcttcaagaagctgtttctagggatcttgaagctggattgattccattcttcttatgtgctaatgttgggaccacttcttcaaccgcagttgatccattagctgcactggggaagattgctaatagcaatggaatttggtttcacgtggatgcagcatatgctggaagtgcctgtatatgtccagagtatcggcaatacattgacggtgtagaaactgcagactcttttaacatgaatgctcacaaatggttcctcactaacttcgattgttcccttctttgggtaaaggatcaagattctcttacattagctctttcaacaaatccagagtttctcaaaaacaaggcctctcaggcaaacttggttgttgattacaaagattggcaaatccctctcggacgaagattcagatcattgaaactatggatggttttaaggctctatggatctgagaccttgaagagctatataagaaaccatatcaaactggctaaagaattcgaacaacttgtctctcaagatcctaacttcgagattgtcacacctcggatctttgctcttgtctgtttccgcctcgtgcctgtgaaagacgaagaaaagaagtgtaataaccgaaaccgtgaactcctagacgcagtgaactcttcagggaaactcttcatgtcgcacactgctttatcggggaaaatcgtactacgttgcgcaataggagcgccattgacggaggagaagcacgttaaggaggcgtggaagattattcaggaagaagcatcttacttgcttcacaagtaaatatgataaaacagtaaaagaataaaacggtttttgccaacaaaacgaagcacttcggtttggtttggtttaatttgataatataataataaaacagaaaattgcttaagtaagacttatcaacttcggtttgatttcggtacactttagtaaggtgatctttcttgtgtgtattttatcctctattttttttttttaccaattgtgtgtattttatctatttggtttgggtttattttgtggttaattaatgtaagcaatgataataaaatgttctatttt

SEQ ID NO: 96453 - protein, 490 aa, Arabidopsis thaliana
  peptide (1)..(490): Ceres Seq. ID no. 12733327
MENGSGKVLKPMDSEQLREYGHLMVDFIADYYKTIEDFPVLSQVQPGYLHKLLPDSAPDHPETLDQVLDDVRAKILPGVTHWQSPSFFAYYPSNSSVAGFLGEMLSAGLGIVGFSWVTSPAATELEMIVLDWVAKLLNLPEQFMSKGNGGGVIQGSASEAVLVVLIAARDKVLRSVGKNALEKLVVYSSDQTHSALQKACQIAGIHPENCRVLTTDSSTNYALRPESLQEAVSRDLEAGLIPFFLCANVGTTSSTAVDPLAALGKIANSNGIWFHVDAAYAGSACICPEYRQYIDGVETADSFNMNAHKWFLTNFDCSLLWVKDQDSLTLALSTNPEFLKNKASQANLVVDYKDWQIPLGRRFRSLKLWMVLRLYGSETLKSYIRNHIKLAKEFEQLVSQDPNFEIVTPRIFALVCFRLVPVKDEEKKCNNRNRELLDAVNSSGKLFMSHTALSGKIVLRCAIGAPLTEEKHVKEAWKIIQEEASYLLHK

SEQ ID NO: 96454 - protein, 479 aa, Arabidopsis thaliana; identical to SEQ ID NO: 88107
  peptide (1)..(479): Ceres Seq. ID no. 12733328

SEQ ID NO: 96455 - protein, 467 aa, Arabidopsis thaliana; identical to SEQ ID NO: 88108
  peptide (1)..(467): Ceres Seq. ID no. 12733329

SEQ ID NO: 96456 - DNA, 1803 bp, Arabidopsis thaliana
  misc_feature (1)..(1803): Ceres Seq. ID no. 12733333
  misc_feature (1)..(1803): Ortholog of  Ceres SEQ ID NO 14310024 as cited in SEQ ID NO 20634
  misc_feature (1)..(1803): Ortholog of  Ceres SEQ ID NO 15177184 as cited in SEQ ID NO 58157
atggagaagggaaatggaaaaaatcagactaatcgaatctgtttgttggttgctttgtcactctttttctgggcattgttgttgtacttccattttgttgtcttagggactagtaacattgataaacagctccaattgcaacctagttatgctcaatctcagccatcatcagtctctcttcgtgttgataaattccctatagagcctcatgcagctccatcgaaaccacctcccaaagagcctttagttactatcgataagccaatactccctcctgcaccagtagccaattctagttccacctttaagccacctagaattgttgagagcgggaagaaacaggagttttcgtttataagagccttgaagacagtagacaacaagagtgacccttgtggagggaagtacatttatgttcacaatctaccctcaaagttcaatgaggatatgcttagagactgtaagaagcttagtctctggactaacatgtgtaagttcacaaccaatgctggccttgggccgccgcttgagaatgttgaaggtgtcttctctgatgaaggttggtatgcgactaatcagtttgctgttgatgtgatattcagcaaccggatgaagcagtacaaatgtttgacaaatgattcttcccttgctgctgccatctttgtgccgttctatgctggattcgacattgctaggtatctgtggggatacaatatctcgagaagggatgctgcttcgcttgagttggtcgattggctcatgaagcggcctgagtgggatataatgaggggaaaagatcatttccttgtggcgggtaggataacgtgggattttaggagattgtctgaagaagaaactgattggggcaacaagcttctcttcttaccggctgccaagaacatgtctatgcttgtggttgagtcgagcccatggaatgctaatgattttgggatcccgtacccaacctacttccacccagcaaaggactcagaggtttttgaatggcaagaccggatgagaaacctggaaaggaagtggcttttctcgtttgcaggagccccacgacctgacaatccgaaatctatcagagggcagatcattgatcaatgtcgaaactcaaatgttggcaaattattagaatgcgattttggggagagcaaatgccatgcaccaagcagcattatgcaaatgtttcaaagctctctcttctgcctgcagccacagggagactcttacacccgaagatcggcatttgactcaatgcttgccggttgtataccggtcttcttccatccgggttcagcctacacgcaatacacgtggcatctacccaagaactacacaacctactcggtattcatccccgaggatgatgttcggaagagaaacataagcatcgaggagcgactcctccagattccagccaagcaggtcaagataatgagagagaatgtcatcaacctcatcccaaggctgatctacgcagacccgagatcagaactggagacgcagaaagatgcatttgatgtctcggtacaggctgtgatagacaaggtgactcggttaaggaagaacatgatcgagggccgaaccgagtatgactacttcgtggaggagaacagctggaagtatgcgttgctggaggaaggccaacgggaagcagggggccatgtgtgggacccgttcttctccaaaccaaagcccggagaagatggcagcagcgatggtaatggaggcacgactatttcagcagatgcagctaagaattcatggaagagtgagcagagagataagacacagtga

SEQ ID NO: 96457 - protein, 600 aa, Arabidopsis thaliana
  peptide (1)..(600): Ceres Seq. ID no. 12733334
MEKGNGKNQTNRICLLVALSLFFWALLLYFHFVVLGTSNIDKQLQLQPSYAQSQPSSVSLRVDKFPIEPHAAPSKPPPKEPLVTIDKPILPPAPVANSSSTFKPPRIVESGKKQEFSFIRALKTVDNKSDPCGGKYIYVHNLPSKFNEDMLRDCKKLSLWTNMCKFTTNAGLGPPLENVEGVFSDEGWYATNQFAVDVIFSNRMKQYKCLTNDSSLAAAIFVPFYAGFDIARYLWGYNISRRDAASLELVDWLMKRPEWDIMRGKDHFLVAGRITWDFRRLSEEETDWGNKLLFLPAAKNMSMLVVESSPWNANDFGIPYPTYFHPAKDSEVFEWQDRMRNLERKWLFSFAGAPRPDNPKSIRGQIIDQCRNSNVGKLLECDFGESKCHAPSSIMQMFQSSLFCLQPQGDSYTRRSAFDSMLAGCIPVFFHPGSAYTQYTWHLPKNYTTYSVFIPEDDVRKRNISIEERLLQIPAKQVKIMRENVINLIPRLIYADPRSELETQKDAFDVSVQAVIDKVTRLRKNMIEGRTEYDYFVEENSWKYALLEEGQREAGGHVWDPFFSKPKPGEDGSSDGNGGTTISADAAKNSWKSEQRDKTQ

SEQ ID NO: 96458 - protein, 451 aa, Arabidopsis thaliana
  peptide (1)..(451): Ceres Seq. ID no. 12733335
MLRDCKKLSLWTNMCKFTTNAGLGPPLENVEGVFSDEGWYATNQFAVDVIFSNRMKQYKCLTNDSSLAAAIFVPFYAGFDIARYLWGYNISRRDAASLELVDWLMKRPEWDIMRGKDHFLVAGRITWDFRRLSEEETDWGNKLLFLPAAKNMSMLVVESSPWNANDFGIPYPTYFHPAKDSEVFEWQDRMRNLERKWLFSFAGAPRPDNPKSIRGQIIDQCRNSNVGKLLECDFGESKCHAPSSIMQMFQSSLFCLQPQGDSYTRRSAFDSMLAGCIPVFFHPGSAYTQYTWHLPKNYTTYSVFIPEDDVRKRNISIEERLLQIPAKQVKIMRENVINLIPRLIYADPRSELETQKDAFDVSVQAVIDKVTRLRKNMIEGRTEYDYFVEENSWKYALLEEGQREAGGHVWDPFFSKPKPGEDGSSDGNGGTTISADAAKNSWKSEQRDKTQ

SEQ ID NO: 96459 - protein, 438 aa, Arabidopsis thaliana
  peptide (1)..(438): Ceres Seq. ID no. 12733336
MCKFTTNAGLGPPLENVEGVFSDEGWYATNQFAVDVIFSNRMKQYKCLTNDSSLAAAIFVPFYAGFDIARYLWGYNISRRDAASLELVDWLMKRPEWDIMRGKDHFLVAGRITWDFRRLSEEETDWGNKLLFLPAAKNMSMLVVESSPWNANDFGIPYPTYFHPAKDSEVFEWQDRMRNLERKWLFSFAGAPRPDNPKSIRGQIIDQCRNSNVGKLLECDFGESKCHAPSSIMQMFQSSLFCLQPQGDSYTRRSAFDSMLAGCIPVFFHPGSAYTQYTWHLPKNYTTYSVFIPEDDVRKRNISIEERLLQIPAKQVKIMRENVINLIPRLIYADPRSELETQKDAFDVSVQAVIDKVTRLRKNMIEGRTEYDYFVEENSWKYALLEEGQREAGGHVWDPFFSKPKPGEDGSSDGNGGTTISADAAKNSWKSEQRDKTQ

SEQ ID NO: 96460 - DNA, 1791 bp, Arabidopsis thaliana
  misc_feature (1)..(1791): Ceres Seq. ID no. 12733341
  misc_feature (1)..(1791): Ortholog of  Ceres SEQ ID NO 14310556 as cited in SEQ ID NO 54965
atggattctgcaaagggttggtttcagaagcggcagatgcgtggaggatccagatataaaggtgcttcaggtggtgctggtggaggtggaagtaatggctctgccgatgagcacaacgtcgaaactgatgaagaagctgtttcaaacactaccaaacagaaagttgcagcagctaaacagtacattgagaatcattacaaagagcagatgaagattctacaagagaggaaagaaaggcgaagcatgttagagcagaaactggcagatgctgacgtgtctgaagaagatcaaaataatcttctcaagtttttagagaagaaggagacagagtacatgcgccttcaacgccataagttaggtgttgctgattttgatttgcttacaatgattgggaaaggtgcatttggggaggttagagtttgtagagaaaagacgacaggtcaagtttatgcaatgaaaaagctcaagaaggctgagatgcttcgcagaggccaggttgaacatgtgagagcagagaggaacttacttgcggaagtggacagtaactacatagtgaagctctactgttcatttcaagacgatgaccatctttaccttgtgatggagtatttgcctggtggagatatgatgactcttcttatgcgcaaagatactttgacagaagaggaggccaagttctatgtcgctgagacagttctcgctatcgagtccatccacaggcacaattacatccacagggatatcaagccagacaacttgctgcttgacagatatgggcatctaagactttcagattttggattgtgtaaacctttggactgcagtgccattggagaaaacgatttttcaaacaattccaatggatctacggagcaagaggctggatcaactgctccaaaacgcacacagcaggaacaacttgaacattggcagaggaacaggagaacgctagcttattccacagttggcacaccagattacatagctccagaagttctgttgaagaaaggctatgggatggagtgtgactggtggtctcttggtgctataatgtacgaaatgctagtaggatatccgccgttttattcagatgatcctatgtcaacctgtagaaagatagtaaactggaaaagtcatttgaagtttccagaggaagcaatattgtcaagggaagcaaaggatcttattaacagtctgttgtgcagtgtcagacgtaggcttggttccaaaggtgctgatgaattaaaggctcatacatggtttgaaactgttgattgggatacaatattcgatatggatgcagcttttgttccagaggtcaatgacgatttagacactcagaattttgagaagtttgacgagtctgaatcggaaactcagacatcatccaagtctggcccgtggaggaagatgttgtcgtcaaaagacataaacttcgtagggtatacatacaagaactttgagattgttaatgattaccaagttcctggaatgggtacacacttacttgatcactgcggagttgaagaagaagaaaaagtcgacgcgaccaatggtcaagtcactcttcggtacccaacaacctcgtttactggtccaaaatttggctatttccatgtgaatcttgaatataatggatcatcggagacctcagattcatcggaaacaacgtcgagaccgccttgtgatcgacctcctcctgctcctccggttgttcagggaagctttctgaaacttctaccaccagaacttgaagtgagaccaaagcaagaaggatctgaagcttgctaa

SEQ ID NO: 96461 - protein, 596 aa, Arabidopsis thaliana
  peptide (1)..(596): Ceres Seq. ID no. 12733342
MDSAKGWFQKRQMRGGSRYKGASGGAGGGGSNGSADEHNVETDEEAVSNTTKQKVAAAKQYIENHYKEQMKILQERKERRSMLEQKLADADVSEEDQNNLLKFLEKKETEYMRLQRHKLGVADFDLLTMIGKGAFGEVRVCREKTTGQVYAMKKLKKAEMLRRGQVEHVRAERNLLAEVDSNYIVKLYCSFQDDDHLYLVMEYLPGGDMMTLLMRKDTLTEEEAKFYVAETVLAIESIHRHNYIHRDIKPDNLLLDRYGHLRLSDFGLCKPLDCSAIGENDFSNNSNGSTEQEAGSTAPKRTQQEQLEHWQRNRRTLAYSTVGTPDYIAPEVLLKKGYGMECDWWSLGAIMYEMLVGYPPFYSDDPMSTCRKIVNWKSHLKFPEEAILSREAKDLINSLLCSVRRRLGSKGADELKAHTWFETVDWDTIFDMDAAFVPEVNDDLDTQNFEKFDESESETQTSSKSGPWRKMLSSKDINFVGYTYKNFEIVNDYQVPGMGTHLLDHCGVEEEEKVDATNGQVTLRYPTTSFTGPKFGYFHVNLEYNGSSETSDSSETTSRPPCDRPPPAPPVVQGSFLKLLPPELEVRPKQEGSEAC

SEQ ID NO: 96462 - protein, 584 aa, Arabidopsis thaliana
  peptide (1)..(584): Ceres Seq. ID no. 12733343
MRGGSRYKGASGGAGGGGSNGSADEHNVETDEEAVSNTTKQKVAAAKQYIENHYKEQMKILQERKERRSMLEQKLADADVSEEDQNNLLKFLEKKETEYMRLQRHKLGVADFDLLTMIGKGAFGEVRVCREKTTGQVYAMKKLKKAEMLRRGQVEHVRAERNLLAEVDSNYIVKLYCSFQDDDHLYLVMEYLPGGDMMTLLMRKDTLTEEEAKFYVAETVLAIESIHRHNYIHRDIKPDNLLLDRYGHLRLSDFGLCKPLDCSAIGENDFSNNSNGSTEQEAGSTAPKRTQQEQLEHWQRNRRTLAYSTVGTPDYIAPEVLLKKGYGMECDWWSLGAIMYEMLVGYPPFYSDDPMSTCRKIVNWKSHLKFPEEAILSREAKDLINSLLCSVRRRLGSKGADELKAHTWFETVDWDTIFDMDAAFVPEVNDDLDTQNFEKFDESESETQTSSKSGPWRKMLSSKDINFVGYTYKNFEIVNDYQVPGMGTHLLDHCGVEEEEKVDATNGQVTLRYPTTSFTGPKFGYFHVNLEYNGSSETSDSSETTSRPPCDRPPPAPPVVQGSFLKLLPPELEVRPKQEGSEAC

SEQ ID NO: 96463 - protein, 527 aa, Arabidopsis thaliana
  peptide (1)..(527): Ceres Seq. ID no. 12733344
MKILQERKERRSMLEQKLADADVSEEDQNNLLKFLEKKETEYMRLQRHKLGVADFDLLTMIGKGAFGEVRVCREKTTGQVYAMKKLKKAEMLRRGQVEHVRAERNLLAEVDSNYIVKLYCSFQDDDHLYLVMEYLPGGDMMTLLMRKDTLTEEEAKFYVAETVLAIESIHRHNYIHRDIKPDNLLLDRYGHLRLSDFGLCKPLDCSAIGENDFSNNSNGSTEQEAGSTAPKRTQQEQLEHWQRNRRTLAYSTVGTPDYIAPEVLLKKGYGMECDWWSLGAIMYEMLVGYPPFYSDDPMSTCRKIVNWKSHLKFPEEAILSREAKDLINSLLCSVRRRLGSKGADELKAHTWFETVDWDTIFDMDAAFVPEVNDDLDTQNFEKFDESESETQTSSKSGPWRKMLSSKDINFVGYTYKNFEIVNDYQVPGMGTHLLDHCGVEEEEKVDATNGQVTLRYPTTSFTGPKFGYFHVNLEYNGSSETSDSSETTSRPPCDRPPPAPPVVQGSFLKLLPPELEVRPKQEGSEAC

SEQ ID NO: 96464 - DNA, 744 bp, Arabidopsis thaliana
  misc_feature (1)..(744): Ceres Seq. ID no. 12733355
  misc_feature (1)..(744): Ortholog of  Ceres SEQ ID NO 15173410 as cited in SEQ ID NO 61812
atgtcctcgtcactattctcttatgttgtcctcttaatcttccttttcaccatcccatacattcaaagccagcccactgctccagctccaaccactgaaaaaagtcccatcaatctcacagcgattcttgaagctggtcaccaatttaccacattaatacaactcctcaacacaactcaagtcgggtttcaggtaagtgtacaactcaatagctctgaccaagggatgactatatttgccccaacagataacgcattcaacaagcttaaacccggaaccctaaacagtctgacatatcaacaacaaatccagctcatgctctaccatatcattccaaaatactactctctaagcgatcttctcttagcaagtaatcccgttagaactcaggctacgggacaagacggaggtgtttttgggttaaatttcacaggacaagcacaaagcaaccaagtgaatgtttccaccggtgttgttgagactcggatcaataatgcattaaggcaacagtttcctctagcagtttacgtggtggacagtgtgttgttgccggaggagttattcggaacaaagaccactcccaccggagctcctgccccgaaatcctcaacttcatcgtctgatgccgattctccagctgctgatgatgagcacaaatctgccggatcaagcgtgaagaggacaagtctagggattgttgttagctttgcattgttttgttgctcggttatatatattgcttga

SEQ ID NO: 96465 - protein, 247 aa, Arabidopsis thaliana
  peptide (1)..(247): Ceres Seq. ID no. 12733356
MSSSLFSYVVLLIFLFTIPYIQSQPTAPAPTTEKSPINLTAILEAGHQFTTLIQLLNTTQVGFQVSVQLNSSDQGMTIFAPTDNAFNKLKPGTLNSLTYQQQIQLMLYHIIPKYYSLSDLLLASNPVRTQATGQDGGVFGLNFTGQAQSNQVNVSTGVVETRINNALRQQFPLAVYVVDSVLLPEELFGTKTTPTGAPAPKSSTSSSDADSPAADDEHKSAGSSVKRTSLGIVVSFALFCCSVIYIA

SEQ ID NO: 96466 - protein, 172 aa, Arabidopsis thaliana
  peptide (1)..(172): Ceres Seq. ID no. 12733357
MTIFAPTDNAFNKLKPGTLNSLTYQQQIQLMLYHIIPKYYSLSDLLLASNPVRTQATGQDGGVFGLNFTGQAQSNQVNVSTGVVETRINNALRQQFPLAVYVVDSVLLPEELFGTKTTPTGAPAPKSSTSSSDADSPAADDEHKSAGSSVKRTSLGIVVSFALFCCSVIYIA

SEQ ID NO: 96467 - protein, 142 aa, Arabidopsis thaliana
  peptide (1)..(142): Ceres Seq. ID no. 12733358
MLYHIIPKYYSLSDLLLASNPVRTQATGQDGGVFGLNFTGQAQSNQVNVSTGVVETRINNALRQQFPLAVYVVDSVLLPEELFGTKTTPTGAPAPKSSTSSSDADSPAADDEHKSAGSSVKRTSLGIVVSFALFCCSVIYIA

SEQ ID NO: 96468 - DNA, 1473 bp, Arabidopsis thaliana
  misc_feature (1)..(1473): Ceres Seq. ID no. 12733377
  misc_feature (1)..(1473): Ortholog of  Ceres SEQ ID NO 14309674 as cited in SEQ ID NO 55707
  misc_feature (1)..(1473): Ortholog of  Ceres SEQ ID NO 13658728 as cited in SEQ ID NO 66270
  misc_feature (1)..(1473): Ortholog of  Ceres SEQ ID NO 12465428 as cited in SEQ ID NO 68898
atgaagcatcttcttcttcttcgtcttgttcttccaaagccaaattacattctcagaaggagcttccttttccactccggcaagaccacaccatcgccgttggacccttacgacactctgcagcgtcgggtcgcgagatccggagatccctctgcttcgattatcaaagtgttggatggatggcttgatcaagggaatctggttaagacttcggagctccatagcatcatcaagatgcttcgaaagttcagccgtttctctcacgctctccagatatcagattggatgagtgagcatagagttcatgagatctctgaaggagatgttgcgattcggcttgatttgattgctaaagttggtggtttgggagaagcagagaagtttttcgaaactattcctatggagaggaggaactaccatctctacggtgctctcttgaactgctatgcgagcaagaaggtgttgcacaaagctgagcaagtgtttcaggagatgaaagagcttggcttccttaaaggttgtcttccctacaatgtgatgctgaatctctatgtccggactgggaaatacacaatggttgagaagctgctgcgcgaaatggaggatgagactgtgaagccagacatcttcacagtgaacacgcggttgcatgcttattcggttgtatctgatgtagaggggatggagaagtttcttatgcgttgtgaggctgaccaggggcttcatttggactggcgcacttacgccgatacagcgaatggctacataaaggctggattaactgaaaaggctctagagatgctgcgtaaatcagagcagatggtgaatgctcagaaaagaaagcatgcctatgaggttctcatgtcattctatggagctgcaggtaagaaagaagaggtgtaccgtctctggagcttgtacaaggagctggacgggttctacaacactggatacataagcgtgatcagtgcactcttgaagatggatgacatagaggaggtggagaaaattatggaagagtgggaagctggacactcccttttcgatattcggatcccacacttgttaataacgggttactgcaagaaaggaatgatggagaaggcagaggaagtagtaaatatattggtccagaagtggagagtggaggatacaagcacatgggagcgtttagctcttgggtacaagatggcgggtaaaatggagaaggcggtggagaaatggaagagagcaatagaggtgagcaagccagggtggagaccacaccaggttgtgctgatgagctgtgtggattatctggagggtcaaagagacatggagggtttgagaaagattttgagactgttaagcgagcgaggacacatttcatacgatcagctactgtacgacatgaacggtgctggactgagttggaagatagtcgatgcaatgggaaaaggtcgatacgttgaggaaagagaagtacgaatctag

SEQ ID NO: 96469 - protein, 490 aa, Arabidopsis thaliana
  peptide (1)..(490): Ceres Seq. ID no. 12733378
MKHLLLLRLVLPKPNYILRRSFLFHSGKTTPSPLDPYDTLQRRVARSGDPSASIIKVLDGWLDQGNLVKTSELHSIIKMLRKFSRFSHALQISDWMSEHRVHEISEGDVAIRLDLIAKVGGLGEAEKFFETIPMERRNYHLYGALLNCYASKKVLHKAEQVFQEMKELGFLKGCLPYNVMLNLYVRTGKYTMVEKLLREMEDETVKPDIFTVNTRLHAYSVVSDVEGMEKFLMRCEADQGLHLDWRTYADTANGYIKAGLTEKALEMLRKSEQMVNAQKRKHAYEVLMSFYGAAGKKEEVYRLWSLYKELDGFYNTGYISVISALLKMDDIEEVEKIMEEWEAGHSLFDIRIPHLLITGYCKKGMMEKAEEVVNILVQKWRVEDTSTWERLALGYKMAGKMEKAVEKWKRAIEVSKPGWRPHQVVLMSCVDYLEGQRDMEGLRKILRLLSERGHISYDQLLYDMNGAGLSWKIVDAMGKGRYVEEREVRI

SEQ ID NO: 96470 - protein, 412 aa, Arabidopsis thaliana
  peptide (1)..(412): Ceres Seq. ID no. 12733379
MLRKFSRFSHALQISDWMSEHRVHEISEGDVAIRLDLIAKVGGLGEAEKFFETIPMERRNYHLYGALLNCYASKKVLHKAEQVFQEMKELGFLKGCLPYNVMLNLYVRTGKYTMVEKLLREMEDETVKPDIFTVNTRLHAYSVVSDVEGMEKFLMRCEADQGLHLDWRTYADTANGYIKAGLTEKALEMLRKSEQMVNAQKRKHAYEVLMSFYGAAGKKEEVYRLWSLYKELDGFYNTGYISVISALLKMDDIEEVEKIMEEWEAGHSLFDIRIPHLLITGYCKKGMMEKAEEVVNILVQKWRVEDTSTWERLALGYKMAGKMEKAVEKWKRAIEVSKPGWRPHQVVLMSCVDYLEGQRDMEGLRKILRLLSERGHISYDQLLYDMNGAGLSWKIVDAMGKGRYVEEREVRI

SEQ ID NO: 96471 - protein, 395 aa, Arabidopsis thaliana
  peptide (1)..(395): Ceres Seq. ID no. 12733380
MSEHRVHEISEGDVAIRLDLIAKVGGLGEAEKFFETIPMERRNYHLYGALLNCYASKKVLHKAEQVFQEMKELGFLKGCLPYNVMLNLYVRTGKYTMVEKLLREMEDETVKPDIFTVNTRLHAYSVVSDVEGMEKFLMRCEADQGLHLDWRTYADTANGYIKAGLTEKALEMLRKSEQMVNAQKRKHAYEVLMSFYGAAGKKEEVYRLWSLYKELDGFYNTGYISVISALLKMDDIEEVEKIMEEWEAGHSLFDIRIPHLLITGYCKKGMMEKAEEVVNILVQKWRVEDTSTWERLALGYKMAGKMEKAVEKWKRAIEVSKPGWRPHQVVLMSCVDYLEGQRDMEGLRKILRLLSERGHISYDQLLYDMNGAGLSWKIVDAMGKGRYVEEREVRI

SEQ ID NO: 96472 - DNA, 1546 bp, Arabidopsis thaliana
  misc_feature (1)..(1546): Ceres Seq. ID no. 12733381
  misc_feature (1)..(1546): Ortholog of  Ceres SEQ ID NO 14313413 as cited in SEQ ID NO 58766
  misc_feature (1)..(1546): Ortholog of  Ceres SEQ ID NO 15171109 as cited in SEQ ID NO 59576
gtcgtttagtctttcttctagaacacaaaatcgattttgagctttaacggaaagagacgacaatggcgggtcggttcttcgataacgtgatgcctgatttcgtgaaggagaaggaaagtgtatctggaggagatacgcttaggaatctgcttgctatgccgtattcgtctctctcgcagcagctcaagcggtccgctttggatctcaaagaaaccgtagtgattgaaacttggggttttagtggacagactgttgaagacttcactctttactctggaactcttggagctgcgtttttactctttagagcttatcaggttactggcaacgccaacgatctttccctctgcttggaaatcgtcaaagcttgtgatactgcttctgcttcctcaggggatgttacttttctctgtggccgagctggtgtttgtggtcttggcgctgttgcagctaagctttctggtgaggaagatttgctcaattactatttgggacaatttcgtctgataagactatctagtgatcttcctaacgagcttttgtatggaagagttggttatctatgggcttgtctgtttatcaacaagtacatcggcaaagaaactttgtcttcagataccatccgcgaagttgctcaggagattatcaaggaaggaagatcaatggctaagaaaggaagctcaccgcttatgtttgaatggtatggcaaaaggtactggggtgcagcacatggacttgctggtattatgcacgtattgatggatgttcagctgaagcctgacgaggcagaagatgtgaagggaacccttaagtatatgatcaagaatcggtttccaagtggaaattaccctgctagtgaagaggataagaagaaagatattcttgtgcattggtgtcatggagcccctgggattgccctcacacttgggaaggcggctgaggtttttggggagagagagtttctggaagcgagtgcagctgcagcagaggtggtttggaaccgtggattgctcaagcgcgtggggatctgtcatggaataagtgggaacgcatatgtttttcttgcgctttacagagctacgggaaggagtgagtatctataccgtgcaaaagcctttgccagtttcctgcttgatagaggccccaagttactctcaaaaggagaaatgcatggaggtgatagtccttattccttgtttgaaggcgttgcaggcatggcctatctcttccttgacatggtcgacccatctgaagccaggttcccaggttacgagctttaaacttcttgatcgataacaatctccgtccatcaaatccttctctcttgttatggaggatgcacaaggtaagagagggtgtgagtgtatgtgtgtttagtactagcaaaatcttcttgttgtttgatggtgaataagtttgagttgatatatagccgaactgtccggagagcctgtaactttatgagtgttagaaggagagtgtgaaacatgaagtgaacacaaaggttctgtcatttctgtatatattgtcttttgagttgagtatc

SEQ ID NO: 96473 - protein, 405 aa, Arabidopsis thaliana
  peptide (1)..(405): Ceres Seq. ID no. 12733382
MAGRFFDNVMPDFVKEKESVSGGDTLRNLLAMPYSSLSQQLKRSALDLKETVVIETWGFSGQTVEDFTLYSGTLGAAFLLFRAYQVTGNANDLSLCLEIVKACDTASASSGDVTFLCGRAGVCGLGAVAAKLSGEEDLLNYYLGQFRLIRLSSDLPNELLYGRVGYLWACLFINKYIGKETLSSDTIREVAQEIIKEGRSMAKKGSSPLMFEWYGKRYWGAAHGLAGIMHVLMDVQLKPDEAEDVKGTLKYMIKNRFPSGNYPASEEDKKKDILVHWCHGAPGIALTLGKAAEVFGEREFLEASAAAAEVVWNRGLLKRVGICHGISGNAYVFLALYRATGRSEYLYRAKAFASFLLDRGPKLLSKGEMHGGDSPYSLFEGVAGMAYLFLDMVDPSEARFPGYEL

SEQ ID NO: 96474 - protein, 396 aa, Arabidopsis thaliana
  peptide (1)..(396): Ceres Seq. ID no. 12733383
MPDFVKEKESVSGGDTLRNLLAMPYSSLSQQLKRSALDLKETVVIETWGFSGQTVEDFTLYSGTLGAAFLLFRAYQVTGNANDLSLCLEIVKACDTASASSGDVTFLCGRAGVCGLGAVAAKLSGEEDLLNYYLGQFRLIRLSSDLPNELLYGRVGYLWACLFINKYIGKETLSSDTIREVAQEIIKEGRSMAKKGSSPLMFEWYGKRYWGAAHGLAGIMHVLMDVQLKPDEAEDVKGTLKYMIKNRFPSGNYPASEEDKKKDILVHWCHGAPGIALTLGKAAEVFGEREFLEASAAAAEVVWNRGLLKRVGICHGISGNAYVFLALYRATGRSEYLYRAKAFASFLLDRGPKLLSKGEMHGGDSPYSLFEGVAGMAYLFLDMVDPSEARFPGYEL

SEQ ID NO: 96475 - protein, 374 aa, Arabidopsis thaliana
  peptide (1)..(374): Ceres Seq. ID no. 12733384
MPYSSLSQQLKRSALDLKETVVIETWGFSGQTVEDFTLYSGTLGAAFLLFRAYQVTGNANDLSLCLEIVKACDTASASSGDVTFLCGRAGVCGLGAVAAKLSGEEDLLNYYLGQFRLIRLSSDLPNELLYGRVGYLWACLFINKYIGKETLSSDTIREVAQEIIKEGRSMAKKGSSPLMFEWYGKRYWGAAHGLAGIMHVLMDVQLKPDEAEDVKGTLKYMIKNRFPSGNYPASEEDKKKDILVHWCHGAPGIALTLGKAAEVFGEREFLEASAAAAEVVWNRGLLKRVGICHGISGNAYVFLALYRATGRSEYLYRAKAFASFLLDRGPKLLSKGEMHGGDSPYSLFEGVAGMAYLFLDMVDPSEARFPGYEL

SEQ ID NO: 96476 - DNA, 2588 bp, Arabidopsis thaliana
  misc_feature (1)..(2588): Ceres Seq. ID no. 12733404
  misc_feature (1)..(2588): Ortholog of  Ceres SEQ ID NO 13584744 as cited in SEQ ID NO 69137
gatgagatctgggagagacaacaacatctgcttcctgggttttctctcctttgcccttatctcccttccctccttgtcacttgctcttaccaatcctgacgatgttgcggctattaacagtctcttccttgcactggagtctcctcttctccccggttgggttgcatctggaggtgacccatgtggtgagagctggcaaggtgttctatgtaatgcttcccaagtagaaacaataattctcatcagtgccaatcttggaggagagcttggtgttggcttaaacatgtttacctctcttaaagcaatggattttagcaacaatcacattggaggaagtatcccatccacgttgcctgtttcattgcagaacttgtttctttcaggtaacaactttacaggaaccatcccagaatctctttcctccttaaaatctttgtctgtcatgtccttgaacaataaccttttgtctggcaagatacccgatgtctttcaagaccttggccttatgatcaatatagatttgtctagcaacaatctgagtggaccattacctccttccatgcagaatctttcgactcttacatccttgcttttgcagaacaatcatctttcaggagagcttgatgttcttcaagatcttcccctcaaggacttgaacgttgagaacaacctcttcaatggacctataccagaaaagttgttgagtataccaaatttcataaaaggcggtaatctgtttaacgtcactattgctccatcgccttcacctgaaacacctccaagtccaacatcacctaagcggccattttttggaccaccatctcccaatgcatcagctggtcatggtcaggcacacgtgagatcacccccttctgatcatcacccatcccgaccaactcctcaagggaaagaagactcatttaccagtaaaagaattatttggatatccattcttggggctttttcatttgtggttttggccttggtatgtctactttgtgggagaaaatgtctcagaaaaagagaagacagtgaacaactatccaaaccgcacctaactagtgaatacgggagggcaagggagggttctcgctcaaatgcttctatgcttcctccatccaatacattcaataaagacaaggaggctagaccaaaagagagagtaggaggtgcttcgaagctgcatggtggggcagaaagaagcgtaggaagtgaatcaaagcaggagagtcatgagatagacatgaatggcaatgctatggatttgatgcatccctcatcaattccacctatcaaaagggtcatcgcaaaggcgactgaacctgctgaagcatctctaaaaaggacaaccagtaaatcccatggtcccttgacagctgtgaagcatttcacggtcgcatctctacaacaacacacaaatagcttttcccacgaaaaccttattggaacaggcatgcttgggagtgtctacagggcagagcttccaggtggaaagctcttcgctgtgaggaagttggataagaagtctcccaatcatgaagaagaaggcaaatttttggagctagtgaataatatagatagaatacggcatgccaatattgtccaactcgtgggtttctgttctgagcacagtcaaaggcttctgatccatgagtattgtaggaacggtacactgcacgatttgctgcatattgatgacaggttgaagattgaactatcatggaatgtccgtgttaggattgcactagaagctgcaaaagctctggagtatctgcatgagatctgtgatccacctagtatccaccgaaatttcaagtctgcaaatattctccttgatgacgatataagggtgcatgtctcagactgcggcttggctcctctaatctcctcaggtgccgtaagtcagttatcgggtcaactcttagcggcctacggatatggagctccagagtttgaatatgggatctatacaatgaaatgtgatgtctacagttttggagtagttatgttagaactcttgacaggtcgcaagtcatatgacaagaaacgggatagaggagagcaatttctggtgagatgggcaatcccacagcttcacgacattgatgcattagcgaagatggtcgacccatccctcaagggtgactatccagccaagtcgctgtcacactttgctgatgtgatatcacgttgtgttcagtcggaaccagagtacaggccactaatgtcagaagtggttcaagacctctcagacatgatccagagagaacatcggagaaatgactcaaatggggataatcagtatacgggaagaagatagtttaaggagattgtctcttatacaaaacaagtggtattattagtattctttagaaagtcgaaaccattgttctttaacgagccttgcttgtattattatatatgtagagtgtgtgagtgtgacacaggcacacagcttactctgctttggccttttagtctatccacaacacccccaatgtatttccaccggattaggattagcaatctctgagtttttccaaaaatccatagtactgctacttcaaattttgaatcttttttctttc

SEQ ID NO: 96477 - protein, 772 aa, Arabidopsis thaliana
  peptide (1)..(772): Ceres Seq. ID no. 12733405
MRSGRDNNICFLGFLSFALISLPSLSLALTNPDDVAAINSLFLALESPLLPGWVASGGDPCGESWQGVLCNASQVETIILISANLGGELGVGLNMFTSLKAMDFSNNHIGGSIPSTLPVSLQNLFLSGNNFTGTIPESLSSLKSLSVMSLNNNLLSGKIPDVFQDLGLMINIDLSSNNLSGPLPPSMQNLSTLTSLLLQNNHLSGELDVLQDLPLKDLNVENNLFNGPIPEKLLSIPNFIKGGNLFNVTIAPSPSPETPPSPTSPKRPFFGPPSPNASAGHGQAHVRSPPSDHHPSRPTPQGKEDSFTSKRIIWISILGAFSFVVLALVCLLCGRKCLRKREDSEQLSKPHLTSEYGRAREGSRSNASMLPPSNTFNKDKEARPKERVGGASKLHGGAERSVGSESKQESHEIDMNGNAMDLMHPSSIPPIKRVIAKATEPAEASLKRTTSKSHGPLTAVKHFTVASLQQHTNSFSHENLIGTGMLGSVYRAELPGGKLFAVRKLDKKSPNHEEEGKFLELVNNIDRIRHANIVQLVGFCSEHSQRLLIHEYCRNGTLHDLLHIDDRLKIELSWNVRVRIALEAAKALEYLHEICDPPSIHRNFKSANILLDDDIRVHVSDCGLAPLISSGAVSQLSGQLLAAYGYGAPEFEYGIYTMKCDVYSFGVVMLELLTGRKSYDKKRDRGEQFLVRWAIPQLHDIDALAKMVDPSLKGDYPAKSLSHFADVISRCVQSEPEYRPLMSEVVQDLSDMIQREHRRNDSNGDNQYTGRR

SEQ ID NO: 96478 - protein, 678 aa, Arabidopsis thaliana
  peptide (1)..(678): Ceres Seq. ID no. 12733406
MFTSLKAMDFSNNHIGGSIPSTLPVSLQNLFLSGNNFTGTIPESLSSLKSLSVMSLNNNLLSGKIPDVFQDLGLMINIDLSSNNLSGPLPPSMQNLSTLTSLLLQNNHLSGELDVLQDLPLKDLNVENNLFNGPIPEKLLSIPNFIKGGNLFNVTIAPSPSPETPPSPTSPKRPFFGPPSPNASAGHGQAHVRSPPSDHHPSRPTPQGKEDSFTSKRIIWISILGAFSFVVLALVCLLCGRKCLRKREDSEQLSKPHLTSEYGRAREGSRSNASMLPPSNTFNKDKEARPKERVGGASKLHGGAERSVGSESKQESHEIDMNGNAMDLMHPSSIPPIKRVIAKATEPAEASLKRTTSKSHGPLTAVKHFTVASLQQHTNSFSHENLIGTGMLGSVYRAELPGGKLFAVRKLDKKSPNHEEEGKFLELVNNIDRIRHANIVQLVGFCSEHSQRLLIHEYCRNGTLHDLLHIDDRLKIELSWNVRVRIALEAAKALEYLHEICDPPSIHRNFKSANILLDDDIRVHVSDCGLAPLISSGAVSQLSGQLLAAYGYGAPEFEYGIYTMKCDVYSFGVVMLELLTGRKSYDKKRDRGEQFLVRWAIPQLHDIDALAKMVDPSLKGDYPAKSLSHFADVISRCVQSEPEYRPLMSEVVQDLSDMIQREHRRNDSNGDNQYTGRR

SEQ ID NO: 96479 - protein, 671 aa, Arabidopsis thaliana
  peptide (1)..(671): Ceres Seq. ID no. 12733407
MDFSNNHIGGSIPSTLPVSLQNLFLSGNNFTGTIPESLSSLKSLSVMSLNNNLLSGKIPDVFQDLGLMINIDLSSNNLSGPLPPSMQNLSTLTSLLLQNNHLSGELDVLQDLPLKDLNVENNLFNGPIPEKLLSIPNFIKGGNLFNVTIAPSPSPETPPSPTSPKRPFFGPPSPNASAGHGQAHVRSPPSDHHPSRPTPQGKEDSFTSKRIIWISILGAFSFVVLALVCLLCGRKCLRKREDSEQLSKPHLTSEYGRAREGSRSNASMLPPSNTFNKDKEARPKERVGGASKLHGGAERSVGSESKQESHEIDMNGNAMDLMHPSSIPPIKRVIAKATEPAEASLKRTTSKSHGPLTAVKHFTVASLQQHTNSFSHENLIGTGMLGSVYRAELPGGKLFAVRKLDKKSPNHEEEGKFLELVNNIDRIRHANIVQLVGFCSEHSQRLLIHEYCRNGTLHDLLHIDDRLKIELSWNVRVRIALEAAKALEYLHEICDPPSIHRNFKSANILLDDDIRVHVSDCGLAPLISSGAVSQLSGQLLAAYGYGAPEFEYGIYTMKCDVYSFGVVMLELLTGRKSYDKKRDRGEQFLVRWAIPQLHDIDALAKMVDPSLKGDYPAKSLSHFADVISRCVQSEPEYRPLMSEVVQDLSDMIQREHRRNDSNGDNQYTGRR

SEQ ID NO: 96480 - DNA, 831 bp, Arabidopsis thaliana
  misc_feature (1)..(831): Ceres Seq. ID no. 12733427
  misc_feature (1)..(831): Ortholog of  Ceres SEQ ID NO 12635446 as cited in SEQ ID NO 0
gagagagagagatctgatcggtgatttacttttagttcgtcggagagattttgatcagaatgagcggaggaggagacgtgaacatgagtggtggagacagacgcaagggaacggtgaagtggtttgatacacagaaggggtttggtttcatcacacctagcgacggtggtgacgatctcttcgttcaccagtcttccatcagatctgaaggatttcgtagcctcgcagctgaggaatctgttgagttcgacgttgaggttgacaactccggccgtcccaaggctattgaagtgtctggacccgacggtgctcccgttcagggtaacagcggtggtggtggttcatctggtggacgcggtggttttggcggcggtggtggaagaggagggggacgtggtggaggaagctacggaggaggttatggtggaagaggaagcggtggccgtggaggaggtggtggtgataattcttgctttaagtgcggtgaaccaggtcacatggcgagagaatgctctcaaggtggtggaggatacagcggaggcgggggtggtggaaggtacgggtctggcggcggcggaggaggaggtggtggtggcttaagctgctacagctgtggagagtctgggcactttgcaagggattgcactagcggtggtgctcgttgaagcaaaccagactgtgaagaaggggtaaatcagtcatcgatccctcttctccgtgacttctatcaaattattatctatcttttgttattcgactctcttcaatgttgttttcggaatttattaattaggacttgtggttgttatggttatggttccttgtgatttg

SEQ ID NO: 96481 - protein, 201 aa, Arabidopsis thaliana
  peptide (1)..(201): Ceres Seq. ID no. 12733428
MSGGGDVNMSGGDRRKGTVKWFDTQKGFGFITPSDGGDDLFVHQSSIRSEGFRSLAAEESVEFDVEVDNSGRPKAIEVSGPDGAPVQGNSGGGGSSGGRGGFGGGGGRGGGRGGGSYGGGYGGRGSGGRGGGGGDNSCFKCGEPGHMARECSQGGGGYSGGGGGGRYGSGGGGGGGGGGLSCYSCGESGHFARDCTSGGAR

SEQ ID NO: 96482 - protein, 193 aa, Arabidopsis thaliana
  peptide (1)..(193): Ceres Seq. ID no. 12733429
MSGGDRRKGTVKWFDTQKGFGFITPSDGGDDLFVHQSSIRSEGFRSLAAEESVEFDVEVDNSGRPKAIEVSGPDGAPVQGNSGGGGSSGGRGGFGGGGGRGGGRGGGSYGGGYGGRGSGGRGGGGGDNSCFKCGEPGHMARECSQGGGGYSGGGGGGRYGSGGGGGGGGGGLSCYSCGESGHFARDCTSGGAR

SEQ ID NO: 96483 - DNA, 1950 bp, Arabidopsis thaliana
  misc_feature (1)..(1950): Ceres Seq. ID no. 12733455
  misc_feature (1)..(1950): Ortholog of  Ceres SEQ ID NO 15171610 as cited in SEQ ID NO 57317
atcagttaatcaacgcaacgccgagaagctttttcaggggtttggtgcgttgaatttgtggatcaagaaacaatgcaaattcaatgcaaaaccctaacttttacagtttcttcgattcctttaacccaaagctaccattcccatcttccctcactttacggtcatggaatccttcattcccgagtttcaggagctccgctgtttccggaccaaagtcatcactgaagctgaacaggtttttaagaaactgtgcaagtacgaatcaggagcttgttgttgatggagaaaccggaaatgggtcgatttcggagctccaaggagatgcagcaaatggttcgatttcgccggtggaagtggaagcagaagtagaagaagtgaaggtagatgatttggcgactcagagcatttggggacagatgaaagagatcgtcatgtttaccggacctgccgcgggattgtggctatgtgggccgttgatgagtctcattgatacggcggtgattggtcaaggaagctcactcgaactcgctgctttaggtcctgctaccgtcatctgtgattatttgtgttatacgttcatgttcctctcagttgcgacttcaaatcttgttgctacctctcttgctcggcaggataaagatgaagtacaacatcagatatcgatcttgcttttcattgggttggcttgtggagtcacgatgatggtgttgacaagactgtttggttcctgggcactaactgcttttacaggggtaaagaatgccgacattgttccagcagctaataaatatgttcagattcgtggtttagcatggccagctgttctcattggatgggttgctcaaagtgcaagtcttggtatgaaagactcatggggacctcttaaggctttggcggttgctagtgcaataaacggtgttggtgatgtggtcttatgcacctttctaggatatggtatagcaggtgcagcttgggcaactatggtgtcacaagttgttgctgcttatatgatgatggacgcattgaacaagaaaggatacagcgcattctcattctgtgttccttctccaagtgaacttttgacgatttttggactcgctgcccctgtctttataactatgatgtcaaaggttttgttctatacgctccttgtgtactttgctacatcaatgggtacaaatatcatagctgctcatcaggttatgcttcagatatataccatgagtacggtttggggggagcctctctctcaaactgcacagtcctttatgcctgagcttttattcggaatcaatcgtaatttgcctaaagctagggtgcttctgaagtcactagttatcatcggagctacgctaggaatagtagtcggaaccattggcacagcagttccatggctgttccctggcatcttcacacgtgacaaggttgtcacatccgagatgcacaaggtcataataccgtattttcttgctttatccatcactccaagtactcacagtcttgaaggcaccttactggctggaagagatcttagatatatcagcttgtcaatgactggatgcttagcggtcgctgggcttctacttatgcttctgagcaatggaggatttggtttgagaggctgctggtatgctctcgtgggattccaatgggctcggttttctctatctcttttccgccttctatcgcgggatggtgtactgtactccgaagatacaagccgatacgctgagaaagtgaaagctgcgtagctcagtaagtcaccgtatacctcacaagaaaaagtataatgaacagagaacagcttcattcagttgtagatcaatgggttactctgtttcaagattgtattctttaagaacatgaaaatgtattcgactgaatagaaaagtcttggcattaataggccctgcttcaactcctgtgattcccctgtatataaaagatgat

SEQ ID NO: 96484 - protein, 555 aa, Arabidopsis thaliana
  peptide (1)..(555): Ceres Seq. ID no. 12733456
MQNPNFYSFFDSFNPKLPFPSSLTLRSWNPSFPSFRSSAVSGPKSSLKLNRFLRNCASTNQELVVDGETGNGSISELQGDAANGSISPVEVEAEVEEVKVDDLATQSIWGQMKEIVMFTGPAAGLWLCGPLMSLIDTAVIGQGSSLELAALGPATVICDYLCYTFMFLSVATSNLVATSLARQDKDEVQHQISILLFIGLACGVTMMVLTRLFGSWALTAFTGVKNADIVPAANKYVQIRGLAWPAVLIGWVAQSASLGMKDSWGPLKALAVASAINGVGDVVLCTFLGYGIAGAAWATMVSQVVAAYMMMDALNKKGYSAFSFCVPSPSELLTIFGLAAPVFITMMSKVLFYTLLVYFATSMGTNIIAAHQVMLQIYTMSTVWGEPLSQTAQSFMPELLFGINRNLPKARVLLKSLVIIGATLGIVVGTIGTAVPWLFPGIFTRDKVVTSEMHKVIIPYFLALSITPSTHSLEGTLLAGRDLRYISLSMTGCLAVAGLLLMLLSNGGFGLRGCWYALVGFQWARFSLSLFRLLSRDGVLYSEDTSRYAEKVKAA

SEQ ID NO: 96485 - protein, 444 aa, Arabidopsis thaliana; identical to SEQ ID NO: 41491
  peptide (1)..(444): Ceres Seq. ID no. 12733457

SEQ ID NO: 96486 - protein, 439 aa, Arabidopsis thaliana; identical to SEQ ID NO: 41492
  peptide (1)..(439): Ceres Seq. ID no. 12733458

SEQ ID NO: 96487 - DNA, 2028 bp, Arabidopsis thaliana
  misc_feature (1)..(2028): Ceres Seq. ID no. 12733487
  misc_feature (1)..(2028): Ortholog of  Ceres SEQ ID NO 15175771 as cited in SEQ ID NO 55443
gcgcctttcttcttctccctacaaaaatggcttcttctctttctctttctcttaccagggacaagttacaatgtaaataaaggtcaaaccttttttccaataaaacccttttaatggattgtgctaaaactctctctctctttggattttcaaaacaaagaaatcttaaatccagactttaaccatgacggatacaatgtctgctcatatggatcgacataataagcttgattatgacggctcagaggatgaaaagaaaacaaagctttgttccctcaagaagaaagcaatcaatgcctccaacaaattcaaacactccttcaccaagagaactcgaaggaacagccgagtcatgtctgtctctattgttgacgatattgatcttgaagagcttcaagctgttgacgctttccgtcaagctcttatcctagacgagcttctcccttccaaacacgatgatcatcacatgatgctgaggtttctgagggcaaggaagtttgatcttgagaaagcaaagcaaatgtggactgatatgatccattggaggaaagagtttggtgttgacacaatcatggaggactttgatttcaaggagattgatgaagtcctcaagtactaccctcaaggttaccatggtgttgacaaagatggaaggcctgtttacattgagaggctaggccaagttgatgccacaaagctgatgcaagtcactaccatcgataggtatgtcaagtaccatgtgagagagtttgagaagactttcaatatcaaattaccagcttgttccattgctgccaagaagcatattgatcagagcaccaccatcttggatgtgcaaggcgtggggttgaagagcttcagtaaggctgcaagggatcttcttcagcgtatccagaagatcgatagcgataactaccctgagacattgaaccgtatgttcattatcaacgctggtagtggattcaggcttctgtggagcactgtgaaatctttccttgacccaaagaccaccgcaaagattcacgttcttggcaacaaataccaaagcaagctgcttgagattatcgactccaatgaacttcctgagttcttgggtggtaactgcacttgtgcagacaaaggtggatgtatgcgttctgacaaaggtccatggaacgaccctgacatcttcaagatggttcagaacggagaaggaaagtgcccaaggaagactttgtcaaacattgaagagaagacaatctcagtggacgagaacacaacaatgaaatctgattcctttgcgaagaacaaattcgatgcagagaacacaaaattcataccgatgattgacaaaactgtgaatgcttctacatggcctacaaatctccacaagtcaaactatcctgaacctgaagatttatactctgccgtgaagccatcgcagaggagaggaggagaaggttatttattcgggggagtgatgtctttggtgatggggttaatgactgtggtgaggctaacgaagaacatgccaaggaagctcactgaggctgccatttacggtggtgaagtggacaaagcagagactacaatggtgtcaaaccaagagtatatgtcgatggtgaagagaatggccgagttggaggagaaatgtaggtctttggacaatcagcctgcagcgttctcgccagagaaagaacagattctcaccgctgctctcagccgtgtcgacgagctagagcttcagttggctcagaccaaaaagacgctggaggaaaccatggcaacgcagcatgtgataatggcttatatcgacaagaagaaaaagaagaagaagttctttggattctgaaagacttgataatgcctcaagactttgaagaaacctggaaaaatatatataaatccatatttattatatatataaacataaatattattcgtgaagagtttttacagataaaaatgtgggaaattttctttctgtaaatgttttgttgtttgtccctctggaaatatctgaaagcttatgtttaccacttatcaatt

SEQ ID NO: 96488 - protein, 548 aa, Arabidopsis thaliana
  peptide (1)..(548): Ceres Seq. ID no. 12733488
MTDTMSAHMDRHNKLDYDGSEDEKKTKLCSLKKKAINASNKFKHSFTKRTRRNSRVMSVSIVDDIDLEELQAVDAFRQALILDELLPSKHDDHHMMLRFLRARKFDLEKAKQMWTDMIHWRKEFGVDTIMEDFDFKEIDEVLKYYPQGYHGVDKDGRPVYIERLGQVDATKLMQVTTIDRYVKYHVREFEKTFNIKLPACSIAAKKHIDQSTTILDVQGVGLKSFSKAARDLLQRIQKIDSDNYPETLNRMFIINAGSGFRLLWSTVKSFLDPKTTAKIHVLGNKYQSKLLEIIDSNELPEFLGGNCTCADKGGCMRSDKGPWNDPDIFKMVQNGEGKCPRKTLSNIEEKTISVDENTTMKSDSFAKNKFDAENTKFIPMIDKTVNASTWPTNLHKSNYPEPEDLYSAVKPSQRRGGEGYLFGGVMSLVMGLMTVVRLTKNMPRKLTEAAIYGGEVDKAETTMVSNQEYMSMVKRMAELEEKCRSLDNQPAAFSPEKEQILTAALSRVDELELQLAQTKKTLEETMATQHVIMAYIDKKKKKKKFFGF

SEQ ID NO: 96489 - protein, 544 aa, Arabidopsis thaliana
  peptide (1)..(544): Ceres Seq. ID no. 12733489
MSAHMDRHNKLDYDGSEDEKKTKLCSLKKKAINASNKFKHSFTKRTRRNSRVMSVSIVDDIDLEELQAVDAFRQALILDELLPSKHDDHHMMLRFLRARKFDLEKAKQMWTDMIHWRKEFGVDTIMEDFDFKEIDEVLKYYPQGYHGVDKDGRPVYIERLGQVDATKLMQVTTIDRYVKYHVREFEKTFNIKLPACSIAAKKHIDQSTTILDVQGVGLKSFSKAARDLLQRIQKIDSDNYPETLNRMFIINAGSGFRLLWSTVKSFLDPKTTAKIHVLGNKYQSKLLEIIDSNELPEFLGGNCTCADKGGCMRSDKGPWNDPDIFKMVQNGEGKCPRKTLSNIEEKTISVDENTTMKSDSFAKNKFDAENTKFIPMIDKTVNASTWPTNLHKSNYPEPEDLYSAVKPSQRRGGEGYLFGGVMSLVMGLMTVVRLTKNMPRKLTEAAIYGGEVDKAETTMVSNQEYMSMVKRMAELEEKCRSLDNQPAAFSPEKEQILTAALSRVDELELQLAQTKKTLEETMATQHVIMAYIDKKKKKKKFFGF

SEQ ID NO: 96490 - protein, 540 aa, Arabidopsis thaliana
  peptide (1)..(540): Ceres Seq. ID no. 12733490
MDRHNKLDYDGSEDEKKTKLCSLKKKAINASNKFKHSFTKRTRRNSRVMSVSIVDDIDLEELQAVDAFRQALILDELLPSKHDDHHMMLRFLRARKFDLEKAKQMWTDMIHWRKEFGVDTIMEDFDFKEIDEVLKYYPQGYHGVDKDGRPVYIERLGQVDATKLMQVTTIDRYVKYHVREFEKTFNIKLPACSIAAKKHIDQSTTILDVQGVGLKSFSKAARDLLQRIQKIDSDNYPETLNRMFIINAGSGFRLLWSTVKSFLDPKTTAKIHVLGNKYQSKLLEIIDSNELPEFLGGNCTCADKGGCMRSDKGPWNDPDIFKMVQNGEGKCPRKTLSNIEEKTISVDENTTMKSDSFAKNKFDAENTKFIPMIDKTVNASTWPTNLHKSNYPEPEDLYSAVKPSQRRGGEGYLFGGVMSLVMGLMTVVRLTKNMPRKLTEAAIYGGEVDKAETTMVSNQEYMSMVKRMAELEEKCRSLDNQPAAFSPEKEQILTAALSRVDELELQLAQTKKTLEETMATQHVIMAYIDKKKKKKKFFGF

SEQ ID NO: 96491 - DNA, 1465 bp, Arabidopsis thaliana
  misc_feature (1)..(1465): Ceres Seq. ID no. 12733551
  misc_feature (1)..(1465): Ortholog of  Ceres SEQ ID NO 13662164 as cited in SEQ ID NO 67158
aacaaccagctcaggccataagattcatcccggagaaacaagaacgatgacaacacataaacatagaagaacagagaaaaatctctgttttaagcaatactacaaatggatcctctgttttatcctcactctctatttttttgcttccttctttgtcgaccatgatcaagatcatagatcttctacttccatatcaaagcatcttcttactaaccataaacctaagcttttcgcttctcgtgccatgtttgaatctaaaatccatgatcacaaacttgggtttacctctcaacaacctaacatcaaaacagacgtattcaacaatttgaaaatctacgtctatgacttaccttcaaagttcaacaaagactggttagccaatgatagatgcaccaaccacctctttgccgcggaagtggctctccataaggcgtttctcagcctcgaaggagatgtaaggacggaagatccgtatgaagccgatttcttctttgtccctgtctatgtctcttgcaacttcagcaccattaatggctttccagcgattggccatgcacgatcactcatcaatgacgcgataaagctcgtctcgactcaataccctttttggaaccgaaccagtggctctgatcatgtcttcacggccacacacgactttggctcttgcttccacaccatgagctattgctgatggagtaccaatttttttgagaaactctataattttgcaaacatttggtgttacttttaaccatccatgccaagaggtagagaacgtggtgataccaccgtacatctcaccggaaagtttacacaagactcaaaagaatattccggtaactaaagaacgagacatttgggtttttttccgtggcaagatggaacttcatcccaaaaacatcagtggacgcttctatagcaagcgtgtaaggacgaatatatggcggagttacggtggtgaccggaggttttatctccaacggcaaagatttgccggttaccagtcagaaatagctcgttctgttttctgtttatgtcctctcgggtgggcaccgtggagcccaagacttgttgaatcggtggctcttggctgtgttccggtgattatagccgacgggattcgtttgccgttcccttccaccgtacgttggccggatatttcgctcacggtggcggagagagacgttggaaagctaggggatattttggaacacgtggcggctactaatttgtcagtcatacagagaaacttggaggatccgtctgttaggcgggcccttatgtttaatgttccttcaagagagggagatgccacgtggcaagttttggaggctttgtcaaagaaattgaataggtctgttagaaggtcaaactctttcttgtaaaccaatataattttgacacctgtgtattactattttttttcctggctagtgagatataagagtagtaagctcttaaatgt

SEQ ID NO: 96492 - protein, 229 aa, Arabidopsis thaliana
  peptide (1)..(229): Ceres Seq. ID no. 12733552
TTSSGHKIHPGETRTMTTHKHRRTEKNLCFKQYYKWILCFILTLYFFASFFVDHDQDHRSSTSISKHLLTNHKPKLFASRAMFESKIHDHKLGFTSQQPNIKTDVFNNLKIYVYDLPSKFNKDWLANDRCTNHLFAAEVALHKAFLSLEGDVRTEDPYEADFFFVPVYVSCNFSTINGFPAIGHARSLINDAIKLVSTQYPFWNRTSGSDHVFTATHDFGSCFHTMSYC

SEQ ID NO: 96493 - protein, 214 aa, Arabidopsis thaliana
  peptide (1)..(214): Ceres Seq. ID no. 12733553
MTTHKHRRTEKNLCFKQYYKWILCFILTLYFFASFFVDHDQDHRSSTSISKHLLTNHKPKLFASRAMFESKIHDHKLGFTSQQPNIKTDVFNNLKIYVYDLPSKFNKDWLANDRCTNHLFAAEVALHKAFLSLEGDVRTEDPYEADFFFVPVYVSCNFSTINGFPAIGHARSLINDAIKLVSTQYPFWNRTSGSDHVFTATHDFGSCFHTMSYC

SEQ ID NO: 96494 - protein, 168 aa, Arabidopsis thaliana
  peptide (1)..(168): Ceres Seq. ID no. 12733554
MELHPKNISGRFYSKRVRTNIWRSYGGDRRFYLQRQRFAGYQSEIARSVFCLCPLGWAPWSPRLVESVALGCVPVIIADGIRLPFPSTVRWPDISLTVAERDVGKLGDILEHVAATNLSVIQRNLEDPSVRRALMFNVPSREGDATWQVLEALSKKLNRSVRRSNSFL

SEQ ID NO: 96495 - DNA, 1029 bp, Arabidopsis thaliana
  misc_feature (1)..(1029): Ceres Seq. ID no. 12733577
  misc_feature (1)..(1029): Ortholog of  Ceres SEQ ID NO 14307273 as cited in SEQ ID NO 54302
  misc_feature (1)..(1029): Ortholog of  Ceres SEQ ID NO 14315317 as cited in SEQ ID NO 58242
  misc_feature (1)..(1029): Ortholog of  Ceres SEQ ID NO 13655375 as cited in SEQ ID NO 63347
  misc_feature (1)..(1029): Ortholog of  Ceres SEQ ID NO 12626166 as cited in SEQ ID NO 64505
  misc_feature (1)..(1029): Ortholog of  Ceres SEQ ID NO 14301599 as cited in SEQ ID NO 65699
  misc_feature (1)..(1029): Ortholog of  Ceres SEQ ID NO 14301978 as cited in SEQ ID NO 0
  misc_feature (1)..(1029): Ortholog of  Ceres SEQ ID NO 14303290 as cited in SEQ ID NO 0
atgggagagatgaagagtatgcaaatgggtgtgattggagcattgtttctatcagttgcatcttctgtctccattgtcatttgcaacaaagctttgatgaccaatcttggtttcccttttgcaacaacacttactagttggcatttgatggtaacatattgcacacttcatgtggcatataaactaaacttctttgagaataaaccaatagacatgagaactgttgttctctttggcctcctcaatggcatttccattggtctcctcaatctcagcctcggctttaattccatcggcttctatcaaatgaccaaacttgctatcataccattcactgttcttttagaaaccctcttcctcaacaagaagttcagccagaagataaaattctcattgtttttgctgctagttggggttggtatagcatcaatcacagatcttcagctcaattttgttggctctgttctatctctccttgccattgccacaacttgcgtcggccaaattctaacaaacactatccagaagagactgaacgtgacatcaacacaactcctataccaatcagccccgttccaagctgctatactcttcgtctcgggtccttttgtcgacaaatacctcactagcctcaatgttttctccttccattactctcccatcgtcgtggggttcataacgttgtcgtgtttgatagcggtttcggttaacttcagtacgtttttagtgattggaaagacatctccggtgacataccaagtcttgggacatctcaaaacgtgtttggtgctcgcatttggttacactctccttcacgatcccttcactcctcgtaatatcgcaggaatactcatcgctgtcctcgggatgcttctctactcctacttctgctcagttgcttctaaatccaaacaagcctcctccgattccacttttcttgggaaagatagagatacgacgccgcttttgggacaagaaaatgagaaccatcatgaagccaagaaattagacaagcattctccagtatga

SEQ ID NO: 96496 - protein, 342 aa, Arabidopsis thaliana
  peptide (1)..(342): Ceres Seq. ID no. 12733578
MGEMKSMQMGVIGALFLSVASSVSIVICNKALMTNLGFPFATTLTSWHLMVTYCTLHVAYKLNFFENKPIDMRTVVLFGLLNGISIGLLNLSLGFNSIGFYQMTKLAIIPFTVLLETLFLNKKFSQKIKFSLFLLLVGVGIASITDLQLNFVGSVLSLLAIATTCVGQILTNTIQKRLNVTSTQLLYQSAPFQAAILFVSGPFVDKYLTSLNVFSFHYSPIVVGFITLSCLIAVSVNFSTFLVIGKTSPVTYQVLGHLKTCLVLAFGYTLLHDPFTPRNIAGILIAVLGMLLYSYFCSVASKSKQASSDSTFLGKDRDTTPLLGQENENHHEAKKLDKHSPV

SEQ ID NO: 96497 - protein, 339 aa, Arabidopsis thaliana
  peptide (1)..(339): Ceres Seq. ID no. 12733579
MKSMQMGVIGALFLSVASSVSIVICNKALMTNLGFPFATTLTSWHLMVTYCTLHVAYKLNFFENKPIDMRTVVLFGLLNGISIGLLNLSLGFNSIGFYQMTKLAIIPFTVLLETLFLNKKFSQKIKFSLFLLLVGVGIASITDLQLNFVGSVLSLLAIATTCVGQILTNTIQKRLNVTSTQLLYQSAPFQAAILFVSGPFVDKYLTSLNVFSFHYSPIVVGFITLSCLIAVSVNFSTFLVIGKTSPVTYQVLGHLKTCLVLAFGYTLLHDPFTPRNIAGILIAVLGMLLYSYFCSVASKSKQASSDSTFLGKDRDTTPLLGQENENHHEAKKLDKHSPV

SEQ ID NO: 96498 - protein, 336 aa, Arabidopsis thaliana
  peptide (1)..(336): Ceres Seq. ID no. 12733580
MQMGVIGALFLSVASSVSIVICNKALMTNLGFPFATTLTSWHLMVTYCTLHVAYKLNFFENKPIDMRTVVLFGLLNGISIGLLNLSLGFNSIGFYQMTKLAIIPFTVLLETLFLNKKFSQKIKFSLFLLLVGVGIASITDLQLNFVGSVLSLLAIATTCVGQILTNTIQKRLNVTSTQLLYQSAPFQAAILFVSGPFVDKYLTSLNVFSFHYSPIVVGFITLSCLIAVSVNFSTFLVIGKTSPVTYQVLGHLKTCLVLAFGYTLLHDPFTPRNIAGILIAVLGMLLYSYFCSVASKSKQASSDSTFLGKDRDTTPLLGQENENHHEAKKLDKHSPV

SEQ ID NO: 96499 - DNA, 1809 bp, Arabidopsis thaliana
  misc_feature (1)..(1809): Ceres Seq. ID no. 12733585
  misc_feature (1)..(1809): Ortholog of  Ceres SEQ ID NO 14301916 as cited in SEQ ID NO 69281
ttgctcctccctctcttcctctctctatctctctctgcaaaaaccctaaatttcctccgatttcaccatcttcaatctccttcacaccccaacttagcctcttaatcactccccaagctaaaccctccaacgattttccatgattcgaagatacagagccttagcgatgaagaaaaagccctaaaaaccaaagctttgatctctccgaaatcggagtttctttctttgtttggtaaatttggttttcgaaatgtataagaaccagctacaagagttggctcagaggagctgctttaatcttccttcgtatacttgtattagggaaggtcctgaccacgcgccgcgattcaaggctactgttaactttaacggcgagatctttgagagtcctcagtattgttctactcttcgtcaagctgaacactctgctgctgaagttgctctcaatgctctctctaatcgtggtccttctcactctcttgccgccaggatcttggatgagacgggtgtgtataagaatcttttgcaagagatagctcaaagagtgggagctcctttaccgcgatatactactttcaggtcaggtcttggtcaccaacctgtgtttactggtactgtagaattggctggaattacgttcactggagatccagctaagaacaagaagcaagcagagaagaatgctgcaatggctgcttggtcttccctaaaacaattggcaaaagaaacatcaagttcaatgcctgagcctgagaacattgacgaactagaacaggtgattatagcaagagctttgataaactatcgtatcaaggaaaacattggcacaggaagctcctcgagtgccccagttccatttgcaaagaagttctttatgcagaaccttagaccaacaagtccacagccttctcctgcaaccacatcgagaatcttaccctttatttgcccaaaacaaccttccagaagcagcagatcatccttagcagcaacttccggtattgacagaattatggcagcagccttggaaagccgcagctaccagcggcctcagcagagatttgcaaatccgccttatgttcctatgaggcaatttagatcgcaatgccatgggatggctccacctgtcacaatcagaaccgctgtaccggtcttctctgcacctccaatgcctcctccaccatgtacaaacaacactcagctaccttcttctgtgtatgtcccatcgctgatgcgaactgcaccacctgtgaggatcgcgccgcctgtcacaatcagaaccgcggtgcccgtatttgcttctgcgccaccggttagaattagaaccgctgtgaagcccacagttgaggcaggagaaacccgcatatcatcagtccaagaaaaggagagtataccagtcttgcctgatagtcttgaaattggagtagaaggaagtactataacaattacagattgtgagaaaacagcgtcaaaggaaaccgagagagcagagtttaaggattcatcgaaaggagaaccggagacagcaagagagcgactggagaacctaaagatctgatgccttgaagactgtctctgggtttagttttttttgaggttggtttctgaaaattgttacattagtaatctcgttcgttattatactcggtggatcgagtagtttgataatccgaaagatttgtattatattggggagttttgggaagaacctggccatctctggattgtagaattgtatcagtttcgcttcctattcagtttgtttgtgtcctttttctcatcttttataaatctgttacctatcgttgttcc

SEQ ID NO: 96500 - protein, 434 aa, Arabidopsis thaliana
  peptide (1)..(434): Ceres Seq. ID no. 12733586
MYKNQLQELAQRSCFNLPSYTCIREGPDHAPRFKATVNFNGEIFESPQYCSTLRQAEHSAAEVALNALSNRGPSHSLAARILDETGVYKNLLQEIAQRVGAPLPRYTTFRSGLGHQPVFTGTVELAGITFTGDPAKNKKQAEKNAAMAAWSSLKQLAKETSSSMPEPENIDELEQVIIARALINYRIKENIGTGSSSSAPVPFAKKFFMQNLRPTSPQPSPATTSRILPFICPKQPSRSSRSSLAATSGIDRIMAAALESRSYQRPQQRFANPPYVPMRQFRSQCHGMAPPVTIRTAVPVFSAPPMPPPPCTNNTQLPSSVYVPSLMRTAPPVRIAPPVTIRTAVPVFASAPPVRIRTAVKPTVEAGETRISSVQEKESIPVLPDSLEIGVEGSTITITDCEKTASKETERAEFKDSSKGEPETARERLENLKI

SEQ ID NO: 96501 - protein, 288 aa, Arabidopsis thaliana
  peptide (1)..(288): Ceres Seq. ID no. 12733587
MAAWSSLKQLAKETSSSMPEPENIDELEQVIIARALINYRIKENIGTGSSSSAPVPFAKKFFMQNLRPTSPQPSPATTSRILPFICPKQPSRSSRSSLAATSGIDRIMAAALESRSYQRPQQRFANPPYVPMRQFRSQCHGMAPPVTIRTAVPVFSAPPMPPPPCTNNTQLPSSVYVPSLMRTAPPVRIAPPVTIRTAVPVFASAPPVRIRTAVKPTVEAGETRISSVQEKESIPVLPDSLEIGVEGSTITITDCEKTASKETERAEFKDSSKGEPETARERLENLKI

SEQ ID NO: 96502 - protein, 271 aa, Arabidopsis thaliana
  peptide (1)..(271): Ceres Seq. ID no. 12733588
MPEPENIDELEQVIIARALINYRIKENIGTGSSSSAPVPFAKKFFMQNLRPTSPQPSPATTSRILPFICPKQPSRSSRSSLAATSGIDRIMAAALESRSYQRPQQRFANPPYVPMRQFRSQCHGMAPPVTIRTAVPVFSAPPMPPPPCTNNTQLPSSVYVPSLMRTAPPVRIAPPVTIRTAVPVFASAPPVRIRTAVKPTVEAGETRISSVQEKESIPVLPDSLEIGVEGSTITITDCEKTASKETERAEFKDSSKGEPETARERLENLKI

SEQ ID NO: 96503 - DNA, 1536 bp, Arabidopsis thaliana
  misc_feature (1)..(1536): Ceres Seq. ID no. 12733622
  misc_feature (1)..(1536): Ortholog of  Ceres SEQ ID NO 13502874 as cited in SEQ ID NO 66298
  misc_feature (1)..(1536): Ortholog of  Ceres SEQ ID NO 12614124 as cited in SEQ ID NO 68392
atggacatcatctcaggacaacctctatttctcatcttctgctttatcttatcatgtcttcttttcttcaccaccgcacgatctcgacgtagcccttgtcaattgtccaagtcacctccggggcctccacggttacccataattggaaacattcatctggtcggaaagaacccacatcactcattcacggacctctcaaaaacatatggaccagtcatgagtcttaagcttggatgtttaaactcagtggtcatagcttcacgagacgctgtgagagaagtactaaaaacacacgaccaaatcttgtctggacggtacataagtgaagcgaccaaatccaacaatcatcatgaattttccgttggctggattcatccatcgtcatctcgttttagaatgttgaggaaattgtcggctactcagctgttctcaccgcagtgtatccaggctaccaaagctctgaggatgaagaaggtgcaggaacttgtcaacttcctgagtgaaagctgtgagagagaagaagctgttgatatttctcatgtatccttcgtcacagctctcaatatcatatcgaatattttgttctcagtcaatctcggtagctacgattcaaaaaattccagtgcgtttcaagagatggtgatcggttaccaggaatctatcggaaatccagaccttgctaacttcttcccatttatgagatttcttgacttgcaaggtaacagtaagaagatgagggagtcctcagggagattgcttcaggtattcagagagttttatgatgctcggattgtggagaaatcatcgcgttcagttgagaaagatgtttcgagtaaagacttcctggatgtgcttatcgatctccaacaaggagatgaaactgaaatcaacatcgacgagatcgaacacctacttctcgatatgtttgtagcaggcacagatacaaactcaagtaccgtggaatgggcaatggcagagttacttggaaaccctaaaacgatgacaaaagttcaagacgagatcaatcatgtgatagggcaaaacggtgactttcaagagtctgatatctcaaaactgccgtatttaaaagcggtcgtaaaagaaactttccgactacaccctgctgctccatttctcctccaaagaaaagctgaaaccaacgtagagattcttggattcactgtgcttaaagactctcaggttcttgtgaacgtgtgggccataggacgagacccacttgtatgggaaaatccgacccattttgagccagagaggtttttggggaaagagattgatgtaaaaggtacagattatgagcttacaccgtttggggctgggcgtagaatttgtccgggactgcctttggctatgaaaacagtgcatctcatgcttgcttctcttctctatacctttgaatggaagcttccaaacggtgtcggttcagaggatttggacatggaagagacctttggtctcacagtgcacaagacaaacccgttacttgccgtgcctctgaagaaacgagccataaattaa

SEQ ID NO: 96504 - protein, 511 aa, Arabidopsis thaliana
  peptide (1)..(511): Ceres Seq. ID no. 12733623
MDIISGQPLFLIFCFILSCLLFFTTARSRRSPCQLSKSPPGPPRLPIIGNIHLVGKNPHHSFTDLSKTYGPVMSLKLGCLNSVVIASRDAVREVLKTHDQILSGRYISEATKSNNHHEFSVGWIHPSSSRFRMLRKLSATQLFSPQCIQATKALRMKKVQELVNFLSESCEREEAVDISHVSFVTALNIISNILFSVNLGSYDSKNSSAFQEMVIGYQESIGNPDLANFFPFMRFLDLQGNSKKMRESSGRLLQVFREFYDARIVEKSSRSVEKDVSSKDFLDVLIDLQQGDETEINIDEIEHLLLDMFVAGTDTNSSTVEWAMAELLGNPKTMTKVQDEINHVIGQNGDFQESDISKLPYLKAVVKETFRLHPAAPFLLQRKAETNVEILGFTVLKDSQVLVNVWAIGRDPLVWENPTHFEPERFLGKEIDVKGTDYELTPFGAGRRICPGLPLAMKTVHLMLASLLYTFEWKLPNGVGSEDLDMEETFGLTVHKTNPLLAVPLKKRAIN

SEQ ID NO: 96505 - protein, 439 aa, Arabidopsis thaliana
  peptide (1)..(439): Ceres Seq. ID no. 12733624
MSLKLGCLNSVVIASRDAVREVLKTHDQILSGRYISEATKSNNHHEFSVGWIHPSSSRFRMLRKLSATQLFSPQCIQATKALRMKKVQELVNFLSESCEREEAVDISHVSFVTALNIISNILFSVNLGSYDSKNSSAFQEMVIGYQESIGNPDLANFFPFMRFLDLQGNSKKMRESSGRLLQVFREFYDARIVEKSSRSVEKDVSSKDFLDVLIDLQQGDETEINIDEIEHLLLDMFVAGTDTNSSTVEWAMAELLGNPKTMTKVQDEINHVIGQNGDFQESDISKLPYLKAVVKETFRLHPAAPFLLQRKAETNVEILGFTVLKDSQVLVNVWAIGRDPLVWENPTHFEPERFLGKEIDVKGTDYELTPFGAGRRICPGLPLAMKTVHLMLASLLYTFEWKLPNGVGSEDLDMEETFGLTVHKTNPLLAVPLKKRAIN

SEQ ID NO: 96506 - protein, 379 aa, Arabidopsis thaliana
  peptide (1)..(379): Ceres Seq. ID no. 12733625
MLRKLSATQLFSPQCIQATKALRMKKVQELVNFLSESCEREEAVDISHVSFVTALNIISNILFSVNLGSYDSKNSSAFQEMVIGYQESIGNPDLANFFPFMRFLDLQGNSKKMRESSGRLLQVFREFYDARIVEKSSRSVEKDVSSKDFLDVLIDLQQGDETEINIDEIEHLLLDMFVAGTDTNSSTVEWAMAELLGNPKTMTKVQDEINHVIGQNGDFQESDISKLPYLKAVVKETFRLHPAAPFLLQRKAETNVEILGFTVLKDSQVLVNVWAIGRDPLVWENPTHFEPERFLGKEIDVKGTDYELTPFGAGRRICPGLPLAMKTVHLMLASLLYTFEWKLPNGVGSEDLDMEETFGLTVHKTNPLLAVPLKKRAIN

SEQ ID NO: 96507 - DNA, 1845 bp, Arabidopsis thaliana
  misc_feature (1)..(1845): Ceres Seq. ID no. 12733630
  misc_feature (1)..(1845): Ortholog of  Ceres SEQ ID NO 13663060 as cited in SEQ ID NO 60964
  misc_feature (1)..(1845): Ortholog of  Ceres SEQ ID NO 13598532 as cited in SEQ ID NO 65204
  misc_feature (1)..(1845): Ortholog of  Ceres SEQ ID NO 13656849 as cited in SEQ ID NO 65764
  misc_feature (1)..(1845): Ortholog of  Ceres SEQ ID NO 13656501 as cited in SEQ ID NO 69206
atgggctgcatttgctcaaaaggagcagcagaagatgaagagggtgttgtttatcatcgtgagaaagcaaatgaatattggaacaaatcttcttctgttcaattgattgctcctctgccttcgaataaagacgatttttcgcataaagccgttgatggaagctctggtggtggaagaagagcgagtggtcttattgttcctattgatgatagtcatgatggtaagacggttattgtagagagaccttcaaggtctcaaagaggaagaagagtttcggataatggcaaaggaggaggattgattatttcgaatgttccgcgtagcgcagaagcagagcttattgcagctggttggccttattggttaacctctgttgctggtgaagctattaaaggttgggttccgcgacgtgctgattcctttgagaagcttgacaaaattgggcaagggacttatagcattgtgtataaggcaagggatcttgagacaggcaaaatcgtggcaatgaagaaggtgaggtttgctaatatggatcctgaaagtgtaaggttcatggctagagaaatcaacattttacgaaaactcgaccatccaaatgttatgaagcttcagtgtcttgtcacttcaaagctatcaggtagcttgcaccttgtatttgagtacatggagcatgatctttcaggcttggctcttaggcctggtgtcaaattcactgaaccacagatcaagtgttttatgaaacaacttctttgtggacttgagcattgtcatagccgtggaatccttcaccgtgacatcaagggttcaaatcttttggtaaacaatgatggagttcttaagatcggagatttcggtctggcgagtttttataaaccagatcaagatcaaccactgactagccgtgtagtcaccttgtggtatagagctcctgagcttctacttggatctacagagtatggacccgccattgatctctggagcgttggttgcattctcgctgaactctttgtatgtaaaccaatcatgccgggaagaacagaggtcgagcaaatgcacaagatctttaaactgtgtggttcaccatctgaagagttctggaatacgacaaagttcccacaggcgacaagttacaaaccgcaacatccttataagcgtgtccttctagagacgttcaagaatctatcatcttcttctctagatcttcttgacaagcttctatctgtagaaccagagaaacgatgctcagcttcttcgactctactgagtgagttttttacaacggagcctctcccttgtcacatatcaagtttgcctaagtatccaccaagcaaggaactcgatgcaaaggttcgagacgaagaagctaaaaggaaaaaagctgaagctgtgaagtggcgtggacatgaatctgtgagaagagggttaagagactccaaggtaacaccagagttcattgcttcaggaaattcaaatgtctcactcactaccccgtcgttcaagaaagaaaagcgctttacggataccaattcagtgatccatccaagctctaggagcaatgtaggtgaggtgaagccaagccgatccaacaacgtacctgctacaatgggagactacttagctagttcttcgcaaaaggagaatatcgtttcaagagcacccgcaacgacatacatgcgaaagaagaacagaatgcactattcaggtccactgatgcctcctggtggtaacattgaagacatgatgaaagagcacgagagacgaatccaagaagctgtacgcaagtcccgccttgagaaatctgctacaaagaagaacaaagatatctcagtcaaagcatgtgcttag

SEQ ID NO: 96508 - protein, 614 aa, Arabidopsis thaliana
  peptide (1)..(614): Ceres Seq. ID no. 12733631
MGCICSKGAAEDEEGVVYHREKANEYWNKSSSVQLIAPLPSNKDDFSHKAVDGSSGGGRRASGLIVPIDDSHDGKTVIVERPSRSQRGRRVSDNGKGGGLIISNVPRSAEAELIAAGWPYWLTSVAGEAIKGWVPRRADSFEKLDKIGQGTYSIVYKARDLETGKIVAMKKVRFANMDPESVRFMAREINILRKLDHPNVMKLQCLVTSKLSGSLHLVFEYMEHDLSGLALRPGVKFTEPQIKCFMKQLLCGLEHCHSRGILHRDIKGSNLLVNNDGVLKIGDFGLASFYKPDQDQPLTSRVVTLWYRAPELLLGSTEYGPAIDLWSVGCILAELFVCKPIMPGRTEVEQMHKIFKLCGSPSEEFWNTTKFPQATSYKPQHPYKRVLLETFKNLSSSSLDLLDKLLSVEPEKRCSASSTLLSEFFTTEPLPCHISSLPKYPPSKELDAKVRDEEAKRKKAEAVKWRGHESVRRGLRDSKVTPEFIASGNSNVSLTTPSFKKEKRFTDTNSVIHPSSRSNVGEVKPSRSNNVPATMGDYLASSSQKENIVSRAPATTYMRKKNRMHYSGPLMPPGGNIEDMMKEHERRIQEAVRKSRLEKSATKKNKDISVKACA

SEQ ID NO: 96509 - protein, 446 aa, Arabidopsis thaliana
  peptide (1)..(446): Ceres Seq. ID no. 12733632
MKKVRFANMDPESVRFMAREINILRKLDHPNVMKLQCLVTSKLSGSLHLVFEYMEHDLSGLALRPGVKFTEPQIKCFMKQLLCGLEHCHSRGILHRDIKGSNLLVNNDGVLKIGDFGLASFYKPDQDQPLTSRVVTLWYRAPELLLGSTEYGPAIDLWSVGCILAELFVCKPIMPGRTEVEQMHKIFKLCGSPSEEFWNTTKFPQATSYKPQHPYKRVLLETFKNLSSSSLDLLDKLLSVEPEKRCSASSTLLSEFFTTEPLPCHISSLPKYPPSKELDAKVRDEEAKRKKAEAVKWRGHESVRRGLRDSKVTPEFIASGNSNVSLTTPSFKKEKRFTDTNSVIHPSSRSNVGEVKPSRSNNVPATMGDYLASSSQKENIVSRAPATTYMRKKNRMHYSGPLMPPGGNIEDMMKEHERRIQEAVRKSRLEKSATKKNKDISVKACA

SEQ ID NO: 96510 - protein, 438 aa, Arabidopsis thaliana
  peptide (1)..(438): Ceres Seq. ID no. 12733633
MDPESVRFMAREINILRKLDHPNVMKLQCLVTSKLSGSLHLVFEYMEHDLSGLALRPGVKFTEPQIKCFMKQLLCGLEHCHSRGILHRDIKGSNLLVNNDGVLKIGDFGLASFYKPDQDQPLTSRVVTLWYRAPELLLGSTEYGPAIDLWSVGCILAELFVCKPIMPGRTEVEQMHKIFKLCGSPSEEFWNTTKFPQATSYKPQHPYKRVLLETFKNLSSSSLDLLDKLLSVEPEKRCSASSTLLSEFFTTEPLPCHISSLPKYPPSKELDAKVRDEEAKRKKAEAVKWRGHESVRRGLRDSKVTPEFIASGNSNVSLTTPSFKKEKRFTDTNSVIHPSSRSNVGEVKPSRSNNVPATMGDYLASSSQKENIVSRAPATTYMRKKNRMHYSGPLMPPGGNIEDMMKEHERRIQEAVRKSRLEKSATKKNKDISVKACA

SEQ ID NO: 96511 - DNA, 1387 bp, Arabidopsis thaliana
  misc_feature (1)..(1387): Ceres Seq. ID no. 12733638
  misc_feature (1)..(1387): Ortholog of  Ceres SEQ ID NO 12364737 as cited in SEQ ID NO 51089
  misc_feature (1)..(1387): Ortholog of  Ceres SEQ ID NO 13595567 as cited in SEQ ID NO 56760
  misc_feature (1)..(1387): Ortholog of  Ceres SEQ ID NO 14315035 as cited in SEQ ID NO 56880
  misc_feature (1)..(1387): Ortholog of  Ceres SEQ ID NO 13594147 as cited in SEQ ID NO 58975
  misc_feature (1)..(1387): Ortholog of  Ceres SEQ ID NO 13655302 as cited in SEQ ID NO 63307
  misc_feature (1)..(1387): Ortholog of  Ceres SEQ ID NO 13597380 as cited in SEQ ID NO 64054
  misc_feature (1)..(1387): Ortholog of  Ceres SEQ ID NO 12625474 as cited in SEQ ID NO 64169
  misc_feature (1)..(1387): Ortholog of  Ceres SEQ ID NO 13597502 as cited in SEQ ID NO 64681
aatctcattcttcttaaaaaccattacaattatttcactaaattataacttaatgggcattctccgttttgtattgttgattagtttgaatctggttttgtttggttttaaaacgaccgtgtcacagccacaacaacaggcacaagtcccatgtttattcatcttcggtgactctttagtcgacaatggaaacaacaataggttgctttctcttgcgagggctaattaccgaccttatggcattgactttccccaaggtacaacgggacggttcaccaacggtcgcacctacgttgatgcactagctcaaattcttggatttaggaactatattccaccatattccaggattcgtggccaggctatacttagaggtgcgaatttcgcatctggtgcagctggcattagagatgagaccggtgacaacttgggtgcacatacttctatgaaccagcaggtagagctatacacgaccgcggttcaacagatgcttcgatacttcagaggagacacaaatgagctccagagatacttaagccgttgtatcttttactcgggaatgggaagtaacgattatctcaacaattacttcatgcctgacttttactcaaccagtaccaattacaatgacaaaacctttgctgagtctctgataaagaactacacacaacagctcacgcgattgtaccaatttggagctcggaaagtgattgtgactggagtgggacagatcggttgcataccttaccagctcgcccgctacaataatcgtaacaatagtactggcagatgcaacgaaaagattaacaacgcaattgtggtgtttaacactcaagtcaagaaactagtggaccgtttaaacaaaggtcagttgaagggagcaaagtttgtttaccttgattcctacaagagtacctatgatctcgccgtcaatggagccgcttacggatttgaggttgtggacaaaggttgttgtggggtggggaggaacaatggtcagataacatgtttgccgctgcagaccccgtgccctgaccgaaccaagtatctcttttgggacgcgtttcatccgacggagactgctaacatactgctggcgaaatctaatttttactcccgagcttacacttacccaatcaacatccaagaactagccaatctttgaagaaataatatcttgatctcccatatgaatgcatatatgtcatgtaatatggctatttataaaatgtttctatttcctatgtgttaacttatgtttctttgaaataactaatgtttctttgtttctgtattgttcctcttacgtaactctcaaatataagagaaacatatgacacaagtgctcactttgattgaaagaattatattaacaattctgtttttg

SEQ ID NO: 96512 - protein, 387 aa, Arabidopsis thaliana
  peptide (1)..(387): Ceres Seq. ID no. 12733639
ISFFLKTITIISLNYNLMGILRFVLLISLNLVLFGFKTTVSQPQQQAQVPCLFIFGDSLVDNGNNNRLLSLARANYRPYGIDFPQGTTGRFTNGRTYVDALAQILGFRNYIPPYSRIRGQAILRGANFASGAAGIRDETGDNLGAHTSMNQQVELYTTAVQQMLRYFRGDTNELQRYLSRCIFYSGMGSNDYLNNYFMPDFYSTSTNYNDKTFAESLIKNYTQQLTRLYQFGARKVIVTGVGQIGCIPYQLARYNNRNNSTGRCNEKINNAIVVFNTQVKKLVDRLNKGQLKGAKFVYLDSYKSTYDLAVNGAAYGFEVVDKGCCGVGRNNGQITCLPLQTPCPDRTKYLFWDAFHPTETANILLAKSNFYSRAYTYPINIQELANL

SEQ ID NO: 96513 - protein, 370 aa, Arabidopsis thaliana
  peptide (1)..(370): Ceres Seq. ID no. 12733640
MGILRFVLLISLNLVLFGFKTTVSQPQQQAQVPCLFIFGDSLVDNGNNNRLLSLARANYRPYGIDFPQGTTGRFTNGRTYVDALAQILGFRNYIPPYSRIRGQAILRGANFASGAAGIRDETGDNLGAHTSMNQQVELYTTAVQQMLRYFRGDTNELQRYLSRCIFYSGMGSNDYLNNYFMPDFYSTSTNYNDKTFAESLIKNYTQQLTRLYQFGARKVIVTGVGQIGCIPYQLARYNNRNNSTGRCNEKINNAIVVFNTQVKKLVDRLNKGQLKGAKFVYLDSYKSTYDLAVNGAAYGFEVVDKGCCGVGRNNGQITCLPLQTPCPDRTKYLFWDAFHPTETANILLAKSNFYSRAYTYPINIQELANL

SEQ ID NO: 96514 - protein, 239 aa, Arabidopsis thaliana
  peptide (1)..(239): Ceres Seq. ID no. 12733641
MNQQVELYTTAVQQMLRYFRGDTNELQRYLSRCIFYSGMGSNDYLNNYFMPDFYSTSTNYNDKTFAESLIKNYTQQLTRLYQFGARKVIVTGVGQIGCIPYQLARYNNRNNSTGRCNEKINNAIVVFNTQVKKLVDRLNKGQLKGAKFVYLDSYKSTYDLAVNGAAYGFEVVDKGCCGVGRNNGQITCLPLQTPCPDRTKYLFWDAFHPTETANILLAKSNFYSRAYTYPINIQELANL

SEQ ID NO: 96515 - DNA, 1011 bp, Arabidopsis thaliana
  misc_feature (1)..(1011): Ceres Seq. ID no. 12733649
  misc_feature (1)..(1011): Ortholog of  Ceres SEQ ID NO 13596030 as cited in SEQ ID NO 62043
atggctgaagatcagaacacaactgaccgttgggagttgccttcagcgtcagagcccgtcaaaaacgttgaccgttgggagttgccttcagcgtcagagcccgtcaaaaacgtagttctggtaggccgtactgggaatggaaaaagcgccactggaaattccatcatcggaagaaaggttttcgagtcaaaatatcaagctgttggtgttaccacaagatgtaagacatttagagctgtgacaccggatggccccataatcaatgtgattgacactcctggtctcttcgacctggccgtgtccgctgagtttattagtaaggaaatcgtcaactgccttattcttgctagagaagggctacatgctgtggtgttagttctatccttgtcgactcggatttcacaagaggaagaaaacgcactttgtacgttacagatgttgttcgggggtaaaatcgttgactatttgatcgttgtattcacttgtggtgatatgttggaagatcgaaatatgactttagaagattatttgtccaatggttgccctgaatttctaaagaatgttctcagactatgtggaggcagaagggttgtatttgataaccgaacgaaagatgaaggtgtgaaggctaagcaagtccagcagcttctggtccatgtcgcagcgattgaaaaggaaactggtgggaatccctttacggacacgatgcaccgtaggatacaggaagaggctgcaagggttaaaagggaagagaaggaaattgaagaaaaaaacattgcagacgaagagaaagcagcgttgaagaagcagttagacatgtcgtatagccaaaacatgaacatgatggcattgatgatggagaggatatttaaagaaacagcagcggcgaatgagagacaaatgaatatgatgaaagactttatggaaatttcaataataggaaatgatgctcatcgtaaaagagctgaagagaagcaggcagagaagaaacaagaatgcaacatcctgtga

SEQ ID NO: 96516 - protein, 336 aa, Arabidopsis thaliana
  peptide (1)..(336): Ceres Seq. ID no. 12733650
MAEDQNTTDRWELPSASEPVKNVDRWELPSASEPVKNVVLVGRTGNGKSATGNSIIGRKVFESKYQAVGVTTRCKTFRAVTPDGPIINVIDTPGLFDLAVSAEFISKEIVNCLILAREGLHAVVLVLSLSTRISQEEENALCTLQMLFGGKIVDYLIVVFTCGDMLEDRNMTLEDYLSNGCPEFLKNVLRLCGGRRVVFDNRTKDEGVKAKQVQQLLVHVAAIEKETGGNPFTDTMHRRIQEEAARVKREEKEIEEKNIADEEKAALKKQLDMSYSQNMNMMALMMERIFKETAAANERQMNMMKDFMEISIIGNDAHRKRAEEKQAEKKQECNIL

SEQ ID NO: 96517 - protein, 191 aa, Arabidopsis thaliana
  peptide (1)..(191): Ceres Seq. ID no. 12733651
MLFGGKIVDYLIVVFTCGDMLEDRNMTLEDYLSNGCPEFLKNVLRLCGGRRVVFDNRTKDEGVKAKQVQQLLVHVAAIEKETGGNPFTDTMHRRIQEEAARVKREEKEIEEKNIADEEKAALKKQLDMSYSQNMNMMALMMERIFKETAAANERQMNMMKDFMEISIIGNDAHRKRAEEKQAEKKQECNIL

SEQ ID NO: 96518 - protein, 172 aa, Arabidopsis thaliana
  peptide (1)..(172): Ceres Seq. ID no. 12733652
MLEDRNMTLEDYLSNGCPEFLKNVLRLCGGRRVVFDNRTKDEGVKAKQVQQLLVHVAAIEKETGGNPFTDTMHRRIQEEAARVKREEKEIEEKNIADEEKAALKKQLDMSYSQNMNMMALMMERIFKETAAANERQMNMMKDFMEISIIGNDAHRKRAEEKQAEKKQECNIL

SEQ ID NO: 96519 - DNA, 984 bp, Arabidopsis thaliana
  misc_feature (1)..(984): Ceres Seq. ID no. 12733675
  misc_feature (1)..(984): Ortholog of  Ceres SEQ ID NO 13596108 as cited in SEQ ID NO 68591
atggatagtgacattgtttccagtagcatagatcgatctcagacagcaatgcctgatgctttagcattcaagagtatcaatgatcctatcaagaaccagatcaatagttgtgctgcaatctgtgttaagcaagatgatccatgccatttcttgcgtgtcctttatgagtctctgataacaggagggttagctggtgttgtggtggaagctgctttgtatccaattgatacaatcaaaactcgaatacaggtagtttctcctcaaaccaatttctcgggatggtggaaagataatatggaaggattatactctggtcttggtggaaatcttgtcggtgtcttacctgcttcggctctattttttggtgtatatgaaccaaccaaacagaagctgctaaaggttttaccagataatcttagtgcggttgcacatttggctgcaggtgcgttaggaggtgctgtttcatctattgttcgggtaccaacagaagttgtgaaacagcggatgcagactggtcaatttgtttcggcccctgacgctgttcgccttattatagccaaggagggctttggaggcatgtatgcgggttatggatccttcttattgcgagatttgccttttgacgcgctccagttttgtgtttatgagcaattacgaattggatacaagttggctgcaagaagagatctaaatgatccagagaatgcgatgattggtgcttttgctggtgctgtcactggagttttgaccactcctcttgatgttatcaaaaccagattaatggttcagggctcaggaactcagtataaaggagtttcggattgcattaagacgataataagagaagaaggttcatcagctttgtggaagggaatgggtccaagggtattgtggataggtattggaggttcaattttctttggtgttttggaaaagacaaagcagattctttcagagagaagccaaaagagtcacaatgcttaa

SEQ ID NO: 96520 - protein, 327 aa, Arabidopsis thaliana
  peptide (1)..(327): Ceres Seq. ID no. 12733676
MDSDIVSSSIDRSQTAMPDALAFKSINDPIKNQINSCAAICVKQDDPCHFLRVLYESLITGGLAGVVVEAALYPIDTIKTRIQVVSPQTNFSGWWKDNMEGLYSGLGGNLVGVLPASALFFGVYEPTKQKLLKVLPDNLSAVAHLAAGALGGAVSSIVRVPTEVVKQRMQTGQFVSAPDAVRLIIAKEGFGGMYAGYGSFLLRDLPFDALQFCVYEQLRIGYKLAARRDLNDPENAMIGAFAGAVTGVLTTPLDVIKTRLMVQGSGTQYKGVSDCIKTIIREEGSSALWKGMGPRVLWIGIGGSIFFGVLEKTKQILSERSQKSHNA

SEQ ID NO: 96521 - protein, 311 aa, Arabidopsis thaliana
  peptide (1)..(311): Ceres Seq. ID no. 12733677
MPDALAFKSINDPIKNQINSCAAICVKQDDPCHFLRVLYESLITGGLAGVVVEAALYPIDTIKTRIQVVSPQTNFSGWWKDNMEGLYSGLGGNLVGVLPASALFFGVYEPTKQKLLKVLPDNLSAVAHLAAGALGGAVSSIVRVPTEVVKQRMQTGQFVSAPDAVRLIIAKEGFGGMYAGYGSFLLRDLPFDALQFCVYEQLRIGYKLAARRDLNDPENAMIGAFAGAVTGVLTTPLDVIKTRLMVQGSGTQYKGVSDCIKTIIREEGSSALWKGMGPRVLWIGIGGSIFFGVLEKTKQILSERSQKSHNA

SEQ ID NO: 96522 - protein, 229 aa, Arabidopsis thaliana
  peptide (1)..(229): Ceres Seq. ID no. 12733678
MEGLYSGLGGNLVGVLPASALFFGVYEPTKQKLLKVLPDNLSAVAHLAAGALGGAVSSIVRVPTEVVKQRMQTGQFVSAPDAVRLIIAKEGFGGMYAGYGSFLLRDLPFDALQFCVYEQLRIGYKLAARRDLNDPENAMIGAFAGAVTGVLTTPLDVIKTRLMVQGSGTQYKGVSDCIKTIIREEGSSALWKGMGPRVLWIGIGGSIFFGVLEKTKQILSERSQKSHNA

SEQ ID NO: 96523 - DNA, 1620 bp, Arabidopsis thaliana
  misc_feature (1)..(1620): Ceres Seq. ID no. 12733695
  misc_feature (1)..(1620): Ortholog of  Ceres SEQ ID NO 14313471 as cited in SEQ ID NO 64513
  misc_feature (1)..(1620): Ortholog of  Ceres SEQ ID NO 13591377 as cited in SEQ ID NO 66534
gaaaacactaaagaggaaattaagtgaccaagtcttcttcttctttactctctcctttctgttaccgtcgaaaaaatcgagctaatgtccggtgataaccagatccgaatcggactcttaagctgcacaaacaaagtccgcaaactctctcgagctataaatctctctccaaacgctactatatccgccatagccaccacaagctccatcgaagaagcaaaatcatttgctaaatccaacaatttccctccgaatacaaaactccacagctcctacgagtcacttctagaagatcccgacgtcgacgccgtctatttccctatccccactcgcctccacgtcgagtgggctacactcgccgctattaagggtaaacatatactccttgataagcctgttgctttaaacgtagctgagtttgatcagatcgttgaagcttgtgaggttaatggtgttcaatttatggatggaactcagtggatgcatagccctagaacggataagattaaagaatttgtgaatgatttagagagttttggtcagattaaatctgtgtatagttgtttctcatttgctgcgagtgatgatttcttaaaacatgatattcgtgtaaagcctggtcttgatggacttggagctctcggtgatgctggatggtatacgatccaagcgattcttcttgttaacaactttaaacttccgaagaccgttactgctttgtccggttctgttttaaacgatgcggggattgttctttcttgtggtgcgttgtttgattgggaagatggggtcaatgcaacgatttactgttctttcttggcgaatttgacgatggagataactgcgatcggtacgaaaggtagtcttcgtgttcatgattttgttataccgtatatggaaaccgaggctgtgtttactacaagtggtggaggttgtgttagtgaacataaagtaatgactgagctttcacaagaggcgtgtatggttatggaatttgctcggttggttggagaaatcaaaaacagaggagctaaaccggatgggttttggatgaggtttagccggaatacgcagttgcttgttgatgctgtgaaagagtcgattgataataaccttgaaccggtgtttctctccggccggtgagaaagagctcagaagttagatcagatttgtttgtgtcgatgcttttagtagatgtagtaattaggggtttatgtatgatatcttctcggcgtccgttggtggagaggtcaattaaagatctccttggcgcatggctgcaagcatttcatcaatacatttcatccatcaccaagaaattctagggatatatactgcatagagcttcaaagacttggtgcagtgtcactcacgagttttgctgtgtttaatgtggcaccggggtttgcttgtaaatctatacctccagctttaatagcagaggtagtgactatggctggtaaactttggcattatgtgacttctttctccgatgtgacatcttcaggtgtccaaacaaaaatctctgctcataagacaatataagttcatcgacaatactagctactgttttgttgaattcacaatctctgcacctttcttatatagcagccaccttgg

SEQ ID NO: 96524 - protein, 352 aa, Arabidopsis thaliana
  peptide (1)..(352): Ceres Seq. ID no. 12733696
MSGDNQIRIGLLSCTNKVRKLSRAINLSPNATISAIATTSSIEEAKSFAKSNNFPPNTKLHSSYESLLEDPDVDAVYFPIPTRLHVEWATLAAIKGKHILLDKPVALNVAEFDQIVEACEVNGVQFMDGTQWMHSPRTDKIKEFVNDLESFGQIKSVYSCFSFAASDDFLKHDIRVKPGLDGLGALGDAGWYTIQAILLVNNFKLPKTVTALSGSVLNDAGIVLSCGALFDWEDGVNATIYCSFLANLTMEITAIGTKGSLRVHDFVIPYMETEAVFTTSGGGCVSEHKVMTELSQEACMVMEFARLVGEIKNRGAKPDGFWMRFSRNTQLLVDAVKESIDNNLEPVFLSGR

SEQ ID NO: 96525 - protein, 226 aa, Arabidopsis thaliana
  peptide (1)..(226): Ceres Seq. ID no. 12733697
MDGTQWMHSPRTDKIKEFVNDLESFGQIKSVYSCFSFAASDDFLKHDIRVKPGLDGLGALGDAGWYTIQAILLVNNFKLPKTVTALSGSVLNDAGIVLSCGALFDWEDGVNATIYCSFLANLTMEITAIGTKGSLRVHDFVIPYMETEAVFTTSGGGCVSEHKVMTELSQEACMVMEFARLVGEIKNRGAKPDGFWMRFSRNTQLLVDAVKESIDNNLEPVFLSGR

SEQ ID NO: 96526 - protein, 220 aa, Arabidopsis thaliana
  peptide (1)..(220): Ceres Seq. ID no. 12733698
MHSPRTDKIKEFVNDLESFGQIKSVYSCFSFAASDDFLKHDIRVKPGLDGLGALGDAGWYTIQAILLVNNFKLPKTVTALSGSVLNDAGIVLSCGALFDWEDGVNATIYCSFLANLTMEITAIGTKGSLRVHDFVIPYMETEAVFTTSGGGCVSEHKVMTELSQEACMVMEFARLVGEIKNRGAKPDGFWMRFSRNTQLLVDAVKESIDNNLEPVFLSGR

SEQ ID NO: 96527 - DNA, 1860 bp, Arabidopsis thaliana
  misc_feature (1)..(1860): Ceres Seq. ID no. 12733699
  misc_feature (1)..(1860): Ortholog of  Ceres SEQ ID NO 14304871 as cited in SEQ ID NO 54194
  misc_feature (1)..(1860): Ortholog of  Ceres SEQ ID NO 13597751 as cited in SEQ ID NO 60721
atgtcgatgctcgattccttcttcaataagggtttcaaagctgcaaaatgcaaaaccttgctcaagttaacgatccctaggattaagctaatcaggaatagaagagaagcacagattaaacaaatgcgtcgtgaaattgcaaagcttctcgagactggtcaagaagctactgctcgaattcgggttgagcatattataagggaagagaagatgatggctgctcaagagatccttgagctcttctgtgaactcattgctgttcgtcttccgattattgaggcacaaagggaatgtcctttggatctaaaagaagcgatatcaagtgtatgttttgctgcgccgaggtgctctgacttgacagagctgcagcaggttcagatactgtttgtatctaagtatggaaaggaatttgttgcagctgcatctgagctcaagccggattctggtgtcaatcgtaagttggtggagttgctgtctgtacgtgcaccttctccagaaactaaactgaaacttctcaaggaaattgcagaagaacatgaacttgattgggaccctgcttctacagaaactgatctcttcaaatctcatgaagatctccttgatggaccaaaacaatttggtgggggatctaagctgccgttaccagaggaacaaaatgaaaagacaaatttaacatctctttcagcggcaaaggagaaatctgattctgactcagagtatgatatattggactttcccgaggttccaaatgtcttgctgcgaccaactcctggtgctacctctgtaaatgcaccggatgcagcgaaatcagccagttatgaacatacctctcacgacttgccctttgattcagagaatgcaggagtcgaaaaaacggcttccaaaagagatgaacatcctgcaaaagcaagcaaaactgtcgtggaaggccaacaatcttcacccattctgatggaatctttcgaaaagaagaattactctccgccatccattgatgcagtagggcccatccctacaaaagagagtggtgcttccagagatactccaaggaaaatatccgatggagacttgcaggatgtcttaatggctgctcaagctgctgctgactcagcagaacgtgcagcatcagctgcccgctcagctgcaagcctggcacaactcagaatcaacgagcttaccaggaagacttctgatcagtatccagaaagtccgtctgagaaccctttccatgctccctcaatgggaaaccttcaatttgatcatcagaattcttcggccagcagtagcggagatcttacagagctccagagagcagaaacttcgtcacttttcaactctgagcagaacaaccaacagccacagacacactcttcaatggaaaaaccgcagtttgatcgtcagaactcatcattcagtagctatggcgatcttaccccacagagattccattcaatggaaaaaccacagtttgatcatcagaactcatcaggcagcaactatgacgatcttacaccacagagattctcgtcattggagaaaccgcagtttgatcatcagaactcatcaggcagcaactatgacgatcttacaccacatagattcccgtcaatggagaaaccgcagtttgatcatcagaactcatcagtcagcagctatggcgatctgccagagctccaaaggccagagacttcaccacttgacagactcagccctgaccaggaccatcagcaaatgagactgccttcaatggaagatgatccctattactcataccctaatctcttcacatcgcagaagcatgatccctcatctggctctcattcgttctcagacaatacaagacccgcccatgattcgtga

SEQ ID NO: 96528 - protein, 619 aa, Arabidopsis thaliana
  peptide (1)..(619): Ceres Seq. ID no. 12733700
MSMLDSFFNKGFKAAKCKTLLKLTIPRIKLIRNRREAQIKQMRREIAKLLETGQEATARIRVEHIIREEKMMAAQEILELFCELIAVRLPIIEAQRECPLDLKEAISSVCFAAPRCSDLTELQQVQILFVSKYGKEFVAAASELKPDSGVNRKLVELLSVRAPSPETKLKLLKEIAEEHELDWDPASTETDLFKSHEDLLDGPKQFGGGSKLPLPEEQNEKTNLTSLSAAKEKSDSDSEYDILDFPEVPNVLLRPTPGATSVNAPDAAKSASYEHTSHDLPFDSENAGVEKTASKRDEHPAKASKTVVEGQQSSPILMESFEKKNYSPPSIDAVGPIPTKESGASRDTPRKISDGDLQDVLMAAQAAADSAERAASAARSAASLAQLRINELTRKTSDQYPESPSENPFHAPSMGNLQFDHQNSSASSSGDLTELQRAETSSLFNSEQNNQQPQTHSSMEKPQFDRQNSSFSSYGDLTPQRFHSMEKPQFDHQNSSGSNYDDLTPQRFSSLEKPQFDHQNSSGSNYDDLTPHRFPSMEKPQFDHQNSSVSSYGDLPELQRPETSPLDRLSPDQDHQQMRLPSMEDDPYYSYPNLFTSQKHDPSSGSHSFSDNTRPAHDS

SEQ ID NO: 96529 - protein, 617 aa, Arabidopsis thaliana
  peptide (1)..(617): Ceres Seq. ID no. 12733701
MLDSFFNKGFKAAKCKTLLKLTIPRIKLIRNRREAQIKQMRREIAKLLETGQEATARIRVEHIIREEKMMAAQEILELFCELIAVRLPIIEAQRECPLDLKEAISSVCFAAPRCSDLTELQQVQILFVSKYGKEFVAAASELKPDSGVNRKLVELLSVRAPSPETKLKLLKEIAEEHELDWDPASTETDLFKSHEDLLDGPKQFGGGSKLPLPEEQNEKTNLTSLSAAKEKSDSDSEYDILDFPEVPNVLLRPTPGATSVNAPDAAKSASYEHTSHDLPFDSENAGVEKTASKRDEHPAKASKTVVEGQQSSPILMESFEKKNYSPPSIDAVGPIPTKESGASRDTPRKISDGDLQDVLMAAQAAADSAERAASAARSAASLAQLRINELTRKTSDQYPESPSENPFHAPSMGNLQFDHQNSSASSSGDLTELQRAETSSLFNSEQNNQQPQTHSSMEKPQFDRQNSSFSSYGDLTPQRFHSMEKPQFDHQNSSGSNYDDLTPQRFSSLEKPQFDHQNSSGSNYDDLTPHRFPSMEKPQFDHQNSSVSSYGDLPELQRPETSPLDRLSPDQDHQQMRLPSMEDDPYYSYPNLFTSQKHDPSSGSHSFSDNTRPAHDS

SEQ ID NO: 96530 - protein, 578 aa, Arabidopsis thaliana
  peptide (1)..(578): Ceres Seq. ID no. 12733702
MRREIAKLLETGQEATARIRVEHIIREEKMMAAQEILELFCELIAVRLPIIEAQRECPLDLKEAISSVCFAAPRCSDLTELQQVQILFVSKYGKEFVAAASELKPDSGVNRKLVELLSVRAPSPETKLKLLKEIAEEHELDWDPASTETDLFKSHEDLLDGPKQFGGGSKLPLPEEQNEKTNLTSLSAAKEKSDSDSEYDILDFPEVPNVLLRPTPGATSVNAPDAAKSASYEHTSHDLPFDSENAGVEKTASKRDEHPAKASKTVVEGQQSSPILMESFEKKNYSPPSIDAVGPIPTKESGASRDTPRKISDGDLQDVLMAAQAAADSAERAASAARSAASLAQLRINELTRKTSDQYPESPSENPFHAPSMGNLQFDHQNSSASSSGDLTELQRAETSSLFNSEQNNQQPQTHSSMEKPQFDRQNSSFSSYGDLTPQRFHSMEKPQFDHQNSSGSNYDDLTPQRFSSLEKPQFDHQNSSGSNYDDLTPHRFPSMEKPQFDHQNSSVSSYGDLPELQRPETSPLDRLSPDQDHQQMRLPSMEDDPYYSYPNLFTSQKHDPSSGSHSFSDNTRPAHDS

SEQ ID NO: 96531 - DNA, 1621 bp, Arabidopsis thaliana
  misc_feature (1)..(1621): Ceres Seq. ID no. 12733707
  misc_feature (1)..(1621): Ortholog of  Ceres SEQ ID NO 13648575 as cited in SEQ ID NO 20407
agagatctttcctgcgaagcaaaatcgaagatggttcctaagatcgcatcaatggcgtctactagacctctctgttcaattccttctatcttcctctctttctctctcctcttcgtcgtctctcttctcttcttcttctccaattccttaatctccaatccaaatccgagcatttcacacaacactctccaaaacggtatcaatgtctatgtagctgagcttccaagatccctaaactatggtcttatcgacaaatactggtcctcttctactccagattcacgtatacccagtgacccagatcacccgacccgtaaaacccattcacccgataaatacccaccgtacccagagaacccgttgatcaagcaatacagtgctgagtactggatcatgggagacctagaaacctcaccagagaaacgaattggatcttttgctaaaagggtttttagtgaatctgacgctgatgtagtcttcgtgcctttctttgcgacgttaagtgcagagatggagcttggaaatggtaaaggttcgtttagaaagaagtctggtaacgaagattatcaaagacagagacaagtgcttgattttgtcaagaacactaaagcttggaaacgatctaatggtcgtgatcacgtttttgttctaacggaccctgttgcaatgtggcatgttcgtgaggagattgctttatctattcttcttgtggtggattttggaggatggtttaggcaagattctaagtcgtctaatgggactagcttgcctgagaggattcagcatactcaagtctctgtcattaaggatgtgattgttccatatacgcatttgcttcctagactggatttgtctcagaaccagagacgtcatagccttctttattttaaaggcgctaagcacagacatcggggagggttaatcagagaaaaactatgggacttgctggtcaatgagcctggcgttgtcatggaagaaggttttcctaatgcaacaggaagggaacagtcgataagaggaatgagaaactcagagttctgcttacatccagctggtgacactcccacttcatgccgtctctttgatgccattcaaagtctatgcatccctgtgattgtcagcgacaccatagagctcccgtttgagggaataatcgattactcagaattctcggtttttgcctctgtaagtgatgcattaacacctaaatggttggctaatcatctcggaaggttctctgaaagagagaaggaaacattgagaagtagaatagcaaaggttcagtcagtttttgtgtatgataatggtcatgccgatgggattggacctattgaacccaatggtgcggtgaatcacatatggaagaaggttcagcagaaggtgccaatggtgaaggaggcagtgattagggagaggagaaaaccagcaggtgcttccgttccacttcgatgtcaatgtatctaaataatgcaaccaatccaaaagatagaaagtgttccttttactttgttggtcttttcttttgtacttgtttcgtttacgaacattgttatggccactttaaaatccatgttccttagggttcacagaaaatattgaatcatgtaagaggtttcattat

SEQ ID NO: 96532 - protein, 487 aa, Arabidopsis thaliana
  peptide (1)..(487): Ceres Seq. ID no. 12733708
RDLSCEAKSKMVPKIASMASTRPLCSIPSIFLSFSLLFVVSLLFFFSNSLISNPNPSISHNTLQNGINVYVAELPRSLNYGLIDKYWSSSTPDSRIPSDPDHPTRKTHSPDKYPPYPENPLIKQYSAEYWIMGDLETSPEKRIGSFAKRVFSESDADVVFVPFFATLSAEMELGNGKGSFRKKSGNEDYQRQRQVLDFVKNTKAWKRSNGRDHVFVLTDPVAMWHVREEIALSILLVVDFGGWFRQDSKSSNGTSLPERIQHTQVSVIKDVIVPYTHLLPRLDLSQNQRRHSLLYFKGAKHRHRGGLIREKLWDLLVNEPGVVMEEGFPNATGREQSIRGMRNSEFCLHPAGDTPTSCRLFDAIQSLCIPVIVSDTIELPFEGIIDYSEFSVFASVSDALTPKWLANHLGRFSEREKETLRSRIAKVQSVFVYDNGHADGIGPIEPNGAVNHIWKKVQQKVPMVKEAVIRERRKPAGASVPLRCQCI

SEQ ID NO: 96533 - protein, 477 aa, Arabidopsis thaliana
  peptide (1)..(477): Ceres Seq. ID no. 12733709
MVPKIASMASTRPLCSIPSIFLSFSLLFVVSLLFFFSNSLISNPNPSISHNTLQNGINVYVAELPRSLNYGLIDKYWSSSTPDSRIPSDPDHPTRKTHSPDKYPPYPENPLIKQYSAEYWIMGDLETSPEKRIGSFAKRVFSESDADVVFVPFFATLSAEMELGNGKGSFRKKSGNEDYQRQRQVLDFVKNTKAWKRSNGRDHVFVLTDPVAMWHVREEIALSILLVVDFGGWFRQDSKSSNGTSLPERIQHTQVSVIKDVIVPYTHLLPRLDLSQNQRRHSLLYFKGAKHRHRGGLIREKLWDLLVNEPGVVMEEGFPNATGREQSIRGMRNSEFCLHPAGDTPTSCRLFDAIQSLCIPVIVSDTIELPFEGIIDYSEFSVFASVSDALTPKWLANHLGRFSEREKETLRSRIAKVQSVFVYDNGHADGIGPIEPNGAVNHIWKKVQQKVPMVKEAVIRERRKPAGASVPLRCQCI

SEQ ID NO: 96534 - protein, 470 aa, Arabidopsis thaliana
  peptide (1)..(470): Ceres Seq. ID no. 12733710
MASTRPLCSIPSIFLSFSLLFVVSLLFFFSNSLISNPNPSISHNTLQNGINVYVAELPRSLNYGLIDKYWSSSTPDSRIPSDPDHPTRKTHSPDKYPPYPENPLIKQYSAEYWIMGDLETSPEKRIGSFAKRVFSESDADVVFVPFFATLSAEMELGNGKGSFRKKSGNEDYQRQRQVLDFVKNTKAWKRSNGRDHVFVLTDPVAMWHVREEIALSILLVVDFGGWFRQDSKSSNGTSLPERIQHTQVSVIKDVIVPYTHLLPRLDLSQNQRRHSLLYFKGAKHRHRGGLIREKLWDLLVNEPGVVMEEGFPNATGREQSIRGMRNSEFCLHPAGDTPTSCRLFDAIQSLCIPVIVSDTIELPFEGIIDYSEFSVFASVSDALTPKWLANHLGRFSEREKETLRSRIAKVQSVFVYDNGHADGIGPIEPNGAVNHIWKKVQQKVPMVKEAVIRERRKPAGASVPLRCQCI

SEQ ID NO: 96535 - DNA, 1731 bp, Arabidopsis thaliana
  misc_feature (1)..(1731): Ceres Seq. ID no. 12733724
  misc_feature (1)..(1731): Ortholog of  Ceres SEQ ID NO 13594536 as cited in SEQ ID NO 51382
  misc_feature (1)..(1731): Ortholog of  Ceres SEQ ID NO 15172549 as cited in SEQ ID NO 57185
atctcatttctctctatctctctctctctctcgcattgcgattaacgaaattcgaaaaatgtctcgtcttctccaaacacccttcttaccttcagtttccctccccacaaaaacacgatcttccgttacgggtttccgggtaaagcccagaatcatcccaattcaagcaaagatccgagaaatcttcatgcctgcactaagttccacgatgaccgaaggcaaaatcgtctcttgggttaaatcagaaggcgataaactcaacaaaggagagagtgttgttgttgttgaatctgataaagctgatatggatgttgagactttctatgatggttatctagctgcaatcatggttgaagaaggtggtgttgctcctgttggttctgctattgctttgttagctgaaactgaagatgagattgctgatgctaaagctaaagcttctggtggtggtggtggtggtgattctaaggctcctccggcttctcctcccacggctgcagttgaagcacctgtgagtgttgagaagaaggttgcagctgctccggtgtccattaaggcggtggcggcgtctgcggtgcatccggcgtctgaaggagggaagaggattgtggcgtctccttatgctaagaagttagctaaggagttgaaggttgaattggctggtttagttggaagtggaccgatgggaaggattgtggctaaagatgttgaggcggttgctgctggaggaggagttcaagctgctgttgctgttaaggaggtagtggcagctcctggtgtggagttgggatcggtggttccttttacgacaatgcagggggctgtgagtaggaatatggtggagagtcttggtgttcctacttttagagtcggttacacgattagtacggatgctcttgatgctctctacaagaagattaagtcgaaaggtgtgacaatgacggcacttttagcaaaggcaactgcacttgcactggcgaaacatccagttgtaaactcgtcttgtagagatggtaacagttttgtgtataatagtagcatcaacgttgctgttgctgttgctattgatggtggtttgatcactccggtgcttcagaacgctgataaggttgacatttattcgttatctagaaaatggaaagaattggttgataaggctcgagccaagcagctgcagcctcaggagtacaacactggtaccttcactctctctaacctaggaatgtttggcgttgatcggtttgatgctattctaccccctggaacaggagcgattatggctgtcggagcatctcaaccttcagtggttgcaactaaagacggccgcattggcatgaaaaaccagatgcaggtgaatgtgacggcagatcatcgtgtcatctatggtgctgatcttgcacagttcttgcaaacattggcaagcattattgaggacccaaaggaccttacattctaggccaaattactgcttttcgcatcccagtcttctctgcttttgattccatgggagcttgtatttctgcggtaatcagtttctttgatagaacaaaccttttaagattaaacataatcatttctttgtttgagatatatcttctgcaacattttctgcatggaaaggccgtcccacatgattttgctactgacttcatatatatccacttcatgcgatgaatcttatatgaactgataactttagcatgattaataacatgaatcttatatggactg

SEQ ID NO: 96536 - protein, 484 aa, Arabidopsis thaliana
  peptide (1)..(484): Ceres Seq. ID no. 12733725
SHFSLSLSLSRIAINEIRKMSRLLQTPFLPSVSLPTKTRSSVTGFRVKPRIIPIQAKIREIFMPALSSTMTEGKIVSWVKSEGDKLNKGESVVVVESDKADMDVETFYDGYLAAIMVEEGGVAPVGSAIALLAETEDEIADAKAKASGGGGGGDSKAPPASPPTAAVEAPVSVEKKVAAAPVSIKAVAASAVHPASEGGKRIVASPYAKKLAKELKVELAGLVGSGPMGRIVAKDVEAVAAGGGVQAAVAVKEVVAAPGVELGSVVPFTTMQGAVSRNMVESLGVPTFRVGYTISTDALDALYKKIKSKGVTMTALLAKATALALAKHPVVNSSCRDGNSFVYNSSINVAVAVAIDGGLITPVLQNADKVDIYSLSRKWKELVDKARAKQLQPQEYNTGTFTLSNLGMFGVDRFDAILPPGTGAIMAVGASQPSVVATKDGRIGMKNQMQVNVTADHRVIYGADLAQFLQTLASIIEDPKDLTF

SEQ ID NO: 96537 - protein, 465 aa, Arabidopsis thaliana
  peptide (1)..(465): Ceres Seq. ID no. 12733726
MSRLLQTPFLPSVSLPTKTRSSVTGFRVKPRIIPIQAKIREIFMPALSSTMTEGKIVSWVKSEGDKLNKGESVVVVESDKADMDVETFYDGYLAAIMVEEGGVAPVGSAIALLAETEDEIADAKAKASGGGGGGDSKAPPASPPTAAVEAPVSVEKKVAAAPVSIKAVAASAVHPASEGGKRIVASPYAKKLAKELKVELAGLVGSGPMGRIVAKDVEAVAAGGGVQAAVAVKEVVAAPGVELGSVVPFTTMQGAVSRNMVESLGVPTFRVGYTISTDALDALYKKIKSKGVTMTALLAKATALALAKHPVVNSSCRDGNSFVYNSSINVAVAVAIDGGLITPVLQNADKVDIYSLSRKWKELVDKARAKQLQPQEYNTGTFTLSNLGMFGVDRFDAILPPGTGAIMAVGASQPSVVATKDGRIGMKNQMQVNVTADHRVIYGADLAQFLQTLASIIEDPKDLTF

SEQ ID NO: 96538 - protein, 422 aa, Arabidopsis thaliana
  peptide (1)..(422): Ceres Seq. ID no. 12733727
MPALSSTMTEGKIVSWVKSEGDKLNKGESVVVVESDKADMDVETFYDGYLAAIMVEEGGVAPVGSAIALLAETEDEIADAKAKASGGGGGGDSKAPPASPPTAAVEAPVSVEKKVAAAPVSIKAVAASAVHPASEGGKRIVASPYAKKLAKELKVELAGLVGSGPMGRIVAKDVEAVAAGGGVQAAVAVKEVVAAPGVELGSVVPFTTMQGAVSRNMVESLGVPTFRVGYTISTDALDALYKKIKSKGVTMTALLAKATALALAKHPVVNSSCRDGNSFVYNSSINVAVAVAIDGGLITPVLQNADKVDIYSLSRKWKELVDKARAKQLQPQEYNTGTFTLSNLGMFGVDRFDAILPPGTGAIMAVGASQPSVVATKDGRIGMKNQMQVNVTADHRVIYGADLAQFLQTLASIIEDPKDLTF

SEQ ID NO: 96539 - DNA, 933 bp, Arabidopsis thaliana
  misc_feature (1)..(933): Ceres Seq. ID no. 12733744
  misc_feature (1)..(933): Ortholog of  Ceres SEQ ID NO 13598714 as cited in SEQ ID NO 62656
  misc_feature (1)..(933): Ortholog of  Ceres SEQ ID NO 13596969 as cited in SEQ ID NO 63375
  misc_feature (1)..(933): Ortholog of  Ceres SEQ ID NO 13597519 as cited in SEQ ID NO 64759
  misc_feature (1)..(933): Ortholog of  Ceres SEQ ID NO 13597870 as cited in SEQ ID NO 64982
  misc_feature (1)..(933): Ortholog of  Ceres SEQ ID NO 13656123 as cited in SEQ ID NO 65212
atgagggcaatcgcagcttggtttttcattttctgttaccttgttccctctgtttttgcgcagctccggcatgggttttacgagggtacatgccctcccgctgaatctatcgtgggtagagttgttttcaaccattgggaccgtaaccgaacggttactgcagcattgcttcgtatgcagtttcatgattgtgttgtcaaaggttgtgatgcttccctcttgatcgacccaacaaccgaaagaccatcagagaaaagcgtcgggcgaaatgcaggggtgagaggtttcgagatcatagatgaagctaagaaagaactcgagcttgtttgcccgaaaacagtctcttgcgcagacattgtaactatagccaccagagactcgattgcattagcgggtggtccaaagttcaaagtacgaacaggaagacgcgatggattaagatcaaaccctagtgatgttaaattgctaggaccaacagtttccgtggctacatcaatcaaagcatttaaatctataggttttaatgtaagcaccatggttgcacttattggtggtggccacactgtcggtgttgcacattgtagtctttttcaggataggattaaggatcctaaaatggacagcaaactgagagctaagttaaagaagtcatgtcgtggcccgaacgacccatcagtgttcatggaccaaaatacgccatttagagtagacaatgaaatctatagacagatgatacagcaacgagcaatccttagaattgatgacaacttgattcgcgatggatcaaccaggtcgattgtgtcagattttgcatacaacaataaattattcaaagagagttttgccgaagcgatgcagaaaatgggtgaaataggagttcttacgggagattctggagagatcaggacaaactgcagagccttcaacaactga

SEQ ID NO: 96540 - protein, 310 aa, Arabidopsis thaliana
  peptide (1)..(310): Ceres Seq. ID no. 12733745
MRAIAAWFFIFCYLVPSVFAQLRHGFYEGTCPPAESIVGRVVFNHWDRNRTVTAALLRMQFHDCVVKGCDASLLIDPTTERPSEKSVGRNAGVRGFEIIDEAKKELELVCPKTVSCADIVTIATRDSIALAGGPKFKVRTGRRDGLRSNPSDVKLLGPTVSVATSIKAFKSIGFNVSTMVALIGGGHTVGVAHCSLFQDRIKDPKMDSKLRAKLKKSCRGPNDPSVFMDQNTPFRVDNEIYRQMIQQRAILRIDDNLIRDGSTRSIVSDFAYNNKLFKESFAEAMQKMGEIGVLTGDSGEIRTNCRAFNN

SEQ ID NO: 96541 - protein, 252 aa, Arabidopsis thaliana
  peptide (1)..(252): Ceres Seq. ID no. 12733746
MQFHDCVVKGCDASLLIDPTTERPSEKSVGRNAGVRGFEIIDEAKKELELVCPKTVSCADIVTIATRDSIALAGGPKFKVRTGRRDGLRSNPSDVKLLGPTVSVATSIKAFKSIGFNVSTMVALIGGGHTVGVAHCSLFQDRIKDPKMDSKLRAKLKKSCRGPNDPSVFMDQNTPFRVDNEIYRQMIQQRAILRIDDNLIRDGSTRSIVSDFAYNNKLFKESFAEAMQKMGEIGVLTGDSGEIRTNCRAFNN

SEQ ID NO: 96542 - DNA, 912 bp, Arabidopsis thaliana
  misc_feature (1)..(912): Ceres Seq. ID no. 12733755
  misc_feature (1)..(912): Ortholog of  Ceres SEQ ID NO 13594163 as cited in SEQ ID NO 60426
  misc_feature (1)..(912): Ortholog of  Ceres SEQ ID NO 13596273 as cited in SEQ ID NO 67892
atgcctgcccaagtgatcgctgagcagaccacctttcactccgtccacgacaccattatggaggagacgaatacaactttatatcctaagaggttggaaggaaaagtagccatcataaccggaggcgcacatggaataggcaaagcaaccgtcatgttattcgctagacacggtgccacagtggtgattgctgacgtggacaacgtagctggctcttccctggctaagtcactctcatcccacaaaacctccccgatggtggcattcattagctgcgatgtctccgtagaagccgacgtggaaaaccttgtgaacgtaaccgttgcacggtacggtaggcttgacattctattcaacaacgcgggagttctcggagatcagaagaaacacaaaagcatattagacttcgacgcggacgagtttgaccacgtgatgcgtgtgaacgtacgtggcgtaggactcggcatgaaacacggggcacgcgctatgatcaagagaggattcaaaggctgcataatctccacggcgagtgtagccggtgtgatgggtggaatgggaccacacgcttacacagcctcgaaacatgcgatcgttggtttgaccaagaacgcagcgtgtgagctaggcaagtatgggattagggttaattgtatatcaccgtttggagttgccacgtcgatgctggttaacgcgtggcgaaagacgagtggtggtgacgtggaagatgatgacgtggaggagatggaggagtttgtgaggagtttggctaatttgaaaggagagacattgagagcgaatgatatagctgaagcagcgttatatttggcgagtgatgagtctaagtatgtgaacggacataatcttgtcgttgacggtggtgttacgactgcaagaaactgtgttggtttgtga

SEQ ID NO: 96543 - protein, 303 aa, Arabidopsis thaliana
  peptide (1)..(303): Ceres Seq. ID no. 12733756
MPAQVIAEQTTFHSVHDTIMEETNTTLYPKRLEGKVAIITGGAHGIGKATVMLFARHGATVVIADVDNVAGSSLAKSLSSHKTSPMVAFISCDVSVEADVENLVNVTVARYGRLDILFNNAGVLGDQKKHKSILDFDADEFDHVMRVNVRGVGLGMKHGARAMIKRGFKGCIISTASVAGVMGGMGPHAYTASKHAIVGLTKNAACELGKYGIRVNCISPFGVATSMLVNAWRKTSGGDVEDDDVEEMEEFVRSLANLKGETLRANDIAEAALYLASDESKYVNGHNLVVDGGVTTARNCVGL

SEQ ID NO: 96544 - protein, 284 aa, Arabidopsis thaliana
  peptide (1)..(284): Ceres Seq. ID no. 12733757
MEETNTTLYPKRLEGKVAIITGGAHGIGKATVMLFARHGATVVIADVDNVAGSSLAKSLSSHKTSPMVAFISCDVSVEADVENLVNVTVARYGRLDILFNNAGVLGDQKKHKSILDFDADEFDHVMRVNVRGVGLGMKHGARAMIKRGFKGCIISTASVAGVMGGMGPHAYTASKHAIVGLTKNAACELGKYGIRVNCISPFGVATSMLVNAWRKTSGGDVEDDDVEEMEEFVRSLANLKGETLRANDIAEAALYLASDESKYVNGHNLVVDGGVTTARNCVGL

SEQ ID NO: 96545 - protein, 252 aa, Arabidopsis thaliana
  peptide (1)..(252): Ceres Seq. ID no. 12733758
MLFARHGATVVIADVDNVAGSSLAKSLSSHKTSPMVAFISCDVSVEADVENLVNVTVARYGRLDILFNNAGVLGDQKKHKSILDFDADEFDHVMRVNVRGVGLGMKHGARAMIKRGFKGCIISTASVAGVMGGMGPHAYTASKHAIVGLTKNAACELGKYGIRVNCISPFGVATSMLVNAWRKTSGGDVEDDDVEEMEEFVRSLANLKGETLRANDIAEAALYLASDESKYVNGHNLVVDGGVTTARNCVGL

SEQ ID NO: 96546 - DNA, 819 bp, Arabidopsis thaliana
  misc_feature (1)..(819): Ceres Seq. ID no. 12733773
  misc_feature (1)..(819): Ortholog of  Ceres SEQ ID NO 15171606 as cited in SEQ ID NO 57214
  misc_feature (1)..(819): Ortholog of  Ceres SEQ ID NO 13596921 as cited in SEQ ID NO 62368
  misc_feature (1)..(819): Ortholog of  Ceres SEQ ID NO 13600673 as cited in SEQ ID NO 0
atgatgaacccgtttctcccggaaggctgcgatccaccaccaccaccacaaccaatggagggtttacacgaaaatgctccacctccatttctgaccaagacatttgagatggtggatgatccaaacactgaccacatcgtatcttggaacagaggaggaacaagttttgtcgtctgggatttgcattctttctccacgattctccttcctcgtcatttcaaacacagcaatttctcaagtttcatcagacaactcaatacttatggtttcagaaagatagaagcagagagatgggaatttgcaaacgaagagtttttgttaggacaaagacagttgttgaagaacatcaagaggagaaacccttttactccatcatcttcaccaagccatgacgcttgcaacgagcttcgcagagagaagcaagtgctaatgatggagatagtgagtctaagacagcagcaacaaacaacgaaaagctacatcaaagctatggaacagaggatagaaggaacagagaggaaacagagacaaatgatgtcgtttctggctagagcaatgcagagtccttcgtttttgcatcagttgttgaaacaaagagataaaaaaattaaggagcttgaggataatgagtcagcaaagaggaaaagaggttcttcttcgatgtcggaattggaagttttggctttggagatgcaagggcatggaaaacagaggaatatgttggaagaagaggatcatcaactggtggtagagagagagttggatgatggtttctgggaagagttgcttagtgatgagagtttggcttccacctcctaa

SEQ ID NO: 96547 - protein, 272 aa, Arabidopsis thaliana
  peptide (1)..(272): Ceres Seq. ID no. 12733774
MMNPFLPEGCDPPPPPQPMEGLHENAPPPFLTKTFEMVDDPNTDHIVSWNRGGTSFVVWDLHSFSTILLPRHFKHSNFSSFIRQLNTYGFRKIEAERWEFANEEFLLGQRQLLKNIKRRNPFTPSSSPSHDACNELRREKQVLMMEIVSLRQQQQTTKSYIKAMEQRIEGTERKQRQMMSFLARAMQSPSFLHQLLKQRDKKIKELEDNESAKRKRGSSSMSELEVLALEMQGHGKQRNMLEEEDHQLVVERELDDGFWEELLSDESLASTS

SEQ ID NO: 96548 - protein, 271 aa, Arabidopsis thaliana
  peptide (1)..(271): Ceres Seq. ID no. 12733775
MNPFLPEGCDPPPPPQPMEGLHENAPPPFLTKTFEMVDDPNTDHIVSWNRGGTSFVVWDLHSFSTILLPRHFKHSNFSSFIRQLNTYGFRKIEAERWEFANEEFLLGQRQLLKNIKRRNPFTPSSSPSHDACNELRREKQVLMMEIVSLRQQQQTTKSYIKAMEQRIEGTERKQRQMMSFLARAMQSPSFLHQLLKQRDKKIKELEDNESAKRKRGSSSMSELEVLALEMQGHGKQRNMLEEEDHQLVVERELDDGFWEELLSDESLASTS

SEQ ID NO: 96549 - protein, 254 aa, Arabidopsis thaliana
  peptide (1)..(254): Ceres Seq. ID no. 12733776
MEGLHENAPPPFLTKTFEMVDDPNTDHIVSWNRGGTSFVVWDLHSFSTILLPRHFKHSNFSSFIRQLNTYGFRKIEAERWEFANEEFLLGQRQLLKNIKRRNPFTPSSSPSHDACNELRREKQVLMMEIVSLRQQQQTTKSYIKAMEQRIEGTERKQRQMMSFLARAMQSPSFLHQLLKQRDKKIKELEDNESAKRKRGSSSMSELEVLALEMQGHGKQRNMLEEEDHQLVVERELDDGFWEELLSDESLASTS

SEQ ID NO: 96550 - DNA, 1248 bp, Arabidopsis thaliana
  misc_feature (1)..(1248): Ceres Seq. ID no. 12733781
  misc_feature (1)..(1248): Ortholog of  Ceres SEQ ID NO 15171438 as cited in SEQ ID NO 51665
  misc_feature (1)..(1248): Ortholog of  Ceres SEQ ID NO 15170804 as cited in SEQ ID NO 52653
  misc_feature (1)..(1248): Ortholog of  Ceres SEQ ID NO 15170203 as cited in SEQ ID NO 53291
  misc_feature (1)..(1248): Ortholog of  Ceres SEQ ID NO 14303083 as cited in SEQ ID NO 66573
atggtgagatcaatccaagaaggagtcttgatgtcttcatcttcttcctcaaccacaagcaacagcaacgactccgacggttctctcagcccatctgcgtccaccaaaagcttcgtcctcaacactctccgtccgcctatcaccggcgcgtacaagccactcgctgttctctctgctcatgtcggctctgtttcttccttagcgctctgtggtgagttcttgctgagtgcgtctcagggaaaagatatcatcgtttggcaacagcctgatctcaagatctttgcgaaattcggacaaggtgatgggtctgtgaaggctttggtcagcgtgggaagcaaagtgttcacggcgcatcaagatagtagaatcagagtttggaaagtttctcggagaaactctgagaatgctttcaggcttgttgatacacttcccacgactaaagactatctggggaagtttatgaaacagagcaattacgttcagacgaggaggaaccataagcgtctctggattgaacacgccgatagcatttcgtgccttgcggtacacgctgggataatctactctggatcgtgggataagactctcaaagtctggagactgtcggatctcaagtgtcttgaatcgatcaaggctcatgatgacgcaatcaatggtcttgtcgccggagatggcagggtatactctgcttccgcagatgggaaggtcaagatatgggggaaagagaagagaaagcagattgagtctacttcttcctcttcctcttctttacatgttttgaaggctacgttggagggtcgtgcagaggtgtcagtgaactcggtggtggtttccggtgacggtaattgggtatacggaggaggatcagacgggtttgtgatcggatgggagaagaaagagaaagaaggagactttgaggaatggagattagggtttgagacaagaggacataacatggcagttctgtgtatgtgtgtagttggggaaatggtatgcagtggatcggctgataagagcattgggttgtggaggagagaagtgactggcatgctctgtaaattcggagtcatacatggccatgaaggtccggtcaaatgcttacaagcgtcgccaaacaatgtcggtgctggcttcatgctttacagtggaggccttgacaagagtctcagggtttggtgggtaccaaaacaagacaacttagaagagaagaaatcaagctttaagacattgttgacgcaaaaggaatga

SEQ ID NO: 96551 - protein, 415 aa, Arabidopsis thaliana
  peptide (1)..(415): Ceres Seq. ID no. 12733782
MVRSIQEGVLMSSSSSSTTSNSNDSDGSLSPSASTKSFVLNTLRPPITGAYKPLAVLSAHVGSVSSLALCGEFLLSASQGKDIIVWQQPDLKIFAKFGQGDGSVKALVSVGSKVFTAHQDSRIRVWKVSRRNSENAFRLVDTLPTTKDYLGKFMKQSNYVQTRRNHKRLWIEHADSISCLAVHAGIIYSGSWDKTLKVWRLSDLKCLESIKAHDDAINGLVAGDGRVYSASADGKVKIWGKEKRKQIESTSSSSSSLHVLKATLEGRAEVSVNSVVVSGDGNWVYGGGSDGFVIGWEKKEKEGDFEEWRLGFETRGHNMAVLCMCVVGEMVCSGSADKSIGLWRREVTGMLCKFGVIHGHEGPVKCLQASPNNVGAGFMLYSGGLDKSLRVWWVPKQDNLEEKKSSFKTLLTQKE

SEQ ID NO: 96552 - protein, 405 aa, Arabidopsis thaliana
  peptide (1)..(405): Ceres Seq. ID no. 12733783
MSSSSSSTTSNSNDSDGSLSPSASTKSFVLNTLRPPITGAYKPLAVLSAHVGSVSSLALCGEFLLSASQGKDIIVWQQPDLKIFAKFGQGDGSVKALVSVGSKVFTAHQDSRIRVWKVSRRNSENAFRLVDTLPTTKDYLGKFMKQSNYVQTRRNHKRLWIEHADSISCLAVHAGIIYSGSWDKTLKVWRLSDLKCLESIKAHDDAINGLVAGDGRVYSASADGKVKIWGKEKRKQIESTSSSSSSLHVLKATLEGRAEVSVNSVVVSGDGNWVYGGGSDGFVIGWEKKEKEGDFEEWRLGFETRGHNMAVLCMCVVGEMVCSGSADKSIGLWRREVTGMLCKFGVIHGHEGPVKCLQASPNNVGAGFMLYSGGLDKSLRVWWVPKQDNLEEKKSSFKTLLTQKE

SEQ ID NO: 96553 - protein, 262 aa, Arabidopsis thaliana
  peptide (1)..(262): Ceres Seq. ID no. 12733784
MKQSNYVQTRRNHKRLWIEHADSISCLAVHAGIIYSGSWDKTLKVWRLSDLKCLESIKAHDDAINGLVAGDGRVYSASADGKVKIWGKEKRKQIESTSSSSSSLHVLKATLEGRAEVSVNSVVVSGDGNWVYGGGSDGFVIGWEKKEKEGDFEEWRLGFETRGHNMAVLCMCVVGEMVCSGSADKSIGLWRREVTGMLCKFGVIHGHEGPVKCLQASPNNVGAGFMLYSGGLDKSLRVWWVPKQDNLEEKKSSFKTLLTQKE

SEQ ID NO: 96554 - DNA, 474 bp, Arabidopsis thaliana
  misc_feature (1)..(474): Ceres Seq. ID no. 12733785
  misc_feature (1)..(474): Ortholog of  Ceres SEQ ID NO 14311590 as cited in SEQ ID NO 51709
atgaatgaggaagaagataaagatcaagatcgagtaacgagaggatgtagtcacactcatagctgtaaccctccaggcccagaggatgcttctcactcccacacatgcttccacgctcacactcatctcatcatctctcaggatcagcaagagaatgatcattctgacagtagcaacaagaaacggttatgtggtaatagagaggcagtgaggaagtacagggagaagaagaaggctcgcactgcataccttgaagatgaagtgatgagattgcaatctctgaatgagcaattccttagaaaacttcagagccaagaaatggtggaaactgaattgatcagactccgggctcttctggtagagatgcaggggaaaattgaagttgaactttgtagtttctcgtttcagaaacaatgcaacggttctggttttgtgttcaaagaaggtgatttctcctactatttggtttactag

SEQ ID NO: 96555 - protein, 157 aa, Arabidopsis thaliana
  peptide (1)..(157): Ceres Seq. ID no. 12733786
MNEEEDKDQDRVTRGCSHTHSCNPPGPEDASHSHTCFHAHTHLIISQDQQENDHSDSSNKKRLCGNREAVRKYREKKKARTAYLEDEVMRLQSLNEQFLRKLQSQEMVETELIRLRALLVEMQGKIEVELCSFSFQKQCNGSGFVFKEGDFSYYLVY

SEQ ID NO: 96556 - DNA, 1038 bp, Arabidopsis thaliana
  misc_feature (1)..(1038): Ceres Seq. ID no. 12733787
  misc_feature (1)..(1038): Ortholog of  Ceres SEQ ID NO 14302462 as cited in SEQ ID NO 65678
atggcgagtttcatcaaggcatggggtttagtgatcatctcactgtgttacacttttttcattgccaaattggttccaaaaggaatcaaaaggctcatactatttttccctgtcttcctcattttcttcatagtacctttcttgatatattccttacatttactcggcatcacggctttcttcatcgcttggctagcaaatttcaagctcttattatttgcattagggcgcggtcctctctcttcaaaccataaacccctatctctccctattttcttagctgtctcttgcttgcccatcaagattcagctgagcccaaaacctacaaaaactcactcccatgaaggatccacagagggtcctttgatttataccataaaggcagtttttgtggttctcatcatcaaagcctacgaatacagtaccaaattgcctgagaaagtcgtgctgactctctacgcgatccacatatatttcgcccttgagatcatccttgccgccacagctgctgcggttcgagccatgtcggatcttgagctcgagccacagttcaacaagccgtacctagcgacatcacttcaagatttctgggggagacgatggaacctgatggtcactggaatcttacggccaaccgtgtacgaaccgtcacttcaactgttctcggttttgggcccgaactattcccagattcttgcagctttcgggacgtttgttgtctctgggataatgcacgagctcatcttcttctacatgggacggttgaggccagactggaagatgatgtggttcttcctcataaatggattttgcacgaccgtggagatcgccatcaagaaaaccattaacggtaggtggagattcccgaaagcaatcagtcaggttttgacactcacttttgtgatggtgacggcattgtggctgttcttgcccgaatttaatcggtgcaacatagttgagaaggctcttgatgagtacgcagccataggcgcatttgcagtcgaggtcaggaggaaactgaccgcatatcttttttaa

SEQ ID NO: 96557 - protein, 345 aa, Arabidopsis thaliana
  peptide (1)..(345): Ceres Seq. ID no. 12733788
MASFIKAWGLVIISLCYTFFIAKLVPKGIKRLILFFPVFLIFFIVPFLIYSLHLLGITAFFIAWLANFKLLLFALGRGPLSSNHKPLSLPIFLAVSCLPIKIQLSPKPTKTHSHEGSTEGPLIYTIKAVFVVLIIKAYEYSTKLPEKVVLTLYAIHIYFALEIILAATAAAVRAMSDLELEPQFNKPYLATSLQDFWGRRWNLMVTGILRPTVYEPSLQLFSVLGPNYSQILAAFGTFVVSGIMHELIFFYMGRLRPDWKMMWFFLINGFCTTVEIAIKKTINGRWRFPKAISQVLTLTFVMVTALWLFLPEFNRCNIVEKALDEYAAIGAFAVEVRRKLTAYLF

SEQ ID NO: 96558 - DNA, 783 bp, Arabidopsis thaliana
  misc_feature (1)..(783): Ceres Seq. ID no. 12733807
  misc_feature (1)..(783): Ortholog of  Ceres SEQ ID NO 15178873 as cited in SEQ ID NO 1103
  misc_feature (1)..(783): Ortholog of  Ceres SEQ ID NO 15173557 as cited in SEQ ID NO 60031
atggcgactttcctaacaaatgttgtttcaatcaaacctacaatcttctcattccagtccgaatccttcactcctttgcatacacgggtcaatgtattctcctcgaaaccctttccttctctcgctggaactttctcccggagctctagaacgagattcattccttatgctgtaacggagacggaagaaaaacccgccgctttggaccctagttcagaagctgccaggcgtgtgtatatcggtaacatacccaggacggtgaccaatgagcagctcactaaacttgttgaagaacacggtgctgttgaaaaagttcaggtgatgtatgataagtattcaggaagaagccgtcgatttgggtttgctacaatgaaatcagttgaagatgctaatgctgtggttgagaaattgaatggcaatagcttgtttttggtttctcagaccgttgaagggcgtgagataaaggttaacattacagagaaacctatagcatcatcacctgatttatcagttcttcagtctgaggattcagcatttgtagatagcccttacaaagtgtatgttgggaatctagcaaagactgttacaaaagagatgcttgagaatttgttttctgagaaagggaaagtagtaagtgctaaggtttcaagagtacctggaacttccaaatccaccgggtttggattcgttacgttttcttctgaagaagatgtggaagcagccattgttgctcttaacaattcgttgctggaaggacagaagattcgggtgaataaggcttag

SEQ ID NO: 96559 - protein, 260 aa, Arabidopsis thaliana
  peptide (1)..(260): Ceres Seq. ID no. 12733808
MATFLTNVVSIKPTIFSFQSESFTPLHTRVNVFSSKPFPSLAGTFSRSSRTRFIPYAVTETEEKPAALDPSSEAARRVYIGNIPRTVTNEQLTKLVEEHGAVEKVQVMYDKYSGRSRRFGFATMKSVEDANAVVEKLNGNSLFLVSQTVEGREIKVNITEKPIASSPDLSVLQSEDSAFVDSPYKVYVGNLAKTVTKEMLENLFSEKGKVVSAKVSRVPGTSKSTGFGFVTFSSEEDVEAAIVALNNSLLEGQKIRVNKA

SEQ ID NO: 96560 - protein, 153 aa, Arabidopsis thaliana
  peptide (1)..(153): Ceres Seq. ID no. 12733809
MYDKYSGRSRRFGFATMKSVEDANAVVEKLNGNSLFLVSQTVEGREIKVNITEKPIASSPDLSVLQSEDSAFVDSPYKVYVGNLAKTVTKEMLENLFSEKGKVVSAKVSRVPGTSKSTGFGFVTFSSEEDVEAAIVALNNSLLEGQKIRVNKA

SEQ ID NO: 96561 - protein, 137 aa, Arabidopsis thaliana
  peptide (1)..(137): Ceres Seq. ID no. 12733810
MKSVEDANAVVEKLNGNSLFLVSQTVEGREIKVNITEKPIASSPDLSVLQSEDSAFVDSPYKVYVGNLAKTVTKEMLENLFSEKGKVVSAKVSRVPGTSKSTGFGFVTFSSEEDVEAAIVALNNSLLEGQKIRVNKA

SEQ ID NO: 96562 - DNA, 828 bp, Arabidopsis thaliana
  misc_feature (1)..(828): Ceres Seq. ID no. 12733811
  misc_feature (1)..(828): Ortholog of  Ceres SEQ ID NO 15173862 as cited in SEQ ID NO 61747
agaaataaagaaattacctttctttaactaaaaatcaagccagagatgcttagcttgcagtgtcttcctcctttcttcatctccgtcccaaatcggagcaccaattcttgctccacggctccacttcgtgcggtcagtgacttcgctgcttctccgtcgacctcaatctctcgccgtcttatccttctccgtcacgctcacagttcctgggatgatctttccctcagagaccatgatcgtcctctaagtaaaaccggagaagcagatgctgccaaagtagctcaaatcctctcctcactcggttggcttccccaacttattctctcaagcgacgccactcggactagagagacactgaagtcgatgcaggctcaagtagatgggtttatggaggcaaatgtacatttcattcctagcttttactccattgctgctatggatggccaaacagccgagcatcttcaaaacattatctccaaatattcaacccctgatatctccactatcatgtgtatggggcataataagggttgggaagaagcagcttccatgctctctggagcttctattaagttgaaaacatgcaatgctgctttgcttcaggcttttggcaactcctgggaagaagcttttgcgctgtccgggcctggtggatggaaacttgagggtctagtggctccagatagtagcatctttgtgtaagagaatggaacattacaaagcttcaatttttagctttttccatggttgcaacttttgctcctacagtatgtcattcttcaacttcatgtctgttgcataatatatataaaaaggttgcaacgtctc

SEQ ID NO: 96563 - protein, 218 aa, Arabidopsis thaliana
  peptide (1)..(218): Ceres Seq. ID no. 12733812
MLSLQCLPPFFISVPNRSTNSCSTAPLRAVSDFAASPSTSISRRLILLRHAHSSWDDLSLRDHDRPLSKTGEADAAKVAQILSSLGWLPQLILSSDATRTRETLKSMQAQVDGFMEANVHFIPSFYSIAAMDGQTAEHLQNIISKYSTPDISTIMCMGHNKGWEEAASMLSGASIKLKTCNAALLQAFGNSWEEAFALSGPGGWKLEGLVAPDSSIFV

SEQ ID NO: 96564 - protein, 112 aa, Arabidopsis thaliana
  peptide (1)..(112): Ceres Seq. ID no. 12733813
MQAQVDGFMEANVHFIPSFYSIAAMDGQTAEHLQNIISKYSTPDISTIMCMGHNKGWEEAASMLSGASIKLKTCNAALLQAFGNSWEEAFALSGPGGWKLEGLVAPDSSIFV

SEQ ID NO: 96565 - DNA, 1764 bp, Arabidopsis thaliana
  misc_feature (1)..(1764): Ceres Seq. ID no. 12733838
  misc_feature (1)..(1764): Ortholog of  Ceres SEQ ID NO 14313636 as cited in SEQ ID NO 64205
atgagtgctccaaagtttggttatgtattactattgattgtattaatcaatattagcaataatggcgtcgatgcatttcacaaagttttcaagaaattgcaatcaaaatcgacatcattggagtcagtaagtcctcttcacagaaccgcttatcactttcaacctccccgccattggatcaacgctccaatgctctacaagggagtttaccatctcttctaccaatacaatcccaaaggtgcggtttggggtaacattgtgtgggctcactcggtttctaaggacttgatcaattgggaagcccttgaaccagccatttacccatccaaatggttcgacatcaacggtacatggtccggttcagctacccacgtaccgggaaaaggaccggttatcctctacaccggtatcaccgagaaccagactcagattcaaaactacgccattccacaagatctttccgacccatacctcaagacatggataaagccagacgataaccccatcgtaaaacccgataatggcgagaacggatccgctttccgtgacccgaccacggcttggttcaacaaaaaagatgggtattggagaatgcttgttggctcaaagagaaagaacagaggaattgcttatatgtacaagagccgtgacttcaaaaaatgggtcaaaagcaaacgtcctatccactcaagaaagaaaaccggtatgtgggaatgtcccgatttcttcccggtatccgtaaccgacaagaaaaacggtttggacttcagctacgacggtccaaacgccaagcatgtgttgaaggttagtttggacttgaccagatacgagtactacactcttggaacgtatgacaccaagaaggatcgttacaggccagacggttacactcctgacggttgggatggtttgagatttgattatggtaactactatgcgtcaaagacattctttgatgacaagacgaacagaagaattctttgggggtgggccaatgaatccgacaccgttcaagatgataccgtgaagggttgggccggaattcagcttatcccaagaacaatcttgcttgactctagcggtaagcaactcgtgttttggcctattgaagagattgagtcattgagaggaaagaatgtccaaatgaccaaccagaaaatggagatgggccaacgctttgaggtccaaggaatcactcctgctcaggtggatgtggatgtgacattcaacgttggaaatctagagaaggccgaaaagtttgacgaaagcttcgcaactaaaccactagagttatgtaacttgaaaggttcgaatgtgaatggtggagttggtccttttggtttgatcacgttggctacatctgacttagaagaatacactcctgttttctttagagtcttcaaagatgccgcatccaacaagcctaaggttctcatgtgctctgacgccaagccttcgagtctcaaaaaagacaccgggactgacgccaaggagaggatgtacaaaccatcgtttgctggttttgtggatgtcggtctccttgacggaaagatctctctaaggagtttgattgatcactcggttgtggagagctttggagcaaaaggaaagacagtgataacatctagagtgtatccgacaaaagcagtaggagaaaaagctcatttgtttgtctttaacaacggctcacaacctgtgaccgtagagagcctcaatgcatggaacatgcagaagcctctgaagatgaaccaaggtgcaaagtga

SEQ ID NO: 96566 - protein, 587 aa, Arabidopsis thaliana
  peptide (1)..(587): Ceres Seq. ID no. 12733839
MSAPKFGYVLLLIVLINISNNGVDAFHKVFKKLQSKSTSLESVSPLHRTAYHFQPPRHWINAPMLYKGVYHLFYQYNPKGAVWGNIVWAHSVSKDLINWEALEPAIYPSKWFDINGTWSGSATHVPGKGPVILYTGITENQTQIQNYAIPQDLSDPYLKTWIKPDDNPIVKPDNGENGSAFRDPTTAWFNKKDGYWRMLVGSKRKNRGIAYMYKSRDFKKWVKSKRPIHSRKKTGMWECPDFFPVSVTDKKNGLDFSYDGPNAKHVLKVSLDLTRYEYYTLGTYDTKKDRYRPDGYTPDGWDGLRFDYGNYYASKTFFDDKTNRRILWGWANESDTVQDDTVKGWAGIQLIPRTILLDSSGKQLVFWPIEEIESLRGKNVQMTNQKMEMGQRFEVQGITPAQVDVDVTFNVGNLEKAEKFDESFATKPLELCNLKGSNVNGGVGPFGLITLATSDLEEYTPVFFRVFKDAASNKPKVLMCSDAKPSSLKKDTGTDAKERMYKPSFAGFVDVGLLDGKISLRSLIDHSVVESFGAKGKTVITSRVYPTKAVGEKAHLFVFNNGSQPVTVESLNAWNMQKPLKMNQGAK

SEQ ID NO: 96567 - protein, 524 aa, Arabidopsis thaliana
  peptide (1)..(524): Ceres Seq. ID no. 12733840
MLYKGVYHLFYQYNPKGAVWGNIVWAHSVSKDLINWEALEPAIYPSKWFDINGTWSGSATHVPGKGPVILYTGITENQTQIQNYAIPQDLSDPYLKTWIKPDDNPIVKPDNGENGSAFRDPTTAWFNKKDGYWRMLVGSKRKNRGIAYMYKSRDFKKWVKSKRPIHSRKKTGMWECPDFFPVSVTDKKNGLDFSYDGPNAKHVLKVSLDLTRYEYYTLGTYDTKKDRYRPDGYTPDGWDGLRFDYGNYYASKTFFDDKTNRRILWGWANESDTVQDDTVKGWAGIQLIPRTILLDSSGKQLVFWPIEEIESLRGKNVQMTNQKMEMGQRFEVQGITPAQVDVDVTFNVGNLEKAEKFDESFATKPLELCNLKGSNVNGGVGPFGLITLATSDLEEYTPVFFRVFKDAASNKPKVLMCSDAKPSSLKKDTGTDAKERMYKPSFAGFVDVGLLDGKISLRSLIDHSVVESFGAKGKTVITSRVYPTKAVGEKAHLFVFNNGSQPVTVESLNAWNMQKPLKMNQGAK

SEQ ID NO: 96568 - protein, 390 aa, Arabidopsis thaliana
  peptide (1)..(390): Ceres Seq. ID no. 12733841
MLVGSKRKNRGIAYMYKSRDFKKWVKSKRPIHSRKKTGMWECPDFFPVSVTDKKNGLDFSYDGPNAKHVLKVSLDLTRYEYYTLGTYDTKKDRYRPDGYTPDGWDGLRFDYGNYYASKTFFDDKTNRRILWGWANESDTVQDDTVKGWAGIQLIPRTILLDSSGKQLVFWPIEEIESLRGKNVQMTNQKMEMGQRFEVQGITPAQVDVDVTFNVGNLEKAEKFDESFATKPLELCNLKGSNVNGGVGPFGLITLATSDLEEYTPVFFRVFKDAASNKPKVLMCSDAKPSSLKKDTGTDAKERMYKPSFAGFVDVGLLDGKISLRSLIDHSVVESFGAKGKTVITSRVYPTKAVGEKAHLFVFNNGSQPVTVESLNAWNMQKPLKMNQGAK

SEQ ID NO: 96569 - DNA, 1322 bp, Arabidopsis thaliana
  misc_feature (1)..(1322): Ceres Seq. ID no. 12733850
  misc_feature (1)..(1322): Ortholog of  Ceres SEQ ID NO 12617391 as cited in SEQ ID NO 64114
  misc_feature (1)..(1322): Ortholog of  Ceres SEQ ID NO 13595922 as cited in SEQ ID NO 69293
  misc_feature (1)..(1322): Ortholog of  Ceres SEQ ID NO 12635496 as cited in SEQ ID NO 0
atgcagtaatctgataaaaccctccacagagatttccaacaaaacaggaactaaaacacaagatgaagattatgatgatgattaagctctgcttcttctccatgtccctcatctgcattgcacctgcagatgctcgtaatgcttacactctttgtttctctctccctccatttctatattcatagtatgcattcacatgtttatagttttatttagagaaaacacaataaattaatcagaaagttcaaagtttgatacataggatgggatttaattaagtttaaaacgatcaagtaaatgatggtaatcgtgctattatatgagagtttttggtatgggtctaaccgtctaaaacgatatgtgttgtgcttagtgaatataactttataagttttaaccgtattcaaattggtaataaatgagcagagacagaaggagtagtgtttggatataaaggcaaaaatggaccaaaccaatggggacacttaaaccctcacttcaccacatgcgcggtcggtaaattgcaatctccaattgatattcaaaggaggcaaatattttacaaccacaaattgaattcaatacaccgtgaatactacttcacaaacgcaacactagtgaaccacgtctgtaatgttgccatgttcttcggggagggagcaggagatgtgataatagaaaacaagaactataccttactgcaaatgcattggcacactccttctgaacatcacctccatggagtccaatatgcagctgagctgcacatggtacaccaagcaaaagatggaagctttgctgtggtggcaagtctcttcaaaatcggcactgaagagcctttcctctctcagatgaaggagaaattggtgaagctaaaggaagagagactcaaagggaaccacacagcacaagtggaagtaggaagaatcgacacaagacacattgaacgtaagactcgaaagtactacagatacattggttcactcactactcctccttgctccgagaacgtttcttggaccatccttggcaaggtgaggtcaatgtcaaaggaacaagtagaactactcagatctccattggacacttctttcaagaacaattcaagaccgtgtcaacccctcaacggccggagagttgagatgttccacgaccacgagcgtgtcgataaaaaagaaaccggtaacaaaaagaaaaaacccaattaaaatagttttacattgtctattggtttgtttagaaccctaattagctttgtaaaactaataatctcttatgtagtactgtgttgttgtttacgacttgatatacgatttccaaat

SEQ ID NO: 96570 - protein, 188 aa, Arabidopsis thaliana
  peptide (1)..(188): Ceres Seq. ID no. 12733851
MFFGEGAGDVIIENKNYTLLQMHWHTPSEHHLHGVQYAAELHMVHQAKDGSFAVVASLFKIGTEEPFLSQMKEKLVKLKEERLKGNHTAQVEVGRIDTRHIERKTRKYYRYIGSLTTPPCSENVSWTILGKVRSMSKEQVELLRSPLDTSFKNNSRPCQPLNGRRVEMFHDHERVDKKETGNKKKKPN

SEQ ID NO: 96571 - protein, 167 aa, Arabidopsis thaliana
  peptide (1)..(167): Ceres Seq. ID no. 12733852
MHWHTPSEHHLHGVQYAAELHMVHQAKDGSFAVVASLFKIGTEEPFLSQMKEKLVKLKEERLKGNHTAQVEVGRIDTRHIERKTRKYYRYIGSLTTPPCSENVSWTILGKVRSMSKEQVELLRSPLDTSFKNNSRPCQPLNGRRVEMFHDHERVDKKETGNKKKKPN

SEQ ID NO: 96572 - protein, 146 aa, Arabidopsis thaliana
  peptide (1)..(146): Ceres Seq. ID no. 12733853
MVHQAKDGSFAVVASLFKIGTEEPFLSQMKEKLVKLKEERLKGNHTAQVEVGRIDTRHIERKTRKYYRYIGSLTTPPCSENVSWTILGKVRSMSKEQVELLRSPLDTSFKNNSRPCQPLNGRRVEMFHDHERVDKKETGNKKKKPN

SEQ ID NO: 96573 - DNA, 2476 bp, Arabidopsis thaliana
  misc_feature (1)..(2476): Ceres Seq. ID no. 12733866
  misc_feature (1)..(2476): Ortholog of  Ceres SEQ ID NO 13600595 as cited in SEQ ID NO 629
  misc_feature (1)..(2476): Ortholog of  Ceres SEQ ID NO 13593379 as cited in SEQ ID NO 20573
acagagctgataatttcagcagaatatttactattttttataaagaaacaaaaaaacatagaaaggtttggtttttcaaagaacgtgaaaatgagtatgcattttaggaataaagcatggattattctggcaattctgtgtttttcatctttgattcactcaacagaagcagtggtcacttatgatcacaaagctttaatcatcaatggacagagaaggatccttatctccggttctatacactatccaagaagcactcctgagatgtggcctgatcttataaagaaggccaaagaaggaggtttggatgttatacaaacatatgttttctggaatggacatgaaccttctcctggaaattactattttcaggatagatatgatctggttaaattcaccaaactggtgcaccaagctggactatatcttgatctaagaattggtccatatgtttgtgccgagtggaattttgggggatttccggtttggctcaaatatgttcctggtatggttttcagaacagataacgaacctttcaagattgcaatgcaaaaattcacaaagaagattgtggatatgatgaaagaagaaaagctgtttgagactcaaggaggacccatcattctctcacagatagagaatgagtatggaccaatgcaatgggagatgggagcagcaggaaaggcttactcaaaatggacagctgaaatggcattgggactgtccacaggtgtcccatggattatgagcaagcaagaggatgctccttaccctattatagacacatgcaatggattttattgtgagggtttcaaaccaaactcagacaataagccgaagttgtggacagagaactggactggttggttcacggaatttggaggtgcgataccaaatagaccagtcgaagacattgcgttctccgtggctcgtttcatacagaacggtggttcttttatgaattattatatgtattatggagggaccaactttgatagaacagccggtgttttcatcgccactagctatgactacgatgctcctattgacgaatatggattactaagagaacccaagtatagtcacttgaaagagttacataaagtcatcaagctatgtgaacctgcattggtctctgttgatcccaccatcacatcgctcggcgataaacaagaaattcatgtgttcaagtccaagacttcttgcgctgcatttctctcgaactacgacacgagttctgcagcaagagttatgtttaggggatttccgtatgatttgcctccttggtctgttagtattttaccagactgcaaaaccgaatattacaacactgcaaagatccgtgcaccaaccatacttatgaagatgattcctacaagcacaaagttttcctgggaatcgtacaacgaaggaagcccttcttcaaatgaagctggtacatttgttaaagatggtctagtggaacaaataagcatgaccagagataaaacagattatttctggtattttacggacattacaattggttctgatgagagcttcttgaagactggtgataatcctcttcttaccattttttcggctgggcatgctcttcatgtattcgttaatggcctgcttgcaggaacttcctatggagcactgagcaactcaaagctcacatttagtcaaaatatcaaattgagtgtaggcatcaacaaacttgctctgcttagtactgcagtgggtcttccgaacgctggtgtgcattatgagacttggaatactggtattctagggccagtcacattgaagggagtaaactctggaacatgggacatgtctaaatggaagtggtcttacaagattggtcttagaggtgaagctatgagccttcacaccttagctggaagttcagctgtgaaatggtggatcaaaggattcgtggtcaagaagcaacccttgacctggtacaagtcttcttttgatacaccgagaggcaacgaaccactggctttggacatgaacacaatggggaaaggtcaagtttgggtaaatggacataacattggacgccactggcctgcctacacggctcgtgggaactgtggacgttgcaactatgctggaatttacaacgagaagaaatgtctcagtcactgtggtgaaccttctcaaagatggtaccatgtacctcgttcatggctaaaaccgtttgggaaccttctagttatatttgaggaatggggtggtgatccaagtggaatctctcttgttaaaaggacagccaaatgaagcttcttacttcaaattttttccggaagcatgcagagattgtcatgtacagatatagttgcattcattggctcattgtggaagaatattatatatatatgtatcctgctctaaaaatgtattacaattgtataaaataatatttatacaatagaccaaaacaagccaatctcaatcaccccataagaggggttcttcttca

SEQ ID NO: 96574 - protein, 757 aa, Arabidopsis thaliana
  peptide (1)..(757): Ceres Seq. ID no. 12733867
TELIISAEYLLFFIKKQKNIERFGFSKNVKMSMHFRNKAWIILAILCFSSLIHSTEAVVTYDHKALIINGQRRILISGSIHYPRSTPEMWPDLIKKAKEGGLDVIQTYVFWNGHEPSPGNYYFQDRYDLVKFTKLVHQAGLYLDLRIGPYVCAEWNFGGFPVWLKYVPGMVFRTDNEPFKIAMQKFTKKIVDMMKEEKLFETQGGPIILSQIENEYGPMQWEMGAAGKAYSKWTAEMALGLSTGVPWIMSKQEDAPYPIIDTCNGFYCEGFKPNSDNKPKLWTENWTGWFTEFGGAIPNRPVEDIAFSVARFIQNGGSFMNYYMYYGGTNFDRTAGVFIATSYDYDAPIDEYGLLREPKYSHLKELHKVIKLCEPALVSVDPTITSLGDKQEIHVFKSKTSCAAFLSNYDTSSAARVMFRGFPYDLPPWSVSILPDCKTEYYNTAKIRAPTILMKMIPTSTKFSWESYNEGSPSSNEAGTFVKDGLVEQISMTRDKTDYFWYFTDITIGSDESFLKTGDNPLLTIFSAGHALHVFVNGLLAGTSYGALSNSKLTFSQNIKLSVGINKLALLSTAVGLPNAGVHYETWNTGILGPVTLKGVNSGTWDMSKWKWSYKIGLRGEAMSLHTLAGSSAVKWWIKGFVVKKQPLTWYKSSFDTPRGNEPLALDMNTMGKGQVWVNGHNIGRHWPAYTARGNCGRCNYAGIYNEKKCLSHCGEPSQRWYHVPRSWLKPFGNLLVIFEEWGGDPSGISLVKRTAK

SEQ ID NO: 96575 - protein, 727 aa, Arabidopsis thaliana
  peptide (1)..(727): Ceres Seq. ID no. 12733868
MSMHFRNKAWIILAILCFSSLIHSTEAVVTYDHKALIINGQRRILISGSIHYPRSTPEMWPDLIKKAKEGGLDVIQTYVFWNGHEPSPGNYYFQDRYDLVKFTKLVHQAGLYLDLRIGPYVCAEWNFGGFPVWLKYVPGMVFRTDNEPFKIAMQKFTKKIVDMMKEEKLFETQGGPIILSQIENEYGPMQWEMGAAGKAYSKWTAEMALGLSTGVPWIMSKQEDAPYPIIDTCNGFYCEGFKPNSDNKPKLWTENWTGWFTEFGGAIPNRPVEDIAFSVARFIQNGGSFMNYYMYYGGTNFDRTAGVFIATSYDYDAPIDEYGLLREPKYSHLKELHKVIKLCEPALVSVDPTITSLGDKQEIHVFKSKTSCAAFLSNYDTSSAARVMFRGFPYDLPPWSVSILPDCKTEYYNTAKIRAPTILMKMIPTSTKFSWESYNEGSPSSNEAGTFVKDGLVEQISMTRDKTDYFWYFTDITIGSDESFLKTGDNPLLTIFSAGHALHVFVNGLLAGTSYGALSNSKLTFSQNIKLSVGINKLALLSTAVGLPNAGVHYETWNTGILGPVTLKGVNSGTWDMSKWKWSYKIGLRGEAMSLHTLAGSSAVKWWIKGFVVKKQPLTWYKSSFDTPRGNEPLALDMNTMGKGQVWVNGHNIGRHWPAYTARGNCGRCNYAGIYNEKKCLSHCGEPSQRWYHVPRSWLKPFGNLLVIFEEWGGDPSGISLVKRTAK

SEQ ID NO: 96576 - protein, 725 aa, Arabidopsis thaliana
  peptide (1)..(725): Ceres Seq. ID no. 12733869
MHFRNKAWIILAILCFSSLIHSTEAVVTYDHKALIINGQRRILISGSIHYPRSTPEMWPDLIKKAKEGGLDVIQTYVFWNGHEPSPGNYYFQDRYDLVKFTKLVHQAGLYLDLRIGPYVCAEWNFGGFPVWLKYVPGMVFRTDNEPFKIAMQKFTKKIVDMMKEEKLFETQGGPIILSQIENEYGPMQWEMGAAGKAYSKWTAEMALGLSTGVPWIMSKQEDAPYPIIDTCNGFYCEGFKPNSDNKPKLWTENWTGWFTEFGGAIPNRPVEDIAFSVARFIQNGGSFMNYYMYYGGTNFDRTAGVFIATSYDYDAPIDEYGLLREPKYSHLKELHKVIKLCEPALVSVDPTITSLGDKQEIHVFKSKTSCAAFLSNYDTSSAARVMFRGFPYDLPPWSVSILPDCKTEYYNTAKIRAPTILMKMIPTSTKFSWESYNEGSPSSNEAGTFVKDGLVEQISMTRDKTDYFWYFTDITIGSDESFLKTGDNPLLTIFSAGHALHVFVNGLLAGTSYGALSNSKLTFSQNIKLSVGINKLALLSTAVGLPNAGVHYETWNTGILGPVTLKGVNSGTWDMSKWKWSYKIGLRGEAMSLHTLAGSSAVKWWIKGFVVKKQPLTWYKSSFDTPRGNEPLALDMNTMGKGQVWVNGHNIGRHWPAYTARGNCGRCNYAGIYNEKKCLSHCGEPSQRWYHVPRSWLKPFGNLLVIFEEWGGDPSGISLVKRTAK

SEQ ID NO: 96577 - DNA, 2235 bp, Arabidopsis thaliana
  misc_feature (1)..(2235): Ceres Seq. ID no. 12733874
  misc_feature (1)..(2235): Ortholog of  Ceres SEQ ID NO 15177692 as cited in SEQ ID NO 52664
  misc_feature (1)..(2235): Ortholog of  Ceres SEQ ID NO 14303959 as cited in SEQ ID NO 53709
atgcctgtaaacgataaaccaagctcttcaaagagcgtacctcaacggtttgaagatccttctaaccccatttctgagccatctcaagctggaaccagttttggattacaaggagtggggaatcaaacgcgggagattaagctgttgcatagatccaacaaacctgggtcttgtcttagttctggcagtggagattatgagatagagttagatgaaaatgttgcgtctccttccactcatgcatttgttgaagatgatgtgatagaaatagacaaacacgttacttcactgccatctcactctagcaagaaagtcaatgcgacggagcttgacaagaatatttcctcatctgctgtagactcagagcagaaagggaagttggatgatgcacctaattcagggacagagaatggcaaaacagtacggaaggtaacaagaatgattccacgtcccaaacaaccgaaaaagaaaattttgcttaagaagaagttaaaaatcggggttgtgtcagcaacttacccaacaaaagacgatgaagaaattgttccttccttggactctagtgccaatcaacttctctgccagagatgtcactgttcgttgaagagcaccagcatcgatgacaacccaccttcatatacttctagtcataatcctaagatttgcacagatagtttgagctctgtttcaaataaagaagctcatcaaggatctgacgagaactcctctggctcgtgtaatgtcagtcaaagctctgaagctgacattgtcataatgaaacaagatgtttcctctagcaataatagtggaatcggtgcaatggtagaaaaagaaaccgagaatccgacttccagtgagaaattcgagttctctctgagttcaaaagatagtcttggggattatagcaggagcacaagcattagtgaggagagtaatctgagccgatttagctgtgggaataagcctcacatgtcgatggatgtgagatgggaagcgattaagcatatcaaggttcaatacggctctttgggtttacgacacttcaaccttctgaagaaacttggttgtggagatataggaacagtctatctcgccgagctgattggtacaaactgtttgtttgccataaaggttatggacaacgagttcttggcgagaaggaaaaagtctccccgggcacaagcagaaagagaaatacttaaaatgttggaccatccttttcttcctacattatacgcgcaatttacttcggataatttatcttgtctagtcatggaatattgtcctggaggagatcttcatgtcctcagacagaagcagctaggccggtgtttccctgaacctgcagcaagattctatgtggccgaaattctccttgcactggagtacttacacatgcttggtatcatataccgagatctgaaaccggaaaacattcttgtccgtgaagatggacacattatgcttacggattttgacctctcactccgttgtgcagtgaacccgactcttgtcaggtcaaactctccacctggtaaagatcccgcaaggatttcaggtccatacaacacatccaactgcatacaaccattctgtatcaccgaaccatcttgccaggtttcgtgtttcagccctaggctctcctcaaaccaacaacaaggtagaaaaccaaaaaggggtgatcatctttcgaaaacccaacaacacttgagtagatcattgcctcagctcgtggctgaaccaaccgaagcaagatccaattcctttgtgggaacacacgagtacctagccccagagatcatcaaaggagaaggacatggcgctgcagttgactggtggactttcggggttctcctttacgagcttttatacgggaaaacaccattcaaaggttacaacaacgacgagactttggccaatgttgtgttacagaacctcaagtttcctgatagcccgcttgtaagcttccaggcaaaagacttgatcaggggacttcttgttaaggaaccagagaacaggctcgggtcagagaaaggttctgtagagatcaaaagacatcctttttttgaaggattgaattgggctctgatccggtgtgcaatcccgcctgagctaccggatttctatgagtatggtggtggaccagaggcagcggcggattcgcctggaggcagtaataataggtatcttgaatgtaaagccataggcgatcatcttgagttcgagttgttttaa

SEQ ID NO: 96578 - protein, 744 aa, Arabidopsis thaliana
  peptide (1)..(744): Ceres Seq. ID no. 12733875
MPVNDKPSSSKSVPQRFEDPSNPISEPSQAGTSFGLQGVGNQTREIKLLHRSNKPGSCLSSGSGDYEIELDENVASPSTHAFVEDDVIEIDKHVTSLPSHSSKKVNATELDKNISSSAVDSEQKGKLDDAPNSGTENGKTVRKVTRMIPRPKQPKKKILLKKKLKIGVVSATYPTKDDEEIVPSLDSSANQLLCQRCHCSLKSTSIDDNPPSYTSSHNPKICTDSLSSVSNKEAHQGSDENSSGSCNVSQSSEADIVIMKQDVSSSNNSGIGAMVEKETENPTSSEKFEFSLSSKDSLGDYSRSTSISEESNLSRFSCGNKPHMSMDVRWEAIKHIKVQYGSLGLRHFNLLKKLGCGDIGTVYLAELIGTNCLFAIKVMDNEFLARRKKSPRAQAEREILKMLDHPFLPTLYAQFTSDNLSCLVMEYCPGGDLHVLRQKQLGRCFPEPAARFYVAEILLALEYLHMLGIIYRDLKPENILVREDGHIMLTDFDLSLRCAVNPTLVRSNSPPGKDPARISGPYNTSNCIQPFCITEPSCQVSCFSPRLSSNQQQGRKPKRGDHLSKTQQHLSRSLPQLVAEPTEARSNSFVGTHEYLAPEIIKGEGHGAAVDWWTFGVLLYELLYGKTPFKGYNNDETLANVVLQNLKFPDSPLVSFQAKDLIRGLLVKEPENRLGSEKGSVEIKRHPFFEGLNWALIRCAIPPELPDFYEYGGGPEAAADSPGGSNNRYLECKAIGDHLEFELF

SEQ ID NO: 96579 - protein, 598 aa, Arabidopsis thaliana
  peptide (1)..(598): Ceres Seq. ID no. 12733876
MIPRPKQPKKKILLKKKLKIGVVSATYPTKDDEEIVPSLDSSANQLLCQRCHCSLKSTSIDDNPPSYTSSHNPKICTDSLSSVSNKEAHQGSDENSSGSCNVSQSSEADIVIMKQDVSSSNNSGIGAMVEKETENPTSSEKFEFSLSSKDSLGDYSRSTSISEESNLSRFSCGNKPHMSMDVRWEAIKHIKVQYGSLGLRHFNLLKKLGCGDIGTVYLAELIGTNCLFAIKVMDNEFLARRKKSPRAQAEREILKMLDHPFLPTLYAQFTSDNLSCLVMEYCPGGDLHVLRQKQLGRCFPEPAARFYVAEILLALEYLHMLGIIYRDLKPENILVREDGHIMLTDFDLSLRCAVNPTLVRSNSPPGKDPARISGPYNTSNCIQPFCITEPSCQVSCFSPRLSSNQQQGRKPKRGDHLSKTQQHLSRSLPQLVAEPTEARSNSFVGTHEYLAPEIIKGEGHGAAVDWWTFGVLLYELLYGKTPFKGYNNDETLANVVLQNLKFPDSPLVSFQAKDLIRGLLVKEPENRLGSEKGSVEIKRHPFFEGLNWALIRCAIPPELPDFYEYGGGPEAAADSPGGSNNRYLECKAIGDHLEFELF

SEQ ID NO: 96580 - protein, 486 aa, Arabidopsis thaliana
  peptide (1)..(486): Ceres Seq. ID no. 12733877
MKQDVSSSNNSGIGAMVEKETENPTSSEKFEFSLSSKDSLGDYSRSTSISEESNLSRFSCGNKPHMSMDVRWEAIKHIKVQYGSLGLRHFNLLKKLGCGDIGTVYLAELIGTNCLFAIKVMDNEFLARRKKSPRAQAEREILKMLDHPFLPTLYAQFTSDNLSCLVMEYCPGGDLHVLRQKQLGRCFPEPAARFYVAEILLALEYLHMLGIIYRDLKPENILVREDGHIMLTDFDLSLRCAVNPTLVRSNSPPGKDPARISGPYNTSNCIQPFCITEPSCQVSCFSPRLSSNQQQGRKPKRGDHLSKTQQHLSRSLPQLVAEPTEARSNSFVGTHEYLAPEIIKGEGHGAAVDWWTFGVLLYELLYGKTPFKGYNNDETLANVVLQNLKFPDSPLVSFQAKDLIRGLLVKEPENRLGSEKGSVEIKRHPFFEGLNWALIRCAIPPELPDFYEYGGGPEAAADSPGGSNNRYLECKAIGDHLEFELF

SEQ ID NO: 96581 - DNA, 1539 bp, Arabidopsis thaliana
  misc_feature (1)..(1539): Ceres Seq. ID no. 12733878
  misc_feature (1)..(1539): Ortholog of  Ceres SEQ ID NO 13502874 as cited in SEQ ID NO 66298
  misc_feature (1)..(1539): Ortholog of  Ceres SEQ ID NO 12614124 as cited in SEQ ID NO 68392
atgattaatcaattaacaaagaacgagttaatcggattatttacatcgattgccgtcctcatatacgttacatgtctcttctacaccaaacgatgtcgtacgagactacctccgggaccaaatccatggccggtgattggaaacattttccagctcgctggtttaccgccacacgactcattgactaaactttcacggcgtcacgggccaatcatgactttacggatcgggtcgatgctgacggttgtgatctcttcgagtgaagtggctcgggagatcttcaagaagcatgacgcagctttggctggccggaagatttacgaggcgatgaaaggagggaagagtagtgacggctcgctcatcacggctcagtatggtgcgtattggcggatgctgcggaggctttgcaccactcagttctttgtcacgcgccgtcttgatgctatgagtgatgtacgctctaggtgtgttgatcagatgcttcggtttgtcgaggaaggtggccaaaacggtacaaaaacaatcgatgtggggagatatttcttcttgatggcatttaatctcataggaaacctcatgttctcgagagatttgcttgatcctgattcaaaaagaggatccgaattcttttaccacaccgggaaagtgatggagttcgccggaaaaccaaacgttgccgatttcttcccgttgctaaggtttcttgaccctcaaggaatcaggagaaaaacgcaattccacgtggaaaaagcgtttgagatcgccggagagttcatcagagaacgaacggaggttagggagagagaaaagagcgacgagaagacgaaagattacttagatgttcttttggagtttcgtggtggcgatggagtcgacgaagaaccttctagcttctcatcaagagatatcaacgaaatgtttacggctggaacggatacgacaacgagcacgttggagtgggcactagcggagcttctacacaacccaagaacactgaccaaactccaaaccgaactccggacctacttcaagtcctcgaaccaaaagctccaagaagaagacctaccaaaccttccctatctctcagctgttatcatggaaaccttaaggctacacccacctctgcctttcctcgtcccacacaaagccatgtcaacttgtcacatcttcgatcaatacactatccccaaggaaacacaagtcttggtcaatgtatgggccatcggacgcgatcctaaaacatggatcgacccgataatgttcaaacccgagagatttatatccgaccctgacgcccgagacttcaagggacaagattacgagttcttgccgttcgggtcgggtcgaaggatgtgtccagctttgcctttggcatcacgggttttgccgttggccattgggtcaatggtgagatcgtttgattgggctttagaaaatgggcttaatgcagaagaaatggatatgggagaaaggattggtataacattgaaaaaagctgttcctttggaagccattccaattccttatcgagggacttaa

SEQ ID NO: 96582 - protein, 512 aa, Arabidopsis thaliana
  peptide (1)..(512): Ceres Seq. ID no. 12733879
MINQLTKNELIGLFTSIAVLIYVTCLFYTKRCRTRLPPGPNPWPVIGNIFQLAGLPPHDSLTKLSRRHGPIMTLRIGSMLTVVISSSEVAREIFKKHDAALAGRKIYEAMKGGKSSDGSLITAQYGAYWRMLRRLCTTQFFVTRRLDAMSDVRSRCVDQMLRFVEEGGQNGTKTIDVGRYFFLMAFNLIGNLMFSRDLLDPDSKRGSEFFYHTGKVMEFAGKPNVADFFPLLRFLDPQGIRRKTQFHVEKAFEIAGEFIRERTEVREREKSDEKTKDYLDVLLEFRGGDGVDEEPSSFSSRDINEMFTAGTDTTTSTLEWALAELLHNPRTLTKLQTELRTYFKSSNQKLQEEDLPNLPYLSAVIMETLRLHPPLPFLVPHKAMSTCHIFDQYTIPKETQVLVNVWAIGRDPKTWIDPIMFKPERFISDPDARDFKGQDYEFLPFGSGRRMCPALPLASRVLPLAIGSMVRSFDWALENGLNAEEMDMGERIGITLKKAVPLEAIPIPYRGT

SEQ ID NO: 96583 - protein, 441 aa, Arabidopsis thaliana
  peptide (1)..(441): Ceres Seq. ID no. 12733880
MTLRIGSMLTVVISSSEVAREIFKKHDAALAGRKIYEAMKGGKSSDGSLITAQYGAYWRMLRRLCTTQFFVTRRLDAMSDVRSRCVDQMLRFVEEGGQNGTKTIDVGRYFFLMAFNLIGNLMFSRDLLDPDSKRGSEFFYHTGKVMEFAGKPNVADFFPLLRFLDPQGIRRKTQFHVEKAFEIAGEFIRERTEVREREKSDEKTKDYLDVLLEFRGGDGVDEEPSSFSSRDINEMFTAGTDTTTSTLEWALAELLHNPRTLTKLQTELRTYFKSSNQKLQEEDLPNLPYLSAVIMETLRLHPPLPFLVPHKAMSTCHIFDQYTIPKETQVLVNVWAIGRDPKTWIDPIMFKPERFISDPDARDFKGQDYEFLPFGSGRRMCPALPLASRVLPLAIGSMVRSFDWALENGLNAEEMDMGERIGITLKKAVPLEAIPIPYRGT

SEQ ID NO: 96584 - protein, 434 aa, Arabidopsis thaliana
  peptide (1)..(434): Ceres Seq. ID no. 12733881
MLTVVISSSEVAREIFKKHDAALAGRKIYEAMKGGKSSDGSLITAQYGAYWRMLRRLCTTQFFVTRRLDAMSDVRSRCVDQMLRFVEEGGQNGTKTIDVGRYFFLMAFNLIGNLMFSRDLLDPDSKRGSEFFYHTGKVMEFAGKPNVADFFPLLRFLDPQGIRRKTQFHVEKAFEIAGEFIRERTEVREREKSDEKTKDYLDVLLEFRGGDGVDEEPSSFSSRDINEMFTAGTDTTTSTLEWALAELLHNPRTLTKLQTELRTYFKSSNQKLQEEDLPNLPYLSAVIMETLRLHPPLPFLVPHKAMSTCHIFDQYTIPKETQVLVNVWAIGRDPKTWIDPIMFKPERFISDPDARDFKGQDYEFLPFGSGRRMCPALPLASRVLPLAIGSMVRSFDWALENGLNAEEMDMGERIGITLKKAVPLEAIPIPYRGT

SEQ ID NO: 96585 - DNA, 903 bp, Arabidopsis thaliana
  misc_feature (1)..(903): Ceres Seq. ID no. 12733886
  misc_feature (1)..(903): Ortholog of  Ceres SEQ ID NO 13594604 as cited in SEQ ID NO 52106
atgggttcgtccttgtcgaatctaaacgacgggacgaatggtttggctatgggacctggtctcggcgatataccggaaagttgtgtcgcttgtgtgtttatgtatctgactccaccggagatttgcaatctggctggattgaatcgttcttttcgtggtgcggcttcttcggattctgtttgggaaaagaagcttccggagaattatcaggatctgcttgatttattgccgccggagaggtatcatagtctctcgaagaaagatatcttcgctgtgctttctcgtccaattccttttgatgatgataataaggaagtatggattgatagagttacaggacgagtttgtatggcgatttctgctagaggaatgtctattactggaattgaagaccggagatattggaactggattccaacggaagaatctaggttccatgttgtagcctacttacagcagatttggtggtttgaagttgatggaacagtgagattccatctcccacctggtgtatactctctatcattcagaatccatctagggagattcacaaaaaggctagggagacgtgtgtgccactttgaactcactcatggttgggatctaaagccggtaaggttttcgctttcgacttctgatggtcaagaagcatcatgtgaatattacttggacgacgtagagagaaacgaagcacttggaaaacacaaacgcggttactggatcgagtatagggttggagaattcatagtaaatggatcagaaccatcgacagaaatccaatggtcgatgaaacagattgactgcacgcactcgaaaggagggttatgtgttgattcagtcttcataaacccaattggtgatgtgaaagaacacaaaaggaaagctgttttgaaagaagcttga

SEQ ID NO: 96586 - protein, 300 aa, Arabidopsis thaliana
  peptide (1)..(300): Ceres Seq. ID no. 12733887
MGSSLSNLNDGTNGLAMGPGLGDIPESCVACVFMYLTPPEICNLAGLNRSFRGAASSDSVWEKKLPENYQDLLDLLPPERYHSLSKKDIFAVLSRPIPFDDDNKEVWIDRVTGRVCMAISARGMSITGIEDRRYWNWIPTEESRFHVVAYLQQIWWFEVDGTVRFHLPPGVYSLSFRIHLGRFTKRLGRRVCHFELTHGWDLKPVRFSLSTSDGQEASCEYYLDDVERNEALGKHKRGYWIEYRVGEFIVNGSEPSTEIQWSMKQIDCTHSKGGLCVDSVFINPIGDVKEHKRKAVLKEA

SEQ ID NO: 96587 - protein, 284 aa, Arabidopsis thaliana
  peptide (1)..(284): Ceres Seq. ID no. 12733888
MGPGLGDIPESCVACVFMYLTPPEICNLAGLNRSFRGAASSDSVWEKKLPENYQDLLDLLPPERYHSLSKKDIFAVLSRPIPFDDDNKEVWIDRVTGRVCMAISARGMSITGIEDRRYWNWIPTEESRFHVVAYLQQIWWFEVDGTVRFHLPPGVYSLSFRIHLGRFTKRLGRRVCHFELTHGWDLKPVRFSLSTSDGQEASCEYYLDDVERNEALGKHKRGYWIEYRVGEFIVNGSEPSTEIQWSMKQIDCTHSKGGLCVDSVFINPIGDVKEHKRKAVLKEA

SEQ ID NO: 96588 - protein, 267 aa, Arabidopsis thaliana
  peptide (1)..(267): Ceres Seq. ID no. 12733889
MYLTPPEICNLAGLNRSFRGAASSDSVWEKKLPENYQDLLDLLPPERYHSLSKKDIFAVLSRPIPFDDDNKEVWIDRVTGRVCMAISARGMSITGIEDRRYWNWIPTEESRFHVVAYLQQIWWFEVDGTVRFHLPPGVYSLSFRIHLGRFTKRLGRRVCHFELTHGWDLKPVRFSLSTSDGQEASCEYYLDDVERNEALGKHKRGYWIEYRVGEFIVNGSEPSTEIQWSMKQIDCTHSKGGLCVDSVFINPIGDVKEHKRKAVLKEA

SEQ ID NO: 96589 - DNA, 1272 bp, Arabidopsis thaliana
  misc_feature (1)..(1272): Ceres Seq. ID no. 12733902
  misc_feature (1)..(1272): Ortholog of  Ceres SEQ ID NO 14313532 as cited in SEQ ID NO 20462
atgcatgggttcgatttcaaagagatccaggagaagatctccgatagctttcgtccatggcaacgctcttttcaattctgggttcgagctactaatatctacacaggctacaaggtgtttcaacttcgagtaagtttagtaaaagatgcaaagaagcaagaggaaatgtgggaaagacaacatgaacaagctgctgataagatttacttcatgtgctctgatcttggtggtttcttccttaagattgctcaacttttagcaaaacctgacatggcaccagctgcgtgggtgaaaaagcttgtcactttgtgtgatcaagctcctgcgacgccgtttgatgcgattcaacttgttctagagaaggagttaggtaaaagcattggtgaaatctttgaaacgtttgatgaaaagcctcttggttctgcttctattgctcaggttcaacatcctggcattgaaagattgatgatgacagacataagaaacttgcaactattcgccttatacatgcagagaacagatatcaaatttgacctgcattccataacaaaggaaatggagaaacagattggttatgaatttgacttcaaaagggaggccaatgcaatggaaagaattcgatgttttctttatgagaacaacaaaaagtctcctgttttggtaccaagagttctgcgagatatggtgactaagagggttttggtgatggaatacattaatggaattccaatcctgagcattggtgatgagatggctaaaagagggataaatcctcatggtaagattgcagaggcagcaaagcacaatatacttaacagtttatcccgtgcgtatggccaaatgatactgaaaagtggtttctttcatgcggatccacatcctggaaatatcttgatttgcaaaggtcaagaggcaagtcatattttggaaatgggtttacatacagtggccaagtgtgagaatgagcagcaagaacttctgcggttagcacaaacactttttgatacaaagatgcctactggtcagacagttttacaacctttctcagatgactcttcgattaaaaagatagccgttgagacatttccagaggaactgttctctgtacttcgcactgtggttctgttaagaggactcagtgttgggatgggagttaattattcgtgtgcagaacaatggagagcaatggccgaagaggctttacttgcatctggaagagtgacaagaggtaagtggttatatcgtatagtactcactacactttttgcataa

SEQ ID NO: 96590 - protein, 423 aa, Arabidopsis thaliana
  peptide (1)..(423): Ceres Seq. ID no. 12733903
MHGFDFKEIQEKISDSFRPWQRSFQFWVRATNIYTGYKVFQLRVSLVKDAKKQEEMWERQHEQAADKIYFMCSDLGGFFLKIAQLLAKPDMAPAAWVKKLVTLCDQAPATPFDAIQLVLEKELGKSIGEIFETFDEKPLGSASIAQVQHPGIERLMMTDIRNLQLFALYMQRTDIKFDLHSITKEMEKQIGYEFDFKREANAMERIRCFLYENNKKSPVLVPRVLRDMVTKRVLVMEYINGIPILSIGDEMAKRGINPHGKIAEAAKHNILNSLSRAYGQMILKSGFFHADPHPGNILICKGQEASHILEMGLHTVAKCENEQQELLRLAQTLFDTKMPTGQTVLQPFSDDSSIKKIAVETFPEELFSVLRTVVLLRGLSVGMGVNYSCAEQWRAMAEEALLASGRVTRGKWLYRIVLTTLFA

SEQ ID NO: 96591 - protein, 368 aa, Arabidopsis thaliana
  peptide (1)..(368): Ceres Seq. ID no. 12733904
MWERQHEQAADKIYFMCSDLGGFFLKIAQLLAKPDMAPAAWVKKLVTLCDQAPATPFDAIQLVLEKELGKSIGEIFETFDEKPLGSASIAQVQHPGIERLMMTDIRNLQLFALYMQRTDIKFDLHSITKEMEKQIGYEFDFKREANAMERIRCFLYENNKKSPVLVPRVLRDMVTKRVLVMEYINGIPILSIGDEMAKRGINPHGKIAEAAKHNILNSLSRAYGQMILKSGFFHADPHPGNILICKGQEASHILEMGLHTVAKCENEQQELLRLAQTLFDTKMPTGQTVLQPFSDDSSIKKIAVETFPEELFSVLRTVVLLRGLSVGMGVNYSCAEQWRAMAEEALLASGRVTRGKWLYRIVLTTLFA

SEQ ID NO: 96592 - protein, 353 aa, Arabidopsis thaliana
  peptide (1)..(353): Ceres Seq. ID no. 12733905
MCSDLGGFFLKIAQLLAKPDMAPAAWVKKLVTLCDQAPATPFDAIQLVLEKELGKSIGEIFETFDEKPLGSASIAQVQHPGIERLMMTDIRNLQLFALYMQRTDIKFDLHSITKEMEKQIGYEFDFKREANAMERIRCFLYENNKKSPVLVPRVLRDMVTKRVLVMEYINGIPILSIGDEMAKRGINPHGKIAEAAKHNILNSLSRAYGQMILKSGFFHADPHPGNILICKGQEASHILEMGLHTVAKCENEQQELLRLAQTLFDTKMPTGQTVLQPFSDDSSIKKIAVETFPEELFSVLRTVVLLRGLSVGMGVNYSCAEQWRAMAEEALLASGRVTRGKWLYRIVLTTLFA

SEQ ID NO: 96593 - DNA, 609 bp, Arabidopsis thaliana
  misc_feature (1)..(609): Ceres Seq. ID no. 12733918
  misc_feature (1)..(609): Ortholog of  Ceres SEQ ID NO 13663517 as cited in SEQ ID NO 66850
atggctgagaacaacaacaacaacggcgacaacatgaacaacgacaaccaccagcaaccaccgtcgtactcgcagctgccgccgatggcatcatccaaccctcagttacgtaattactggattgagcagatggaaaccgtctcggatttcaaaaaccgtcagcttccattggctcgaattaagaagatcatgaaggctgatccagatgtgcacatggtctccgcagaggctccgatcatcttcgcaaaggcttgcgaaatgttcatcgttgatctcacgatgcggtcgtggctcaaagccgaggagaacaaacgccacacgcttcagaaatcggatatctccaacgcagtggctagctctttcacctacgatttccttcttgatgttgtccctaaggacgagtctatcgccaccgctgatcctggctttgtggctatgccacatcctgacggtggaggagtaccgcaatattattatccaccgggagtggtgatgggaactcctatggttggtagtggaatgtacgcgccatcgcaggcgtggccagcagcggctggtgacggggaggatgatgctgaggataatggaggaaacggcggcggaaattga

SEQ ID NO: 96594 - protein, 202 aa, Arabidopsis thaliana
  peptide (1)..(202): Ceres Seq. ID no. 12733919
MAENNNNNGDNMNNDNHQQPPSYSQLPPMASSNPQLRNYWIEQMETVSDFKNRQLPLARIKKIMKADPDVHMVSAEAPIIFAKACEMFIVDLTMRSWLKAEENKRHTLQKSDISNAVASSFTYDFLLDVVPKDESIATADPGFVAMPHPDGGGVPQYYYPPGVVMGTPMVGSGMYAPSQAWPAAAGDGEDDAEDNGGNGGGN

SEQ ID NO: 96595 - protein, 191 aa, Arabidopsis thaliana
  peptide (1)..(191): Ceres Seq. ID no. 12733920
MNNDNHQQPPSYSQLPPMASSNPQLRNYWIEQMETVSDFKNRQLPLARIKKIMKADPDVHMVSAEAPIIFAKACEMFIVDLTMRSWLKAEENKRHTLQKSDISNAVASSFTYDFLLDVVPKDESIATADPGFVAMPHPDGGGVPQYYYPPGVVMGTPMVGSGMYAPSQAWPAAAGDGEDDAEDNGGNGGGN

SEQ ID NO: 96596 - protein, 174 aa, Arabidopsis thaliana
  peptide (1)..(174): Ceres Seq. ID no. 12733921
MASSNPQLRNYWIEQMETVSDFKNRQLPLARIKKIMKADPDVHMVSAEAPIIFAKACEMFIVDLTMRSWLKAEENKRHTLQKSDISNAVASSFTYDFLLDVVPKDESIATADPGFVAMPHPDGGGVPQYYYPPGVVMGTPMVGSGMYAPSQAWPAAAGDGEDDAEDNGGNGGGN

SEQ ID NO: 96597 - DNA, 1740 bp, Arabidopsis thaliana
  misc_feature (1)..(1740): Ceres Seq. ID no. 12733934
  misc_feature (1)..(1740): Ortholog of  Ceres SEQ ID NO 13597411 as cited in SEQ ID NO 64125
aaagttttgagagcgtttgactatgatgactttgtggcgtcacaaactagagctcctagtcaacgaccgatggctagttttcgtctgcgccatgtgggtccaatccgtcgccggcgttggctatctattcggcggctctatgtctccggcaatcaagacttcccttggctacaatcagaaacagatcgctcttctcggcgtagctaaaaacctcggtgacgccatcggattcgtctccggtgctttatctgaagtctcaccttcctgggtggttctactcgtcggtgcaactcagaaccttttcggctacggtgttgtttggctcgtcgtcactggccaattgcctaatttgcctctctggatgttgtttgttgctatattcgtgggaacaaatggggaaacatactacaatacagcgtcgcttgtgtcatgcattcataacttcccagaaagccgaggtcctgtggtgggaatcctgaaagggttttctggcttgagtggagcaatcttgactcaggtttatttgatgttcaacccttctcatgattcttcggttattctcatggttgctcttggaccaccagtcgtggttcttgctctactatttattgttagacccgtggaaagaagttgcagaacgaacttgcgatctgatgatttaagattcctggctatttacggtttctgtgttgtccttgcggtatatttactaggattgttggtacttcagagtgtttttgatatgactcaaacgattatcacaacctctggagccatccttgtcattttcatggttgttccagttcttgtccctttttcatcggttttcatctcgggtaataatgtcacctcagtgaagcctgaagaaggaacttccaatgtggatcagcatgaggctagaactttaattgagagaagtgacagaccgccggaaaagaaaagagcgccgtgtataggagaagatttcaccttgttacaagctttgggacaagctgacttctggcttatatttatgtctctggttctaggtgtaggttcgggaatcacgattatagacaatcttggtcagatttgttattccctcgggtacagcaacaccaaaatatttgtctcactgatcagcatctccaattttctcggccgtgttgctggtggctacttctctgagctaatcataaggaaactctcacttccaagaacgttggcaatgtctgtggttcaggcgataatgtctttggggctcatctactatgccatagattggccagggaagatctacgtagtgaccattgtgataggaatgggttatggcgctcattgggcgattgctcctgcttcagtctctgacatttttggcctgaagagcttcggttctctttacaatttccagattacagctttgcctattgggtcatttgtgttctcaggtgtgatcgctagtaacatctatgactactacgccagaaagcaagccggacccaccacagagactgagtcgctcgtctgcacgggctcggtgtgttattcagtcacgtgcagtctcatgtccatgttgtgtctaatggctatggttttgagtttgagtgtggtttataggacgaggaagttttacttgaggcttcatcaccgagtctcaaagacttgaagatagtgtaattgtgtaagcaattttcatttggtctttggaagatatatgtaagcaattttgaattccatactcaaaatctttaattggtgttc

SEQ ID NO: 96598 - protein, 540 aa, Arabidopsis thaliana
  peptide (1)..(540): Ceres Seq. ID no. 12733935
MMTLWRHKLELLVNDRWLVFVCAMWVQSVAGVGYLFGGSMSPAIKTSLGYNQKQIALLGVAKNLGDAIGFVSGALSEVSPSWVVLLVGATQNLFGYGVVWLVVTGQLPNLPLWMLFVAIFVGTNGETYYNTASLVSCIHNFPESRGPVVGILKGFSGLSGAILTQVYLMFNPSHDSSVILMVALGPPVVVLALLFIVRPVERSCRTNLRSDDLRFLAIYGFCVVLAVYLLGLLVLQSVFDMTQTIITTSGAILVIFMVVPVLVPFSSVFISGNNVTSVKPEEGTSNVDQHEARTLIERSDRPPEKKRAPCIGEDFTLLQALGQADFWLIFMSLVLGVGSGITIIDNLGQICYSLGYSNTKIFVSLISISNFLGRVAGGYFSELIIRKLSLPRTLAMSVVQAIMSLGLIYYAIDWPGKIYVVTIVIGMGYGAHWAIAPASVSDIFGLKSFGSLYNFQITALPIGSFVFSGVIASNIYDYYARKQAGPTTETESLVCTGSVCYSVTCSLMSMLCLMAMVLSLSVVYRTRKFYLRLHHRVSKT

SEQ ID NO: 96599 - protein, 539 aa, Arabidopsis thaliana
  peptide (1)..(539): Ceres Seq. ID no. 12733936
MTLWRHKLELLVNDRWLVFVCAMWVQSVAGVGYLFGGSMSPAIKTSLGYNQKQIALLGVAKNLGDAIGFVSGALSEVSPSWVVLLVGATQNLFGYGVVWLVVTGQLPNLPLWMLFVAIFVGTNGETYYNTASLVSCIHNFPESRGPVVGILKGFSGLSGAILTQVYLMFNPSHDSSVILMVALGPPVVVLALLFIVRPVERSCRTNLRSDDLRFLAIYGFCVVLAVYLLGLLVLQSVFDMTQTIITTSGAILVIFMVVPVLVPFSSVFISGNNVTSVKPEEGTSNVDQHEARTLIERSDRPPEKKRAPCIGEDFTLLQALGQADFWLIFMSLVLGVGSGITIIDNLGQICYSLGYSNTKIFVSLISISNFLGRVAGGYFSELIIRKLSLPRTLAMSVVQAIMSLGLIYYAIDWPGKIYVVTIVIGMGYGAHWAIAPASVSDIFGLKSFGSLYNFQITALPIGSFVFSGVIASNIYDYYARKQAGPTTETESLVCTGSVCYSVTCSLMSMLCLMAMVLSLSVVYRTRKFYLRLHHRVSKT

SEQ ID NO: 96600 - protein, 517 aa, Arabidopsis thaliana
  peptide (1)..(517): Ceres Seq. ID no. 12733937
MWVQSVAGVGYLFGGSMSPAIKTSLGYNQKQIALLGVAKNLGDAIGFVSGALSEVSPSWVVLLVGATQNLFGYGVVWLVVTGQLPNLPLWMLFVAIFVGTNGETYYNTASLVSCIHNFPESRGPVVGILKGFSGLSGAILTQVYLMFNPSHDSSVILMVALGPPVVVLALLFIVRPVERSCRTNLRSDDLRFLAIYGFCVVLAVYLLGLLVLQSVFDMTQTIITTSGAILVIFMVVPVLVPFSSVFISGNNVTSVKPEEGTSNVDQHEARTLIERSDRPPEKKRAPCIGEDFTLLQALGQADFWLIFMSLVLGVGSGITIIDNLGQICYSLGYSNTKIFVSLISISNFLGRVAGGYFSELIIRKLSLPRTLAMSVVQAIMSLGLIYYAIDWPGKIYVVTIVIGMGYGAHWAIAPASVSDIFGLKSFGSLYNFQITALPIGSFVFSGVIASNIYDYYARKQAGPTTETESLVCTGSVCYSVTCSLMSMLCLMAMVLSLSVVYRTRKFYLRLHHRVSKT

SEQ ID NO: 96601 - DNA, 1152 bp, Arabidopsis thaliana
  misc_feature (1)..(1152): Ceres Seq. ID no. 12733944
  misc_feature (1)..(1152): Ortholog of  Ceres SEQ ID NO 13595525 as cited in SEQ ID NO 56679
  misc_feature (1)..(1152): Ortholog of  Ceres SEQ ID NO 15226984 as cited in SEQ ID NO 62173
  misc_feature (1)..(1152): Ortholog of  Ceres SEQ ID NO 14302236 as cited in SEQ ID NO 68793
atggcgagtaatcaacaaccaccgtcgaatctacagacctacggtgtaccaatttacgccgtcgactggattctagaggaagctgtcagatccaaaatcactaaggatcaggatgatgatgatgatgatggatcgtcgtcgtcgtcgtacatcgttttatccggcggaggaggagaaggacgaagtggaatacctaatgtcatcttaatctgtcgtgttgatctccacaccaattctctctctgaacaacctattggtaggcgtgtgattggcactgatctaccttatcgtatggctattcatcctcgtcaaggtggtcttatttgtgcattgcctaacagttgcagactgtttgattgggaaaacattatagaggatgataatgaggaagagtcagagaaagttgttaaagagttaaaagatgttggacaacagttgtctctctcgtttaatcaggatgggactgttctagctactggtgcagaggatgggactttgagggtttttgaatggccaagcatgaagactttacttaatgagtctaagacacatgcatcagttaaaagcctaactttcagcgaaagtggtaagtttcttgtatctcttggagctccactttgtcgggtttgggatgtgaatgcttctgctgctattgccagtctatcaaaagagaaggacgagatgtttgcctcgtgtagattctctgtagacaattcaggcagtgaagttctttatgttgctgcaaacactcaacgtggtgggagtattataacatgggatacaacatcatggagaagaagaagttcaaagcttattaaaagaaacaactctatatctgcctttaatgtctcagctgatgggaagcttcttgcagtaggaaccctcgaaggagatgttttaataattgattcgacaaagatgcaaactaaccaaatcgtcaagaaagctcatctcggtttggtcaccgcactgactttctcccctgattcaaggtgcttagtgtcagtatcttttgactcaagggcaaggctaaccgtgatcaaacaaaagggtgaaaaacgtcgagtatatctgtgggtggcggcattgttgtttgtgttggtatacgtggttttgtattatttgatggtggcaatggggatcatacattag

SEQ ID NO: 96602 - protein, 383 aa, Arabidopsis thaliana
  peptide (1)..(383): Ceres Seq. ID no. 12733945
MASNQQPPSNLQTYGVPIYAVDWILEEAVRSKITKDQDDDDDDGSSSSSYIVLSGGGGEGRSGIPNVILICRVDLHTNSLSEQPIGRRVIGTDLPYRMAIHPRQGGLICALPNSCRLFDWENIIEDDNEEESEKVVKELKDVGQQLSLSFNQDGTVLATGAEDGTLRVFEWPSMKTLLNESKTHASVKSLTFSESGKFLVSLGAPLCRVWDVNASAAIASLSKEKDEMFASCRFSVDNSGSEVLYVAANTQRGGSIITWDTTSWRRRSSKLIKRNNSISAFNVSADGKLLAVGTLEGDVLIIDSTKMQTNQIVKKAHLGLVTALTFSPDSRCLVSVSFDSRARLTVIKQKGEKRRVYLWVAALLFVLVYVVLYYLMVAMGIIH

SEQ ID NO: 96603 - protein, 286 aa, Arabidopsis thaliana
  peptide (1)..(286): Ceres Seq. ID no. 12733946
MAIHPRQGGLICALPNSCRLFDWENIIEDDNEEESEKVVKELKDVGQQLSLSFNQDGTVLATGAEDGTLRVFEWPSMKTLLNESKTHASVKSLTFSESGKFLVSLGAPLCRVWDVNASAAIASLSKEKDEMFASCRFSVDNSGSEVLYVAANTQRGGSIITWDTTSWRRRSSKLIKRNNSISAFNVSADGKLLAVGTLEGDVLIIDSTKMQTNQIVKKAHLGLVTALTFSPDSRCLVSVSFDSRARLTVIKQKGEKRRVYLWVAALLFVLVYVVLYYLMVAMGIIH

SEQ ID NO: 96604 - protein, 210 aa, Arabidopsis thaliana
  peptide (1)..(210): Ceres Seq. ID no. 12733947
MKTLLNESKTHASVKSLTFSESGKFLVSLGAPLCRVWDVNASAAIASLSKEKDEMFASCRFSVDNSGSEVLYVAANTQRGGSIITWDTTSWRRRSSKLIKRNNSISAFNVSADGKLLAVGTLEGDVLIIDSTKMQTNQIVKKAHLGLVTALTFSPDSRCLVSVSFDSRARLTVIKQKGEKRRVYLWVAALLFVLVYVVLYYLMVAMGIIH

SEQ ID NO: 96605 - DNA, 900 bp, Arabidopsis thaliana
  misc_feature (1)..(900): Ceres Seq. ID no. 12733957
  misc_feature (1)..(900): Ortholog of  Ceres SEQ ID NO 14311477 as cited in SEQ ID NO 51390
  misc_feature (1)..(900): Ortholog of  Ceres SEQ ID NO 14302840 as cited in SEQ ID NO 62295
  misc_feature (1)..(900): Ortholog of  Ceres SEQ ID NO 13596892 as cited in SEQ ID NO 62900
atggatttaaacaacaagatctttaacatccttcttcctattgtcacggtttcgtttcttttagtgttcatgccattttcaatattcttcaagctcctccagttcataaggggatgcaaagagtccgagaaagtcaacggaaaagtcgtcatcatcaccggatcttcctcaggaattggcgagcacctagcgtatgagtatgctcgtagaggagcatacttgactctagtagctcggagagaggatcgtctccaggtggtggctgaccggtgcaggaagcttggttcaccagacgttgctgtggtacgcggtgatgtctcagtcatcaaagactgtaaacgttttgttcaagaaaccatctctcggtttggaagattggatcacttggtgaacaatgctggaattgcggaggccaaatttttcgaggactattctgaaatttcggatgttcttcccattgtgaacactaacttttggggaccggtttacgcgacacatttcgctataccgcatctcaagaaaacaaaaggaaagatcatagcggttgcatcacctgctggatggtctggagtaccaaggatgagcatatatgctgcaagcaaagcagctatgataaacttctacgagactcttaggatcgagcttcatccagaagttggtgtgacaatcgtgtttcctggtctaatcgaaaacggaaatactaatccggaccttttagctgagaaacaagactggtcgcaagttgtgaccatcgagtcagcagcggaatgcgccaaagcggtagttaacggaatctgcagaggcaaaacctttgtggcagagccgtcgtgggttcgtgtcctgttctggcttagtgctatatgccctgagcttctgatctctaagcctaaaaggaattaa

SEQ ID NO: 96606 - protein, 299 aa, Arabidopsis thaliana
  peptide (1)..(299): Ceres Seq. ID no. 12733958
MDLNNKIFNILLPIVTVSFLLVFMPFSIFFKLLQFIRGCKESEKVNGKVVIITGSSSGIGEHLAYEYARRGAYLTLVARREDRLQVVADRCRKLGSPDVAVVRGDVSVIKDCKRFVQETISRFGRLDHLVNNAGIAEAKFFEDYSEISDVLPIVNTNFWGPVYATHFAIPHLKKTKGKIIAVASPAGWSGVPRMSIYAASKAAMINFYETLRIELHPEVGVTIVFPGLIENGNTNPDLLAEKQDWSQVVTIESAAECAKAVVNGICRGKTFVAEPSWVRVLFWLSAICPELLISKPKRN

SEQ ID NO: 96607 - protein, 276 aa, Arabidopsis thaliana
  peptide (1)..(276): Ceres Seq. ID no. 12733959
MPFSIFFKLLQFIRGCKESEKVNGKVVIITGSSSGIGEHLAYEYARRGAYLTLVARREDRLQVVADRCRKLGSPDVAVVRGDVSVIKDCKRFVQETISRFGRLDHLVNNAGIAEAKFFEDYSEISDVLPIVNTNFWGPVYATHFAIPHLKKTKGKIIAVASPAGWSGVPRMSIYAASKAAMINFYETLRIELHPEVGVTIVFPGLIENGNTNPDLLAEKQDWSQVVTIESAAECAKAVVNGICRGKTFVAEPSWVRVLFWLSAICPELLISKPKRN

SEQ ID NO: 96608 - DNA, 1209 bp, Arabidopsis thaliana
  misc_feature (1)..(1209): Ceres Seq. ID no. 12733960
  misc_feature (1)..(1209): Ortholog of  Ceres SEQ ID NO 14311477 as cited in SEQ ID NO 51390
  misc_feature (1)..(1209): Ortholog of  Ceres SEQ ID NO 14302840 as cited in SEQ ID NO 62295
  misc_feature (1)..(1209): Ortholog of  Ceres SEQ ID NO 13596892 as cited in SEQ ID NO 62900
gagagctaaatcatttacgttttgatcgacaaaaatggagttgataaacgactttctcaacctaactgctcctttcttcaccttctttggtctctgcttcttcttgcctcctttttacttcttcaagttcttgcagtctattttctcgacaattttctctgaaaatctttacgggaaagttgttctcatcactggtgcttcctccggtataggcgagcaattggcatatgagtacgcatgtagaggtgcatgtttagccctgaccgcccgaaggaagaaccgtctagaggaagtggcagagattgctcgtgaactcggatctcccaatgttgttaccgttcatgctgatgtctccaaacctgatgactgtagacgaatcgttgatgacaccatcacccattttggcagattggatcatcttgtaaataatgctgggatgacgcagatttcaatgtttgagaacattgaagatataacgaggacaaaagcagttttggatactaacttctggggatcggtttataccactcgtgctgcgcttccataccttagacaaagtaatggtaagattgtggctatgtcgtcttccgcagcgtggctaaccgctccaaggatgagtttttacaatgcaagcaaagcagctttgttgagcttctttgagacgatgagaattgagcttggtggcgatgtacacattacaatcgtcacacctggttatatcgagtcggagctcacacaaggcaagtacttctctggtgaaggcgagttaatagtcaaccaagacatgagagatgttcaagtaggaccatttccggtagcgtcagcatcaggatgtgccaagtcgatagtgaacggtgtgtgccggaaacaaagatacgtgacagagccatcatggtttaaggtgacgtacctttggaaagtgctatgtccggagttgattgagtggggttgtcggttactgtacatgactggaactggtatgtccgaggatactgcactcaacaagaggatcatggacattcctggtgtacgtagtactctgtacccggaatctatcagaactccagaaatcaagtcggattagagaggggtcaatacataataaatggatgagatgtatcatgagtatgtgcaatgagtaataattatcaaagaaatgggtgaaaatgtaggtttgtttttgttaatggtacttttgactatgtatat

SEQ ID NO: 96609 - protein, 349 aa, Arabidopsis thaliana
  peptide (1)..(349): Ceres Seq. ID no. 12733961
MELINDFLNLTAPFFTFFGLCFFLPPFYFFKFLQSIFSTIFSENLYGKVVLITGASSGIGEQLAYEYACRGACLALTARRKNRLEEVAEIARELGSPNVVTVHADVSKPDDCRRIVDDTITHFGRLDHLVNNAGMTQISMFENIEDITRTKAVLDTNFWGSVYTTRAALPYLRQSNGKIVAMSSSAAWLTAPRMSFYNASKAALLSFFETMRIELGGDVHITIVTPGYIESELTQGKYFSGEGELIVNQDMRDVQVGPFPVASASGCAKSIVNGVCRKQRYVTEPSWFKVTYLWKVLCPELIEWGCRLLYMTGTGMSEDTALNKRIMDIPGVRSTLYPESIRTPEIKSD

SEQ ID NO: 96610 - protein, 215 aa, Arabidopsis thaliana
  peptide (1)..(215): Ceres Seq. ID no. 12733962
MTQISMFENIEDITRTKAVLDTNFWGSVYTTRAALPYLRQSNGKIVAMSSSAAWLTAPRMSFYNASKAALLSFFETMRIELGGDVHITIVTPGYIESELTQGKYFSGEGELIVNQDMRDVQVGPFPVASASGCAKSIVNGVCRKQRYVTEPSWFKVTYLWKVLCPELIEWGCRLLYMTGTGMSEDTALNKRIMDIPGVRSTLYPESIRTPEIKSD

SEQ ID NO: 96611 - protein, 210 aa, Arabidopsis thaliana
  peptide (1)..(210): Ceres Seq. ID no. 12733963
MFENIEDITRTKAVLDTNFWGSVYTTRAALPYLRQSNGKIVAMSSSAAWLTAPRMSFYNASKAALLSFFETMRIELGGDVHITIVTPGYIESELTQGKYFSGEGELIVNQDMRDVQVGPFPVASASGCAKSIVNGVCRKQRYVTEPSWFKVTYLWKVLCPELIEWGCRLLYMTGTGMSEDTALNKRIMDIPGVRSTLYPESIRTPEIKSD

SEQ ID NO: 96612 - DNA, 1227 bp, Arabidopsis thaliana
  misc_feature (1)..(1227): Ceres Seq. ID no. 12733986
  misc_feature (1)..(1227): Ortholog of  Ceres SEQ ID NO 15168355 as cited in SEQ ID NO 57246
  misc_feature (1)..(1227): Ortholog of  Ceres SEQ ID NO 13597094 as cited in SEQ ID NO 63626
atggcggcgaatcgtgtggcgatggaagaagatattactgaatctgtgactttaatggtggattccgtttcttcttctccgatgactccgaagactgtgacggttaaggaagatgaaactcatcatccttatgcgtttcatgtttccggtccgagaaatgttgcttctcctaattggagagatctcatcaactccagttggaaggatcctaactacaagagaacagtaatggcctgttttattcaagcagcttacttgcttgaactcgacagacaagagaatcgaaacgagcaaaacgctctcgcaccaaaatggtggattccattcaagtacaagttatcacaaacgctcattgacgagagagatggatcaatatttggtgctgttcttgaatgggacagagcagctgcaatggcagatttggttgtcatcagaccaagtggggcaccaaaagcagtacttgcgctgcgaggaacgatactaaagagtcttacaatgagacgtgacatagaagatgatctccgatttttagcttgggagagccttaaaggttctgtgaggtttaatgttgctctagaggcgttgcaatcagtagcaacgagatatgggagcagtaatgtctgtgtagtggggcattcgttaggagctggttttgctttacaagttggtaaatccttggctaaagaagggttatttgtagatgctcatttgttcaatccaccttctatatctgtcgctatgagcttgagaaacatcagtgagaaagctggtgttgcttggaaaagactcatgtcaatgcttcctcccaaacacgagcctctgatacagaatagtaacgaaggtcaggtttctcctagcaatgtttcatcagggttcaggaactgggtaccgagtttctacgggtcgaatcagaaacctactgtggatttaagaaaatgggtgcctcatctatatgtgaacgatagcgactatatttgttgccactacactgaccaggatggagtagcagagaagagggaaatgaacaacaaagagaacaatagccctgttgtaaacactaattttcaagcagcagcaaagcttttcgtgatgtcgaaagggaaacagaagtttcacgaggcgcacgggttagaacaatggtggtctgataacctagagcttcaatcagctattcacagcagcaggttgatcagtcagcaactcaagtcattatacagtatcaagtaa

SEQ ID NO: 96613 - protein, 408 aa, Arabidopsis thaliana
  peptide (1)..(408): Ceres Seq. ID no. 12733987
MAANRVAMEEDITESVTLMVDSVSSSPMTPKTVTVKEDETHHPYAFHVSGPRNVASPNWRDLINSSWKDPNYKRTVMACFIQAAYLLELDRQENRNEQNALAPKWWIPFKYKLSQTLIDERDGSIFGAVLEWDRAAAMADLVVIRPSGAPKAVLALRGTILKSLTMRRDIEDDLRFLAWESLKGSVRFNVALEALQSVATRYGSSNVCVVGHSLGAGFALQVGKSLAKEGLFVDAHLFNPPSISVAMSLRNISEKAGVAWKRLMSMLPPKHEPLIQNSNEGQVSPSNVSSGFRNWVPSFYGSNQKPTVDLRKWVPHLYVNDSDYICCHYTDQDGVAEKREMNNKENNSPVVNTNFQAAAKLFVMSKGKQKFHEAHGLEQWWSDNLELQSAIHSSRLISQQLKSLYSIK

SEQ ID NO: 96614 - protein, 401 aa, Arabidopsis thaliana
  peptide (1)..(401): Ceres Seq. ID no. 12733988
MEEDITESVTLMVDSVSSSPMTPKTVTVKEDETHHPYAFHVSGPRNVASPNWRDLINSSWKDPNYKRTVMACFIQAAYLLELDRQENRNEQNALAPKWWIPFKYKLSQTLIDERDGSIFGAVLEWDRAAAMADLVVIRPSGAPKAVLALRGTILKSLTMRRDIEDDLRFLAWESLKGSVRFNVALEALQSVATRYGSSNVCVVGHSLGAGFALQVGKSLAKEGLFVDAHLFNPPSISVAMSLRNISEKAGVAWKRLMSMLPPKHEPLIQNSNEGQVSPSNVSSGFRNWVPSFYGSNQKPTVDLRKWVPHLYVNDSDYICCHYTDQDGVAEKREMNNKENNSPVVNTNFQAAAKLFVMSKGKQKFHEAHGLEQWWSDNLELQSAIHSSRLISQQLKSLYSIK

SEQ ID NO: 96615 - protein, 390 aa, Arabidopsis thaliana
  peptide (1)..(390): Ceres Seq. ID no. 12733989
MVDSVSSSPMTPKTVTVKEDETHHPYAFHVSGPRNVASPNWRDLINSSWKDPNYKRTVMACFIQAAYLLELDRQENRNEQNALAPKWWIPFKYKLSQTLIDERDGSIFGAVLEWDRAAAMADLVVIRPSGAPKAVLALRGTILKSLTMRRDIEDDLRFLAWESLKGSVRFNVALEALQSVATRYGSSNVCVVGHSLGAGFALQVGKSLAKEGLFVDAHLFNPPSISVAMSLRNISEKAGVAWKRLMSMLPPKHEPLIQNSNEGQVSPSNVSSGFRNWVPSFYGSNQKPTVDLRKWVPHLYVNDSDYICCHYTDQDGVAEKREMNNKENNSPVVNTNFQAAAKLFVMSKGKQKFHEAHGLEQWWSDNLELQSAIHSSRLISQQLKSLYSIK

SEQ ID NO: 96616 - DNA, 1536 bp, Arabidopsis thaliana
  misc_feature (1)..(1536): Ceres Seq. ID no. 12734000
  misc_feature (1)..(1536): Ortholog of  Ceres SEQ ID NO 12586556 as cited in SEQ ID NO 64667
  misc_feature (1)..(1536): Ortholog of  Ceres SEQ ID NO 13660894 as cited in SEQ ID NO 67475
atgctttcttatgtagatcatgggatgttgaaacaagttcttgaatcatgcaaagctccttcaaattctaaatgtgttcttcaagcacatgctcagatctttaaacttgggtacggaacatatccatctcttcttgtctccacagttgcagcttacagacgctgcaaccgttcatatcttgctcgacggcttcttctttggttcctctctttgtctcctggtgtctgtaacataaacctaatcattgagagtcttatgaaaattggagagtctggtttggccaagaaggtacttcgtaatgcgagtgatcagaatgtgatcacctggaacttgatgattggtggttatgttagaaatgtccagtatgaagaagctctgaaagctcttaagaatatgcttagttttactgatattaaaccgaataagttcagttttgcttcctctttagctgcttgtgcccgtcttggagatctgcaccatgcgaagtgggtgcactctctgatgattgatagtgggattgagcttaatgcaatattgtcttctgcacttgttgatgtgtatgcaaagtgtggagatataggaacttcgagggaggttttctatagtgttaaacggaacgatgtgtcgatttggaacgcgatgatcacgggttttgctactcatgggctagccacagaagcaatcagagtgttttcagagatggaagcggaacatgtttcaccagattctataacattcctcgggcttttaacaacgtgtagccattgcggtttgcttgaagaagggaaagagtactttggtctaatgagtcgccgcttttctatacagccaaagttagagcactatggtgctatggttgatctgctaggccgagcaggaagagtaaaagaagcgtacgagttgatcgaatcaatgccgatagagccagatgtagtgatatggaggtctcttcttagttcctctagaacttataagaatcctgagctaggagaaatcgcgatacagaatctttcaaaagcaaagagcggagactatgtgttgctttcgaacatatatagctccacgaagaaatgggagagcgctcaaaaggtcagagagttgatgagtaaggaaggaatccgtaaagcgaaaggaaagagttggttggaatttggagggatgatacatcggtttaaggcaggagatacatctcatatagaaacaaaagctatatacaaagtattagaaggtttgatacagaaaactaagtctcaaggatttgtgtctgacacggatttggtgttgatggatgtttctgaagaagagaaagaagagaacttaaattatcacagcgaaaagctcgcgttggcgtatgtgatattgaagagtagtccaggaacagaaattagaattcagaagaatatacggatgtgtagtgattgccacaactggataaaagcagtgtcgaagttgttgaatagagtgattataatgcgggatcggatacggtttcataggtttgaagatgggttgtgttcttgcagagattattggtaa

SEQ ID NO: 96617 - protein, 511 aa, Arabidopsis thaliana
  peptide (1)..(511): Ceres Seq. ID no. 12734001
MLSYVDHGMLKQVLESCKAPSNSKCVLQAHAQIFKLGYGTYPSLLVSTVAAYRRCNRSYLARRLLLWFLSLSPGVCNINLIIESLMKIGESGLAKKVLRNASDQNVITWNLMIGGYVRNVQYEEALKALKNMLSFTDIKPNKFSFASSLAACARLGDLHHAKWVHSLMIDSGIELNAILSSALVDVYAKCGDIGTSREVFYSVKRNDVSIWNAMITGFATHGLATEAIRVFSEMEAEHVSPDSITFLGLLTTCSHCGLLEEGKEYFGLMSRRFSIQPKLEHYGAMVDLLGRAGRVKEAYELIESMPIEPDVVIWRSLLSSSRTYKNPELGEIAIQNLSKAKSGDYVLLSNIYSSTKKWESAQKVRELMSKEGIRKAKGKSWLEFGGMIHRFKAGDTSHIETKAIYKVLEGLIQKTKSQGFVSDTDLVLMDVSEEEKEENLNYHSEKLALAYVILKSSPGTEIRIQKNIRMCSDCHNWIKAVSKLLNRVIIMRDRIRFHRFEDGLCSCRDYW

SEQ ID NO: 96618 - protein, 503 aa, Arabidopsis thaliana
  peptide (1)..(503): Ceres Seq. ID no. 12734002
MLKQVLESCKAPSNSKCVLQAHAQIFKLGYGTYPSLLVSTVAAYRRCNRSYLARRLLLWFLSLSPGVCNINLIIESLMKIGESGLAKKVLRNASDQNVITWNLMIGGYVRNVQYEEALKALKNMLSFTDIKPNKFSFASSLAACARLGDLHHAKWVHSLMIDSGIELNAILSSALVDVYAKCGDIGTSREVFYSVKRNDVSIWNAMITGFATHGLATEAIRVFSEMEAEHVSPDSITFLGLLTTCSHCGLLEEGKEYFGLMSRRFSIQPKLEHYGAMVDLLGRAGRVKEAYELIESMPIEPDVVIWRSLLSSSRTYKNPELGEIAIQNLSKAKSGDYVLLSNIYSSTKKWESAQKVRELMSKEGIRKAKGKSWLEFGGMIHRFKAGDTSHIETKAIYKVLEGLIQKTKSQGFVSDTDLVLMDVSEEEKEENLNYHSEKLALAYVILKSSPGTEIRIQKNIRMCSDCHNWIKAVSKLLNRVIIMRDRIRFHRFEDGLCSCRDYW

SEQ ID NO: 96619 - protein, 426 aa, Arabidopsis thaliana
  peptide (1)..(426): Ceres Seq. ID no. 12734003
MKIGESGLAKKVLRNASDQNVITWNLMIGGYVRNVQYEEALKALKNMLSFTDIKPNKFSFASSLAACARLGDLHHAKWVHSLMIDSGIELNAILSSALVDVYAKCGDIGTSREVFYSVKRNDVSIWNAMITGFATHGLATEAIRVFSEMEAEHVSPDSITFLGLLTTCSHCGLLEEGKEYFGLMSRRFSIQPKLEHYGAMVDLLGRAGRVKEAYELIESMPIEPDVVIWRSLLSSSRTYKNPELGEIAIQNLSKAKSGDYVLLSNIYSSTKKWESAQKVRELMSKEGIRKAKGKSWLEFGGMIHRFKAGDTSHIETKAIYKVLEGLIQKTKSQGFVSDTDLVLMDVSEEEKEENLNYHSEKLALAYVILKSSPGTEIRIQKNIRMCSDCHNWIKAVSKLLNRVIIMRDRIRFHRFEDGLCSCRDYW

SEQ ID NO: 96620 - DNA, 945 bp, Arabidopsis thaliana
  misc_feature (1)..(945): Ceres Seq. ID no. 12734008
  misc_feature (1)..(945): Ortholog of  Ceres SEQ ID NO 15170627 as cited in SEQ ID NO 52703
  misc_feature (1)..(945): Ortholog of  Ceres SEQ ID NO 13655124 as cited in SEQ ID NO 62896
  misc_feature (1)..(945): Ortholog of  Ceres SEQ ID NO 14313540 as cited in SEQ ID NO 68110
  misc_feature (1)..(945): Ortholog of  Ceres SEQ ID NO 13596175 as cited in SEQ ID NO 68297
  misc_feature (1)..(945): Ortholog of  Ceres SEQ ID NO 14301898 as cited in SEQ ID NO 69243
atggtaggaagcaaagaaaaatcgaaagagaaacgagataagagactccaagagatctccctccttcgtactattccctattctgatcaccagaggtggtggacctctgaaaccgtggcggtggtaacaggtgcgaatagaggaataggatttgagatggtgagacaattggctggacatggactaacagttattctaacatcaagagacgagaatgtaggcgtcgaagccgccaagatccttcaagaaggtggattcaatgttgatttccaccgcctcgatatcttggactcttcctcaatccaagagttttgcgaatggattaaagaaaaatatggatttattgatgttttaattaataatgcaggagtaaactacaatgttggatcagataactctgttgaattctcgcatatggttatatctaccaactactatggcaccaagaacataatcaacgccatgattccactaatgagacatgcttgtcaaggagctcgtattgtcaatgtcacttcaaggctcggtagattaaaaggccgacacagtaaacttgagaatgaagacgtgagagccaagcttatggatgtggactctctaactgaagaaatcgttgacaaaacagtatcagagtttttgaaacaagtggaagaaggaacatgggaatctggaggttggccacattccttcacagactactctgtctccaaaatggcggtgaacgcatacacaagagtactagctaaagaactatccgagagaccagagggagagaagatatatgcaaactgtttttgtcccggttgggtgaaaaccgcaatgacaggctatgcagggaacgtttcagcagaagatggagctgacactggagtctggcttgcattgcttcctgatcaagctatcaccggaaagttcttcgccgagagacgtgagatcagtttctaa

SEQ ID NO: 96621 - protein, 314 aa, Arabidopsis thaliana
  peptide (1)..(314): Ceres Seq. ID no. 12734009
MVGSKEKSKEKRDKRLQEISLLRTIPYSDHQRWWTSETVAVVTGANRGIGFEMVRQLAGHGLTVILTSRDENVGVEAAKILQEGGFNVDFHRLDILDSSSIQEFCEWIKEKYGFIDVLINNAGVNYNVGSDNSVEFSHMVISTNYYGTKNIINAMIPLMRHACQGARIVNVTSRLGRLKGRHSKLENEDVRAKLMDVDSLTEEIVDKTVSEFLKQVEEGTWESGGWPHSFTDYSVSKMAVNAYTRVLAKELSERPEGEKIYANCFCPGWVKTAMTGYAGNVSAEDGADTGVWLALLPDQAITGKFFAERREISF

SEQ ID NO: 96622 - protein, 262 aa, Arabidopsis thaliana
  peptide (1)..(262): Ceres Seq. ID no. 12734010
MVRQLAGHGLTVILTSRDENVGVEAAKILQEGGFNVDFHRLDILDSSSIQEFCEWIKEKYGFIDVLINNAGVNYNVGSDNSVEFSHMVISTNYYGTKNIINAMIPLMRHACQGARIVNVTSRLGRLKGRHSKLENEDVRAKLMDVDSLTEEIVDKTVSEFLKQVEEGTWESGGWPHSFTDYSVSKMAVNAYTRVLAKELSERPEGEKIYANCFCPGWVKTAMTGYAGNVSAEDGADTGVWLALLPDQAITGKFFAERREISF

SEQ ID NO: 96623 - protein, 176 aa, Arabidopsis thaliana
  peptide (1)..(176): Ceres Seq. ID no. 12734011
MVISTNYYGTKNIINAMIPLMRHACQGARIVNVTSRLGRLKGRHSKLENEDVRAKLMDVDSLTEEIVDKTVSEFLKQVEEGTWESGGWPHSFTDYSVSKMAVNAYTRVLAKELSERPEGEKIYANCFCPGWVKTAMTGYAGNVSAEDGADTGVWLALLPDQAITGKFFAERREISF

SEQ ID NO: 96624 - DNA, 2805 bp, Arabidopsis thaliana
  misc_feature (1)..(2805): Ceres Seq. ID no. 12734026
  misc_feature (1)..(2805): Ortholog of  Ceres SEQ ID NO 13660487 as cited in SEQ ID NO 60849
atgagcgtagatgttcagagaatcactgacttcatttggtatgtaaacagcatatggatgttacctatacagattttctcagcgatttatatcttgcaaaaacatctgggacttggagctttagctgcattggtcacaactttaatggtgatggcttgcaactacccattgacaaggcttcagagaaactaccaatcagatatcatgaatgccaaagatgatagaatgaaagcaacttcagagattcttaaaaacatgaagattctgaagcttcaagcatgggataaccagtttctcaacaaggttaaaacattaagaaagaaagagtatgattgtttatggaagtctttgaggttacaagatttcacaactttcatactttggggagctccttcattgatctctgtggtgacttttgttacttgtatgttaatgggagtgaagctaacagctggagcagtcttatctgctcttgcaacgtttcaaatgttacaaagtccgattttcggtttacctgatctcctctcagcgcttgttcagagcaaggtttctgcagatagaatagcttcttacttgcaacaaagcgagactcagaaagatgcagttgagtattgctcaaatgatcatacagaatttagtgttgaaatagaaaatggagcatttagttgggaacctgagtcaagcagaccaactcttgatgacatcgaactgaaagtaaaaagcggaatgaaagtggcgatctgcggagctgtaggatcaggaaaatcaagcttaccctcttcaatcttaggggagattcagaagctgaagggaacagtcagagtcagtggtaaacaagcttatgttccacaatcaccatggatactaagcgggactataagagataacattttgtttggaagcatttatgaaagcgaaaagtatgagagaactgttaaagcatgtgctttgataaaggactttgagcttttctcgaatggagacttgacagagattggagagagagggataaacatgagtggaggtcagaagcaaaggatacagattgctcgagcggtatatcagaacgctgatatatatctacttgatgatccttttagcgccgttgatgctcatacaggaagagaactctttgaagattgcttaatggggatactgaaagacaaaactgtactttacgttacccatcaagtcgagtttcttccagcagcagatctaatcctggtgatgcaaaacggaagagtgatgcaagcaggaaagtttgaagagcttctaaagcaaaacataggaagttcactttgtgttttagcacggactattctagtcgcgataggtggactttcaacagcagagacgttcttctcaaggatgctctgcagcattttcagagctccaatgtcatatttcgattcaactccaacaggaagaatcttgaacagggcatccacagatcaaagtgtcctggatttggaaatggcagtcaaactaggttggtgtgctttctcgatcattcagattgttggaaccatcttcgtcatgtcgcaagttgcttggcaaagatattacacaccaacagagagagaactgtcacgcatgtcaggagtagaaagagctccaatcctccaccatttcgctgaatcgcttgctggtgcaacaacaatacgtgcttttgatcaacgagatcgcttcattagctcaaaccttgttctaatagatagccactcaaggccatggttccatgttgcatcagcaatggagtggctttccttcaggttgaatttgctgtctcattttgtctttgctttttccttggtgttacttgtgactctccctgaaggtgtcatcaatccaagtattgctggtcttggggtcacatatggcttaagtctgaatgttctacaagccacagtgatatggaatatatgcaatgcagaaaacaagatgatttctgtagaaagaattcttcagcactctaagatccccagtgaagcacctctagtaattgatgatcagagacctcttgataactggccaaatgtaggatcaatcgtcttcagagacctacaggtccgttatgcagaacatttcccagctgtcttgaagaacatcacttgtgcgtttccaggaggaaaaaagattggagtagtaggaagaacaggaagcggcaaatcaactttaattcaggcattgtttaggattgtagagccaagtcatggaaccatagttattgataatgtggatataaccaagataggtctacatgacctgagatcaaggcttgggattattcctcaagataatgcactatttgatggaacaatcagattgaatctagatcctctagctcagtatactgatcgcgaaatatgggaggctcttgataaatgtcaactgggagatgttattcgtgcaaaggatgagaagctggatgctacagtggttgaaaatggagaaaattggagcgtaggacaaagacagttagtctgtcttgggagggtgttgttgaagaaaagcaacattctggtgcttgatgaagccactgcttcagttgattctgcaactgatggtgtaatacaaaagatcatcaatcaagagtttaaagatcggacagtggtgactattgcacacagaatccacacagtgatagagagtgatcttgttctggttctgagtgatggacgaatcgcagagtttgattcacctgcaaaactgctacagagagaagattctttcttctccaaactcataaaagagtattcgctgagatctaatcactttgccggctcgaatgatcttctcagctaa

SEQ ID NO: 96625 - protein, 934 aa, Arabidopsis thaliana
  peptide (1)..(934): Ceres Seq. ID no. 12734027
MSVDVQRITDFIWYVNSIWMLPIQIFSAIYILQKHLGLGALAALVTTLMVMACNYPLTRLQRNYQSDIMNAKDDRMKATSEILKNMKILKLQAWDNQFLNKVKTLRKKEYDCLWKSLRLQDFTTFILWGAPSLISVVTFVTCMLMGVKLTAGAVLSALATFQMLQSPIFGLPDLLSALVQSKVSADRIASYLQQSETQKDAVEYCSNDHTEFSVEIENGAFSWEPESSRPTLDDIELKVKSGMKVAICGAVGSGKSSLPSSILGEIQKLKGTVRVSGKQAYVPQSPWILSGTIRDNILFGSIYESEKYERTVKACALIKDFELFSNGDLTEIGERGINMSGGQKQRIQIARAVYQNADIYLLDDPFSAVDAHTGRELFEDCLMGILKDKTVLYVTHQVEFLPAADLILVMQNGRVMQAGKFEELLKQNIGSSLCVLARTILVAIGGLSTAETFFSRMLCSIFRAPMSYFDSTPTGRILNRASTDQSVLDLEMAVKLGWCAFSIIQIVGTIFVMSQVAWQRYYTPTERELSRMSGVERAPILHHFAESLAGATTIRAFDQRDRFISSNLVLIDSHSRPWFHVASAMEWLSFRLNLLSHFVFAFSLVLLVTLPEGVINPSIAGLGVTYGLSLNVLQATVIWNICNAENKMISVERILQHSKIPSEAPLVIDDQRPLDNWPNVGSIVFRDLQVRYAEHFPAVLKNITCAFPGGKKIGVVGRTGSGKSTLIQALFRIVEPSHGTIVIDNVDITKIGLHDLRSRLGIIPQDNALFDGTIRLNLDPLAQYTDREIWEALDKCQLGDVIRAKDEKLDATVVENGENWSVGQRQLVCLGRVLLKKSNILVLDEATASVDSATDGVIQKIINQEFKDRTVVTIAHRIHTVIESDLVLVLSDGRIAEFDSPAKLLQREDSFFSKLIKEYSLRSNHFAGSNDLLS

SEQ ID NO: 96626 - protein, 915 aa, Arabidopsis thaliana
  peptide (1)..(915): Ceres Seq. ID no. 12734028
MLPIQIFSAIYILQKHLGLGALAALVTTLMVMACNYPLTRLQRNYQSDIMNAKDDRMKATSEILKNMKILKLQAWDNQFLNKVKTLRKKEYDCLWKSLRLQDFTTFILWGAPSLISVVTFVTCMLMGVKLTAGAVLSALATFQMLQSPIFGLPDLLSALVQSKVSADRIASYLQQSETQKDAVEYCSNDHTEFSVEIENGAFSWEPESSRPTLDDIELKVKSGMKVAICGAVGSGKSSLPSSILGEIQKLKGTVRVSGKQAYVPQSPWILSGTIRDNILFGSIYESEKYERTVKACALIKDFELFSNGDLTEIGERGINMSGGQKQRIQIARAVYQNADIYLLDDPFSAVDAHTGRELFEDCLMGILKDKTVLYVTHQVEFLPAADLILVMQNGRVMQAGKFEELLKQNIGSSLCVLARTILVAIGGLSTAETFFSRMLCSIFRAPMSYFDSTPTGRILNRASTDQSVLDLEMAVKLGWCAFSIIQIVGTIFVMSQVAWQRYYTPTERELSRMSGVERAPILHHFAESLAGATTIRAFDQRDRFISSNLVLIDSHSRPWFHVASAMEWLSFRLNLLSHFVFAFSLVLLVTLPEGVINPSIAGLGVTYGLSLNVLQATVIWNICNAENKMISVERILQHSKIPSEAPLVIDDQRPLDNWPNVGSIVFRDLQVRYAEHFPAVLKNITCAFPGGKKIGVVGRTGSGKSTLIQALFRIVEPSHGTIVIDNVDITKIGLHDLRSRLGIIPQDNALFDGTIRLNLDPLAQYTDREIWEALDKCQLGDVIRAKDEKLDATVVENGENWSVGQRQLVCLGRVLLKKSNILVLDEATASVDSATDGVIQKIINQEFKDRTVVTIAHRIHTVIESDLVLVLSDGRIAEFDSPAKLLQREDSFFSKLIKEYSLRSNHFAGSNDLLS

SEQ ID NO: 96627 - protein, 886 aa, Arabidopsis thaliana
  peptide (1)..(886): Ceres Seq. ID no. 12734029
MVMACNYPLTRLQRNYQSDIMNAKDDRMKATSEILKNMKILKLQAWDNQFLNKVKTLRKKEYDCLWKSLRLQDFTTFILWGAPSLISVVTFVTCMLMGVKLTAGAVLSALATFQMLQSPIFGLPDLLSALVQSKVSADRIASYLQQSETQKDAVEYCSNDHTEFSVEIENGAFSWEPESSRPTLDDIELKVKSGMKVAICGAVGSGKSSLPSSILGEIQKLKGTVRVSGKQAYVPQSPWILSGTIRDNILFGSIYESEKYERTVKACALIKDFELFSNGDLTEIGERGINMSGGQKQRIQIARAVYQNADIYLLDDPFSAVDAHTGRELFEDCLMGILKDKTVLYVTHQVEFLPAADLILVMQNGRVMQAGKFEELLKQNIGSSLCVLARTILVAIGGLSTAETFFSRMLCSIFRAPMSYFDSTPTGRILNRASTDQSVLDLEMAVKLGWCAFSIIQIVGTIFVMSQVAWQRYYTPTERELSRMSGVERAPILHHFAESLAGATTIRAFDQRDRFISSNLVLIDSHSRPWFHVASAMEWLSFRLNLLSHFVFAFSLVLLVTLPEGVINPSIAGLGVTYGLSLNVLQATVIWNICNAENKMISVERILQHSKIPSEAPLVIDDQRPLDNWPNVGSIVFRDLQVRYAEHFPAVLKNITCAFPGGKKIGVVGRTGSGKSTLIQALFRIVEPSHGTIVIDNVDITKIGLHDLRSRLGIIPQDNALFDGTIRLNLDPLAQYTDREIWEALDKCQLGDVIRAKDEKLDATVVENGENWSVGQRQLVCLGRVLLKKSNILVLDEATASVDSATDGVIQKIINQEFKDRTVVTIAHRIHTVIESDLVLVLSDGRIAEFDSPAKLLQREDSFFSKLIKEYSLRSNHFAGSNDLLS

SEQ ID NO: 96628 - DNA, 2349 bp, Arabidopsis thaliana
  misc_feature (1)..(2349): Ceres Seq. ID no. 12734071
  misc_feature (1)..(2349): Ortholog of  Ceres SEQ ID NO 12586556 as cited in SEQ ID NO 64667
  misc_feature (1)..(2349): Ortholog of  Ceres SEQ ID NO 13660894 as cited in SEQ ID NO 67475
atgcacagattgaactacagaaaatggcgccttcctttgaaaccgtttggtagttgtattcacagctatgctgatagaacgaagcttcactcgaatctgcttttgggagatttgtctaaatctggtcgggtcgatgaagcccgccaaatgttcgataaaatgcctgagagggatgagtttacatggaacacgatgatcgttgcttactcgaattcaaggcgactttctgatgcagaaaagctttttcgtagcaacccagtgaagaatacaatctcctggaatgctcttatctctgggtattgcaagtctggaagtaaagttgaagcttttaatttgttttgggaaatgcagtctgatggaataaaacctaacgagtacactttgggtagtgttcttaggatgtgtacttcgcttgttttgcttctgagaggtgaacagattcatgggcatacaataaaaaccgggtttgatttggatgttaatgtggtgaatggccttcttgctatgtatgcacaatgcaagcgtatctctgaagctgaatacctctttgagacaatggaaggtgagaaaaataatgttacatggacttcaatgctcactggttactctcaaaatggatttgctttcaaggcaatagagtgttttagggatttgagaagagaaggaaatcaatcgaatcaatatacatttcctagtgttttaactgcttgtgcctcggtttctgcttgcagggtaggagtccaggtacattgctgcatagttaagagtggtttcaagaccaatatctatgttcagagcgcattgattgatatgtatgctaaatgcagagaaatggaatccgcaagagctttgttagaaggtatggaggttgatgatgtggtatcttggaactcgatgattgtagggtgtgttagacaaggtcttattggagaagctctgtctatgtttggaagaatgcatgagcgagatatgaaaatagatgatttcacgatcccatccatcttaaattgttttgctttgtctaggacagaaatgaagatagcttcttctgcacattgtctgattgtgaaaaccgggtatgcgacttacaaacttgtgaataacgcccttgtggatatgtatgctaaaagagggatcatggattcagcgttgaaagtgtttgaagggatgattgagaaagatgtgatatcttggacagctcttgtgacaggaaatacacataacggatcttatgatgaagcactgaagttgttctgtaacatgagagttggaggcattactcctgataagattgttacagcgagtgtattaagcgcctcggcggagttaactcttttggagtttgggcaacaggtacatgggaattatattaaatctggttttccttcatctttgtcagtaaacaattctcttgtgacaatgtacacaaagtgtggaagcttagaagacgcgaatgttatattcaactctatggaaatcagggatttaataacatggacttgtcttattgtgggttacgcaaaaaacgattacattacctttatcgggttactatttgcttgcagtcatgcaggtctcttagaagatgctcaacgctactttgattcgatgagaacagtttatggaatcacaccaggaccggaacactatgcctgtatgattgatctctttggtagatctggtgatttcgtaaaagtagagcaattgctgcatcaaatggaggttgaaccagatgctactgtatggaaagcgattttggctgcaagtaggaagcatgggaatatagaaaacggggaaagagcagcgaaaactcttatggaattggaaccaaacaatgctgttccttatgttcagttatcaaacatgtattctgcagcgggaagacaagacgaagctgcaaatgttcgtagattgatgaaatctcgtaatataagcaaagaacctggttgcagttgggttgaagagaaaggtaaagttcatagctttatgtctgaagatagaagacatccgagaatggttgagatatattccaaggttgatgaaatgatgcttttgatcaaagaggctggttatttcgcggatatgagttttgctctccatgacttagataaggaagggaaggagctaggtttggcttaccatagtgagaaattagctgttgcgtttggtctacttgttgtaccatctggagctccaatccggatcatcaagaaccttcgcgtctgtggggattgccacagtgcaatgaagtatatatcaagagtatatcttcggcatatcatcttaagagattctaactgctttcatcactttagagatggaaagtgttcttgcggagactattggtaa

SEQ ID NO: 96629 - protein, 782 aa, Arabidopsis thaliana
  peptide (1)..(782): Ceres Seq. ID no. 12734072
MHRLNYRKWRLPLKPFGSCIHSYADRTKLHSNLLLGDLSKSGRVDEARQMFDKMPERDEFTWNTMIVAYSNSRRLSDAEKLFRSNPVKNTISWNALISGYCKSGSKVEAFNLFWEMQSDGIKPNEYTLGSVLRMCTSLVLLLRGEQIHGHTIKTGFDLDVNVVNGLLAMYAQCKRISEAEYLFETMEGEKNNVTWTSMLTGYSQNGFAFKAIECFRDLRREGNQSNQYTFPSVLTACASVSACRVGVQVHCCIVKSGFKTNIYVQSALIDMYAKCREMESARALLEGMEVDDVVSWNSMIVGCVRQGLIGEALSMFGRMHERDMKIDDFTIPSILNCFALSRTEMKIASSAHCLIVKTGYATYKLVNNALVDMYAKRGIMDSALKVFEGMIEKDVISWTALVTGNTHNGSYDEALKLFCNMRVGGITPDKIVTASVLSASAELTLLEFGQQVHGNYIKSGFPSSLSVNNSLVTMYTKCGSLEDANVIFNSMEIRDLITWTCLIVGYAKNDYITFIGLLFACSHAGLLEDAQRYFDSMRTVYGITPGPEHYACMIDLFGRSGDFVKVEQLLHQMEVEPDATVWKAILAASRKHGNIENGERAAKTLMELEPNNAVPYVQLSNMYSAAGRQDEAANVRRLMKSRNISKEPGCSWVEEKGKVHSFMSEDRRHPRMVEIYSKVDEMMLLIKEAGYFADMSFALHDLDKEGKELGLAYHSEKLAVAFGLLVVPSGAPIRIIKNLRVCGDCHSAMKYISRVYLRHIILRDSNCFHHFRDGKCSCGDYW

SEQ ID NO: 96630 - protein, 733 aa, Arabidopsis thaliana
  peptide (1)..(733): Ceres Seq. ID no. 12734073
MFDKMPERDEFTWNTMIVAYSNSRRLSDAEKLFRSNPVKNTISWNALISGYCKSGSKVEAFNLFWEMQSDGIKPNEYTLGSVLRMCTSLVLLLRGEQIHGHTIKTGFDLDVNVVNGLLAMYAQCKRISEAEYLFETMEGEKNNVTWTSMLTGYSQNGFAFKAIECFRDLRREGNQSNQYTFPSVLTACASVSACRVGVQVHCCIVKSGFKTNIYVQSALIDMYAKCREMESARALLEGMEVDDVVSWNSMIVGCVRQGLIGEALSMFGRMHERDMKIDDFTIPSILNCFALSRTEMKIASSAHCLIVKTGYATYKLVNNALVDMYAKRGIMDSALKVFEGMIEKDVISWTALVTGNTHNGSYDEALKLFCNMRVGGITPDKIVTASVLSASAELTLLEFGQQVHGNYIKSGFPSSLSVNNSLVTMYTKCGSLEDANVIFNSMEIRDLITWTCLIVGYAKNDYITFIGLLFACSHAGLLEDAQRYFDSMRTVYGITPGPEHYACMIDLFGRSGDFVKVEQLLHQMEVEPDATVWKAILAASRKHGNIENGERAAKTLMELEPNNAVPYVQLSNMYSAAGRQDEAANVRRLMKSRNISKEPGCSWVEEKGKVHSFMSEDRRHPRMVEIYSKVDEMMLLIKEAGYFADMSFALHDLDKEGKELGLAYHSEKLAVAFGLLVVPSGAPIRIIKNLRVCGDCHSAMKYISRVYLRHIILRDSNCFHHFRDGKCSCGDYW

SEQ ID NO: 96631 - protein, 729 aa, Arabidopsis thaliana
  peptide (1)..(729): Ceres Seq. ID no. 12734074
MPERDEFTWNTMIVAYSNSRRLSDAEKLFRSNPVKNTISWNALISGYCKSGSKVEAFNLFWEMQSDGIKPNEYTLGSVLRMCTSLVLLLRGEQIHGHTIKTGFDLDVNVVNGLLAMYAQCKRISEAEYLFETMEGEKNNVTWTSMLTGYSQNGFAFKAIECFRDLRREGNQSNQYTFPSVLTACASVSACRVGVQVHCCIVKSGFKTNIYVQSALIDMYAKCREMESARALLEGMEVDDVVSWNSMIVGCVRQGLIGEALSMFGRMHERDMKIDDFTIPSILNCFALSRTEMKIASSAHCLIVKTGYATYKLVNNALVDMYAKRGIMDSALKVFEGMIEKDVISWTALVTGNTHNGSYDEALKLFCNMRVGGITPDKIVTASVLSASAELTLLEFGQQVHGNYIKSGFPSSLSVNNSLVTMYTKCGSLEDANVIFNSMEIRDLITWTCLIVGYAKNDYITFIGLLFACSHAGLLEDAQRYFDSMRTVYGITPGPEHYACMIDLFGRSGDFVKVEQLLHQMEVEPDATVWKAILAASRKHGNIENGERAAKTLMELEPNNAVPYVQLSNMYSAAGRQDEAANVRRLMKSRNISKEPGCSWVEEKGKVHSFMSEDRRHPRMVEIYSKVDEMMLLIKEAGYFADMSFALHDLDKEGKELGLAYHSEKLAVAFGLLVVPSGAPIRIIKNLRVCGDCHSAMKYISRVYLRHIILRDSNCFHHFRDGKCSCGDYW

SEQ ID NO: 96632 - DNA, 2925 bp, Arabidopsis thaliana
  misc_feature (1)..(2925): Ceres Seq. ID no. 12734189
  misc_feature (1)..(2925): Ortholog of  Ceres SEQ ID NO 13600310 as cited in SEQ ID NO 5086
  misc_feature (1)..(2925): Ortholog of  Ceres SEQ ID NO 14316099 as cited in SEQ ID NO 52473
atggcggctactgcgacggaggatggaggattaagcttcactgtggcttcagtaatggaggatgtgttgcagcaacatggaaatgggcttagagatcatgatttagtgtctcgtcgagctgaagaagctgcatcgaggagatatgaggcggctaattggctgagaaggatggttggagttgttggagctaaggatttgcctgcagagccaacagaagaagggcttaggcttggtttaagaagtggaattatcctttgtaaagtcctcaataaggttcaacctggagctgtctcaaaggttgtggaaagtccttgtgatgccattcttgttgcggatggagctccgttatcagcatttcagtattttgagaatgttaggaactttcttgttgctatacaggaaatggggtttccaacatttgaggcatctgatctcgagcaaggaggaaatgcttctcgagttgtgaattgtgttttggctatcaaatcatatgatgaatggaaacaaagtggtggaattggagtttggaaatttggtggcaacattaagcctcctgcacttgggaagtcatcttttgtcagaaaaaactcagagccattcatgaactctttatcgagaacctcctcgatcaacaatgagaaagctccctctgagaatgattctaacaagctgtccagtcccagttccttgagcacacttgttcgcgctgttctatcagataaaaagcctgaggatgtgcccaaactgattgaatctctgctgagtaaagtagtcgaagagtttgaaaatcgagttacaaatcagtatgagttggagttctgtcatgcgaaggttagagcagctccaagagaatcaacttcgtcacagaacaacagatcatttcttaaacctcttggtgaaagagagagggaagagaagagtttcaaagcaataaagaaagatgatcacaatagtcagattcttgacgaaaagatgaaaactcgccaatttaaacaactgacaatcttcaaccaacaacaagaagatatagaaggactaagacagacgctctacacaacaagggctggtatgcaatttatgcagaagaaatttcaagaagagttctcttctcttggtatgcacgttcatggccttgctcatgctgcttctggctatcaccgagttcttgaagaaaaccgaaaactttataatcaagtgcaggatctcaagggtagcatccgtgtttattgtcgggtgcggccatttttgcctggacaatccagcttttctagtacaattgggaacatggaggatgataccatagggatcaatactgcatctagacatggaaaatcactcaaatccttcactttcaacaaagtctttggcccatctgcaactcaagaagaggtattttctgatatgcagccattgatccgttctgttcttgatggatacaatgtctgcatatttgcatatggtcaaactggatcaggaaaaacattcacaatgagtggaccaagagatctaacggagaagagccagggagttaattacagagcacttggtgatctgtttcttcttgctgaacaaagaaaagacacattccgctacgatattgcagttcagatgattgagatttacaatgagcaaatcaggaatagctctcaaaagggtctaagtgtaccggatgcaagtcttgttccagtctcttcaacatttgatgttattgatctaatgaaaactgggcacaagaatcgagccgttggatcaacagccttgaatgatcgaagcagtcgttctcatagctgcttgactgttcatgttcaaggaagagacttgacttcaggagctgtgcttcgaggatgcatgcatcttgtggatctagcaggcagtgagagggtagacaaatccgaggttactggagacagactaaaagaagcacagcacatcaatagatcgctctctgctttaggagatgtgattgcttcgctagctcacaagaacccacatgttccttacagaaacagcaaactcacacaactccttcaggactctcttggaggacaagcaaagacattgatgtttgtccacattagtcctgaggcagatgcagttggggaaacaataagcactttgaagtttgcagagagagtagctacggttgagcttggggctgcacgagtgaacaatgatacttcagatgttaaggaactcaaagaacagattgctactcttaaagcagcactcgcgagaaaagaagcagagtcacagcagaacaacatcttgaaaactcctggtggctctgagaaacacaaagccaaaactggtgaagtagagattcataacaataacatcatgacaaagaaatctgagagttgtgaagtggaggagattacagtgaactcaccaccttggccaccagtagcaagtccaggacaagcctacagagaggatgaccgaagtttcgggtccagcgagtgggttgacaaggtgatggtgaataacagacaagacgagatgagaagagtggagagtctttggggaggagccacaacagagaatggtattggtattctgccggaagatttttacaggagagatttggcttcagacacttcaagaatattctctgaacattcttacaacatcttcatgggaaacaacaacagcacagacgatctagatgcagccacaagtgactcatctgagccagatttgctctggcaattcaaccagtccaccaagatacctacaagaagcaatattgagtcaaaactcaagaaacccgtctcaaaacctataagaagtcctcaatccaggaacaactcaaacaacacggtttcacgtcctttggcttcacagaaggtagggaatggtcctcgtggcatgaaacagttcggtcctgctgatatgaagcggaaagctactaacgccagacattga

SEQ ID NO: 96633 - protein, 974 aa, Arabidopsis thaliana
  peptide (1)..(974): Ceres Seq. ID no. 12734190
MAATATEDGGLSFTVASVMEDVLQQHGNGLRDHDLVSRRAEEAASRRYEAANWLRRMVGVVGAKDLPAEPTEEGLRLGLRSGIILCKVLNKVQPGAVSKVVESPCDAILVADGAPLSAFQYFENVRNFLVAIQEMGFPTFEASDLEQGGNASRVVNCVLAIKSYDEWKQSGGIGVWKFGGNIKPPALGKSSFVRKNSEPFMNSLSRTSSINNEKAPSENDSNKLSSPSSLSTLVRAVLSDKKPEDVPKLIESLLSKVVEEFENRVTNQYELEFCHAKVRAAPRESTSSQNNRSFLKPLGEREREEKSFKAIKKDDHNSQILDEKMKTRQFKQLTIFNQQQEDIEGLRQTLYTTRAGMQFMQKKFQEEFSSLGMHVHGLAHAASGYHRVLEENRKLYNQVQDLKGSIRVYCRVRPFLPGQSSFSSTIGNMEDDTIGINTASRHGKSLKSFTFNKVFGPSATQEEVFSDMQPLIRSVLDGYNVCIFAYGQTGSGKTFTMSGPRDLTEKSQGVNYRALGDLFLLAEQRKDTFRYDIAVQMIEIYNEQIRNSSQKGLSVPDASLVPVSSTFDVIDLMKTGHKNRAVGSTALNDRSSRSHSCLTVHVQGRDLTSGAVLRGCMHLVDLAGSERVDKSEVTGDRLKEAQHINRSLSALGDVIASLAHKNPHVPYRNSKLTQLLQDSLGGQAKTLMFVHISPEADAVGETISTLKFAERVATVELGAARVNNDTSDVKELKEQIATLKAALARKEAESQQNNILKTPGGSEKHKAKTGEVEIHNNNIMTKKSESCEVEEITVNSPPWPPVASPGQAYREDDRSFGSSEWVDKVMVNNRQDEMRRVESLWGGATTENGIGILPEDFYRRDLASDTSRIFSEHSYNIFMGNNNSTDDLDAATSDSSEPDLLWQFNQSTKIPTRSNIESKLKKPVSKPIRSPQSRNNSNNTVSRPLASQKVGNGPRGMKQFGPADMKRKATNARH

SEQ ID NO: 96634 - protein, 956 aa, Arabidopsis thaliana
  peptide (1)..(956): Ceres Seq. ID no. 12734191
MEDVLQQHGNGLRDHDLVSRRAEEAASRRYEAANWLRRMVGVVGAKDLPAEPTEEGLRLGLRSGIILCKVLNKVQPGAVSKVVESPCDAILVADGAPLSAFQYFENVRNFLVAIQEMGFPTFEASDLEQGGNASRVVNCVLAIKSYDEWKQSGGIGVWKFGGNIKPPALGKSSFVRKNSEPFMNSLSRTSSINNEKAPSENDSNKLSSPSSLSTLVRAVLSDKKPEDVPKLIESLLSKVVEEFENRVTNQYELEFCHAKVRAAPRESTSSQNNRSFLKPLGEREREEKSFKAIKKDDHNSQILDEKMKTRQFKQLTIFNQQQEDIEGLRQTLYTTRAGMQFMQKKFQEEFSSLGMHVHGLAHAASGYHRVLEENRKLYNQVQDLKGSIRVYCRVRPFLPGQSSFSSTIGNMEDDTIGINTASRHGKSLKSFTFNKVFGPSATQEEVFSDMQPLIRSVLDGYNVCIFAYGQTGSGKTFTMSGPRDLTEKSQGVNYRALGDLFLLAEQRKDTFRYDIAVQMIEIYNEQIRNSSQKGLSVPDASLVPVSSTFDVIDLMKTGHKNRAVGSTALNDRSSRSHSCLTVHVQGRDLTSGAVLRGCMHLVDLAGSERVDKSEVTGDRLKEAQHINRSLSALGDVIASLAHKNPHVPYRNSKLTQLLQDSLGGQAKTLMFVHISPEADAVGETISTLKFAERVATVELGAARVNNDTSDVKELKEQIATLKAALARKEAESQQNNILKTPGGSEKHKAKTGEVEIHNNNIMTKKSESCEVEEITVNSPPWPPVASPGQAYREDDRSFGSSEWVDKVMVNNRQDEMRRVESLWGGATTENGIGILPEDFYRRDLASDTSRIFSEHSYNIFMGNNNSTDDLDAATSDSSEPDLLWQFNQSTKIPTRSNIESKLKKPVSKPIRSPQSRNNSNNTVSRPLASQKVGNGPRGMKQFGPADMKRKATNARH

SEQ ID NO: 96635 - protein, 918 aa, Arabidopsis thaliana
  peptide (1)..(918): Ceres Seq. ID no. 12734192
MVGVVGAKDLPAEPTEEGLRLGLRSGIILCKVLNKVQPGAVSKVVESPCDAILVADGAPLSAFQYFENVRNFLVAIQEMGFPTFEASDLEQGGNASRVVNCVLAIKSYDEWKQSGGIGVWKFGGNIKPPALGKSSFVRKNSEPFMNSLSRTSSINNEKAPSENDSNKLSSPSSLSTLVRAVLSDKKPEDVPKLIESLLSKVVEEFENRVTNQYELEFCHAKVRAAPRESTSSQNNRSFLKPLGEREREEKSFKAIKKDDHNSQILDEKMKTRQFKQLTIFNQQQEDIEGLRQTLYTTRAGMQFMQKKFQEEFSSLGMHVHGLAHAASGYHRVLEENRKLYNQVQDLKGSIRVYCRVRPFLPGQSSFSSTIGNMEDDTIGINTASRHGKSLKSFTFNKVFGPSATQEEVFSDMQPLIRSVLDGYNVCIFAYGQTGSGKTFTMSGPRDLTEKSQGVNYRALGDLFLLAEQRKDTFRYDIAVQMIEIYNEQIRNSSQKGLSVPDASLVPVSSTFDVIDLMKTGHKNRAVGSTALNDRSSRSHSCLTVHVQGRDLTSGAVLRGCMHLVDLAGSERVDKSEVTGDRLKEAQHINRSLSALGDVIASLAHKNPHVPYRNSKLTQLLQDSLGGQAKTLMFVHISPEADAVGETISTLKFAERVATVELGAARVNNDTSDVKELKEQIATLKAALARKEAESQQNNILKTPGGSEKHKAKTGEVEIHNNNIMTKKSESCEVEEITVNSPPWPPVASPGQAYREDDRSFGSSEWVDKVMVNNRQDEMRRVESLWGGATTENGIGILPEDFYRRDLASDTSRIFSEHSYNIFMGNNNSTDDLDAATSDSSEPDLLWQFNQSTKIPTRSNIESKLKKPVSKPIRSPQSRNNSNNTVSRPLASQKVGNGPRGMKQFGPADMKRKATNARH

SEQ ID NO: 96636 - DNA, 1877 bp, Arabidopsis thaliana
  misc_feature (1)..(1877): Ceres Seq. ID no. 12734214
  misc_feature (1)..(1877): Ortholog of  Ceres SEQ ID NO 15173087 as cited in SEQ ID NO 67193
cgatcattccacttccttcttcctctctctcaacattttcccctgaaaataaggaaactaaagattcttcctctctctttctacactcttctgacaatactaaaacactttatcagatcagatcccacataaactttctaggagaagaagaatggcaagggaacaattacaagtgttgaatgcacttgacgtggccaagacgcaatggtaccatttcacggcgatcataatcgccggaatgggattcttcactgatgcttacgatctcttttgcatctctctcgtaacgaagctcctcggtcgtatttattaccacgtggaaggcgcacaaaagcctgggactctccctcccaacgtcgcagccgccgtcaatggcgttgccttctgtgggactctcgccggtcagctctttttcgggtggcttggtgataagctcgggaggaagaaagtttacggtatgacgttgatggtcatggtcctttgttcaatagcctctggtctctctttcggacatgagccaaaagctgtgatggccacgctctgtttttttcggttttggcttggatttggcatcggtggtgactaccctttatccgcaaccatcatgtctgaatatgcgaacaagaagactcgcggagcctttgtctctgcggtttttgctatgcaagggttcggaatcatggctggtggtattttcgctattataatttcctctgcttttgaagctaagtttccatccccggcctatgcggatgatgccttgggatccacgattcctcaagctgatttggtatggcggataatcctgatggctggtgctatccctgcggctatgacgtattactcaaggtcgaagatgcctgagaccgcaaggtacacggctttggttgctaaggacgcaaagcaggcagcttcggacatgtctaaggttctgcaagtggagatagagccagaacaacagaaattggaagagatctcaaaggagaagtccaaggcctttggattgttctcaaaggaattcatgagtcgccatgggcttcatttgctaggcactacatcgacatggttccttctcgacattgctttctacagtcaaaaccttttccaaaaggatattttcagcgcgatcggatggattcctcccgcgcaaagcatgaacgcaattcaagaggttttcaagattgcccgtgcgcaaacgctaatcgccttgtgtagcacggtacctggttactggttcacagttgcgttcatcgacgtcattggaagatttgcgattcagatgatgggtttctttttcatgacggtctttatgtttgctctggctattccttacaaccactggactcacaaggagaaccgaatcggatttgttatcatgtactcgttaacattctttttcgccaactttggacccaatgctacaaccttcgttgtgccggccgaaatcttcccagccaggttcagatcaacctgccacggtatctctgcagcatcaggaaaattaggagcaatggttggtgcgttcgggttcttgtacttggctcagaacccagacaaggacaagaccgacgcaggataccctccagggattggggtcaggaactcgcttattgtgttgggtgtagttaacttcttaggtatcctcttcactttcttggtacctgaatctaaaggtaagtcactcgaggaaatgtccggtgaaaatgaagacaatgagaatagcaacaatgatagtagaacggtcccaatagtttaggtgatataatacgccttttgtaataattttcgttttttctttctccttgtctctagcaactcaagttgttctttgtgtaatccattgatacctaattaatgctagagaaatcaaaattttc

SEQ ID NO: 96637 - protein, 534 aa, Arabidopsis thaliana
  peptide (1)..(534): Ceres Seq. ID no. 12734215
MAREQLQVLNALDVAKTQWYHFTAIIIAGMGFFTDAYDLFCISLVTKLLGRIYYHVEGAQKPGTLPPNVAAAVNGVAFCGTLAGQLFFGWLGDKLGRKKVYGMTLMVMVLCSIASGLSFGHEPKAVMATLCFFRFWLGFGIGGDYPLSATIMSEYANKKTRGAFVSAVFAMQGFGIMAGGIFAIIISSAFEAKFPSPAYADDALGSTIPQADLVWRIILMAGAIPAAMTYYSRSKMPETARYTALVAKDAKQAASDMSKVLQVEIEPEQQKLEEISKEKSKAFGLFSKEFMSRHGLHLLGTTSTWFLLDIAFYSQNLFQKDIFSAIGWIPPAQSMNAIQEVFKIARAQTLIALCSTVPGYWFTVAFIDVIGRFAIQMMGFFFMTVFMFALAIPYNHWTHKENRIGFVIMYSLTFFFANFGPNATTFVVPAEIFPARFRSTCHGISAASGKLGAMVGAFGFLYLAQNPDKDKTDAGYPPGIGVRNSLIVLGVVNFLGILFTFLVPESKGKSLEEMSGENEDNENSNNDSRTVPIV

SEQ ID NO: 96638 - protein, 505 aa, Arabidopsis thaliana
  peptide (1)..(505): Ceres Seq. ID no. 12734216
MGFFTDAYDLFCISLVTKLLGRIYYHVEGAQKPGTLPPNVAAAVNGVAFCGTLAGQLFFGWLGDKLGRKKVYGMTLMVMVLCSIASGLSFGHEPKAVMATLCFFRFWLGFGIGGDYPLSATIMSEYANKKTRGAFVSAVFAMQGFGIMAGGIFAIIISSAFEAKFPSPAYADDALGSTIPQADLVWRIILMAGAIPAAMTYYSRSKMPETARYTALVAKDAKQAASDMSKVLQVEIEPEQQKLEEISKEKSKAFGLFSKEFMSRHGLHLLGTTSTWFLLDIAFYSQNLFQKDIFSAIGWIPPAQSMNAIQEVFKIARAQTLIALCSTVPGYWFTVAFIDVIGRFAIQMMGFFFMTVFMFALAIPYNHWTHKENRIGFVIMYSLTFFFANFGPNATTFVVPAEIFPARFRSTCHGISAASGKLGAMVGAFGFLYLAQNPDKDKTDAGYPPGIGVRNSLIVLGVVNFLGILFTFLVPESKGKSLEEMSGENEDNENSNNDSRTVPIV

SEQ ID NO: 96639 - protein, 432 aa, Arabidopsis thaliana
  peptide (1)..(432): Ceres Seq. ID no. 12734217
MTLMVMVLCSIASGLSFGHEPKAVMATLCFFRFWLGFGIGGDYPLSATIMSEYANKKTRGAFVSAVFAMQGFGIMAGGIFAIIISSAFEAKFPSPAYADDALGSTIPQADLVWRIILMAGAIPAAMTYYSRSKMPETARYTALVAKDAKQAASDMSKVLQVEIEPEQQKLEEISKEKSKAFGLFSKEFMSRHGLHLLGTTSTWFLLDIAFYSQNLFQKDIFSAIGWIPPAQSMNAIQEVFKIARAQTLIALCSTVPGYWFTVAFIDVIGRFAIQMMGFFFMTVFMFALAIPYNHWTHKENRIGFVIMYSLTFFFANFGPNATTFVVPAEIFPARFRSTCHGISAASGKLGAMVGAFGFLYLAQNPDKDKTDAGYPPGIGVRNSLIVLGVVNFLGILFTFLVPESKGKSLEEMSGENEDNENSNNDSRTVPIV

SEQ ID NO: 96640 - DNA, 1440 bp, Arabidopsis thaliana
  misc_feature (1)..(1440): Ceres Seq. ID no. 12734225
  misc_feature (1)..(1440): Ortholog of  Ceres SEQ ID NO 14311313 as cited in SEQ ID NO 53503
  misc_feature (1)..(1440): Ortholog of  Ceres SEQ ID NO 14311625 as cited in SEQ ID NO 55184
  misc_feature (1)..(1440): Ortholog of  Ceres SEQ ID NO 14310588 as cited in SEQ ID NO 58770
atggcgaaagaggagcaagaaacagcggcaatagagccacttagcccggtttcacagttgtttgtttcgccgagtctctactgcttcattattttcactttagggttccaaactagatgcaacccatccaccattgttgaaggtgtcaagaacacatggatcaagctccctcgcttctctagcaaagtggagataaagaaaaatggaaaagcgtcttgggttcctgttagtgttcgagtagaagatcatgttgttgttccagatcttgattattccaacattgaaaatcctgatcaatttatagaagactatacttcgaaattagctaatactccgatggacatgtcccgacctttatgggaacttcatttacttaatataaagacatcaaatgcagaatctttagctataggaaaatttcatcattctcttggcgatgggatgtctcttatatctcttctattagctagttcacggaaaacatcagatcctgacgctttgcctactaccgcggctacaagaaagcatgccagttccaataaaaagagttggtggttggttggaagattttggtttatgataagaatcattttcactactgttgttgaattgtttaagtatttgcttacactatgttttatgcgggacactaaaactcccctaatgggtaaaacgggtgatgcaatacgatctagaaaggttatacatcggatagtaagctttgatgatgtcaagttggtgaagaacaacatggatatgaaagtgaatgatgttcttcttggaatgacacaggcaggtctctcaagatatttgagcaggaaatatgtagatgaagatatggtggtcgagaagaaaaaaaacttggagaaaatccgtcttcgtggtacagtattcgtaaatttaagagcagacacaaaactcgaggatttggcgaatatgatggcaaaaggttcaaagtgtagatggggaaacttcgtaggtgttattatatttcctttatgggtgagatccgaagatgatccgttggaatacgttcgacgagccaaatctactatggatatcaaaaaactgtccatagaatcacttatttgctatggactcatcaaacttaccagaaaaatactcgggggaaaggtagtagaaactcttgttaggagactatttgatcatacgacattgacattttctaatgtgatgggtccagacgaagatataagtttttttgaccatccaatgtcttacgtagcagcaagcgcattaggtggaccacaagctcttattatccattacgtaacctatgtaaacaagattgtcatcaatctagcagtagacacatcagtgattcgagaccctcatctactatgtgatgatttggtagaatcgctcgatatcatcaaacttgctgccatggagaaaggagttcataaaatggaggtttga

SEQ ID NO: 96641 - protein, 479 aa, Arabidopsis thaliana
  peptide (1)..(479): Ceres Seq. ID no. 12734226
MAKEEQETAAIEPLSPVSQLFVSPSLYCFIIFTLGFQTRCNPSTIVEGVKNTWIKLPRFSSKVEIKKNGKASWVPVSVRVEDHVVVPDLDYSNIENPDQFIEDYTSKLANTPMDMSRPLWELHLLNIKTSNAESLAIGKFHHSLGDGMSLISLLLASSRKTSDPDALPTTAATRKHASSNKKSWWLVGRFWFMIRIIFTTVVELFKYLLTLCFMRDTKTPLMGKTGDAIRSRKVIHRIVSFDDVKLVKNNMDMKVNDVLLGMTQAGLSRYLSRKYVDEDMVVEKKKNLEKIRLRGTVFVNLRADTKLEDLANMMAKGSKCRWGNFVGVIIFPLWVRSEDDPLEYVRRAKSTMDIKKLSIESLICYGLIKLTRKILGGKVVETLVRRLFDHTTLTFSNVMGPDEDISFFDHPMSYVAASALGGPQALIIHYVTYVNKIVINLAVDTSVIRDPHLLCDDLVESLDIIKLAAMEKGVHKMEV

SEQ ID NO: 96642 - protein, 367 aa, Arabidopsis thaliana
  peptide (1)..(367): Ceres Seq. ID no. 12734227
MDMSRPLWELHLLNIKTSNAESLAIGKFHHSLGDGMSLISLLLASSRKTSDPDALPTTAATRKHASSNKKSWWLVGRFWFMIRIIFTTVVELFKYLLTLCFMRDTKTPLMGKTGDAIRSRKVIHRIVSFDDVKLVKNNMDMKVNDVLLGMTQAGLSRYLSRKYVDEDMVVEKKKNLEKIRLRGTVFVNLRADTKLEDLANMMAKGSKCRWGNFVGVIIFPLWVRSEDDPLEYVRRAKSTMDIKKLSIESLICYGLIKLTRKILGGKVVETLVRRLFDHTTLTFSNVMGPDEDISFFDHPMSYVAASALGGPQALIIHYVTYVNKIVINLAVDTSVIRDPHLLCDDLVESLDIIKLAAMEKGVHKMEV

SEQ ID NO: 96643 - protein, 365 aa, Arabidopsis thaliana
  peptide (1)..(365): Ceres Seq. ID no. 12734228
MSRPLWELHLLNIKTSNAESLAIGKFHHSLGDGMSLISLLLASSRKTSDPDALPTTAATRKHASSNKKSWWLVGRFWFMIRIIFTTVVELFKYLLTLCFMRDTKTPLMGKTGDAIRSRKVIHRIVSFDDVKLVKNNMDMKVNDVLLGMTQAGLSRYLSRKYVDEDMVVEKKKNLEKIRLRGTVFVNLRADTKLEDLANMMAKGSKCRWGNFVGVIIFPLWVRSEDDPLEYVRRAKSTMDIKKLSIESLICYGLIKLTRKILGGKVVETLVRRLFDHTTLTFSNVMGPDEDISFFDHPMSYVAASALGGPQALIIHYVTYVNKIVINLAVDTSVIRDPHLLCDDLVESLDIIKLAAMEKGVHKMEV

SEQ ID NO: 96644 - DNA, 894 bp, Arabidopsis thaliana
  misc_feature (1)..(894): Ceres Seq. ID no. 12734229
  misc_feature (1)..(894): Ortholog of  Ceres SEQ ID NO 14303722 as cited in SEQ ID NO 63143
acatcactatcttcaaaaacaagtaacagaaaaatggcgcctccaaccgcagcaccagagccaaacactgtgccagagacttcaccgaccggccaccgtatgttttcccggatccgcctcgctacgccgaccgatgtccctttcattcacaagctaatccaccagatggcggtttttgagcgcctcacgcatctctttgtcgccaccgagtctggtcttgcctccacgctcttcaactcccgtccgttccaagccgtcaccgtcttcctcttggaaatctccccttccccatttcccaccactcatgacgcttcgtcccctgatttcaccccctttcttgagacgcataaggttgatctccctatcgaggatccggacagagaaaagttcttgccggataagctcaacgacgtggtggtggctggattcgttctgttcttcccgaactacccaagttttctagcgaaacagggtttctacatcgaggatatcttcatgagagaaccttacagacgaaaaggcttcggaaaactgctactgaccgctgtggcaaagcaagcagtgaagttgggtgtcggaagagtggagtggattgtgatcgattggaatgtgaatgctatcaacttctatgagcagatgggtgcgcaggtttttaaggaatggagactttgtaggctcactggcgatgcacttcaagctattgacaagctaaacatctagcagcatgatgatttgcatgagacccatcgagcgatcggtcctttaaagtttgtttctcacttgtttttaatttgttgaataaaacatctcaagtttaagataaagatgtatttgtgattatggttacaaaagtatcttctgtgttttcggatttgaataaaatggagatttctt

SEQ ID NO: 96645 - protein, 239 aa, Arabidopsis thaliana
  peptide (1)..(239): Ceres Seq. ID no. 12734230
TSLSSKTSNRKMAPPTAAPEPNTVPETSPTGHRMFSRIRLATPTDVPFIHKLIHQMAVFERLTHLFVATESGLASTLFNSRPFQAVTVFLLEISPSPFPTTHDASSPDFTPFLETHKVDLPIEDPDREKFLPDKLNDVVVAGFVLFFPNYPSFLAKQGFYIEDIFMREPYRRKGFGKLLLTAVAKQAVKLGVGRVEWIVIDWNVNAINFYEQMGAQVFKEWRLCRLTGDALQAIDKLNI

SEQ ID NO: 96646 - protein, 228 aa, Arabidopsis thaliana
  peptide (1)..(228): Ceres Seq. ID no. 12734231
MAPPTAAPEPNTVPETSPTGHRMFSRIRLATPTDVPFIHKLIHQMAVFERLTHLFVATESGLASTLFNSRPFQAVTVFLLEISPSPFPTTHDASSPDFTPFLETHKVDLPIEDPDREKFLPDKLNDVVVAGFVLFFPNYPSFLAKQGFYIEDIFMREPYRRKGFGKLLLTAVAKQAVKLGVGRVEWIVIDWNVNAINFYEQMGAQVFKEWRLCRLTGDALQAIDKLNI

SEQ ID NO: 96647 - protein, 206 aa, Arabidopsis thaliana
  peptide (1)..(206): Ceres Seq. ID no. 12734232
MFSRIRLATPTDVPFIHKLIHQMAVFERLTHLFVATESGLASTLFNSRPFQAVTVFLLEISPSPFPTTHDASSPDFTPFLETHKVDLPIEDPDREKFLPDKLNDVVVAGFVLFFPNYPSFLAKQGFYIEDIFMREPYRRKGFGKLLLTAVAKQAVKLGVGRVEWIVIDWNVNAINFYEQMGAQVFKEWRLCRLTGDALQAIDKLNI

SEQ ID NO: 96648 - DNA, 2011 bp, Arabidopsis thaliana
  misc_feature (1)..(2011): Ceres Seq. ID no. 12734244
  misc_feature (1)..(2011): Ortholog of  Ceres SEQ ID NO 14311103 as cited in SEQ ID NO 52897
actctcatctccctctctctatatcctcctcctatcagaagagctctctcttctctccgcaccgattctgatccgaagattttcagcttagaatttttttacatttctccataatcctgttcttgagacagaacaagagactgtttgactttacagatttcataaagtgaaaaaatgaatcacgtaccgtctgatcaaagcttttacattgagagcgaggacgaagacgataggaaagattacgtagaagaagatggtggaagccattctgattcctctgatgatgtttatgatgaaaaccaagctcacattaagcctagctcatacaccactgcttggcctcagagttacaggcagtcgattgatctttatagtagtgtaccgtctcccggtatcggttttcttgggaataattcgatgacgagattcggaagctctttcttgtcttctggtttgataagaagacatactccggaatcattacctactgttacaaaacctttgttagaagaacaagcagatgaacaagcactaccaaaacatagacttagctctcagggcttactctctcctattccttcgaggaggggttcgatgcgaaaggatgagaaatcatccatggtgtctcatgagattccaatgtctcgtaatagctcatacggacaagctgtactaaatggattgaacgttctttgtggggttggaatactttcaacgccttatgctgccaaagaaggaggatggttaggacttatgatactatttgtatatggtcttctttctttctacaccggaatcctccttcgttattgcctcgacagtgagtctgacctcgaaacctatcccgacattggccaagctgcgtttggtactactggacgtatctttgtctcgattgtactctacttggagctatacgcatgctgtgtggaatatataatattggagagtgataatttgtcttcattatatccaaatgctgccttaagtattggaggatttcagttagatgcacgccatctatttgcattgctaaccactctcgccgttctccccaccgtttggctcagagatctcagcgtacttagttatatctctgctggaggggtgattgcatcagtgctagtggttttatgtttgttttggattggtttggtagatgaagttggaattcacagcaaaggaactacactaaacttgtcaacattacctgtggctataggactctatggttactgctactcaggacatgctgttttccccaatatttatacttctatggccaaaccatctcaataccctgctgttctcttgacatgttttggtatttgtactctgatgtatgccggcgtcgctgttatgggttatacgatgtttggagaatcaacacagtcacagtttactctcaacttgcctcaagatttaattgcaactaagattgctgtgtggactacggtggtcaatccatttaccaaatatgctttgaccatatctccagtagcaatgagtcttgaggagttgataccatcaaggcatatcaggtcacattggtacgccatcggcattagaaccctattggtcttctctactctgcttgttggtctcgctattcccttctttggtcttgtcatgtcattgattggatcgttgttgactatgctcgtcactctaatacttcctccagcttgtttcttgagcattgtaaggagaaaagttaccccgacccagatgatgttgtgtgtcttaatcatcatagtaggagcaatatcttcagtcattggctcatattcagctctttccaagatcgttgagaaattgaccaactgaaaatatttctctgtttttttcttacaaactcttatacccattttgtctttcaggggaatactttttttctttttttctttttctgttttgtcttttgttttcgtatagcaaaattcattcttgcattcaaagcttttgtaatatctgagtgatgatctgcatcttaaaactggtttgaaagttg

SEQ ID NO: 96649 - protein, 550 aa, Arabidopsis thaliana
  peptide (1)..(550): Ceres Seq. ID no. 12734245
MNHVPSDQSFYIESEDEDDRKDYVEEDGGSHSDSSDDVYDENQAHIKPSSYTTAWPQSYRQSIDLYSSVPSPGIGFLGNNSMTRFGSSFLSSGLIRRHTPESLPTVTKPLLEEQADEQALPKHRLSSQGLLSPIPSRRGSMRKDEKSSMVSHEIPMSRNSSYGQAVLNGLNVLCGVGILSTPYAAKEGGWLGLMILFVYGLLSFYTGILLRYCLDSESDLETYPDIGQAAFGTTGRIFVSIVLYLELYACCVEYIILESDNLSSLYPNAALSIGGFQLDARHLFALLTTLAVLPTVWLRDLSVLSYISAGGVIASVLVVLCLFWIGLVDEVGIHSKGTTLNLSTLPVAIGLYGYCYSGHAVFPNIYTSMAKPSQYPAVLLTCFGICTLMYAGVAVMGYTMFGESTQSQFTLNLPQDLIATKIAVWTTVVNPFTKYALTISPVAMSLEELIPSRHIRSHWYAIGIRTLLVFSTLLVGLAIPFFGLVMSLIGSLLTMLVTLILPPACFLSIVRRKVTPTQMMLCVLIIIVGAISSVIGSYSALSKIVEKLTN

SEQ ID NO: 96650 - protein, 469 aa, Arabidopsis thaliana
  peptide (1)..(469): Ceres Seq. ID no. 12734246
MTRFGSSFLSSGLIRRHTPESLPTVTKPLLEEQADEQALPKHRLSSQGLLSPIPSRRGSMRKDEKSSMVSHEIPMSRNSSYGQAVLNGLNVLCGVGILSTPYAAKEGGWLGLMILFVYGLLSFYTGILLRYCLDSESDLETYPDIGQAAFGTTGRIFVSIVLYLELYACCVEYIILESDNLSSLYPNAALSIGGFQLDARHLFALLTTLAVLPTVWLRDLSVLSYISAGGVIASVLVVLCLFWIGLVDEVGIHSKGTTLNLSTLPVAIGLYGYCYSGHAVFPNIYTSMAKPSQYPAVLLTCFGICTLMYAGVAVMGYTMFGESTQSQFTLNLPQDLIATKIAVWTTVVNPFTKYALTISPVAMSLEELIPSRHIRSHWYAIGIRTLLVFSTLLVGLAIPFFGLVMSLIGSLLTMLVTLILPPACFLSIVRRKVTPTQMMLCVLIIIVGAISSVIGSYSALSKIVEKLTN

SEQ ID NO: 96651 - protein, 410 aa, Arabidopsis thaliana
  peptide (1)..(410): Ceres Seq. ID no. 12734247
MRKDEKSSMVSHEIPMSRNSSYGQAVLNGLNVLCGVGILSTPYAAKEGGWLGLMILFVYGLLSFYTGILLRYCLDSESDLETYPDIGQAAFGTTGRIFVSIVLYLELYACCVEYIILESDNLSSLYPNAALSIGGFQLDARHLFALLTTLAVLPTVWLRDLSVLSYISAGGVIASVLVVLCLFWIGLVDEVGIHSKGTTLNLSTLPVAIGLYGYCYSGHAVFPNIYTSMAKPSQYPAVLLTCFGICTLMYAGVAVMGYTMFGESTQSQFTLNLPQDLIATKIAVWTTVVNPFTKYALTISPVAMSLEELIPSRHIRSHWYAIGIRTLLVFSTLLVGLAIPFFGLVMSLIGSLLTMLVTLILPPACFLSIVRRKVTPTQMMLCVLIIIVGAISSVIGSYSALSKIVEKLTN

SEQ ID NO: 96652 - DNA, 1747 bp, Arabidopsis thaliana
  misc_feature (1)..(1747): Ceres Seq. ID no. 12734248
  misc_feature (1)..(1747): Ortholog of  Ceres SEQ ID NO 14307682 as cited in SEQ ID NO 54529
ttgagcagtgaaattaatggcaataaaagagcgatcactagaggaaacaccaacatgggctgttgctgtagtttgcttcgttctccttttcatttccatcatgatcgaatacttcttgcactttattggtcactggtttaagaagaagcacaagaaagctttatctgaagctcttgaaaaggttaaagcagaactgatgcttctgggattcatatcgcttctattggttgtattgcaaacaccagtctccgagatttgcattccaagaaatattgctgcgacttggcatccttgtagcaaccatcaagaaatcgccaaatatggtaaagattatatcgacgatggccgcaaaattcttgaagattttgactccaacgacttttacagtcctcgccgaaatttagccaccaagggttatgacaaatgcgcagaaaaggggaaagtagcattagtatctgcctatggtatccaccagctgcatatattcatctttgtgctcgctgtttttcatgttctctactgcattataacctatgctttaggaaagaccaagatgaagaaatggaagtcatgggagagagagaccaaaacaattgagtaccaatatgccaatgatccagagaggttcagatttgcaagagatacatcgttcggacgtagacatctgaatatatggagcaagtctacctttaccctctggattacatgtttcttcagacagttctttggatcagtgacaaaagtagattatcttacactaagacatggctttattatggcacatttgccagcaggaagtgccgctcgtttcgatttccaaaaatacattgaaagatctttggaacaagatttcacggtggttgtcggtataagcccactgatatggtgcattgctgtcttattcatattgaccaatacacatggatgggactcatatctttggctgcccttccttcccttgattgtgatattgatagtaggagcaaaacttcaaatgataatatcgaaattaggattaaggattcaagaaaaaggagatgtggttaaaggagctcctgtggttgaaccgggcgatgatctcttttggtttggtcgtcctcgtttcattctcttcctcattcacttggttcttttcacgaatgcatttcaactggctttcttcgtttggagcacttacgaattcacactcaaaaactgcttccaccacaaaacagaagacattgcaattaggatcaccatgggggtattaatacaagttctatgcagctacatcactctacctctctatgctcttgttactcagatgggaacatcaatgaggccgacaatattcaacgacagggtagccaatgcattgaagaaatggcaccacacagccaagaaacagacgaaacatggacactcaggatctaacacacctcactcgagccgtcctactacgccaacacatggcatgtcaccggtgcatctcctccacaactacaataaccgcagcctcgaccaacaaaccagcttcactgcttctccttctcctcctagattctctgattatagcggccaaggccatggccatcagcatttcttcgaccctgaatctcagaatcactcttaccaacgtgagatcacagattctgaattcagcaatagtcatcatccccaagttgacatggcaagtcctgttagagaagagaaggagattgttgagcatgtcaaggttgatttgtctgagtttacgttcaagaagtga

SEQ ID NO: 96653 - protein, 576 aa, Arabidopsis thaliana
  peptide (1)..(576): Ceres Seq. ID no. 12734249
MAIKERSLEETPTWAVAVVCFVLLFISIMIEYFLHFIGHWFKKKHKKALSEALEKVKAELMLLGFISLLLVVLQTPVSEICIPRNIAATWHPCSNHQEIAKYGKDYIDDGRKILEDFDSNDFYSPRRNLATKGYDKCAEKGKVALVSAYGIHQLHIFIFVLAVFHVLYCIITYALGKTKMKKWKSWERETKTIEYQYANDPERFRFARDTSFGRRHLNIWSKSTFTLWITCFFRQFFGSVTKVDYLTLRHGFIMAHLPAGSAARFDFQKYIERSLEQDFTVVVGISPLIWCIAVLFILTNTHGWDSYLWLPFLPLIVILIVGAKLQMIISKLGLRIQEKGDVVKGAPVVEPGDDLFWFGRPRFILFLIHLVLFTNAFQLAFFVWSTYEFTLKNCFHHKTEDIAIRITMGVLIQVLCSYITLPLYALVTQMGTSMRPTIFNDRVANALKKWHHTAKKQTKHGHSGSNTPHSSRPTTPTHGMSPVHLLHNYNNRSLDQQTSFTASPSPPRFSDYSGQGHGHQHFFDPESQNHSYQREITDSEFSNSHHPQVDMASPVREEKEIVEHVKVDLSEFTFKK

SEQ ID NO: 96654 - protein, 548 aa, Arabidopsis thaliana
  peptide (1)..(548): Ceres Seq. ID no. 12734250
MIEYFLHFIGHWFKKKHKKALSEALEKVKAELMLLGFISLLLVVLQTPVSEICIPRNIAATWHPCSNHQEIAKYGKDYIDDGRKILEDFDSNDFYSPRRNLATKGYDKCAEKGKVALVSAYGIHQLHIFIFVLAVFHVLYCIITYALGKTKMKKWKSWERETKTIEYQYANDPERFRFARDTSFGRRHLNIWSKSTFTLWITCFFRQFFGSVTKVDYLTLRHGFIMAHLPAGSAARFDFQKYIERSLEQDFTVVVGISPLIWCIAVLFILTNTHGWDSYLWLPFLPLIVILIVGAKLQMIISKLGLRIQEKGDVVKGAPVVEPGDDLFWFGRPRFILFLIHLVLFTNAFQLAFFVWSTYEFTLKNCFHHKTEDIAIRITMGVLIQVLCSYITLPLYALVTQMGTSMRPTIFNDRVANALKKWHHTAKKQTKHGHSGSNTPHSSRPTTPTHGMSPVHLLHNYNNRSLDQQTSFTASPSPPRFSDYSGQGHGHQHFFDPESQNHSYQREITDSEFSNSHHPQVDMASPVREEKEIVEHVKVDLSEFTFKK

SEQ ID NO: 96655 - protein, 516 aa, Arabidopsis thaliana
  peptide (1)..(516): Ceres Seq. ID no. 12734251
MLLGFISLLLVVLQTPVSEICIPRNIAATWHPCSNHQEIAKYGKDYIDDGRKILEDFDSNDFYSPRRNLATKGYDKCAEKGKVALVSAYGIHQLHIFIFVLAVFHVLYCIITYALGKTKMKKWKSWERETKTIEYQYANDPERFRFARDTSFGRRHLNIWSKSTFTLWITCFFRQFFGSVTKVDYLTLRHGFIMAHLPAGSAARFDFQKYIERSLEQDFTVVVGISPLIWCIAVLFILTNTHGWDSYLWLPFLPLIVILIVGAKLQMIISKLGLRIQEKGDVVKGAPVVEPGDDLFWFGRPRFILFLIHLVLFTNAFQLAFFVWSTYEFTLKNCFHHKTEDIAIRITMGVLIQVLCSYITLPLYALVTQMGTSMRPTIFNDRVANALKKWHHTAKKQTKHGHSGSNTPHSSRPTTPTHGMSPVHLLHNYNNRSLDQQTSFTASPSPPRFSDYSGQGHGHQHFFDPESQNHSYQREITDSEFSNSHHPQVDMASPVREEKEIVEHVKVDLSEFTFKK

SEQ ID NO: 96656 - DNA, 1966 bp, Arabidopsis thaliana
  misc_feature (1)..(1966): Ceres Seq. ID no. 12734252
  misc_feature (1)..(1966): Ortholog of  Ceres SEQ ID NO 13597411 as cited in SEQ ID NO 64125
atccctctcgacacacacacttctctcctaaaacccaaaaatggtggctgcaagtcccggtggctcaatgaagagcttaaccatccaaatcctaaccggaagatggttcatgttctttggaagtctcttaatcatgtcgacagctggagccacttacatgttcggtatctactcaggcgatatcaaggaaaccttaggctacgaccaaaccactcttaatctcctaagtttcttcaaagatctcggagccaacgttggagtcctcgcgggtctactcaatgaggtaactcctccttggttcatcctcttgatcggagccatccttaacttctttggatacttcatgatttggctcgccgtcacggaacggatctcgaaacctcaagtttggcacatgtgtctctatatctgcgttggagccaactcgcagtcgttcgctaataccggatctctcgtcacgtgcgttaagaacttcccggagtcacgtggggttgtcttggggattctcaaaggctacgttggtcttagtggcgccattattacacagctctaccgtgccttttatggtgaagacacaaaagagctcatcttgatgattggttggttgccggctatagtctcgtttgcgtttttgagaacgataagaataatgaaagtgaaaagacagacaaacgaactaaaggtgttctataacttcctctacatatcgctcgggcttgcgacgtttctcatggtggtcatcatcatcaacaaactctcgggctttacacaaagcgagtttggaggtagcgccgcggtagtgatcgtcttacttcttttgcccattatagtcgtcatcttggaagagaagaagctttggaaggagaaacaagtcgccttaaacgatccagcacccatcaatgtcgtaactgagaaacccaagttagattcatcagagttcaaagatgatgatggtgaagagtcaaaggaggtagtggagaaggtgaaaacaccgtcgtgttggacgactgtgtttaatccaccggagagaggagatgactatacaatcttgcaagcgttgtttagcgtagacatgttgattttgttcttagcaacgatatgtggcgtaggagggactttgacggcgatagacaatttgggtcaaatcggaaactcgttgggttacccgaagagaagcgtaagcacgtttgtgtcactcgtaagcatatggaattactatggtcgtgtggtttcaggtgtggtctctgagatcttcttgatcaaatacaaatttccaaggcctttaatgctcacgatggtcctcctcttgtcctgcgcgggtcacctcctcatcgcctttaatgtccccggtggactttatgtcgcatcggtcatcatagggttttgttttggtgcgcaatggcctcttctatttgctataatatctgagattttcgggcttaagtactactcgacattgtataacttcgggtcagtcgcgagcccgatcgggtcttacttgctaaacgttcgggtcgcagggtatttgtacgacgtggaggcgggtaagcaatataaggcattagggaaaacgagagtagaagggcaagatttgaattgcataggcacgtcttgttttaagttgtcttttataataattgccgctgtaactttgttcggtgtattggtctcgatggttttggtgatccggaccaagaagttttacaagagtgatatctacaaaaagtttagagaaaaagcgttagctgccgagatggagatggcagcgccggctgcagccagatctaccgtggctaaggaagacaaggatgatgttaaaggcaaagtaataggaaaaggagggtaaactatttagtagatgattgttacagatactagataacaaaagatggtcaagtattttgtaaacacttttatatatctccttaatgtgaaacctatcttttattaatagcattttgttttg

SEQ ID NO: 96657 - protein, 601 aa, Arabidopsis thaliana
  peptide (1)..(601): Ceres Seq. ID no. 12734253
MVAASPGGSMKSLTIQILTGRWFMFFGSLLIMSTAGATYMFGIYSGDIKETLGYDQTTLNLLSFFKDLGANVGVLAGLLNEVTPPWFILLIGAILNFFGYFMIWLAVTERISKPQVWHMCLYICVGANSQSFANTGSLVTCVKNFPESRGVVLGILKGYVGLSGAIITQLYRAFYGEDTKELILMIGWLPAIVSFAFLRTIRIMKVKRQTNELKVFYNFLYISLGLATFLMVVIIINKLSGFTQSEFGGSAAVVIVLLLLPIIVVILEEKKLWKEKQVALNDPAPINVVTEKPKLDSSEFKDDDGEESKEVVEKVKTPSCWTTVFNPPERGDDYTILQALFSVDMLILFLATICGVGGTLTAIDNLGQIGNSLGYPKRSVSTFVSLVSIWNYYGRVVSGVVSEIFLIKYKFPRPLMLTMVLLLSCAGHLLIAFNVPGGLYVASVIIGFCFGAQWPLLFAIISEIFGLKYYSTLYNFGSVASPIGSYLLNVRVAGYLYDVEAGKQYKALGKTRVEGQDLNCIGTSCFKLSFIIIAAVTLFGVLVSMVLVIRTKKFYKSDIYKKFREKALAAEMEMAAPAAARSTVAKEDKDDVKGKVIGKGG

SEQ ID NO: 96658 - protein, 592 aa, Arabidopsis thaliana
  peptide (1)..(592): Ceres Seq. ID no. 12734254
MKSLTIQILTGRWFMFFGSLLIMSTAGATYMFGIYSGDIKETLGYDQTTLNLLSFFKDLGANVGVLAGLLNEVTPPWFILLIGAILNFFGYFMIWLAVTERISKPQVWHMCLYICVGANSQSFANTGSLVTCVKNFPESRGVVLGILKGYVGLSGAIITQLYRAFYGEDTKELILMIGWLPAIVSFAFLRTIRIMKVKRQTNELKVFYNFLYISLGLATFLMVVIIINKLSGFTQSEFGGSAAVVIVLLLLPIIVVILEEKKLWKEKQVALNDPAPINVVTEKPKLDSSEFKDDDGEESKEVVEKVKTPSCWTTVFNPPERGDDYTILQALFSVDMLILFLATICGVGGTLTAIDNLGQIGNSLGYPKRSVSTFVSLVSIWNYYGRVVSGVVSEIFLIKYKFPRPLMLTMVLLLSCAGHLLIAFNVPGGLYVASVIIGFCFGAQWPLLFAIISEIFGLKYYSTLYNFGSVASPIGSYLLNVRVAGYLYDVEAGKQYKALGKTRVEGQDLNCIGTSCFKLSFIIIAAVTLFGVLVSMVLVIRTKKFYKSDIYKKFREKALAAEMEMAAPAAARSTVAKEDKDDVKGKVIGKGG

SEQ ID NO: 96659 - protein, 578 aa, Arabidopsis thaliana
  peptide (1)..(578): Ceres Seq. ID no. 12734255
MFFGSLLIMSTAGATYMFGIYSGDIKETLGYDQTTLNLLSFFKDLGANVGVLAGLLNEVTPPWFILLIGAILNFFGYFMIWLAVTERISKPQVWHMCLYICVGANSQSFANTGSLVTCVKNFPESRGVVLGILKGYVGLSGAIITQLYRAFYGEDTKELILMIGWLPAIVSFAFLRTIRIMKVKRQTNELKVFYNFLYISLGLATFLMVVIIINKLSGFTQSEFGGSAAVVIVLLLLPIIVVILEEKKLWKEKQVALNDPAPINVVTEKPKLDSSEFKDDDGEESKEVVEKVKTPSCWTTVFNPPERGDDYTILQALFSVDMLILFLATICGVGGTLTAIDNLGQIGNSLGYPKRSVSTFVSLVSIWNYYGRVVSGVVSEIFLIKYKFPRPLMLTMVLLLSCAGHLLIAFNVPGGLYVASVIIGFCFGAQWPLLFAIISEIFGLKYYSTLYNFGSVASPIGSYLLNVRVAGYLYDVEAGKQYKALGKTRVEGQDLNCIGTSCFKLSFIIIAAVTLFGVLVSMVLVIRTKKFYKSDIYKKFREKALAAEMEMAAPAAARSTVAKEDKDDVKGKVIGKGG

SEQ ID NO: 96660 - DNA, 2016 bp, Arabidopsis thaliana
  misc_feature (1)..(2016): Ceres Seq. ID no. 12734256
  misc_feature (1)..(2016): Ortholog of  Ceres SEQ ID NO 15176057 as cited in SEQ ID NO 56363
  misc_feature (1)..(2016): Ortholog of  Ceres SEQ ID NO 14316269 as cited in SEQ ID NO 60082
acgcgtgagatataaaagaagatcctttgcagtttctctgttcttgctccttcttcttcatctccctttattgatactgtctgagtaataataaaaattcactctttttgtcttctcaagacagatttcaaaatagaaatcattctccttttttctttttgaaaatttcgagtgatttaaggagggaaaataaagacagaaacaagaacaaaagcatcgtttgcgaataagacttctcgtactctgttttcttttctcgtgttcttatgacagatttataaaaaagattaggtttttgtcttgtcttggcgataatgcctagagagtgttttaaagatttgatttaaatactcttttatgttaactacgatgcaaagagtacacaacaaaccgattgattctatcggaggttttaagcatttggtaaaacagagtaacggcggtgacggtggagtgacggcgacggatatgcaagaaccgagcatcgagactgataagcttagctacgagattttctctattctcgaaagcaagtttcttttcgggtatgatgatgacctgaagcttatggaatcaagaagcagagacccgagtccagagcaagaaacggcatcaccggcgatggtggaagctttaaacggcgttgttccgggtacagttaagaaccagagaggtaaagtttgtgttttgagtatcgatagtggtggaatgagagggattatacctggaaaagctttggcttatctggaacatgctctgaaatcgaaatcgggtgacccgaatgctcgaatcgctgattacttcgacgtagcttccggttccggtatcggtgggattttcacggcgatgctttttgcgtcgagcgatggtaaccgtccgatcttcaaagcggaagacacgtggcggtttttagctatgaaaggtaaaagcttttacaacaaatcaccaccggggatactaaacagggttatgaaaaccgggtcgggtggttcgggtgggtcaggttcgaagcttgagaaagcgatgaaggagtctttcgaagagcttacgcttaaggatacgcttaaaccggttttgattccttgttacgacctcacgagctctgcaccgttcttgttctcacgtgctgatgcgttggaaacggacggttatgattttaagctgtgggaagtttgtagagctacttgggctgagccaggagtgtttgagccggtggagatgagatcagttgatggtaagacacggtgtgtagctgttgatggtggtttagcaatgagtaatccaacggctgcagcgattactcatgtgttgcataataagcaagagtttccttttgttagaggtgttgaggatttgcttgtgttgtcacttggtacgggacagttggttgatgttaagtatgattgtgataaggttatgaagtggaaggctaagcattgggctcgacctgcggttcggatttctgctgatggagcagctgatactgtggatcaggctgtttccatggcgtttggtcagtgtaggaggagtaactacgtccgtattcaggcgaatggatcaagctttggtccgtgcaaaccaaacatagacacagatgcgagtccaagcaatgtgaatatgcttgtgggagtagcagaggagatgctgaagcagaagaatgcagagtctgttctgtttggtggtaagaaaatcaatgaagaaagcaattatgagaagctggattggttagccggtgaactagtgctagaacaccagaggaggagttgtagaatcgctcccactgtagcgttcaagcaatccggcgacagaagagtcgatcaacagaccattttcaaggatattgattgtatgttttgaatatttttaaattgtatagatttgtgtttaagtccagaagaaagcaacattatattcgaattaggctttttattaaatcttaaagatatgtgtaatttttgttttactgaattgttattttctattgactctaaaagagcttcgtcaacaaaattttgg

SEQ ID NO: 96661 - protein, 499 aa, Arabidopsis thaliana
  peptide (1)..(499): Ceres Seq. ID no. 12734257
MLTTMQRVHNKPIDSIGGFKHLVKQSNGGDGGVTATDMQEPSIETDKLSYEIFSILESKFLFGYDDDLKLMESRSRDPSPEQETASPAMVEALNGVVPGTVKNQRGKVCVLSIDSGGMRGIIPGKALAYLEHALKSKSGDPNARIADYFDVASGSGIGGIFTAMLFASSDGNRPIFKAEDTWRFLAMKGKSFYNKSPPGILNRVMKTGSGGSGGSGSKLEKAMKESFEELTLKDTLKPVLIPCYDLTSSAPFLFSRADALETDGYDFKLWEVCRATWAEPGVFEPVEMRSVDGKTRCVAVDGGLAMSNPTAAAITHVLHNKQEFPFVRGVEDLLVLSLGTGQLVDVKYDCDKVMKWKAKHWARPAVRISADGAADTVDQAVSMAFGQCRRSNYVRIQANGSSFGPCKPNIDTDASPSNVNMLVGVAEEMLKQKNAESVLFGGKKINEESNYEKLDWLAGELVLEHQRRSCRIAPTVAFKQSGDRRVDQQTIFKDIDCMF

SEQ ID NO: 96662 - protein, 495 aa, Arabidopsis thaliana
  peptide (1)..(495): Ceres Seq. ID no. 12734258
MQRVHNKPIDSIGGFKHLVKQSNGGDGGVTATDMQEPSIETDKLSYEIFSILESKFLFGYDDDLKLMESRSRDPSPEQETASPAMVEALNGVVPGTVKNQRGKVCVLSIDSGGMRGIIPGKALAYLEHALKSKSGDPNARIADYFDVASGSGIGGIFTAMLFASSDGNRPIFKAEDTWRFLAMKGKSFYNKSPPGILNRVMKTGSGGSGGSGSKLEKAMKESFEELTLKDTLKPVLIPCYDLTSSAPFLFSRADALETDGYDFKLWEVCRATWAEPGVFEPVEMRSVDGKTRCVAVDGGLAMSNPTAAAITHVLHNKQEFPFVRGVEDLLVLSLGTGQLVDVKYDCDKVMKWKAKHWARPAVRISADGAADTVDQAVSMAFGQCRRSNYVRIQANGSSFGPCKPNIDTDASPSNVNMLVGVAEEMLKQKNAESVLFGGKKINEESNYEKLDWLAGELVLEHQRRSCRIAPTVAFKQSGDRRVDQQTIFKDIDCMF

SEQ ID NO: 96663 - protein, 462 aa, Arabidopsis thaliana
  peptide (1)..(462): Ceres Seq. ID no. 12734259
MQEPSIETDKLSYEIFSILESKFLFGYDDDLKLMESRSRDPSPEQETASPAMVEALNGVVPGTVKNQRGKVCVLSIDSGGMRGIIPGKALAYLEHALKSKSGDPNARIADYFDVASGSGIGGIFTAMLFASSDGNRPIFKAEDTWRFLAMKGKSFYNKSPPGILNRVMKTGSGGSGGSGSKLEKAMKESFEELTLKDTLKPVLIPCYDLTSSAPFLFSRADALETDGYDFKLWEVCRATWAEPGVFEPVEMRSVDGKTRCVAVDGGLAMSNPTAAAITHVLHNKQEFPFVRGVEDLLVLSLGTGQLVDVKYDCDKVMKWKAKHWARPAVRISADGAADTVDQAVSMAFGQCRRSNYVRIQANGSSFGPCKPNIDTDASPSNVNMLVGVAEEMLKQKNAESVLFGGKKINEESNYEKLDWLAGELVLEHQRRSCRIAPTVAFKQSGDRRVDQQTIFKDIDCMF

SEQ ID NO: 96664 - DNA, 2604 bp, Arabidopsis thaliana
  misc_feature (1)..(2604): Ceres Seq. ID no. 12734260
  misc_feature (1)..(2604): Ortholog of  Ceres SEQ ID NO 13657677 as cited in SEQ ID NO 66119
atgactactttcatggtttccaaacgatttcgtccacctatttttctccatcgttttataaatccaaaacccatttcttcacagactcgatttctccatccaccggataatcaaagtcgagacatttccgattccactactgaaaccatctcaacactagaatttcctcataaaacctctgtaccaaatcattcacctttaacttcaacctctgagactgagaatcatgtggacgacgctcgtgtaatcgaagtgcttctaggtcgtagaaacgacccagtctcagctcttcagtactgcaattgggtcaagcctttacatcgtctctgtgaaggtggagatgtcttctgggtacttattcatatccttctaagctctattcacactcacgatcgtgccagcaatttgctcgtaatgttcgtttcgaacaatccaacgctaattccaaacgtaatggttaacaatttggttgattcgtctaaacggtttggttttgaacttaccccacgagctttcaattacttgttgaatgcttatattcgaaacaagcgaatggattatgctgtagattgctttggtttgatggtggatcgaaaggttgttccttttgtgccatatgtgaacaatgttctaagttctttagttagaagtaatttgatagatgaagctaaggagatttataataagatggttttaattggtgttgctggtgataatgtaactacacagttgttgatgcgagctagtttgagagagaggaagcctgaagaggctgtgaaaattttcaggagagttatgagtagaggagcagaaccagatggtttgttgtttagtcttgctgttcaagctgcttgtaagacgccagatttggttatggctttggatttgttgagggaaatgagggggaagttaggtgtcccggcctcgcaggaaacgtatactagtgtgattgtggcttttgtgaaggaaggtaatatggaggaggcagtgagggttatggatgagatggttggttttgggataccgatgagtgtaattgctgcaacgagtttggttaatggatattgcaaggggaatgagttaggtaaggctttggatttgtttaatagaatggaggaggaagggctggctccggacaaagttatgttttcggttatggtcgaatggttttgtaagaatatggagatggagaaagctattgagttttatatgaggatgaaatctgtaaggattgctccttcatctgttcttgtccatacaatgatccaagggtgtttgaaagctgagtcaccagaagcggcgctagaaatctttaacgacagttttgaaagctggattgcgcatggttttatgtgtaacaagatttttttattgttttgcaagcaaggtaaagtcgatgctgcaacaagctttttgaagatgatggagcaaaaagggattgagccgaatgtagttttttacaataacatgatgcttgctcattgcagaatgaaaaacatggacttggctcgttcaatattttctgaaatgctggaaaagggtctagagccgaataacttcacttattccatcttgatcgatggatttttcaagaataaggatgaacagaatgcttgggatgtcatcaatcagatgaatgcttccaatttcgaagctaatgaagtcatatataatacgatcatcaatggtttgtgtaaagttggtcagacgtctaaagccaaagagatgttgcaaaatttgatcaaagaaaagcgctattccatgagttgcacgagttacaatagcatcatagatggattcgtcaaagtaggtgatactgattccgctgtcgaaacttacagagagatgagtgaaaacggtaaatctccaaatgttgtaaccttcaccagcttgatcaatggattctgcaaaagtaaccgaatggatctagctcttgaaatgacacacgaaatgaaaagcatggagttgaaacttgatcttccagcctacggtgcactaatagacgggttctgtaaaaagaatgacatgaaaaccgcatatactttgttctctgaactgccggaactaggattgatgccaaatgtgtctgtctacaatagtttgatttcaggattccgtaatctgggaaagatggatgcagcgattgacttgtacaagaaaatggtgaatgatggaataagttgtgatctgtttacatatacaacgatgatcgacgggttgttaaaagatggaaatataaatcttgcctctgatttgtactcggagttgcttgatttaggtattgtccctgatgaaatcttgcacatggtacttgtcaacggtcttagtaagaagggacagtttttgaaagctagcaagatgttagaggagatgaagaagaaagatgtgactccaaatgtgcttctatacagtactgttattgcaggacatcatagagaaggaaatctcaatgaggcttttagacttcatgatgagatgcttgagaaaggtattgtacatgatgatactgtattcaatttactcgtgagtggaagagttgagaaacctcctgctgcatccaagattagtagcttggcttctcctgagatgagatcgagctactaa

SEQ ID NO: 96665 - protein, 867 aa, Arabidopsis thaliana
  peptide (1)..(867): Ceres Seq. ID no. 12734261
MTTFMVSKRFRPPIFLHRFINPKPISSQTRFLHPPDNQSRDISDSTTETISTLEFPHKTSVPNHSPLTSTSETENHVDDARVIEVLLGRRNDPVSALQYCNWVKPLHRLCEGGDVFWVLIHILLSSIHTHDRASNLLVMFVSNNPTLIPNVMVNNLVDSSKRFGFELTPRAFNYLLNAYIRNKRMDYAVDCFGLMVDRKVVPFVPYVNNVLSSLVRSNLIDEAKEIYNKMVLIGVAGDNVTTQLLMRASLRERKPEEAVKIFRRVMSRGAEPDGLLFSLAVQAACKTPDLVMALDLLREMRGKLGVPASQETYTSVIVAFVKEGNMEEAVRVMDEMVGFGIPMSVIAATSLVNGYCKGNELGKALDLFNRMEEEGLAPDKVMFSVMVEWFCKNMEMEKAIEFYMRMKSVRIAPSSVLVHTMIQGCLKAESPEAALEIFNDSFESWIAHGFMCNKIFLLFCKQGKVDAATSFLKMMEQKGIEPNVVFYNNMMLAHCRMKNMDLARSIFSEMLEKGLEPNNFTYSILIDGFFKNKDEQNAWDVINQMNASNFEANEVIYNTIINGLCKVGQTSKAKEMLQNLIKEKRYSMSCTSYNSIIDGFVKVGDTDSAVETYREMSENGKSPNVVTFTSLINGFCKSNRMDLALEMTHEMKSMELKLDLPAYGALIDGFCKKNDMKTAYTLFSELPELGLMPNVSVYNSLISGFRNLGKMDAAIDLYKKMVNDGISCDLFTYTTMIDGLLKDGNINLASDLYSELLDLGIVPDEILHMVLVNGLSKKGQFLKASKMLEEMKKKDVTPNVLLYSTVIAGHHREGNLNEAFRLHDEMLEKGIVHDDTVFNLLVSGRVEKPPAASKISSLASPEMRSSY

SEQ ID NO: 96666 - protein, 863 aa, Arabidopsis thaliana
  peptide (1)..(863): Ceres Seq. ID no. 12734262
MVSKRFRPPIFLHRFINPKPISSQTRFLHPPDNQSRDISDSTTETISTLEFPHKTSVPNHSPLTSTSETENHVDDARVIEVLLGRRNDPVSALQYCNWVKPLHRLCEGGDVFWVLIHILLSSIHTHDRASNLLVMFVSNNPTLIPNVMVNNLVDSSKRFGFELTPRAFNYLLNAYIRNKRMDYAVDCFGLMVDRKVVPFVPYVNNVLSSLVRSNLIDEAKEIYNKMVLIGVAGDNVTTQLLMRASLRERKPEEAVKIFRRVMSRGAEPDGLLFSLAVQAACKTPDLVMALDLLREMRGKLGVPASQETYTSVIVAFVKEGNMEEAVRVMDEMVGFGIPMSVIAATSLVNGYCKGNELGKALDLFNRMEEEGLAPDKVMFSVMVEWFCKNMEMEKAIEFYMRMKSVRIAPSSVLVHTMIQGCLKAESPEAALEIFNDSFESWIAHGFMCNKIFLLFCKQGKVDAATSFLKMMEQKGIEPNVVFYNNMMLAHCRMKNMDLARSIFSEMLEKGLEPNNFTYSILIDGFFKNKDEQNAWDVINQMNASNFEANEVIYNTIINGLCKVGQTSKAKEMLQNLIKEKRYSMSCTSYNSIIDGFVKVGDTDSAVETYREMSENGKSPNVVTFTSLINGFCKSNRMDLALEMTHEMKSMELKLDLPAYGALIDGFCKKNDMKTAYTLFSELPELGLMPNVSVYNSLISGFRNLGKMDAAIDLYKKMVNDGISCDLFTYTTMIDGLLKDGNINLASDLYSELLDLGIVPDEILHMVLVNGLSKKGQFLKASKMLEEMKKKDVTPNVLLYSTVIAGHHREGNLNEAFRLHDEMLEKGIVHDDTVFNLLVSGRVEKPPAASKISSLASPEMRSSY

SEQ ID NO: 96667 - protein, 729 aa, Arabidopsis thaliana
  peptide (1)..(729): Ceres Seq. ID no. 12734263
MFVSNNPTLIPNVMVNNLVDSSKRFGFELTPRAFNYLLNAYIRNKRMDYAVDCFGLMVDRKVVPFVPYVNNVLSSLVRSNLIDEAKEIYNKMVLIGVAGDNVTTQLLMRASLRERKPEEAVKIFRRVMSRGAEPDGLLFSLAVQAACKTPDLVMALDLLREMRGKLGVPASQETYTSVIVAFVKEGNMEEAVRVMDEMVGFGIPMSVIAATSLVNGYCKGNELGKALDLFNRMEEEGLAPDKVMFSVMVEWFCKNMEMEKAIEFYMRMKSVRIAPSSVLVHTMIQGCLKAESPEAALEIFNDSFESWIAHGFMCNKIFLLFCKQGKVDAATSFLKMMEQKGIEPNVVFYNNMMLAHCRMKNMDLARSIFSEMLEKGLEPNNFTYSILIDGFFKNKDEQNAWDVINQMNASNFEANEVIYNTIINGLCKVGQTSKAKEMLQNLIKEKRYSMSCTSYNSIIDGFVKVGDTDSAVETYREMSENGKSPNVVTFTSLINGFCKSNRMDLALEMTHEMKSMELKLDLPAYGALIDGFCKKNDMKTAYTLFSELPELGLMPNVSVYNSLISGFRNLGKMDAAIDLYKKMVNDGISCDLFTYTTMIDGLLKDGNINLASDLYSELLDLGIVPDEILHMVLVNGLSKKGQFLKASKMLEEMKKKDVTPNVLLYSTVIAGHHREGNLNEAFRLHDEMLEKGIVHDDTVFNLLVSGRVEKPPAASKISSLASPEMRSSY

SEQ ID NO: 96668 - DNA, 1230 bp, Arabidopsis thaliana
  misc_feature (1)..(1230): Ceres Seq. ID no. 12734264
  misc_feature (1)..(1230): Ortholog of  Ceres SEQ ID NO 15180208 as cited in SEQ ID NO 0
aaatcagtgtgtagacaatcgcactgaacaacacgtcccacgttctttttcttccctgttttagatagactcttagagtctctctagagtcaccggaacaatcacaaaagcgacgacatattactcattcctacaaatactcatgttggacctcaacctcggaatcttgtcgacacacaacgaagatgaagattgcaaagtaccaacttccatcttcattcaagaagaagattccattaatccctcaaacgacaacttgtctttgattacatttggaatccttaaacgaaacgtcgaaatccttcctcctccccctcctcctcctcctcctcctcctccttcggaaaatgaactctccggccccggaaatgagtggttggatctttcgtcgatgcaaagaaataaacaagaaacgttggtgatgaagaaaaaaagtcgacgtggcccaagatcaagaagctctcattatcgtggcgttaccttttaccgtcgaaccggccgttgggaatctcatatttgggactgtggaaaacaagtttatttgggtggtttcgacacagcctacacagccgcaagagcgtacgaccgagctgctatcagattccggggactccaagcagatatcaactttatcgtggatgattacaaacaagacattgaaaagatgaagaatttaagcaaagaagagtttgtgcaatctcttagacgagcgagtgcaagcttagcaagaggaggttctaaatacaaaaacacccatatgagaaatgatcacatccatctcttccaaaacagcagcagcaaaatgcaatgagataagaaagatggaaggggatattaagttgggtgcccatagtaaaggaaatgagcacaacgatctcgagctaagtcttgggatatcttcatcgtcaaaagttagaattttggaaccagcagattattacatgggtttgaatcgatcggtgacgagtttgcatgggaagccgttgccgggatatctaccgatcacagaaattaaaccgttaaagacagttgtagcatcatcaggattccctttcattaccatgatcaatccttcttctttgtccttatcttgttttgatccatgaggtgatcactatttacttttaaaattttcccctttttattgataatctattgaatgacggaatgattatgtgacttatatctttttataaaccatattcttgtggaatcaggaattttgtgcca

SEQ ID NO: 96669 - protein, 222 aa, Arabidopsis thaliana
  peptide (1)..(222): Ceres Seq. ID no. 12734265
MLDLNLGILSTHNEDEDCKVPTSIFIQEEDSINPSNDNLSLITFGILKRNVEILPPPPPPPPPPPPSENELSGPGNEWLDLSSMQRNKQETLVMKKKSRRGPRSRSSHYRGVTFYRRTGRWESHIWDCGKQVYLGGFDTAYTAARAYDRAAIRFRGLQADINFIVDDYKQDIEKMKNLSKEEFVQSLRRASASLARGGSKYKNTHMRNDHIHLFQNSSSKMQ

SEQ ID NO: 96670 - protein, 139 aa, Arabidopsis thaliana
  peptide (1)..(139): Ceres Seq. ID no. 12734266
MQRNKQETLVMKKKSRRGPRSRSSHYRGVTFYRRTGRWESHIWDCGKQVYLGGFDTAYTAARAYDRAAIRFRGLQADINFIVDDYKQDIEKMKNLSKEEFVQSLRRASASLARGGSKYKNTHMRNDHIHLFQNSSSKMQ

SEQ ID NO: 96671 - protein, 129 aa, Arabidopsis thaliana
  peptide (1)..(129): Ceres Seq. ID no. 12734267
MKKKSRRGPRSRSSHYRGVTFYRRTGRWESHIWDCGKQVYLGGFDTAYTAARAYDRAAIRFRGLQADINFIVDDYKQDIEKMKNLSKEEFVQSLRRASASLARGGSKYKNTHMRNDHIHLFQNSSSKMQ

SEQ ID NO: 96672 - DNA, 1186 bp, Arabidopsis thaliana
  misc_feature (1)..(1186): Ceres Seq. ID no. 12734274
  misc_feature (1)..(1186): Ortholog of  Ceres SEQ ID NO 13594117 as cited in SEQ ID NO 57050
ttagtaagctcgcccatgctcagatccggtctggcttcgttaatcgtcgatgtcaatttgcggcgcacgttacgtccatccccaaccttttcttttccggcgcatcttagccgttgcattatcacttcccgttactcctcccgtacatctctaaggtttccgattcaaatatctcgccaccaacaccgtctatcctacttttcttcatcctcttcgtcggagcaaagcagaccaacttcctcttcccgaaacagtttcagtggtcacggtcagcttgatagtgatgataattcttcaccgcctccgtcgcaatcatcttccaaagttcttacattgcctaccgtattaacacttggtcgtgtcgccgccgtcccgcttctcgtcgcaaccttttacgttgatagttggtggggaacaactgctacaacaagcattttcattgcagcagccattacagactggcttgacggctatcttgcccgcaagatgaggttaggttctgcgtttggtgcctttttggatccagttgctgataagcttatggttgcagctacattgattttactgtgtacaaaacctatccaagttgctgaattaggaccacttccatggttattgaccgtaccttctattgcaatcattggtagggagattactatgtccgcagtaagagaatgggctgcatctcaaaatggaaagcttttagaggcagttgctgtaaataacttgggcaagtggaaaaccgccacgcagatgacagcactaaccatacttcttgcaagccgagatagcaatgttggatggctcgtagcttcaggtgctggcttgctttatgtatcagcaggactatctgtttggtctttagccgtttatatgaggaagatatggaaagtactaatgaagtagtattagtagtagtaattcatctattggttttgttttgctttgacctgcatttggatttatgtattgatggaaagggtctcagtcatcgcctgtacaagagcacaaaacttgaatgctgcaacatttaagtagtttgagaatatgtagatgattttgctttgcacttttccaacacaatatagagtgtgcaacatagtcttggttgagattaaagccttataatgagtgtattgtataaacgatgaatacgtatttccaacatatggaacaaacattcttt

SEQ ID NO: 96673 - protein, 301 aa, Arabidopsis thaliana
  peptide (1)..(301): Ceres Seq. ID no. 12734275
LVSSPMLRSGLASLIVDVNLRRTLRPSPTFSFPAHLSRCIITSRYSSRTSLRFPIQISRHQHRLSYFSSSSSSEQSRPTSSSRNSFSGHGQLDSDDNSSPPPSQSSSKVLTLPTVLTLGRVAAVPLLVATFYVDSWWGTTATTSIFIAAAITDWLDGYLARKMRLGSAFGAFLDPVADKLMVAATLILLCTKPIQVAELGPLPWLLTVPSIAIIGREITMSAVREWAASQNGKLLEAVAVNNLGKWKTATQMTALTILLASRDSNVGWLVASGAGLLYVSAGLSVWSLAVYMRKIWKVLMK

SEQ ID NO: 96674 - protein, 296 aa, Arabidopsis thaliana
  peptide (1)..(296): Ceres Seq. ID no. 12734276
MLRSGLASLIVDVNLRRTLRPSPTFSFPAHLSRCIITSRYSSRTSLRFPIQISRHQHRLSYFSSSSSSEQSRPTSSSRNSFSGHGQLDSDDNSSPPPSQSSSKVLTLPTVLTLGRVAAVPLLVATFYVDSWWGTTATTSIFIAAAITDWLDGYLARKMRLGSAFGAFLDPVADKLMVAATLILLCTKPIQVAELGPLPWLLTVPSIAIIGREITMSAVREWAASQNGKLLEAVAVNNLGKWKTATQMTALTILLASRDSNVGWLVASGAGLLYVSAGLSVWSLAVYMRKIWKVLMK

SEQ ID NO: 96675 - DNA, 2448 bp, Arabidopsis thaliana
  misc_feature (1)..(2448): Ceres Seq. ID no. 12734289
  misc_feature (1)..(2448): Ortholog of  Ceres SEQ ID NO 14310362 as cited in SEQ ID NO 54251
  misc_feature (1)..(2448): Ortholog of  Ceres SEQ ID NO 13584744 as cited in SEQ ID NO 69137
atgataaacctcaagctattcttagagctaaagttatgttttttaataactttactctgttcttcacacatctcctctgtttctgacactttcttcatcaactgtggatctccgacgaatgtaacagtcaacaatagaaccttcgtctccgacaacaatcttgttcaaggattctctgtcggaaccaccgattcgaattcaggtgatgaatcgactctgtttcagaccgcaagagtattctccgatgaatcatcatcaacttacagattcccgatcgaggaacacggttggttcttgattcgtatttactttttaccattagtctctgcttctcaagatttaaccacagctagattctcagtctcggctcagaatttcactctgatcagagaatataaaccctcaacgacttctgttgttagagaatacattttaaacgttaccacagatagtctcttgcttcagtttctccctagaactggttctgtttctttcatcaatgctttggaagttttgagacttccagagactttgatacctgaagatgcaaaactcattggtacacagaaggatcttaagctcagtagtcatgcgatggagactgtttctcgtgtaaacatggggaatcttagtgtgagtcgtgatcaagataagctgtggaggcaatgggattctgattctgcttataaagctcacttcggtacaccggttatgaacctcaaagcggttaacttcagtgctggtggaataactgatgacattgcaccagtttacgtctatggaaccgccacgaggttaaactctgatcttgatcctaatactaacgccaatcttacttggacattcaaagtcgagcctggtttcgattactttgttcggtttcacttttgtaacataatagtggatccttttggattcgagcgtcagatacgttttgacatttttgtgaactcagagaaagttagaaccattgatatgacagaggttttaaatggaacttttggggctccttttttcgttgatgcagtgatgcgtaaagcgaaaagccgtgaagggttcttgaatttatctattggtttagttatggatgtttcttcgtaccctgtttcttttattaacggatttgagatttcgaagctaagcaatgataagcggagtcttgatgcttttgatgccattttacctgatggttcttcgagtaacaagagttcgaatacgagtgtcggattgatagctggtttgtctgcagctttgtgtgttgctttagtgtttggtgtggttgtgtcttggtggtgcattaggaaaagaagaagaagaaatagacaaatgcagactgttcattctagaggagatgatcatcagattaagaagaatgaaacaggtgagagcttaatcttttcgagctcaaagatcggttatcgataccctttggctctaatcaaggaagcaactgatgattttgatgaaagcttagtgattggggttggtgggtttggtaaagtttacaaaggagtcttgagagacaaaaccgaagtagctgtgaaacgtggtgctcctcaatctcgacaaggtctggcggagtttaagacagaggttgaaatgcttactcagttcagacacagacatttggtttctttaatcggatattgcgatgaaaacagtgaaatgatcattgtctatgaatatatggagaagggaacgcttaaggaccatttgtatgacttggatgataagccgaggttgagttggagacagaggcttgagatatgcgttggtgcagctagagggcttcattatctccacacaggttccacaagagcaatcatacaccgcgatgtgaaatctgctaacattctattggatgataattttatggctaaagttgcagattttggattgtctaagacaggtcctgatcttgatcaaacacatgtgagtaccgcggtcaaaggaagctttggatatcttgatccagagtatctaacaagacaacaattaactgagaaatctgatgtttactcttttggtgtggtgatgcttgaagtagtatgtggtagaccagtcattgatccatcactaccgagagagaaagtgaatttgatcgaatgggcgatgaagttggtgaagaaagggaaattggaagatatcatagacccatttcttgtaggaaaagtaaagcttgaagaggtgaaaaagtactgtgaggtaacagagaagtgtttgtcccaaaacggaattgagaggccagcaatgggagatttgttgtggaacctagagttcatgcttcaggtgcaagcaaaagatgagaaagcagcaatggtggatgataagccagaggcgagtgtcgttggctcgaccatgcagtttagtgtgaatggagtgggagatattgcaggggtctcaatgagcaaagttttcgcacaaatggttagagaagaaacgagataa

SEQ ID NO: 96676 - protein, 815 aa, Arabidopsis thaliana
  peptide (1)..(815): Ceres Seq. ID no. 12734290
MINLKLFLELKLCFLITLLCSSHISSVSDTFFINCGSPTNVTVNNRTFVSDNNLVQGFSVGTTDSNSGDESTLFQTARVFSDESSSTYRFPIEEHGWFLIRIYFLPLVSASQDLTTARFSVSAQNFTLIREYKPSTTSVVREYILNVTTDSLLLQFLPRTGSVSFINALEVLRLPETLIPEDAKLIGTQKDLKLSSHAMETVSRVNMGNLSVSRDQDKLWRQWDSDSAYKAHFGTPVMNLKAVNFSAGGITDDIAPVYVYGTATRLNSDLDPNTNANLTWTFKVEPGFDYFVRFHFCNIIVDPFGFERQIRFDIFVNSEKVRTIDMTEVLNGTFGAPFFVDAVMRKAKSREGFLNLSIGLVMDVSSYPVSFINGFEISKLSNDKRSLDAFDAILPDGSSSNKSSNTSVGLIAGLSAALCVALVFGVVVSWWCIRKRRRRNRQMQTVHSRGDDHQIKKNETGESLIFSSSKIGYRYPLALIKEATDDFDESLVIGVGGFGKVYKGVLRDKTEVAVKRGAPQSRQGLAEFKTEVEMLTQFRHRHLVSLIGYCDENSEMIIVYEYMEKGTLKDHLYDLDDKPRLSWRQRLEICVGAARGLHYLHTGSTRAIIHRDVKSANILLDDNFMAKVADFGLSKTGPDLDQTHVSTAVKGSFGYLDPEYLTRQQLTEKSDVYSFGVVMLEVVCGRPVIDPSLPREKVNLIEWAMKLVKKGKLEDIIDPFLVGKVKLEEVKKYCEVTEKCLSQNGIERPAMGDLLWNLEFMLQVQAKDEKAAMVDDKPEASVVGSTMQFSVNGVGDIAGVSMSKVFAQMVREETR

SEQ ID NO: 96677 - protein, 617 aa, Arabidopsis thaliana
  peptide (1)..(617): Ceres Seq. ID no. 12734291
METVSRVNMGNLSVSRDQDKLWRQWDSDSAYKAHFGTPVMNLKAVNFSAGGITDDIAPVYVYGTATRLNSDLDPNTNANLTWTFKVEPGFDYFVRFHFCNIIVDPFGFERQIRFDIFVNSEKVRTIDMTEVLNGTFGAPFFVDAVMRKAKSREGFLNLSIGLVMDVSSYPVSFINGFEISKLSNDKRSLDAFDAILPDGSSSNKSSNTSVGLIAGLSAALCVALVFGVVVSWWCIRKRRRRNRQMQTVHSRGDDHQIKKNETGESLIFSSSKIGYRYPLALIKEATDDFDESLVIGVGGFGKVYKGVLRDKTEVAVKRGAPQSRQGLAEFKTEVEMLTQFRHRHLVSLIGYCDENSEMIIVYEYMEKGTLKDHLYDLDDKPRLSWRQRLEICVGAARGLHYLHTGSTRAIIHRDVKSANILLDDNFMAKVADFGLSKTGPDLDQTHVSTAVKGSFGYLDPEYLTRQQLTEKSDVYSFGVVMLEVVCGRPVIDPSLPREKVNLIEWAMKLVKKGKLEDIIDPFLVGKVKLEEVKKYCEVTEKCLSQNGIERPAMGDLLWNLEFMLQVQAKDEKAAMVDDKPEASVVGSTMQFSVNGVGDIAGVSMSKVFAQMVREETR

SEQ ID NO: 96678 - protein, 609 aa, Arabidopsis thaliana
  peptide (1)..(609): Ceres Seq. ID no. 12734292
MGNLSVSRDQDKLWRQWDSDSAYKAHFGTPVMNLKAVNFSAGGITDDIAPVYVYGTATRLNSDLDPNTNANLTWTFKVEPGFDYFVRFHFCNIIVDPFGFERQIRFDIFVNSEKVRTIDMTEVLNGTFGAPFFVDAVMRKAKSREGFLNLSIGLVMDVSSYPVSFINGFEISKLSNDKRSLDAFDAILPDGSSSNKSSNTSVGLIAGLSAALCVALVFGVVVSWWCIRKRRRRNRQMQTVHSRGDDHQIKKNETGESLIFSSSKIGYRYPLALIKEATDDFDESLVIGVGGFGKVYKGVLRDKTEVAVKRGAPQSRQGLAEFKTEVEMLTQFRHRHLVSLIGYCDENSEMIIVYEYMEKGTLKDHLYDLDDKPRLSWRQRLEICVGAARGLHYLHTGSTRAIIHRDVKSANILLDDNFMAKVADFGLSKTGPDLDQTHVSTAVKGSFGYLDPEYLTRQQLTEKSDVYSFGVVMLEVVCGRPVIDPSLPREKVNLIEWAMKLVKKGKLEDIIDPFLVGKVKLEEVKKYCEVTEKCLSQNGIERPAMGDLLWNLEFMLQVQAKDEKAAMVDDKPEASVVGSTMQFSVNGVGDIAGVSMSKVFAQMVREETR

SEQ ID NO: 96679 - DNA, 987 bp, Arabidopsis thaliana
  misc_feature (1)..(987): Ceres Seq. ID no. 12734293
  misc_feature (1)..(987): Ortholog of  Ceres SEQ ID NO 14310394 as cited in SEQ ID NO 54044
atggcggcttatctagagcgatgcgacagtgtagaagaagattacattgatatggaagtaacttctttcacaaacctcgtacgtaaaactctgagcaacaactaccctcgagagttcgagttccaaatgtctcatctttgtcctcttgagatagacaaaaccacttcccctgcggacgaactcttctacaaaggcaagcttctccctcttcacttacctccacgtctccaaatggtccaaaagattctagaagattacaccttcgacgacgaattctacagcactcctttagccaccggaacggttacaactccagtgacgagcaacactccgttcgagtcctgcaccgtctctccggcagagtcttgccaagtgagtaaagagcttaaccctgaagactacttcctagaatattcagattcattggaggaggacgatgagaagaagaaatcttggaccacgaaactaagattgatgaagcagtcaagtctcggaacgaagattaaagcttcgagagcttatctaagatcgttctttggtaagacaagttgttctgatgagtcatcatgcgcgtcttccgctgcgagagttgcagacgaagattcggttttgaggtattcgcgagtaaagccttttggacagatcaaaacagagagacctaaaaaacagagtaatggttctgtttccggaagccataggagatcattttcagtttctatgaggaggcaagctgccaagagttctaacaacaaatcatcgaatagtttagggtttcgtccgttgcagtttttgaagagaagtacgagttcgagttctgaaattgagaattctatccaaggagctatcttgcattgcaagcaatcacagcagcagaagcagaaacagaaacagtatagtactgttaacgaggtcggattctgttcgttgtcagcgtcaagaatcgcagctagggatgatcaagaatgggctcagatgtttaggggctaa

SEQ ID NO: 96680 - protein, 328 aa, Arabidopsis thaliana
  peptide (1)..(328): Ceres Seq. ID no. 12734294
MAAYLERCDSVEEDYIDMEVTSFTNLVRKTLSNNYPREFEFQMSHLCPLEIDKTTSPADELFYKGKLLPLHLPPRLQMVQKILEDYTFDDEFYSTPLATGTVTTPVTSNTPFESCTVSPAESCQVSKELNPEDYFLEYSDSLEEDDEKKKSWTTKLRLMKQSSLGTKIKASRAYLRSFFGKTSCSDESSCASSAARVADEDSVLRYSRVKPFGQIKTERPKKQSNGSVSGSHRRSFSVSMRRQAAKSSNNKSSNSLGFRPLQFLKRSTSSSSEIENSIQGAILHCKQSQQQKQKQKQYSTVNEVGFCSLSASRIAARDDQEWAQMFRG

SEQ ID NO: 96681 - protein, 311 aa, Arabidopsis thaliana
  peptide (1)..(311): Ceres Seq. ID no. 12734295
MEVTSFTNLVRKTLSNNYPREFEFQMSHLCPLEIDKTTSPADELFYKGKLLPLHLPPRLQMVQKILEDYTFDDEFYSTPLATGTVTTPVTSNTPFESCTVSPAESCQVSKELNPEDYFLEYSDSLEEDDEKKKSWTTKLRLMKQSSLGTKIKASRAYLRSFFGKTSCSDESSCASSAARVADEDSVLRYSRVKPFGQIKTERPKKQSNGSVSGSHRRSFSVSMRRQAAKSSNNKSSNSLGFRPLQFLKRSTSSSSEIENSIQGAILHCKQSQQQKQKQKQYSTVNEVGFCSLSASRIAARDDQEWAQMFRG

SEQ ID NO: 96682 - protein, 286 aa, Arabidopsis thaliana
  peptide (1)..(286): Ceres Seq. ID no. 12734296
MSHLCPLEIDKTTSPADELFYKGKLLPLHLPPRLQMVQKILEDYTFDDEFYSTPLATGTVTTPVTSNTPFESCTVSPAESCQVSKELNPEDYFLEYSDSLEEDDEKKKSWTTKLRLMKQSSLGTKIKASRAYLRSFFGKTSCSDESSCASSAARVADEDSVLRYSRVKPFGQIKTERPKKQSNGSVSGSHRRSFSVSMRRQAAKSSNNKSSNSLGFRPLQFLKRSTSSSSEIENSIQGAILHCKQSQQQKQKQKQYSTVNEVGFCSLSASRIAARDDQEWAQMFRG

SEQ ID NO: 96683 - DNA, 1650 bp, Arabidopsis thaliana
  misc_feature (1)..(1650): Ceres Seq. ID no. 12734319
  misc_feature (1)..(1650): Ortholog of  Ceres SEQ ID NO 13596816 as cited in SEQ ID NO 62287
atggccaaaacgattcggtctttcattctccctttcctcctcatagtcgccggcgtgatctttcaactctcagccgtgacttccgccattggtatcaactatggaacactagggaaccttcaacctccacaacaagtggttgacttcatcaagacaaagaccacttttgacagtgtcaagatctatgatgctaatcccgacatcctccgagccttcgcgggctctgaaatcaacatcaccatcatggtccctaacggtaacattcctgccatggtcaacgttgcaaatgctcgtcaatgggtcgctgccaatgtcttaccgtttcagcagcagatcaagttcaaatacgtttgtgtcggaaacgagattcttgctagtaacgacaataacttgatatcaaatcttgtaccagcgatgcaaagtcttaacgaagctttaaaagcttccaatctcacttatatcaaggtgacaactccacatgcatttaccataagctataaccgtaatacaccaagtgagagcagatttactaacgatcaaaaagatatttttacaaagatcttggaatttcatcgtcaggctaagtccccattcatgatcaacgcctacacttttttcacgatggacacgaacaatgtcaattacgcaatatttggtccatcaaatgcaataacggataccaatacacaacaaacctacaccaacatgtttgacgcagtcatggatgcaacatattctgctatgaaagctcttggctatggcgacgtagatatcgcggtaggggagaccggttggcccacggcttgtgacgcttcatggtgctcacctcaaaacgctgaaaactacaacctcaatatcatcaagcgtgcacaagttatagggacacctctaatgcccaaccgccacatcgatatcttcatatttgcattgttcaatgaagatggaaaacccggtccaacacgtgagagaaattgggggatatttaaaccggatttttcaccgatgtatgatgttggagttctaaaaggcggtggaagcccgcttccgtttccaccgataaacaacaatggaaaatggtgtgtgggaaaaccagaagcgacgttaatgcaactacaagcaaatattgattgggtatgcagccatggtattgattgtacaccaatctcacctggtggcatatgttttgacaacaacaacatgacgactcggtcctcgtttattatgaacgcttattaccaaagcaagggatgcgttgatgttgtctgtgattttagcggtactggcatcgttaccagtaccaacccaagcactagcacatgccctataccgataggggaaggtggcggcggcaatggcgcaaaaagcaaaagtgcaaattggtgtatggcgaaacaagaagcgacagagacacaactacaagctaatattgattgggtgtgtagccaaggtattgattgtaaaccaatatcacctggtggcatatgttttgataacaacaacatgaagactcgatccacgttcataatgaacgcttattacgagagcaaaggatactccaaagacgcttgtgacttccgtggtagtggcatcgtcactactaccaacccaagcactagcacatgcgtcgtaccagcatcagtaacgctctga

SEQ ID NO: 96684 - protein, 549 aa, Arabidopsis thaliana
  peptide (1)..(549): Ceres Seq. ID no. 12734320
MAKTIRSFILPFLLIVAGVIFQLSAVTSAIGINYGTLGNLQPPQQVVDFIKTKTTFDSVKIYDANPDILRAFAGSEINITIMVPNGNIPAMVNVANARQWVAANVLPFQQQIKFKYVCVGNEILASNDNNLISNLVPAMQSLNEALKASNLTYIKVTTPHAFTISYNRNTPSESRFTNDQKDIFTKILEFHRQAKSPFMINAYTFFTMDTNNVNYAIFGPSNAITDTNTQQTYTNMFDAVMDATYSAMKALGYGDVDIAVGETGWPTACDASWCSPQNAENYNLNIIKRAQVIGTPLMPNRHIDIFIFALFNEDGKPGPTRERNWGIFKPDFSPMYDVGVLKGGGSPLPFPPINNNGKWCVGKPEATLMQLQANIDWVCSHGIDCTPISPGGICFDNNNMTTRSSFIMNAYYQSKGCVDVVCDFSGTGIVTSTNPSTSTCPIPIGEGGGGNGAKSKSANWCMAKQEATETQLQANIDWVCSQGIDCKPISPGGICFDNNNMKTRSTFIMNAYYESKGYSKDACDFRGSGIVTTTNPSTSTCVVPASVTL

SEQ ID NO: 96685 - protein, 468 aa, Arabidopsis thaliana
  peptide (1)..(468): Ceres Seq. ID no. 12734321
MVPNGNIPAMVNVANARQWVAANVLPFQQQIKFKYVCVGNEILASNDNNLISNLVPAMQSLNEALKASNLTYIKVTTPHAFTISYNRNTPSESRFTNDQKDIFTKILEFHRQAKSPFMINAYTFFTMDTNNVNYAIFGPSNAITDTNTQQTYTNMFDAVMDATYSAMKALGYGDVDIAVGETGWPTACDASWCSPQNAENYNLNIIKRAQVIGTPLMPNRHIDIFIFALFNEDGKPGPTRERNWGIFKPDFSPMYDVGVLKGGGSPLPFPPINNNGKWCVGKPEATLMQLQANIDWVCSHGIDCTPISPGGICFDNNNMTTRSSFIMNAYYQSKGCVDVVCDFSGTGIVTSTNPSTSTCPIPIGEGGGGNGAKSKSANWCMAKQEATETQLQANIDWVCSQGIDCKPISPGGICFDNNNMKTRSTFIMNAYYESKGYSKDACDFRGSGIVTTTNPSTSTCVVPASVTL

SEQ ID NO: 96686 - protein, 459 aa, Arabidopsis thaliana
  peptide (1)..(459): Ceres Seq. ID no. 12734322
MVNVANARQWVAANVLPFQQQIKFKYVCVGNEILASNDNNLISNLVPAMQSLNEALKASNLTYIKVTTPHAFTISYNRNTPSESRFTNDQKDIFTKILEFHRQAKSPFMINAYTFFTMDTNNVNYAIFGPSNAITDTNTQQTYTNMFDAVMDATYSAMKALGYGDVDIAVGETGWPTACDASWCSPQNAENYNLNIIKRAQVIGTPLMPNRHIDIFIFALFNEDGKPGPTRERNWGIFKPDFSPMYDVGVLKGGGSPLPFPPINNNGKWCVGKPEATLMQLQANIDWVCSHGIDCTPISPGGICFDNNNMTTRSSFIMNAYYQSKGCVDVVCDFSGTGIVTSTNPSTSTCPIPIGEGGGGNGAKSKSANWCMAKQEATETQLQANIDWVCSQGIDCKPISPGGICFDNNNMKTRSTFIMNAYYESKGYSKDACDFRGSGIVTTTNPSTSTCVVPASVTL

SEQ ID NO: 96687 - DNA, 1322 bp, Arabidopsis thaliana
  misc_feature (1)..(1322): Ceres Seq. ID no. 12734327
  misc_feature (1)..(1322): Ortholog of  Ceres SEQ ID NO 14310616 as cited in SEQ ID NO 55699
  misc_feature (1)..(1322): Ortholog of  Ceres SEQ ID NO 13596519 as cited in SEQ ID NO 62572
  misc_feature (1)..(1322): Ortholog of  Ceres SEQ ID NO 12625108 as cited in SEQ ID NO 68102
accatcctcatctctcaatcaacaaacctaactctttctctatacaagagcgcaagctcgaaggcgctcttgttctttcttcattttctccttaacaatcaccctcatagtaactttaaaactctctgtttctagtaattcacacacaaaatggctattaaactagcaattctatttaccacatttgttctttttagcctcgccgacgctagaatccccggtatttactccggcggcgcatggcaaaacgcacacgccactttttacggtggcagcgacgcctccggcacaatgggaggagcttgtggttacggtaacctatacagccaagggtacgggaccaacacggctgctttgagtacggcgctgtttaacaatggtatgagttgtggagcctgctttgagctaaaatgcgccaacgaccctcaatggtgtcactcaggtagtccttcgatcctcatcaccgcaaccaatttctgcccaccaaacttggctcagcctagcgacaacggaggatggtgcaacccaccacgtgaacactttgacctagccatgcctgtcttccttaagatcgctcaatatcgcgccggcattgtccccgtctcataccgcagggtgccatgtagaaagagaggaggcataaggttcacaatcaacggtcaccgttacttcaacttggttctgatcactaacgtggctggagcaggagacatcgtgagggctagtgtgaaaggatcacggactggttggatgagtttgagcagaaactggggacaaaactggcaatctaatgctgttttggttggtcaagcactctctttccgtgtcacaggcagtgaccgtagaacatctacttcctggaacatggttccttctaactggcagtttggtcaaacctttgtcgggaagaatttcagggtttaaggcgagtttcgagaaactaaaatttggaggaaattcgagaaattaaagtggttcgagacaaaagaaaactctccgctaatttcgctattcctcctcctttttttttactaaattttatatatggaaaggagagaaaaatcaggggaaagtatctttgacttttgtgtgtgttttcacttttttaatgtttttttttttgggtttggtgttttaattgtgagtgataaagggggaaatgagggagaaagagaaagtgagtagctgaagtggctgtgagaacattttgtaacagcccgcagctattaaagtattttacatggtttggttgtaagttacaacttgtaacgtttaatctcgtgtaatcttaaaacatggttgtattattgatacttaatact

SEQ ID NO: 96688 - protein, 257 aa, Arabidopsis thaliana; identical to SEQ ID NO: 30296
  peptide (1)..(257): Ceres Seq. ID no. 12734328

SEQ ID NO: 96689 - protein, 210 aa, Arabidopsis thaliana; identical to SEQ ID NO: 30297
  peptide (1)..(210): Ceres Seq. ID no. 12734329

SEQ ID NO: 96690 - protein, 180 aa, Arabidopsis thaliana; identical to SEQ ID NO: 30298
  peptide (1)..(180): Ceres Seq. ID no. 12734330

SEQ ID NO: 96691 - DNA, 744 bp, Arabidopsis thaliana
  misc_feature (1)..(744): Ceres Seq. ID no. 12734339
  misc_feature (1)..(744): Ortholog of  Ceres SEQ ID NO 13594464 as cited in SEQ ID NO 51203
  misc_feature (1)..(744): Ortholog of  Ceres SEQ ID NO 15224956 as cited in SEQ ID NO 59487
atggcgactcgtcttcaatatgataacaataattgcgaaattggtgtcttttccaaactcacaaatgcttattgtctcgtttccgcaacatctgcctccgcaaacttcttcactggttatgagtcgaagttaaaaggtgttatcccaattgttactacttccataggaggatcagggactattggtagtctatgtgtcggaaacaaaaacggacttcttctgtctcacaccattacagaccaagagcttcaacatttgagagatagtttgcctgatgaagttgtagtccaacgaattgaagaacctatatgtgcacttggaaacgctatagcttgcaatgactatgtcgcgcttgtgcatccaaagctcgagaaagacaccgaagagataataagtgatgttcttggtgttgaagtttatcgccaaaccattgcgaataacgaacttgtgggaagttattgttctttatccaataatggtggaatggttcactcaaataccaacgtggaagaaatggtcgagctagcgaatcttgttcaggtgcctttggttgcaggaaccgtgaaccgtggcagccaagttatatccgcgggtttgactgtgaacgattggaccgctttctgtgggtcagatactactgcagtagagctctctgttgttaacaatatcttcaaactagtccaatctcagcctgatttcgtcggtagtgaaatgaggaagtctttgatcgatacctatgtctaa

SEQ ID NO: 96692 - protein, 247 aa, Arabidopsis thaliana
  peptide (1)..(247): Ceres Seq. ID no. 12734340
MATRLQYDNNNCEIGVFSKLTNAYCLVSATSASANFFTGYESKLKGVIPIVTTSIGGSGTIGSLCVGNKNGLLLSHTITDQELQHLRDSLPDEVVVQRIEEPICALGNAIACNDYVALVHPKLEKDTEEIISDVLGVEVYRQTIANNELVGSYCSLSNNGGMVHSNTNVEEMVELANLVQVPLVAGTVNRGSQVISAGLTVNDWTAFCGSDTTAVELSVVNNIFKLVQSQPDFVGSEMRKSLIDTYV

SEQ ID NO: 96693 - DNA, 1446 bp, Arabidopsis thaliana
  misc_feature (1)..(1446): Ceres Seq. ID no. 12734382
  misc_feature (1)..(1446): Ortholog of  Ceres SEQ ID NO 13659033 as cited in SEQ ID NO 66372
  misc_feature (1)..(1446): Ortholog of  Ceres SEQ ID NO 13655724 as cited in SEQ ID NO 68973
  misc_feature (1)..(1446): Ortholog of  Ceres SEQ ID NO 12625899 as cited in SEQ ID NO 69079
atctctctgagccacatgccgacacttacataactgttgaccaagtctctcttccttctttatcaaatcatgcaaccttcaagaacaagagtttcattttttgaaacaggagagaccatgaagcaaagaaagaagagttatctctcaatcttcgtgatcttcttctctcttttcttcttcgggatcttcatgtacaatgacaacctcaaatcctccattgctgacttcacatcttcgaacccattctctagttcatttgtggagttgccgccggatgagtgtgatctgttcaccggtcaatgggttttcgacaacaagacatatccattgtataaagaagaagagtgtgagttcttgacggagcaagtgacttgtttaagaaacggaaggaaagattctttgtttcagaattggagatggcaacctagagactgttctttaccaaaattcaatgcaagagtgttgttagagaagctgaggaacaagagattgatgtttgtcggtgactcgttaaaccggaaccaatgggaatcaatggtttgtttggttcaatcagtgattcctcccggtagaaaaagcttaaaccagaccggttcactcactgttttcaaaatccaggactataacgcgacggtggagttttattgggcgccatttttggtggaatcaaattcagacgatccggaaaagcacagtataatcgaccgtataataatgccagagtccatcgagaagcatggagtcaactggataggcgttgactttcttgtcttcaatagttacatctggtggatgaatactgtctccatcaaagtcctacgtggatcgttcgatgatggggacacagagtatgatgagatcaaacggccaatagcgtacgagagggtgttgaggacattgggagattgggtggaccataacattgatcctctaagtacaactgttttcttcatgagcatgtctcctcttcacatcaagagctcagattgggctaatcctgagggtataaggtgtgctttagagacaacaccgatcttgaacatgtctttcaacgtggcttacgggcagttttccgcggtggggacggattacaggctgtttccggtggcggaaaacgttacacagtctctaaaagttcctattcatttcctcaacattactgcattgtctgagtatcgtaaagatgcacatacttcggtttacacgatcaagcaaggcaagttgctgacgcgggagcagcaaaacgatccagccaattttgctgattgcatacactggtgcttaccaggccttcctgatacatggaatgagtttctctatacacatattatttctcgaagatgagattctttcatcctcttttttggtttaaaaaaattcttgtgatgtatataggacagagattcaagggatttgaagttagccaagtaaggctaaaaatttgtt

SEQ ID NO: 96694 - protein, 424 aa, Arabidopsis thaliana
  peptide (1)..(424): Ceres Seq. ID no. 12734383
MQPSRTRVSFFETGETMKQRKKSYLSIFVIFFSLFFFGIFMYNDNLKSSIADFTSSNPFSSSFVELPPDECDLFTGQWVFDNKTYPLYKEEECEFLTEQVTCLRNGRKDSLFQNWRWQPRDCSLPKFNARVLLEKLRNKRLMFVGDSLNRNQWESMVCLVQSVIPPGRKSLNQTGSLTVFKIQDYNATVEFYWAPFLVESNSDDPEKHSIIDRIIMPESIEKHGVNWIGVDFLVFNSYIWWMNTVSIKVLRGSFDDGDTEYDEIKRPIAYERVLRTLGDWVDHNIDPLSTTVFFMSMSPLHIKSSDWANPEGIRCALETTPILNMSFNVAYGQFSAVGTDYRLFPVAENVTQSLKVPIHFLNITALSEYRKDAHTSVYTIKQGKLLTREQQNDPANFADCIHWCLPGLPDTWNEFLYTHIISRR

SEQ ID NO: 96695 - protein, 408 aa, Arabidopsis thaliana
  peptide (1)..(408): Ceres Seq. ID no. 12734384
MKQRKKSYLSIFVIFFSLFFFGIFMYNDNLKSSIADFTSSNPFSSSFVELPPDECDLFTGQWVFDNKTYPLYKEEECEFLTEQVTCLRNGRKDSLFQNWRWQPRDCSLPKFNARVLLEKLRNKRLMFVGDSLNRNQWESMVCLVQSVIPPGRKSLNQTGSLTVFKIQDYNATVEFYWAPFLVESNSDDPEKHSIIDRIIMPESIEKHGVNWIGVDFLVFNSYIWWMNTVSIKVLRGSFDDGDTEYDEIKRPIAYERVLRTLGDWVDHNIDPLSTTVFFMSMSPLHIKSSDWANPEGIRCALETTPILNMSFNVAYGQFSAVGTDYRLFPVAENVTQSLKVPIHFLNITALSEYRKDAHTSVYTIKQGKLLTREQQNDPANFADCIHWCLPGLPDTWNEFLYTHIISRR

SEQ ID NO: 96696 - protein, 384 aa, Arabidopsis thaliana
  peptide (1)..(384): Ceres Seq. ID no. 12734385
MYNDNLKSSIADFTSSNPFSSSFVELPPDECDLFTGQWVFDNKTYPLYKEEECEFLTEQVTCLRNGRKDSLFQNWRWQPRDCSLPKFNARVLLEKLRNKRLMFVGDSLNRNQWESMVCLVQSVIPPGRKSLNQTGSLTVFKIQDYNATVEFYWAPFLVESNSDDPEKHSIIDRIIMPESIEKHGVNWIGVDFLVFNSYIWWMNTVSIKVLRGSFDDGDTEYDEIKRPIAYERVLRTLGDWVDHNIDPLSTTVFFMSMSPLHIKSSDWANPEGIRCALETTPILNMSFNVAYGQFSAVGTDYRLFPVAENVTQSLKVPIHFLNITALSEYRKDAHTSVYTIKQGKLLTREQQNDPANFADCIHWCLPGLPDTWNEFLYTHIISRR

SEQ ID NO: 96697 - DNA, 1449 bp, Arabidopsis thaliana
  misc_feature (1)..(1449): Ceres Seq. ID no. 12734434
  misc_feature (1)..(1449): Ortholog of  Ceres SEQ ID NO 14311001 as cited in SEQ ID NO 53717
  misc_feature (1)..(1449): Ortholog of  Ceres SEQ ID NO 14314945 as cited in SEQ ID NO 58031
  misc_feature (1)..(1449): Ortholog of  Ceres SEQ ID NO 13595833 as cited in SEQ ID NO 59877
  misc_feature (1)..(1449): Ortholog of  Ceres SEQ ID NO 13654452 as cited in SEQ ID NO 65792
  misc_feature (1)..(1449): Ortholog of  Ceres SEQ ID NO 13573778 as cited in SEQ ID NO 0
tctctctttcgctgtccgattccgacagatagacagagggcgcgaaacagagagaaaataagaagaagaaggacgatccagatatggaggatccttctaacccacaaccaaaccagagcaatctctcgcaatgcccgcctttagccacagctccgacacctgcgccagttcgtggtccgtaccaccggagagcacattcggaggtccaattccgtctccctgaagatctggatctctctgaaccattcggaggattcgatgagcttggatccgaagatgatctcttttgctcatacatggacattgagaaacttggatccggatccggatccgcatccgattcggctggtccttctgctcctaggtctgataacccgttttccgctgagaatggaggtgcggaggctgggaattcgagacctcgacacaggcatagcctctccgttgatggctcttcgactttggagtcaattgaggctaagaaagctatggctcctgataagctcgctgagctttgggtcgtcgaccctaaaagagctaaaaggataattgctaatcgacagtctgctgctcgttcgaaagagaggaaggctcggtatatcttggagctcgagaggaaagttcagaccttgcaaactgaagctactaccctttcagcacagttgtctttgttccagagagacacaactggtttgtcatctgagaatacagagctcaagcttcgtttacaggtcatggaacaacaagctaagttgcgagatgcactgaacgagcaactgaaaaaggaagttgagaggctgaaattcgccacgggagaagtctcacccgcggatgcttataacctcggaatggcacacatgcaatatcagcaacaaccacaacaatccttctttcaacatcatcatcagcaacaaaccgatgctcaaaacctgcaacaaatgactcatcagtttcatctcttccagcctaacaacaaccagaaccaatcttctcgcacaaaccctcccaccgctcatcagcttatgcatcacgctacttctaatgccccggctcaatctcattcctattcagaggcaatgcatgaagaccatcttggccggttacaggggcttgacattagcagctgtggcagaggctcaaactttggtaggtctgacaccgtcagtgaaagcagcagcactatgtgaggctgcctttcccagattcccctttgtcgataaacctattctttcgccctcccttgaaatctttagctaaaaagtaacatcttcgtgacagtcggattcattttttattctgtaaaactggttttttggggggttttggggtttcaactttagagaccacagttgttttaacttgtctgatttctcatttcctgattcatcttgttctcctggggagctactgaattataaacagatcatatttctgtttctttatgttgtc

SEQ ID NO: 96698 - protein, 367 aa, Arabidopsis thaliana
  peptide (1)..(367): Ceres Seq. ID no. 12734435
MEDPSNPQPNQSNLSQCPPLATAPTPAPVRGPYHRRAHSEVQFRLPEDLDLSEPFGGFDELGSEDDLFCSYMDIEKLGSGSGSASDSAGPSAPRSDNPFSAENGGAEAGNSRPRHRHSLSVDGSSTLESIEAKKAMAPDKLAELWVVDPKRAKRIIANRQSAARSKERKARYILELERKVQTLQTEATTLSAQLSLFQRDTTGLSSENTELKLRLQVMEQQAKLRDALNEQLKKEVERLKFATGEVSPADAYNLGMAHMQYQQQPQQSFFQHHHQQQTDAQNLQQMTHQFHLFQPNNNQNQSSRTNPPTAHQLMHHATSNAPAQSHSYSEAMHEDHLGRLQGLDISSCGRGSNFGRSDTVSESSSTM

SEQ ID NO: 96699 - protein, 296 aa, Arabidopsis thaliana
  peptide (1)..(296): Ceres Seq. ID no. 12734436
MDIEKLGSGSGSASDSAGPSAPRSDNPFSAENGGAEAGNSRPRHRHSLSVDGSSTLESIEAKKAMAPDKLAELWVVDPKRAKRIIANRQSAARSKERKARYILELERKVQTLQTEATTLSAQLSLFQRDTTGLSSENTELKLRLQVMEQQAKLRDALNEQLKKEVERLKFATGEVSPADAYNLGMAHMQYQQQPQQSFFQHHHQQQTDAQNLQQMTHQFHLFQPNNNQNQSSRTNPPTAHQLMHHATSNAPAQSHSYSEAMHEDHLGRLQGLDISSCGRGSNFGRSDTVSESSSTM

SEQ ID NO: 96700 - protein, 232 aa, Arabidopsis thaliana
  peptide (1)..(232): Ceres Seq. ID no. 12734437
MAPDKLAELWVVDPKRAKRIIANRQSAARSKERKARYILELERKVQTLQTEATTLSAQLSLFQRDTTGLSSENTELKLRLQVMEQQAKLRDALNEQLKKEVERLKFATGEVSPADAYNLGMAHMQYQQQPQQSFFQHHHQQQTDAQNLQQMTHQFHLFQPNNNQNQSSRTNPPTAHQLMHHATSNAPAQSHSYSEAMHEDHLGRLQGLDISSCGRGSNFGRSDTVSESSSTM

SEQ ID NO: 96701 - DNA, 1996 bp, Arabidopsis thaliana
  misc_feature (1)..(1996): Ceres Seq. ID no. 12734441
  misc_feature (1)..(1996): Ortholog of  Ceres SEQ ID NO 15225015 as cited in SEQ ID NO 0
atgaagagagcccaacaatcggcaagagaaacaaagcaagaagctaaagatgctagcaaagcgaagagcggtttgttcgcttcttgttccttctcttcacttggtttagataccaagctctctgaccagctcaaagaaaggatgggttttgaagctcctactcttgtacaagctcaagcaattcctgttattctctctggtcgagatgtacttgttaatgctccaaccggtactggaaagactatagcgtatttggcacccctcatccatcacttgcagggtcattctcctaaggttgatcgttctcatggaacttttgctttggtgattgtgcctacacgggaactatgccttcaggtgtatgaaaccttggagaagttactgcatcggttccattggatagtccctggctatgttatgggaggagagaaaaaggctaaagaaaaggctagattaaggaaaggaatatccattctaattgcaaccccgggacgccttcttgaccatttgaagaacacagcttcatttgtgcacaaaaatctgcgttgggtcatctttgatgaagctgatagcattctcgaattaggttatgggaaggagatagaacagataattaagcttctaggttcagggcaaaacgagcaaggggaagaagatgatattgttccaaagggtattcagaagcagaacttgttattgtcagcaacattgaatgataaagttaacgatcttgcaaaacttagtttggacgatccggtaatgattggtcttgacaacaccaaattgcaacaaaatctatcaatagagtctcctgcggctcctgactctgatgcggaagatatggtaattcatgttaacaaatccgcaaaccctttatctgaggactatggaataccatcacagctggtacagagatatcttagagtgccatgtggtgcacggcttgtggcacttctttctgttctcaagaacctttttgaaagagaagcttctcaaaaggtggtcgtcttcttttcgacacgtgatgctgtagattttcattactcacttctgagtgaattccagtggccaccgaattctgagacagaagaggaggggactaaagagttgtttctcaagtgcaaaacgttccggttacatggaagtatggagcaggaggatagaagatctgcgtttgggacctttaaaacagagaagcaggctgttctgttgagtacagatgttgctgctagaggcttggatttcccaaaagtaagatgtattatacaatatgactgtcccggggaagctaccgagtatgtgcatagagttggtagaacagctcgtattggtgaaaaaggagaagccttgttatttctacaaccgattgaaatagactatcttaaggagctgaagaaacatggtgcatcacttacagagtaccctcttatgaaagtacttgataaatttcccatacccggcaatatgccccgaatcaaaaaggtcctatctctagaatcccatccatgggtcatatctctgcagagagctcttgaatcccttacttacgccgagccaaagatgaagagcctggccaagaatgcatttgtctcttgggttaggggatatgcagctcacaagggagagctcaagagtattttcgtggtgaagaagcttcacttgggtcatgtcgccaagagttttgctctgagagaacaaccgtctttagttgggaaatcacatcacaaggaaacaatgaagagaaagagagacgaacgtcaaaaagggcaacaaggtaagaagagaaagaagatgagtggtactggcaatagaagtacacaaaaaacttgatcaaatcggtttcgccaccataaaccgtggcgtaagttttgtagttaaggagctggtttgctcatcgaatattttgaaatatcgaaaagaagttgggagctttatcatgtttgttaacaatattacttgtattggccagaaagctaaagattcacaaaatttgctt

SEQ ID NO: 96702 - protein, 609 aa, Arabidopsis thaliana
  peptide (1)..(609): Ceres Seq. ID no. 12734442
MKRAQQSARETKQEAKDASKAKSGLFASCSFSSLGLDTKLSDQLKERMGFEAPTLVQAQAIPVILSGRDVLVNAPTGTGKTIAYLAPLIHHLQGHSPKVDRSHGTFALVIVPTRELCLQVYETLEKLLHRFHWIVPGYVMGGEKKAKEKARLRKGISILIATPGRLLDHLKNTASFVHKNLRWVIFDEADSILELGYGKEIEQIIKLLGSGQNEQGEEDDIVPKGIQKQNLLLSATLNDKVNDLAKLSLDDPVMIGLDNTKLQQNLSIESPAAPDSDAEDMVIHVNKSANPLSEDYGIPSQLVQRYLRVPCGARLVALLSVLKNLFEREASQKVVVFFSTRDAVDFHYSLLSEFQWPPNSETEEEGTKELFLKCKTFRLHGSMEQEDRRSAFGTFKTEKQAVLLSTDVAARGLDFPKVRCIIQYDCPGEATEYVHRVGRTARIGEKGEALLFLQPIEIDYLKELKKHGASLTEYPLMKVLDKFPIPGNMPRIKKVLSLESHPWVISLQRALESLTYAEPKMKSLAKNAFVSWVRGYAAHKGELKSIFVVKKLHLGHVAKSFALREQPSLVGKSHHKETMKRKRDERQKGQQGKKRKKMSGTGNRSTQKT

SEQ ID NO: 96703 - protein, 562 aa, Arabidopsis thaliana
  peptide (1)..(562): Ceres Seq. ID no. 12734443
MGFEAPTLVQAQAIPVILSGRDVLVNAPTGTGKTIAYLAPLIHHLQGHSPKVDRSHGTFALVIVPTRELCLQVYETLEKLLHRFHWIVPGYVMGGEKKAKEKARLRKGISILIATPGRLLDHLKNTASFVHKNLRWVIFDEADSILELGYGKEIEQIIKLLGSGQNEQGEEDDIVPKGIQKQNLLLSATLNDKVNDLAKLSLDDPVMIGLDNTKLQQNLSIESPAAPDSDAEDMVIHVNKSANPLSEDYGIPSQLVQRYLRVPCGARLVALLSVLKNLFEREASQKVVVFFSTRDAVDFHYSLLSEFQWPPNSETEEEGTKELFLKCKTFRLHGSMEQEDRRSAFGTFKTEKQAVLLSTDVAARGLDFPKVRCIIQYDCPGEATEYVHRVGRTARIGEKGEALLFLQPIEIDYLKELKKHGASLTEYPLMKVLDKFPIPGNMPRIKKVLSLESHPWVISLQRALESLTYAEPKMKSLAKNAFVSWVRGYAAHKGELKSIFVVKKLHLGHVAKSFALREQPSLVGKSHHKETMKRKRDERQKGQQGKKRKKMSGTGNRSTQKT

SEQ ID NO: 96704 - protein, 470 aa, Arabidopsis thaliana
  peptide (1)..(470): Ceres Seq. ID no. 12734444
MGGEKKAKEKARLRKGISILIATPGRLLDHLKNTASFVHKNLRWVIFDEADSILELGYGKEIEQIIKLLGSGQNEQGEEDDIVPKGIQKQNLLLSATLNDKVNDLAKLSLDDPVMIGLDNTKLQQNLSIESPAAPDSDAEDMVIHVNKSANPLSEDYGIPSQLVQRYLRVPCGARLVALLSVLKNLFEREASQKVVVFFSTRDAVDFHYSLLSEFQWPPNSETEEEGTKELFLKCKTFRLHGSMEQEDRRSAFGTFKTEKQAVLLSTDVAARGLDFPKVRCIIQYDCPGEATEYVHRVGRTARIGEKGEALLFLQPIEIDYLKELKKHGASLTEYPLMKVLDKFPIPGNMPRIKKVLSLESHPWVISLQRALESLTYAEPKMKSLAKNAFVSWVRGYAAHKGELKSIFVVKKLHLGHVAKSFALREQPSLVGKSHHKETMKRKRDERQKGQQGKKRKKMSGTGNRSTQKT

SEQ ID NO: 96705 - DNA, 1745 bp, Arabidopsis thaliana
  misc_feature (1)..(1745): Ceres Seq. ID no. 12734466
  misc_feature (1)..(1745): Ortholog of  Ceres SEQ ID NO 15177678 as cited in SEQ ID NO 0
taaataggagtgccaaagagttttggcatgaattgcttggctacgaccataatcatcacctgcaagcccacattgatctcggatatggccgtggctattgatcctttcagtgacaagttcccttactttaaccgatcctctcaaagatgcagacttcaatcccttaccaaccttgacttcaacttcctcgcgcaatcctttaatcatacgtttgaagatgacaacatccatcgtagtgtttcctctccttgcttttccatagctgcgtctgctaatatggaggaagatctcaaagcaaccacggctccacggattgagattcttggtggacagagagtgcccaccgttcgtgctcttgtggctgaggtgaccatggctatggtttctggagctcagcctttgcttttaccaagtggcatgggaggtgcttatctcttgcaaaccggaaagggacataacattgctgtggctaaaccggttgatgaagagcctctagctttcaataatcctaaaaagtctggaaatttgatgctcgggcaaccgggaatgaaacattcaattcctgttggcgagacgggtatcagagaactagctgcctaccttttggattaccaaggcttttctggtgttccaccaacagcattggttagtatctcacatgtcccattccatgtcagtgatgccttctctttctcctccatgccctataaggttgcttccttgcagcgatttgtgggtcatgattttgatgcaggagaattgggtccaggaagcttcacggctacttcggttcataggattggaatacttgatgtgagactcctgaaccttgacagacatgctggaaatatgctagtgaagagatgtgacaaaaaggaagcttataatcgacttgggaccgctgagcttgtgcctattgatcatggtctctgcctccctgaatgcctagatgatccttactttgaatggctaaactggcctcaagctttggttccattctctgacactgaactggattatatatccaatcttgaccctttcaaagacgcagaacttctgagaactgaactacactctctgccggaatctgccataagggtcctcgtcgtctgcacagttttcttaaaacaagcagcagctgcagggctctgtctcgcggagataggcgagaagatgactcgggatttctccaagggtgaagagagtttcagtctgttagagaccctctgcaccaaagcgaaagcaagtgtctttggcaaaacaagcgaagacagtgactatagtcatgaaggaaatgaagtgaacacagagttacagtgtggaatgtttaagtttgacggtggagatacaccatgtgaagcggagatttcagaggtatttcatgtatctaaaccacctttggttccaagagggccacgtgcaaacaccatccctaacgatgtaactgcttccatgtcgtcatcacaaaaccagcggattactcatcaagagaaaagtgcaaaagaaaagaagagaggaggcaagcaagaaagatgcaccgtgaggagcaagagcccaccgatcagtccaaaccatgatgaatcaaaaggagtttccttcgtggacatgacaacagttgaatgggatacgttcctgcagagcttccagacacttttgcaagatgcactgagcaaagggtcaacgccaagattaggatgctcctgcgaaatttgaggaaatcgattaatagaagacaggaaaacgac

SEQ ID NO: 96706 - protein, 561 aa, Arabidopsis thaliana
  peptide (1)..(561): Ceres Seq. ID no. 12734467
MNCLATTIIITCKPTLISDMAVAIDPFSDKFPYFNRSSQRCRLQSLTNLDFNFLAQSFNHTFEDDNIHRSVSSPCFSIAASANMEEDLKATTAPRIEILGGQRVPTVRALVAEVTMAMVSGAQPLLLPSGMGGAYLLQTGKGHNIAVAKPVDEEPLAFNNPKKSGNLMLGQPGMKHSIPVGETGIRELAAYLLDYQGFSGVPPTALVSISHVPFHVSDAFSFSSMPYKVASLQRFVGHDFDAGELGPGSFTATSVHRIGILDVRLLNLDRHAGNMLVKRCDKKEAYNRLGTAELVPIDHGLCLPECLDDPYFEWLNWPQALVPFSDTELDYISNLDPFKDAELLRTELHSLPESAIRVLVVCTVFLKQAAAAGLCLAEIGEKMTRDFSKGEESFSLLETLCTKAKASVFGKTSEDSDYSHEGNEVNTELQCGMFKFDGGDTPCEAEISEVFHVSKPPLVPRGPRANTIPNDVTASMSSSQNQRITHQEKSAKEKKRGGKQERCTVRSKSPPISPNHDESKGVSFVDMTTVEWDTFLQSFQTLLQDALSKGSTPRLGCSCEI

SEQ ID NO: 96707 - protein, 542 aa, Arabidopsis thaliana
  peptide (1)..(542): Ceres Seq. ID no. 12734468
MAVAIDPFSDKFPYFNRSSQRCRLQSLTNLDFNFLAQSFNHTFEDDNIHRSVSSPCFSIAASANMEEDLKATTAPRIEILGGQRVPTVRALVAEVTMAMVSGAQPLLLPSGMGGAYLLQTGKGHNIAVAKPVDEEPLAFNNPKKSGNLMLGQPGMKHSIPVGETGIRELAAYLLDYQGFSGVPPTALVSISHVPFHVSDAFSFSSMPYKVASLQRFVGHDFDAGELGPGSFTATSVHRIGILDVRLLNLDRHAGNMLVKRCDKKEAYNRLGTAELVPIDHGLCLPECLDDPYFEWLNWPQALVPFSDTELDYISNLDPFKDAELLRTELHSLPESAIRVLVVCTVFLKQAAAAGLCLAEIGEKMTRDFSKGEESFSLLETLCTKAKASVFGKTSEDSDYSHEGNEVNTELQCGMFKFDGGDTPCEAEISEVFHVSKPPLVPRGPRANTIPNDVTASMSSSQNQRITHQEKSAKEKKRGGKQERCTVRSKSPPISPNHDESKGVSFVDMTTVEWDTFLQSFQTLLQDALSKGSTPRLGCSCEI

SEQ ID NO: 96708 - protein, 478 aa, Arabidopsis thaliana
  peptide (1)..(478): Ceres Seq. ID no. 12734469
MEEDLKATTAPRIEILGGQRVPTVRALVAEVTMAMVSGAQPLLLPSGMGGAYLLQTGKGHNIAVAKPVDEEPLAFNNPKKSGNLMLGQPGMKHSIPVGETGIRELAAYLLDYQGFSGVPPTALVSISHVPFHVSDAFSFSSMPYKVASLQRFVGHDFDAGELGPGSFTATSVHRIGILDVRLLNLDRHAGNMLVKRCDKKEAYNRLGTAELVPIDHGLCLPECLDDPYFEWLNWPQALVPFSDTELDYISNLDPFKDAELLRTELHSLPESAIRVLVVCTVFLKQAAAAGLCLAEIGEKMTRDFSKGEESFSLLETLCTKAKASVFGKTSEDSDYSHEGNEVNTELQCGMFKFDGGDTPCEAEISEVFHVSKPPLVPRGPRANTIPNDVTASMSSSQNQRITHQEKSAKEKKRGGKQERCTVRSKSPPISPNHDESKGVSFVDMTTVEWDTFLQSFQTLLQDALSKGSTPRLGCSCEI

SEQ ID NO: 96709 - DNA, 2118 bp, Arabidopsis thaliana
  misc_feature (1)..(2118): Ceres Seq. ID no. 12734470
  misc_feature (1)..(2118): Ortholog of  Ceres SEQ ID NO 12609146 as cited in SEQ ID NO 52118
  misc_feature (1)..(2118): Ortholog of  Ceres SEQ ID NO 13638136 as cited in SEQ ID NO 58644
  misc_feature (1)..(2118): Ortholog of  Ceres SEQ ID NO 13596868 as cited in SEQ ID NO 62806
  misc_feature (1)..(2118): Ortholog of  Ceres SEQ ID NO 12587035 as cited in SEQ ID NO 63605
  misc_feature (1)..(2118): Ortholog of  Ceres SEQ ID NO 13595885 as cited in SEQ ID NO 69265
  misc_feature (1)..(2118): Ortholog of  Ceres SEQ ID NO 12566239 as cited in SEQ ID NO 0
  misc_feature (1)..(2118): Ortholog of  Ceres SEQ ID NO 13599119 as cited in SEQ ID NO 0
gtttttccggtggagaaaaatggtgatggaaattgtgaaaccaaacacatgcattagaggatgttgcaccagtgaatcgatccctcttcatctcccttcttcttccttcactcttctctccccaatcgctaaaggatcagagagtgttgtttatgaagcgattctcgatggccgaagagtagcagcgaagaagcctatcttgtctacttccgatgaccttgacaagttccacaggaatttgcagctctcatgcaatctcaatcatcctggtgtggctaagttactagcagcacatgcgaagcctccaaattacatgtttttctttgacttctacgagtctgggactttagctgagaagttacacgtcgaggagtggtctccgagtattgatcaagtgttactgatcacgcttcacttggcaaaggcattgcaatatcttcacaacaacgggattgttcatagggatgtgaaaccagcaaatgttcttcttgacgagaagtttttcccatatctggctgactttggtttagctgaatacaagaagaatttgcgcgaagttaatctgcagaattggagatcgtctgggaagccaactggtggattccacaaaaagaatatggtcggaacacttatttacatggcccctgaaatactgaggaaagacatgtatactgagaaagcagatatttatagctttgggattttgatcaatgagcttttaactggagttgttccatatactgatcgtcgtgcagaagctcaggctcacactgttttagagatgaattacacagaacagcaacttacagttgccattgtgtcttctggtctgcgaccagctcttgctgaaattggattgcaccttccaaagagtttgctatctctgatacaaaactgctgggaatctgatccgtctaaacgaccttcttcggacaatgtggttttggaactagaatcaatttgggaacaagtgagaggaaaacagcaaggtcatctccttgagaaaacttctaattcccagagtgatacggatggggcggacatcattaaaaattcaggagattacagggacaccgttaattggtttagtcaaggggagtgtttatccaagaaatcgtctgtttccactgtctttgatgtgaaattatggtctagttcaacagatgaaccttcaagatatgtcccagtaatttcttgtgggtcttttgcaacatgtggaagaagagaatccatggaagatacacacttcatcataccgcacatgtgtaatgaggaaagcatccacttatttgccatcttcgatggtcatagaggcgctgcagctgctgaattttctgctcaagttttgccaggactagttcaaagcttatgttccacaagcgctggcgaggcattgtcacaagcatttgttaggacagatttagctttcagacaagaactggattcccatcgtcagtcaaaaagggtgagtcagaaagactggcatcctggttgtactgctatagcctctctcctagtagagaataagcttttcgttgcgaatgttggtgactccagggcaattttatgccgcgccggtcacccttttgctctaagtaaggcacatcttgcaacttgtattgatgaaagaaatcgtgtgattggagaaggtggacgtattgaatggttggttgacacatggagagttgctcctgctggacttcaggttactcggtcaataggtgatgatgacctgaagccagctgtaacagcagaaccagagattagtgagacaattctatcagctgacgatgagttcttggtaatggcaagcgacgggctctgggatgttatgaacgatgaagaagttattggtataatcagggatactgtaaaagaaccttcaatgtgttcaaagagattagcaactgaagctgcagcacgtggtagtggtgacaacatcacagtcattgtagtcttcctgcggccagtgtctacagccgaaaggatctactagtagtatccaattcttgcacattattattcaacattcaacttctttacatataaattaattcatgtgtgttatcaaaatgaaccttatgttatcgtcccacagtattatatttgctctcaacc

SEQ ID NO: 96710 - protein, 664 aa, Arabidopsis thaliana
  peptide (1)..(664): Ceres Seq. ID no. 12734471
FFRWRKMVMEIVKPNTCIRGCCTSESIPLHLPSSSFTLLSPIAKGSESVVYEAILDGRRVAAKKPILSTSDDLDKFHRNLQLSCNLNHPGVAKLLAAHAKPPNYMFFFDFYESGTLAEKLHVEEWSPSIDQVLLITLHLAKALQYLHNNGIVHRDVKPANVLLDEKFFPYLADFGLAEYKKNLREVNLQNWRSSGKPTGGFHKKNMVGTLIYMAPEILRKDMYTEKADIYSFGILINELLTGVVPYTDRRAEAQAHTVLEMNYTEQQLTVAIVSSGLRPALAEIGLHLPKSLLSLIQNCWESDPSKRPSSDNVVLELESIWEQVRGKQQGHLLEKTSNSQSDTDGADIIKNSGDYRDTVNWFSQGECLSKKSSVSTVFDVKLWSSSTDEPSRYVPVISCGSFATCGRRESMEDTHFIIPHMCNEESIHLFAIFDGHRGAAAAEFSAQVLPGLVQSLCSTSAGEALSQAFVRTDLAFRQELDSHRQSKRVSQKDWHPGCTAIASLLVENKLFVANVGDSRAILCRAGHPFALSKAHLATCIDERNRVIGEGGRIEWLVDTWRVAPAGLQVTRSIGDDDLKPAVTAEPEISETILSADDEFLVMASDGLWDVMNDEEVIGIIRDTVKEPSMCSKRLATEAAARGSGDNITVIVVFLRPVSTAERIY

SEQ ID NO: 96711 - protein, 658 aa, Arabidopsis thaliana
  peptide (1)..(658): Ceres Seq. ID no. 12734472
MVMEIVKPNTCIRGCCTSESIPLHLPSSSFTLLSPIAKGSESVVYEAILDGRRVAAKKPILSTSDDLDKFHRNLQLSCNLNHPGVAKLLAAHAKPPNYMFFFDFYESGTLAEKLHVEEWSPSIDQVLLITLHLAKALQYLHNNGIVHRDVKPANVLLDEKFFPYLADFGLAEYKKNLREVNLQNWRSSGKPTGGFHKKNMVGTLIYMAPEILRKDMYTEKADIYSFGILINELLTGVVPYTDRRAEAQAHTVLEMNYTEQQLTVAIVSSGLRPALAEIGLHLPKSLLSLIQNCWESDPSKRPSSDNVVLELESIWEQVRGKQQGHLLEKTSNSQSDTDGADIIKNSGDYRDTVNWFSQGECLSKKSSVSTVFDVKLWSSSTDEPSRYVPVISCGSFATCGRRESMEDTHFIIPHMCNEESIHLFAIFDGHRGAAAAEFSAQVLPGLVQSLCSTSAGEALSQAFVRTDLAFRQELDSHRQSKRVSQKDWHPGCTAIASLLVENKLFVANVGDSRAILCRAGHPFALSKAHLATCIDERNRVIGEGGRIEWLVDTWRVAPAGLQVTRSIGDDDLKPAVTAEPEISETILSADDEFLVMASDGLWDVMNDEEVIGIIRDTVKEPSMCSKRLATEAAARGSGDNITVIVVFLRPVSTAERIY

SEQ ID NO: 96712 - protein, 656 aa, Arabidopsis thaliana
  peptide (1)..(656): Ceres Seq. ID no. 12734473
MEIVKPNTCIRGCCTSESIPLHLPSSSFTLLSPIAKGSESVVYEAILDGRRVAAKKPILSTSDDLDKFHRNLQLSCNLNHPGVAKLLAAHAKPPNYMFFFDFYESGTLAEKLHVEEWSPSIDQVLLITLHLAKALQYLHNNGIVHRDVKPANVLLDEKFFPYLADFGLAEYKKNLREVNLQNWRSSGKPTGGFHKKNMVGTLIYMAPEILRKDMYTEKADIYSFGILINELLTGVVPYTDRRAEAQAHTVLEMNYTEQQLTVAIVSSGLRPALAEIGLHLPKSLLSLIQNCWESDPSKRPSSDNVVLELESIWEQVRGKQQGHLLEKTSNSQSDTDGADIIKNSGDYRDTVNWFSQGECLSKKSSVSTVFDVKLWSSSTDEPSRYVPVISCGSFATCGRRESMEDTHFIIPHMCNEESIHLFAIFDGHRGAAAAEFSAQVLPGLVQSLCSTSAGEALSQAFVRTDLAFRQELDSHRQSKRVSQKDWHPGCTAIASLLVENKLFVANVGDSRAILCRAGHPFALSKAHLATCIDERNRVIGEGGRIEWLVDTWRVAPAGLQVTRSIGDDDLKPAVTAEPEISETILSADDEFLVMASDGLWDVMNDEEVIGIIRDTVKEPSMCSKRLATEAAARGSGDNITVIVVFLRPVSTAERIY

SEQ ID NO: 96713 - DNA, 2301 bp, Arabidopsis thaliana
  misc_feature (1)..(2301): Ceres Seq. ID no. 12734518
  misc_feature (1)..(2301): Ortholog of  Ceres SEQ ID NO 13657008 as cited in SEQ ID NO 69164
aaatctgagttaagcgaaaaaaaataaaagagcagaagtctctaaacatgcacgaggaagctctgaatctccagatatgaaatcgtagaaacagactctcgcatttatcgaatcctattgcagaagaatctgaaaaccctaatctgctcatcgttttcttcaattgcttgttgaagaagcagagaatctccgagatctgtgttcttccctctgggaatgtgcttcttcttcttcgtggagaacgattaaagcgcaacggagataaaatatatgaagcgttctctgagaagttacgcacattgatgaatcaagttcgtcgttggcagaggattctgatcctctcgctgctattgttatctgttttagctccgattgttttcgtttcgaatcggctcaagagcatcacttccgtcgatagaggagaattcattgaagaattatccgacattacagataagaccgaggatgaacttagacttactgctattgaacaggacgaagaaggcttgaaggagcctaaacgtattctgcaggatcgagattttaattctgtggttttgtcaaattcctctgataaaagtaatgatactgtgcagtctaatgagggagaccaaaaaaactttctctcagaagttgataagggaaataatcacaaaccaaaggaggaacaagcagtttcacagaaaaccacagtaagctcgaatgcggaggtgaaaatttcagcaagagatattcaacttaatcataaaacggaattccgacccccttcaagtaagagtgaaaagaatacaagggttcaacttgaaagagcaacagatgagagggtaaaggagatcagagacaaaattatccaagcgaaagcctatctgaatttggccctacctgggaataactcccaaatcgtaaaggagttgagagttcgaacgaaagagctggaacgggctactggtgatactaccaaggataaatatttgccaaagagctctcctaacagattgaaggccatggaagttgcgttatacaaggtcagccgtgcctttcacaactgccctgccattgctaccaaactccaagccatgacttataaaaccgaagaacaagctcgggcgcagaagaaacaagcagcatatttaatgcagcttgcagcaaggactaccccaaaagggcttcattgtctctcaatgcggttgacaacagaatattttaccctggatcacgaaaaaaggcagcttttgcaacaaagttataatgatcctgatctctaccattacgtagtcttctctgacaatgttttggcctcttcggttgttgttaactctacaatctcctcatcaaaggaaccggataaaatagtattccatgtggtgacagattcactcaattacccagcaatctcaatgtggtttttactaaacccaagtggcagagcttcaatccaaatcctaaacattgatgaaatgaatgtcctgccattgtaccatgctgaattgctgatgaagcaaaattcaagtgacccaagaatcatttcagcgctcaaccatgcacgcttctatctcccagatatcttcccaggtctaaacaagatcgtactcttcgatcatgatgtagtagtgcaaagggatctaactagactgtggagccttgatatgacggggaaagttgttggagctgtagagacttgtcttgaaggtgatccttcatatcgttcgatggactcattcattaatttctcagatgcatgggtttctcagaaatttgatcccaaggcttgcacttgggcattcgggatgaatctatttgatctcgaagaatggagaagacaggagttgacttctgtatacctgaaatacttcgacctgggagtaaaaggacatctgtggaaagcagggggattgccagtaggttggttgacttttttcgggcaaacgtttccgttggaaaagagatggaacgtgggtgggttaggtcacgaatcaggactcagggcaagcgacatcgaacaagcagcggttatacactacgacgggatcatgaaaccatggctggacatcggtatagacaagtacaagcgctactggaacatacatgtaccttaccatcaccctcacttacaacggtgcaacattcacgattgattttttgaaacaagttaccacaaaacttagattcaattcgattcttttcttctttccaaaatgttataattagcttcattctttaaacgatttcttgtgtaaatctttgttctttttgacacaacacacaaaattctcagagcagaatatcagatatagttcacag

SEQ ID NO: 96714 - protein, 610 aa, Arabidopsis thaliana
  peptide (1)..(610): Ceres Seq. ID no. 12734519
MNQVRRWQRILILSLLLLSVLAPIVFVSNRLKSITSVDRGEFIEELSDITDKTEDELRLTAIEQDEEGLKEPKRILQDRDFNSVVLSNSSDKSNDTVQSNEGDQKNFLSEVDKGNNHKPKEEQAVSQKTTVSSNAEVKISARDIQLNHKTEFRPPSSKSEKNTRVQLERATDERVKEIRDKIIQAKAYLNLALPGNNSQIVKELRVRTKELERATGDTTKDKYLPKSSPNRLKAMEVALYKVSRAFHNCPAIATKLQAMTYKTEEQARAQKKQAAYLMQLAARTTPKGLHCLSMRLTTEYFTLDHEKRQLLQQSYNDPDLYHYVVFSDNVLASSVVVNSTISSSKEPDKIVFHVVTDSLNYPAISMWFLLNPSGRASIQILNIDEMNVLPLYHAELLMKQNSSDPRIISALNHARFYLPDIFPGLNKIVLFDHDVVVQRDLTRLWSLDMTGKVVGAVETCLEGDPSYRSMDSFINFSDAWVSQKFDPKACTWAFGMNLFDLEEWRRQELTSVYLKYFDLGVKGHLWKAGGLPVGWLTFFGQTFPLEKRWNVGGLGHESGLRASDIEQAAVIHYDGIMKPWLDIGIDKYKRYWNIHVPYHHPHLQRCNIHD

SEQ ID NO: 96715 - protein, 376 aa, Arabidopsis thaliana
  peptide (1)..(376): Ceres Seq. ID no. 12734520
MEVALYKVSRAFHNCPAIATKLQAMTYKTEEQARAQKKQAAYLMQLAARTTPKGLHCLSMRLTTEYFTLDHEKRQLLQQSYNDPDLYHYVVFSDNVLASSVVVNSTISSSKEPDKIVFHVVTDSLNYPAISMWFLLNPSGRASIQILNIDEMNVLPLYHAELLMKQNSSDPRIISALNHARFYLPDIFPGLNKIVLFDHDVVVQRDLTRLWSLDMTGKVVGAVETCLEGDPSYRSMDSFINFSDAWVSQKFDPKACTWAFGMNLFDLEEWRRQELTSVYLKYFDLGVKGHLWKAGGLPVGWLTFFGQTFPLEKRWNVGGLGHESGLRASDIEQAAVIHYDGIMKPWLDIGIDKYKRYWNIHVPYHHPHLQRCNIHD

SEQ ID NO: 96716 - protein, 352 aa, Arabidopsis thaliana
  peptide (1)..(352): Ceres Seq. ID no. 12734521
MTYKTEEQARAQKKQAAYLMQLAARTTPKGLHCLSMRLTTEYFTLDHEKRQLLQQSYNDPDLYHYVVFSDNVLASSVVVNSTISSSKEPDKIVFHVVTDSLNYPAISMWFLLNPSGRASIQILNIDEMNVLPLYHAELLMKQNSSDPRIISALNHARFYLPDIFPGLNKIVLFDHDVVVQRDLTRLWSLDMTGKVVGAVETCLEGDPSYRSMDSFINFSDAWVSQKFDPKACTWAFGMNLFDLEEWRRQELTSVYLKYFDLGVKGHLWKAGGLPVGWLTFFGQTFPLEKRWNVGGLGHESGLRASDIEQAAVIHYDGIMKPWLDIGIDKYKRYWNIHVPYHHPHLQRCNIHD

SEQ ID NO: 96717 - DNA, 1233 bp, Arabidopsis thaliana
  misc_feature (1)..(1233): Ceres Seq. ID no. 12734536
  misc_feature (1)..(1233): Ortholog of  Ceres SEQ ID NO 15177328 as cited in SEQ ID NO 52523
  misc_feature (1)..(1233): Ortholog of  Ceres SEQ ID NO 13655881 as cited in SEQ ID NO 64426
atgcatgtccgggaggatacaaaggcgaaggaaaactgtaagaaaaaaaaaaggagaagaagaagatggcatctcactctcaggtttgttttctcttcttttctccaaatcttaaacggtcacttcttctctaatttagttcgatcacaggttttggtggaagagaaatcgagcgttagaatcttgacatttaacagacccaagcagcttaatgctctgtccttccacatggtctctcggttgttgcaactgttccttgcatatgaagaagaccctagtgtgaaacttgtcgtcctaaagggtcagggaagagccttttctgctggtggggacattccacctattgttcgtgatatcctacaaggcaaactgatacgcggtgcccattacttcaaagttggatacacgctcaactatgttttgtccacgtatagaaaacctcaggtttcaattttgaatggtattgtcatgggaggtggagctggtctctctaccaatggtcgatttcgtattgcaactgagaacacggttttcgcaatgcctgagacagctctagggctctttccagatgtaggggcctcttacttcttgtcaagactccctggattttttggagagtatgttggccttacaggagctaggttagatggcgccgaaatgcttgcatgtggtcttgcaactcattttgtgccttcaataagtttgactgcattagaagcagagctttacaaagttggttcaagtaatcaaacctttatctcaacaattctcgatgcatacgctgagttagatgttattgataggtgcttctcgaaaagaacagtggaggaaattttctctgcacttgagagagaggtcacacaaaaaccaaacgattggctcttagctaccattcaagcattggagaaggcttcaccatcatgccttaaaatctcgctaagatcgataagagaaggaagattgcaaggggtggggcagtgtcttatccgtgagtatagaatggtgtgtcatgtgatgaagggagacataagcaaagactttgtggaggggtgcagagcagtattgatagacaaagataggaatccaaagtggcagccaaggcgactcgaggacgtgacggatagcatggtagatcagtactttgagagagtggaggatgaggagggatgggaggatcttaagtttccgccaaggaacaacttgcctgctttagcaatcgcagcaaagctttga

SEQ ID NO: 96718 - protein, 410 aa, Arabidopsis thaliana
  peptide (1)..(410): Ceres Seq. ID no. 12734537
MHVREDTKAKENCKKKKRRRRRWHLTLRFVFSSFLQILNGHFFSNLVRSQVLVEEKSSVRILTFNRPKQLNALSFHMVSRLLQLFLAYEEDPSVKLVVLKGQGRAFSAGGDIPPIVRDILQGKLIRGAHYFKVGYTLNYVLSTYRKPQVSILNGIVMGGGAGLSTNGRFRIATENTVFAMPETALGLFPDVGASYFLSRLPGFFGEYVGLTGARLDGAEMLACGLATHFVPSISLTALEAELYKVGSSNQTFISTILDAYAELDVIDRCFSKRTVEEIFSALEREVTQKPNDWLLATIQALEKASPSCLKISLRSIREGRLQGVGQCLIREYRMVCHVMKGDISKDFVEGCRAVLIDKDRNPKWQPRRLEDVTDSMVDQYFERVEDEEGWEDLKFPPRNNLPALAIAAKL

SEQ ID NO: 96719 - protein, 334 aa, Arabidopsis thaliana
  peptide (1)..(334): Ceres Seq. ID no. 12734538
MVSRLLQLFLAYEEDPSVKLVVLKGQGRAFSAGGDIPPIVRDILQGKLIRGAHYFKVGYTLNYVLSTYRKPQVSILNGIVMGGGAGLSTNGRFRIATENTVFAMPETALGLFPDVGASYFLSRLPGFFGEYVGLTGARLDGAEMLACGLATHFVPSISLTALEAELYKVGSSNQTFISTILDAYAELDVIDRCFSKRTVEEIFSALEREVTQKPNDWLLATIQALEKASPSCLKISLRSIREGRLQGVGQCLIREYRMVCHVMKGDISKDFVEGCRAVLIDKDRNPKWQPRRLEDVTDSMVDQYFERVEDEEGWEDLKFPPRNNLPALAIAAKL

SEQ ID NO: 96720 - protein, 254 aa, Arabidopsis thaliana
  peptide (1)..(254): Ceres Seq. ID no. 12734539
MGGGAGLSTNGRFRIATENTVFAMPETALGLFPDVGASYFLSRLPGFFGEYVGLTGARLDGAEMLACGLATHFVPSISLTALEAELYKVGSSNQTFISTILDAYAELDVIDRCFSKRTVEEIFSALEREVTQKPNDWLLATIQALEKASPSCLKISLRSIREGRLQGVGQCLIREYRMVCHVMKGDISKDFVEGCRAVLIDKDRNPKWQPRRLEDVTDSMVDQYFERVEDEEGWEDLKFPPRNNLPALAIAAKL

SEQ ID NO: 96721 - DNA, 1131 bp, Arabidopsis thaliana
  misc_feature (1)..(1131): Ceres Seq. ID no. 12734540
  misc_feature (1)..(1131): Ortholog of  Ceres SEQ ID NO 15177328 as cited in SEQ ID NO 52523
  misc_feature (1)..(1131): Ortholog of  Ceres SEQ ID NO 13655881 as cited in SEQ ID NO 64426
atggcatctcaatctcaggttttggtggaagagaaatcaagtgttagaattttgacattaaaccgacccaagcagcttaatgctctgtgcttcaacatgatctctcggttgctgcaactattccgtgcatatgaggaagaccctagtgttaaacttgtcatcctaaagggtcaaggaagagccttttgtgccggtggcgacgttccacctgttgttcaaaacatggtacaaggtaaatggagacttggtgccgatttcttcagagatcaatacacgctcaattatgttatggccacgtatagcaaacctcaggtttcaattttgaatggtattgtcatgggagccggtgctggtgtctccatccatggtcgatttcgcattgcaactgagaacacggtttttgccatgccggagacatctctggggctctttccagatgtaggcgcctcctatttcctgtcacggctccctggattttttggagagtatgttggccttacaggagctaggttagatggcgctgaattgcttgcgtgtggtcttgcaactcattttgttccttcaacgaggttgacagctctagaaacagatctttgcaaagttgggtcaagtgatccaagctttgtctcaacaattcttgatgcatacactcagcatccgcaccttaaacagaagagtgcttaccacaggttagatgttatcgataggtgcttctcgaagagaacaatggaagaaattatatctgcacttgagagagagaccactcaagaactagatgattggagcttaactacgattcgagctttgaagaagtcttcaccctcaagccttaaaatatctcttagatcgataagagaaggaagattgcaaggggtaggacactgtcttacccgcgagtatagaatggtgtgtcatgtgatgaagggagatttaagcaaagacttggggtgcagagccatattgatagacaaagataggaatccaaagtgggagccaaggcgattggaggacatgaaggatagcatggtagatcagttctttgagagagtggaagaagaggagcgatgggaggatcttaagctttcaccaaggaacaacttgcatgctttaagaattgcagcaaagttgtga

SEQ ID NO: 96722 - protein, 376 aa, Arabidopsis thaliana
  peptide (1)..(376): Ceres Seq. ID no. 12734541
MASQSQVLVEEKSSVRILTLNRPKQLNALCFNMISRLLQLFRAYEEDPSVKLVILKGQGRAFCAGGDVPPVVQNMVQGKWRLGADFFRDQYTLNYVMATYSKPQVSILNGIVMGAGAGVSIHGRFRIATENTVFAMPETSLGLFPDVGASYFLSRLPGFFGEYVGLTGARLDGAELLACGLATHFVPSTRLTALETDLCKVGSSDPSFVSTILDAYTQHPHLKQKSAYHRLDVIDRCFSKRTMEEIISALERETTQELDDWSLTTIRALKKSSPSSLKISLRSIREGRLQGVGHCLTREYRMVCHVMKGDLSKDLGCRAILIDKDRNPKWEPRRLEDMKDSMVDQFFERVEEEERWEDLKLSPRNNLHALRIAAKL

SEQ ID NO: 96723 - protein, 344 aa, Arabidopsis thaliana
  peptide (1)..(344): Ceres Seq. ID no. 12734542
MISRLLQLFRAYEEDPSVKLVILKGQGRAFCAGGDVPPVVQNMVQGKWRLGADFFRDQYTLNYVMATYSKPQVSILNGIVMGAGAGVSIHGRFRIATENTVFAMPETSLGLFPDVGASYFLSRLPGFFGEYVGLTGARLDGAELLACGLATHFVPSTRLTALETDLCKVGSSDPSFVSTILDAYTQHPHLKQKSAYHRLDVIDRCFSKRTMEEIISALERETTQELDDWSLTTIRALKKSSPSSLKISLRSIREGRLQGVGHCLTREYRMVCHVMKGDLSKDLGCRAILIDKDRNPKWEPRRLEDMKDSMVDQFFERVEEEERWEDLKLSPRNNLHALRIAAKL

SEQ ID NO: 96724 - protein, 302 aa, Arabidopsis thaliana
  peptide (1)..(302): Ceres Seq. ID no. 12734543
MVQGKWRLGADFFRDQYTLNYVMATYSKPQVSILNGIVMGAGAGVSIHGRFRIATENTVFAMPETSLGLFPDVGASYFLSRLPGFFGEYVGLTGARLDGAELLACGLATHFVPSTRLTALETDLCKVGSSDPSFVSTILDAYTQHPHLKQKSAYHRLDVIDRCFSKRTMEEIISALERETTQELDDWSLTTIRALKKSSPSSLKISLRSIREGRLQGVGHCLTREYRMVCHVMKGDLSKDLGCRAILIDKDRNPKWEPRRLEDMKDSMVDQFFERVEEEERWEDLKLSPRNNLHALRIAAKL

SEQ ID NO: 96725 - DNA, 789 bp, Arabidopsis thaliana
  misc_feature (1)..(789): Ceres Seq. ID no. 12734544
  misc_feature (1)..(789): Ortholog of  Ceres SEQ ID NO 13597679 as cited in SEQ ID NO 65073
atggataaaagatggagtcttcagggtatgaccgctcttgtaactggtggagccagcggaatcgggcatgctatagtagaggagctagccggtcttggagctagaatctatgtatgcgatatatctgaaacactgctcaatcaaagtttaagtgaatgggaaaagaaagggtttcaagtaagtggttcaatatgtgatgtatcctctcattccgagagggaaacacttatgcaaacagtctcaaagatgttcgatggcaagctgaacattcttgtgaacaatgttggcgtagttaatccaaagccaacaatagaatatgtggcagccgatttctcgttcagtatttcaacaaacttggaatctgcttatcaccttagccaactttcacatcctctcctaaaagcttcagaatttggaagcatcatcttcatttcttctgttggaggggttgtgtcaatggagtgtggatctatctatagtttaacgaaaggagctttgaatcaactagcaaaaactttggcatgtgaatgggcaagagatggcataagagccaactctgttgctcctaattttatctacactgctatggctcaaccttttttcaaagacgccgattacgagaagagtttggttagtagaactccacttggtcgcgctggagagccaaatgaggtttcatcacttgtggcttttctgtgtctacctgcagcttcatatattactggtcagaccatttgtgttgatggaggtctcactgtcaatggtttctcctataagccacaggcttga

SEQ ID NO: 96726 - protein, 262 aa, Arabidopsis thaliana
  peptide (1)..(262): Ceres Seq. ID no. 12734545
MDKRWSLQGMTALVTGGASGIGHAIVEELAGLGARIYVCDISETLLNQSLSEWEKKGFQVSGSICDVSSHSERETLMQTVSKMFDGKLNILVNNVGVVNPKPTIEYVAADFSFSISTNLESAYHLSQLSHPLLKASEFGSIIFISSVGGVVSMECGSIYSLTKGALNQLAKTLACEWARDGIRANSVAPNFIYTAMAQPFFKDADYEKSLVSRTPLGRAGEPNEVSSLVAFLCLPAASYITGQTICVDGGLTVNGFSYKPQA

SEQ ID NO: 96727 - protein, 253 aa, Arabidopsis thaliana
  peptide (1)..(253): Ceres Seq. ID no. 12734546
MTALVTGGASGIGHAIVEELAGLGARIYVCDISETLLNQSLSEWEKKGFQVSGSICDVSSHSERETLMQTVSKMFDGKLNILVNNVGVVNPKPTIEYVAADFSFSISTNLESAYHLSQLSHPLLKASEFGSIIFISSVGGVVSMECGSIYSLTKGALNQLAKTLACEWARDGIRANSVAPNFIYTAMAQPFFKDADYEKSLVSRTPLGRAGEPNEVSSLVAFLCLPAASYITGQTICVDGGLTVNGFSYKPQA

SEQ ID NO: 96728 - protein, 186 aa, Arabidopsis thaliana
  peptide (1)..(186): Ceres Seq. ID no. 12734547
MQTVSKMFDGKLNILVNNVGVVNPKPTIEYVAADFSFSISTNLESAYHLSQLSHPLLKASEFGSIIFISSVGGVVSMECGSIYSLTKGALNQLAKTLACEWARDGIRANSVAPNFIYTAMAQPFFKDADYEKSLVSRTPLGRAGEPNEVSSLVAFLCLPAASYITGQTICVDGGLTVNGFSYKPQA

SEQ ID NO: 96729 - DNA, 1494 bp, Arabidopsis thaliana
  misc_feature (1)..(1494): Ceres Seq. ID no. 12734548
  misc_feature (1)..(1494): Ortholog of  Ceres SEQ ID NO 13594209 as cited in SEQ ID NO 59089
  misc_feature (1)..(1494): Ortholog of  Ceres SEQ ID NO 14302228 as cited in SEQ ID NO 65061
  misc_feature (1)..(1494): Ortholog of  Ceres SEQ ID NO 14308027 as cited in SEQ ID NO 65826
  misc_feature (1)..(1494): Ortholog of  Ceres SEQ ID NO 13502874 as cited in SEQ ID NO 66298
  misc_feature (1)..(1494): Ortholog of  Ceres SEQ ID NO 15169631 as cited in SEQ ID NO 67173
  misc_feature (1)..(1494): Ortholog of  Ceres SEQ ID NO 12614124 as cited in SEQ ID NO 68392
  misc_feature (1)..(1494): Ortholog of  Ceres SEQ ID NO 15176087 as cited in SEQ ID NO 68692
  misc_feature (1)..(1494): Ortholog of  Ceres SEQ ID NO 14307980 as cited in SEQ ID NO 69214
atggagatgatattgatggtctctttgtgcttaacgaccctcattacccttttcttgcttaaacaattcctcaaacgaaccgccaacaaagtgaacttaccaccatctccatggaggcttccgttgattggtaacctccaccagcttagcctccaccctcaccgttccctccattccctaagccttcggtacggaccactcatgctccttcattttggccgtgtccccatactcgtagtatcctccggggaagcagctcaagaggtattgaaaacacacgatcttaagtttgccaaccgcccgagatcaaaagccgttcatgggcttatgaatggggggcgtgatgtggtgtttggtccctatggagaatattggagacagatgaagagtgtatgcattctcaatctgctcacgaacaaaatggttgcgtcctttgagaagataagagaagaagagctaaatgaaatgatcaagaagctggagaaagcaagttcttcttcttcgtcagaaaatctgagcgaactctttgttactctcccaagcgatgttacgagtagaattgccttgggaagaaaacatagtgaggacgaaaccgcaagggatctcaagaagcgagtgaggcagatcatggagcttttaggcgagttcccaatcggggactatgtcccggctttggcatggatagacaggatcaacggtttcaatgctagaataaaggaagtaagtcaagggtttagcgatcttatggacaaagtggtgcaagaacatttagaggcaggtaatcataaagaggactttgtcgatatactgttatcaatcgaaagcgagaagagtattggattccaagctcaaagagacgacatcaaattcatgatattggatatgtttataggagggacgtcaacaagttcaactctactagaatggataatgacggagctgatcagaaatccaaatgttatgaagaaactccaagacgagattcggtcaaccattaggccacatggttcatacataaaagaaaaagatgttgaaaatatgaaatacttgaaagccgtgattaaagaggtgtttcgggtgcatcctcctcttccactaatacttcccagattattaagtgaagatgtcaaagtaaagggatataacatagccgcaggaaccgaggtgataatcaatgcttgggccatccaaagagaccccgcgatatggggaccggatgcagaagaattcaaaccagaaagacatttagattcaactttggattatcatggaaaagatttaaacttcatcccattcggatcagggagaaggatttgtccagggataaatcttgctttgggtttggtagaggtgacagtggccaaccttgtaggccgatttgactggagggccgaggctggaccaaatggggatcaacctgatctaactgaagcttttggtctcgatgtttgccgaaagttccctctcattgcatttccatcttccgttatttaa

SEQ ID NO: 96730 - protein, 497 aa, Arabidopsis thaliana
  peptide (1)..(497): Ceres Seq. ID no. 12734549
MEMILMVSLCLTTLITLFLLKQFLKRTANKVNLPPSPWRLPLIGNLHQLSLHPHRSLHSLSLRYGPLMLLHFGRVPILVVSSGEAAQEVLKTHDLKFANRPRSKAVHGLMNGGRDVVFGPYGEYWRQMKSVCILNLLTNKMVASFEKIREEELNEMIKKLEKASSSSSSENLSELFVTLPSDVTSRIALGRKHSEDETARDLKKRVRQIMELLGEFPIGDYVPALAWIDRINGFNARIKEVSQGFSDLMDKVVQEHLEAGNHKEDFVDILLSIESEKSIGFQAQRDDIKFMILDMFIGGTSTSSTLLEWIMTELIRNPNVMKKLQDEIRSTIRPHGSYIKEKDVENMKYLKAVIKEVFRVHPPLPLILPRLLSEDVKVKGYNIAAGTEVIINAWAIQRDPAIWGPDAEEFKPERHLDSTLDYHGKDLNFIPFGSGRRICPGINLALGLVEVTVANLVGRFDWRAEAGPNGDQPDLTEAFGLDVCRKFPLIAFPSSVI

SEQ ID NO: 96731 - protein, 495 aa, Arabidopsis thaliana
  peptide (1)..(495): Ceres Seq. ID no. 12734550
MILMVSLCLTTLITLFLLKQFLKRTANKVNLPPSPWRLPLIGNLHQLSLHPHRSLHSLSLRYGPLMLLHFGRVPILVVSSGEAAQEVLKTHDLKFANRPRSKAVHGLMNGGRDVVFGPYGEYWRQMKSVCILNLLTNKMVASFEKIREEELNEMIKKLEKASSSSSSENLSELFVTLPSDVTSRIALGRKHSEDETARDLKKRVRQIMELLGEFPIGDYVPALAWIDRINGFNARIKEVSQGFSDLMDKVVQEHLEAGNHKEDFVDILLSIESEKSIGFQAQRDDIKFMILDMFIGGTSTSSTLLEWIMTELIRNPNVMKKLQDEIRSTIRPHGSYIKEKDVENMKYLKAVIKEVFRVHPPLPLILPRLLSEDVKVKGYNIAAGTEVIINAWAIQRDPAIWGPDAEEFKPERHLDSTLDYHGKDLNFIPFGSGRRICPGINLALGLVEVTVANLVGRFDWRAEAGPNGDQPDLTEAFGLDVCRKFPLIAFPSSVI

SEQ ID NO: 96732 - protein, 492 aa, Arabidopsis thaliana
  peptide (1)..(492): Ceres Seq. ID no. 12734551
MVSLCLTTLITLFLLKQFLKRTANKVNLPPSPWRLPLIGNLHQLSLHPHRSLHSLSLRYGPLMLLHFGRVPILVVSSGEAAQEVLKTHDLKFANRPRSKAVHGLMNGGRDVVFGPYGEYWRQMKSVCILNLLTNKMVASFEKIREEELNEMIKKLEKASSSSSSENLSELFVTLPSDVTSRIALGRKHSEDETARDLKKRVRQIMELLGEFPIGDYVPALAWIDRINGFNARIKEVSQGFSDLMDKVVQEHLEAGNHKEDFVDILLSIESEKSIGFQAQRDDIKFMILDMFIGGTSTSSTLLEWIMTELIRNPNVMKKLQDEIRSTIRPHGSYIKEKDVENMKYLKAVIKEVFRVHPPLPLILPRLLSEDVKVKGYNIAAGTEVIINAWAIQRDPAIWGPDAEEFKPERHLDSTLDYHGKDLNFIPFGSGRRICPGINLALGLVEVTVANLVGRFDWRAEAGPNGDQPDLTEAFGLDVCRKFPLIAFPSSVI

SEQ ID NO: 96733 - DNA, 1494 bp, Arabidopsis thaliana
  misc_feature (1)..(1494): Ceres Seq. ID no. 12734552
  misc_feature (1)..(1494): Ortholog of  Ceres SEQ ID NO 13594209 as cited in SEQ ID NO 59089
  misc_feature (1)..(1494): Ortholog of  Ceres SEQ ID NO 14302228 as cited in SEQ ID NO 65061
  misc_feature (1)..(1494): Ortholog of  Ceres SEQ ID NO 14308027 as cited in SEQ ID NO 65826
  misc_feature (1)..(1494): Ortholog of  Ceres SEQ ID NO 15169585 as cited in SEQ ID NO 66076
  misc_feature (1)..(1494): Ortholog of  Ceres SEQ ID NO 13502874 as cited in SEQ ID NO 66298
  misc_feature (1)..(1494): Ortholog of  Ceres SEQ ID NO 15169631 as cited in SEQ ID NO 67173
  misc_feature (1)..(1494): Ortholog of  Ceres SEQ ID NO 12614124 as cited in SEQ ID NO 68392
  misc_feature (1)..(1494): Ortholog of  Ceres SEQ ID NO 15176087 as cited in SEQ ID NO 68692
atggaaatgatattgagtatctctttgtgcttaacgaccctcataacccttctcttgctgaggcgattcctcaaacgaaccgccactaaagtgaacctaccaccatctccatggaggcttccggtgatcggaaacctccaccagctgagcctccatcctcaccgttccctccggtccctcagtctcaggtacggaccactcatgctccttcattttggccgtgtccctatactcgtagtctcctccggtgaagcagctcaagaggtattgaaaacacatgatcataaatttgcgaaccgcccgagatcaaaagccgttcatgggcttatgaatggtggacgtgatgttgtgtttgctccctatggagaatactggagacagatgaagagtgtatgcattctcaatctgctcaccaacaaaatggttgaatcctttgagaaggtaagagaagacgaggtaaatgcaatgatcgagaagctggagaaagcaagttcttcttcttcatcagaaaatctgagcgaactctttataactctaccaagcgatgttacgagtagagttgcgttgggaagaaaacatagcgaggacgagaccgcaagggatctcaagaagcgagtgaggcagatcatggagcttttaggcgagttcccgatcggggaatatgtccccatattggcatggatagatgggatccgtggtttcaataataaaattaaggaagtgagtcgagggtttagcgatcttatggacaaagtggtgcaagaacatttagaggcgagtaacgataaagcggatttcgtggatatattgttatcaatcgaaaaagataagaacagtggattccaagttcaaagaaacgacataaaatttatgatcttggatatgtttatcggaggaacgtcaacaacttcgactctactagaatggacgatgacggaactgatcagaagtccaaagagtatgaagaaactccaagacgagattcggtcaactattaggccacatggttcatacataaaagaaaaagaagtggaaaatatgaaatacttaaaagccgtgattaaagaggtgcttcggttgcatccttctcttccaatgatacttcccagactcttaagtgaagatgtcaaagtaaagggatataacatagccgcagggacagaggtgataatcaatgcttgggcgatccaacgagacactgcgatatggggaccggatgctgaagaattcaaaccggagagacacttagattcaggtttagattatcacggaaaaaatctgaactacatcccattcggatcagggagaaggatatgccccgggataaatcttgctttgggtctggcagaggtgacagtggccaaccttgtaggccgatttgactggagggtagaggctggaccaaatggggatcaacctgatctaactgaagccattggtatcgatgtttgccgcaaattccctctcattgcatttccatcttcggttgtgtaa

SEQ ID NO: 96734 - protein, 497 aa, Arabidopsis thaliana
  peptide (1)..(497): Ceres Seq. ID no. 12734553
MEMILSISLCLTTLITLLLLRRFLKRTATKVNLPPSPWRLPVIGNLHQLSLHPHRSLRSLSLRYGPLMLLHFGRVPILVVSSGEAAQEVLKTHDHKFANRPRSKAVHGLMNGGRDVVFAPYGEYWRQMKSVCILNLLTNKMVESFEKVREDEVNAMIEKLEKASSSSSSENLSELFITLPSDVTSRVALGRKHSEDETARDLKKRVRQIMELLGEFPIGEYVPILAWIDGIRGFNNKIKEVSRGFSDLMDKVVQEHLEASNDKADFVDILLSIEKDKNSGFQVQRNDIKFMILDMFIGGTSTTSTLLEWTMTELIRSPKSMKKLQDEIRSTIRPHGSYIKEKEVENMKYLKAVIKEVLRLHPSLPMILPRLLSEDVKVKGYNIAAGTEVIINAWAIQRDTAIWGPDAEEFKPERHLDSGLDYHGKNLNYIPFGSGRRICPGINLALGLAEVTVANLVGRFDWRVEAGPNGDQPDLTEAIGIDVCRKFPLIAFPSSVV

SEQ ID NO: 96735 - protein, 495 aa, Arabidopsis thaliana
  peptide (1)..(495): Ceres Seq. ID no. 12734554
MILSISLCLTTLITLLLLRRFLKRTATKVNLPPSPWRLPVIGNLHQLSLHPHRSLRSLSLRYGPLMLLHFGRVPILVVSSGEAAQEVLKTHDHKFANRPRSKAVHGLMNGGRDVVFAPYGEYWRQMKSVCILNLLTNKMVESFEKVREDEVNAMIEKLEKASSSSSSENLSELFITLPSDVTSRVALGRKHSEDETARDLKKRVRQIMELLGEFPIGEYVPILAWIDGIRGFNNKIKEVSRGFSDLMDKVVQEHLEASNDKADFVDILLSIEKDKNSGFQVQRNDIKFMILDMFIGGTSTTSTLLEWTMTELIRSPKSMKKLQDEIRSTIRPHGSYIKEKEVENMKYLKAVIKEVLRLHPSLPMILPRLLSEDVKVKGYNIAAGTEVIINAWAIQRDTAIWGPDAEEFKPERHLDSGLDYHGKNLNYIPFGSGRRICPGINLALGLAEVTVANLVGRFDWRVEAGPNGDQPDLTEAIGIDVCRKFPLIAFPSSVV

SEQ ID NO: 96736 - protein, 430 aa, Arabidopsis thaliana
  peptide (1)..(430): Ceres Seq. ID no. 12734555
MLLHFGRVPILVVSSGEAAQEVLKTHDHKFANRPRSKAVHGLMNGGRDVVFAPYGEYWRQMKSVCILNLLTNKMVESFEKVREDEVNAMIEKLEKASSSSSSENLSELFITLPSDVTSRVALGRKHSEDETARDLKKRVRQIMELLGEFPIGEYVPILAWIDGIRGFNNKIKEVSRGFSDLMDKVVQEHLEASNDKADFVDILLSIEKDKNSGFQVQRNDIKFMILDMFIGGTSTTSTLLEWTMTELIRSPKSMKKLQDEIRSTIRPHGSYIKEKEVENMKYLKAVIKEVLRLHPSLPMILPRLLSEDVKVKGYNIAAGTEVIINAWAIQRDTAIWGPDAEEFKPERHLDSGLDYHGKNLNYIPFGSGRRICPGINLALGLAEVTVANLVGRFDWRVEAGPNGDQPDLTEAIGIDVCRKFPLIAFPSSVV

SEQ ID NO: 96737 - DNA, 2758 bp, Arabidopsis thaliana
  misc_feature (1)..(2758): Ceres Seq. ID no. 12734565
  misc_feature (1)..(2758): Ortholog of  Ceres SEQ ID NO 13600595 as cited in SEQ ID NO 629
catatcgatctctcaatcagattagattatggaaattgcagcgaaaatggttaaagtaaggaagatggagatgattttattactaattcttgtgattgtggtggcggcgacggcggcgaatgtgacttatgaccaccgtgcattagtaatcgacgggaaacggaaagttctaatctctggttctattcattatcctcggagtactcctgagatgtggccagagcttatacagaaatctaaagacggtggtttagatgttatagagacgtatgtgttttggagtggtcacgaaccggagaaaaataagtataattttgaaggaagatatgatttagtgaaatttgtgaagcttgcggctaaagctggtctctatgttcatttaagaattggtccttacgtctgtgctgaatggaattacggtggtttcccagtgtggttgcattttgttccaggaattaagtttcgaactgataatgagccatttaaggaagaaatgcagagatttaccacaaagattgttgatttgatgaagcaagaaaagctttatgcatcacaaggaggtccaatcattctctcgcagattgagaatgaatatggaaatattgactcagcttatggtgcggctgctaaaagttatatcaagtggtctgcttctatggctctttcgttagatactggagtaccatggaatatgtgtcaacaaacagatgctcctgatcccatgatcaacacatgcaatggtttctactgtgaccagtttacacctaactcaaataataaaccaaagatgtggaccgagaactggagtggatggttccttggttttggagatccttctccttacagaccagttgaagatcttgcatttgcggtcgcgcggttttaccaacgaggtggaacgttccagaactattacatgtatcacggtggaacaaactttgatagaacaagtggaggaccattaatctctactagttatgattatgatgctccaattgatgagtatggactacttagacaaccaaaatggggacacttacgagatctacacaaggctatcaagctttgtgaagatgcattgattgccacagatccaacaattacttctctaggttcaaatttggaggctgctgtatataaaacagaatctggatcatgtgctgcttttcttgcaaatgttgacacgaagtctgatgcaactgtgactttcaatggaaaatcatataacttgcctgcatggtccgtaagcatcttgccggattgcaaaaatgtagctttcaataccgcaaagataaattctgcaactgagtctaccgcatttgctcgtcaatcattaaagcccgatggtggttcgtctgcggagttaggttcacaatggagttacattaaagaacctattggaatttccaaagctgatgcattcttgaaacctggattgctagagcagattaacacaacagctgataaaagcgattacttgtggtactcactaaggacggatataaaaggcgatgagactttccttgacgagggatctaaagccgtccttcacattgaatctcttggtcaagtggtctatgcttttataaatggaaaacttgcaggaagcggacatggcaaacagaagatttctttggatataccgattaatcttgtaaccgggacgaacacaatcgatctccttagtgttaccgtagggcttgcgaattatggagctttctttgacttagtgggagcaggaataaccggacctgtgacacttaaaagcgctaaaggtggtagctcaattgatttggcttcacagcaatggacttatcaggttggactcaaaggagaagacacaggtttggcaactgtagattcttctgaatgggtttcaaagtctcctttgcctactaaacaaccacttatttggtacaagacgacatttgatgctccttctgggagcgagccagtagctatagacttcacgggtacaggaaagggtattgcatgggtgaatggacagagcataggtaggtactggccaactagtatcgctggaaatggcggttgtacagaatcatgcgactatagaggttcttaccgtgcaaacaaatgcctcaagaactgtggaaaaccttcacagacattgtatcatgtacctcgctcgtggctaaaaccgagcgggaacatacttgttctgtttgaggagatgggaggagatccaacacaaatatcatttgcgacaaaacaaacaggaagcaatctttgtctaacggtgtcacagtctcatccaccaccggtggacacatggacttccgactcaaagatctcaaacagaaacagaaccaggccggttctttcgttgaaatgccctatctctactcaggtgatattttctataaaatttgcaagctttggtacacccaaaggtacttgcggtagcttcacacaaggccattgcaatagctctcgatctctctccctcgtccaaaaggcatgtattggattgaggagttgcaacgttgaagtatcgactagagtgttcggggaaccttgtcgtggcgtcgtcaagagcttagctgttgaagcttcttgttcatgaggagtgcccggttcctaaacctctgctgatttgatattattttaagcatgtaattgttggaaataaagcaaaatgaaatggaaattagtagtatagttttatggtctatccaaataaatttggctggaattaaagttactaaactatgtatgtgtgtggtaagcactttgg

SEQ ID NO: 96738 - protein, 852 aa, Arabidopsis thaliana
  peptide (1)..(852): Ceres Seq. ID no. 12734566
MEIAAKMVKVRKMEMILLLILVIVVAATAANVTYDHRALVIDGKRKVLISGSIHYPRSTPEMWPELIQKSKDGGLDVIETYVFWSGHEPEKNKYNFEGRYDLVKFVKLAAKAGLYVHLRIGPYVCAEWNYGGFPVWLHFVPGIKFRTDNEPFKEEMQRFTTKIVDLMKQEKLYASQGGPIILSQIENEYGNIDSAYGAAAKSYIKWSASMALSLDTGVPWNMCQQTDAPDPMINTCNGFYCDQFTPNSNNKPKMWTENWSGWFLGFGDPSPYRPVEDLAFAVARFYQRGGTFQNYYMYHGGTNFDRTSGGPLISTSYDYDAPIDEYGLLRQPKWGHLRDLHKAIKLCEDALIATDPTITSLGSNLEAAVYKTESGSCAAFLANVDTKSDATVTFNGKSYNLPAWSVSILPDCKNVAFNTAKINSATESTAFARQSLKPDGGSSAELGSQWSYIKEPIGISKADAFLKPGLLEQINTTADKSDYLWYSLRTDIKGDETFLDEGSKAVLHIESLGQVVYAFINGKLAGSGHGKQKISLDIPINLVTGTNTIDLLSVTVGLANYGAFFDLVGAGITGPVTLKSAKGGSSIDLASQQWTYQVGLKGEDTGLATVDSSEWVSKSPLPTKQPLIWYKTTFDAPSGSEPVAIDFTGTGKGIAWVNGQSIGRYWPTSIAGNGGCTESCDYRGSYRANKCLKNCGKPSQTLYHVPRSWLKPSGNILVLFEEMGGDPTQISFATKQTGSNLCLTVSQSHPPPVDTWTSDSKISNRNRTRPVLSLKCPISTQVIFSIKFASFGTPKGTCGSFTQGHCNSSRSLSLVQKACIGLRSCNVEVSTRVFGEPCRGVVKSLAVEASCS

SEQ ID NO: 96739 - protein, 846 aa, Arabidopsis thaliana
  peptide (1)..(846): Ceres Seq. ID no. 12734567
MVKVRKMEMILLLILVIVVAATAANVTYDHRALVIDGKRKVLISGSIHYPRSTPEMWPELIQKSKDGGLDVIETYVFWSGHEPEKNKYNFEGRYDLVKFVKLAAKAGLYVHLRIGPYVCAEWNYGGFPVWLHFVPGIKFRTDNEPFKEEMQRFTTKIVDLMKQEKLYASQGGPIILSQIENEYGNIDSAYGAAAKSYIKWSASMALSLDTGVPWNMCQQTDAPDPMINTCNGFYCDQFTPNSNNKPKMWTENWSGWFLGFGDPSPYRPVEDLAFAVARFYQRGGTFQNYYMYHGGTNFDRTSGGPLISTSYDYDAPIDEYGLLRQPKWGHLRDLHKAIKLCEDALIATDPTITSLGSNLEAAVYKTESGSCAAFLANVDTKSDATVTFNGKSYNLPAWSVSILPDCKNVAFNTAKINSATESTAFARQSLKPDGGSSAELGSQWSYIKEPIGISKADAFLKPGLLEQINTTADKSDYLWYSLRTDIKGDETFLDEGSKAVLHIESLGQVVYAFINGKLAGSGHGKQKISLDIPINLVTGTNTIDLLSVTVGLANYGAFFDLVGAGITGPVTLKSAKGGSSIDLASQQWTYQVGLKGEDTGLATVDSSEWVSKSPLPTKQPLIWYKTTFDAPSGSEPVAIDFTGTGKGIAWVNGQSIGRYWPTSIAGNGGCTESCDYRGSYRANKCLKNCGKPSQTLYHVPRSWLKPSGNILVLFEEMGGDPTQISFATKQTGSNLCLTVSQSHPPPVDTWTSDSKISNRNRTRPVLSLKCPISTQVIFSIKFASFGTPKGTCGSFTQGHCNSSRSLSLVQKACIGLRSCNVEVSTRVFGEPCRGVVKSLAVEASCS

SEQ ID NO: 96740 - protein, 840 aa, Arabidopsis thaliana
  peptide (1)..(840): Ceres Seq. ID no. 12734568
MEMILLLILVIVVAATAANVTYDHRALVIDGKRKVLISGSIHYPRSTPEMWPELIQKSKDGGLDVIETYVFWSGHEPEKNKYNFEGRYDLVKFVKLAAKAGLYVHLRIGPYVCAEWNYGGFPVWLHFVPGIKFRTDNEPFKEEMQRFTTKIVDLMKQEKLYASQGGPIILSQIENEYGNIDSAYGAAAKSYIKWSASMALSLDTGVPWNMCQQTDAPDPMINTCNGFYCDQFTPNSNNKPKMWTENWSGWFLGFGDPSPYRPVEDLAFAVARFYQRGGTFQNYYMYHGGTNFDRTSGGPLISTSYDYDAPIDEYGLLRQPKWGHLRDLHKAIKLCEDALIATDPTITSLGSNLEAAVYKTESGSCAAFLANVDTKSDATVTFNGKSYNLPAWSVSILPDCKNVAFNTAKINSATESTAFARQSLKPDGGSSAELGSQWSYIKEPIGISKADAFLKPGLLEQINTTADKSDYLWYSLRTDIKGDETFLDEGSKAVLHIESLGQVVYAFINGKLAGSGHGKQKISLDIPINLVTGTNTIDLLSVTVGLANYGAFFDLVGAGITGPVTLKSAKGGSSIDLASQQWTYQVGLKGEDTGLATVDSSEWVSKSPLPTKQPLIWYKTTFDAPSGSEPVAIDFTGTGKGIAWVNGQSIGRYWPTSIAGNGGCTESCDYRGSYRANKCLKNCGKPSQTLYHVPRSWLKPSGNILVLFEEMGGDPTQISFATKQTGSNLCLTVSQSHPPPVDTWTSDSKISNRNRTRPVLSLKCPISTQVIFSIKFASFGTPKGTCGSFTQGHCNSSRSLSLVQKACIGLRSCNVEVSTRVFGEPCRGVVKSLAVEASCS

SEQ ID NO: 96741 - DNA, 1753 bp, Arabidopsis thaliana
  misc_feature (1)..(1753): Ceres Seq. ID no. 12734577
  misc_feature (1)..(1753): Ortholog of  Ceres SEQ ID NO 15180208 as cited in SEQ ID NO 0
gttccctcacacgtctccttctatcttcttctccactttaaaaaaaaaaaatatccgtctcactctctcgccgccggtaacatttcccggcgacaaaacttctctactctcaccattcctccatcgtaatctctaaattcttctccattctcttcttcctcccgatcatctcgagctcttcgtgagagattatgtgattatgtaatcgttgttgctgtagaagacgatctctaacaactgattccttcatcatcaccttcgctagatttgtaattttcagagcttgagatgttggatcttaacctcaacgctgattctcccgagtcgactcagtacggtggtgactcatacttagatcggcagacatcagacaactccgccgggaatcgagtggaagagtccggtacatcgacgtcgtcagttatcaatgccgatggagacgaagactcttgctctactcgagctttcactctcagtttcgatattttaaaagtcggaagtagtagcggcggagacgaaagccccgccgcttcagcttccgttactaaagagttttttccggtgagtggagactgtggacatctacgagatgttgaaggatcatcaagctctagaaactggatagatctttcttttgaccgtattggtgacggagaaacgaaattggtaactccggttccgactccggctccggttccggctcaggttaaaaagagtcggagaggaccaaggtctagaagttcacagtatagaggagttactttttatagaagaactggtcgatgggagtcacatatttgggattgtgggaaacaagtttatttaggtggtttcgacactgctcatgctgcagctagagcttatgatcgagctgctattaaatttagaggtgttgatgctgatatcaactttactcttggtgattatgaggaagatatgaaacaggtacaaaacttgagtaaggaagagtttgtgcatatactgcgtagacagagcacggggttttcgcgggggagttcgaagtatcgaggggttacgttacacaaatgtggtagatgggaagctaggatggggcagtttcttggtaaaaaggcttatgacaaggctgcaatcaacactaatggtagagaagcagtcacgaacttcgagatgagttcataccaaaatgagattaactctgagagcaataactctgagattgacctcaacttgggaatctctttatcgaccggtaatgcgccaaagcaaaatgggaggctctttcacttcccttctaatacttatgaaactcagcgtggagttagcttgaggatagataacgaatacatgggaaagccggtgaatacacctcttccttatggatcctcggatcatcgcctttactggaacggagcatgcccgagttataataatcccgccgagggaagagcaacagaaaagagaagtgaagctgaagggatgatgagtaactggggatggcagagaccggggcaaacaagcgccgtgagaccgcagccaccgggaccacaaccaccaccattgttctcagttgcagcagcatcatcaggattctcacatttccggccacaacctcccaatgacaatgcaacacgtggttacttttatccacacccttaacttgtaaggggacatatgagagtttttttaccatctctctctctctcaacactctagtcccctttcaaaaatgtcatttgggttttagatttttcacatacaatgatcaattttt

SEQ ID NO: 96742 - protein, 449 aa, Arabidopsis thaliana
  peptide (1)..(449): Ceres Seq. ID no. 12734578
MLDLNLNADSPESTQYGGDSYLDRQTSDNSAGNRVEESGTSTSSVINADGDEDSCSTRAFTLSFDILKVGSSSGGDESPAASASVTKEFFPVSGDCGHLRDVEGSSSSRNWIDLSFDRIGDGETKLVTPVPTPAPVPAQVKKSRRGPRSRSSQYRGVTFYRRTGRWESHIWDCGKQVYLGGFDTAHAAARAYDRAAIKFRGVDADINFTLGDYEEDMKQVQNLSKEEFVHILRRQSTGFSRGSSKYRGVTLHKCGRWEARMGQFLGKKAYDKAAINTNGREAVTNFEMSSYQNEINSESNNSEIDLNLGISLSTGNAPKQNGRLFHFPSNTYETQRGVSLRIDNEYMGKPVNTPLPYGSSDHRLYWNGACPSYNNPAEGRATEKRSEAEGMMSNWGWQRPGQTSAVRPQPPGPQPPPLFSVAAASSGFSHFRPQPPNDNATRGYFYPHP

SEQ ID NO: 96743 - protein, 233 aa, Arabidopsis thaliana
  peptide (1)..(233): Ceres Seq. ID no. 12734579
MKQVQNLSKEEFVHILRRQSTGFSRGSSKYRGVTLHKCGRWEARMGQFLGKKAYDKAAINTNGREAVTNFEMSSYQNEINSESNNSEIDLNLGISLSTGNAPKQNGRLFHFPSNTYETQRGVSLRIDNEYMGKPVNTPLPYGSSDHRLYWNGACPSYNNPAEGRATEKRSEAEGMMSNWGWQRPGQTSAVRPQPPGPQPPPLFSVAAASSGFSHFRPQPPNDNATRGYFYPHP

SEQ ID NO: 96744 - DNA, 870 bp, Arabidopsis thaliana
  misc_feature (1)..(870): Ceres Seq. ID no. 12734580
  misc_feature (1)..(870): Ortholog of  Ceres SEQ ID NO 12627237 as cited in SEQ ID NO 61036
gttgataaggagaaagaagcaaaatgtggtcgcaaagcttcttaggttctgctcccaaattatgtctcttctcatcttctcttcctcctttctctcatcacaagatccataaattcttctgctttgcccaaaatccatcatccactgttagcatcaatctcagcaaaagacatttgaatctctcaattctcacactcttcttcaatgggttcttgttggataataaagccaaatccatggaagaacttcaaagatacactgattccaacaatggcttcactcttctcataccctcttcttatacaaaggtagagaaagcaggagctaatgctctgtttgaagaactaaacaatggaagcaacaatattggtgttgttgttagtcctgtccgtataaagagccttgaccaatttggttctcctcaatttgttgctgataagcttatcaacgcagagaaacgaaaggaaagcacaaaggaagcagaagttgtatcagtgggagagagagcaggattaggacaacaagtgtatgagtttgaatacaaaattgatagtacaagaggaggaatcaagagggttttctcagctgcgtttgtgagttctaacaagctttatctattgaatgttgttcattcagataaaccagagaatccattggattcaagtacgagaatgtcgttggaacaagttcttcactcctttgatgctctgcctcttacatgaccaccaaacccaataatctgtttccttgttgagcttgtttgatgggcttattcttgagttaatgggcttttgtagtcatttattgagcccaataaatctgagatttcttttgttacaaatactgttgcctagttaacattctttgtgg

SEQ ID NO: 96745 - protein, 232 aa, Arabidopsis thaliana
  peptide (1)..(232): Ceres Seq. ID no. 12734581
MWSQSFLGSAPKLCLFSSSLPPFSHHKIHKFFCFAQNPSSTVSINLSKRHLNLSILTLFFNGFLLDNKAKSMEELQRYTDSNNGFTLLIPSSYTKVEKAGANALFEELNNGSNNIGVVVSPVRIKSLDQFGSPQFVADKLINAEKRKESTKEAEVVSVGERAGLGQQVYEFEYKIDSTRGGIKRVFSAAFVSSNKLYLLNVVHSDKPENPLDSSTRMSLEQVLHSFDALPLT

SEQ ID NO: 96746 - protein, 161 aa, Arabidopsis thaliana; identical to SEQ ID NO: 87798
  peptide (1)..(161): Ceres Seq. ID no. 12734582

SEQ ID NO: 96747 - DNA, 1071 bp, Arabidopsis thaliana
  misc_feature (1)..(1071): Ceres Seq. ID no. 12734591
  misc_feature (1)..(1071): Ortholog of  Ceres SEQ ID NO 14303631 as cited in SEQ ID NO 62864
atggaattggatctatcaccaaggctcccgaaaaaggtgtacggaggagacggtggttcgtactttgcatggtgccctgaagagttgccaatgctccgagatggtaacattggagcctctaagctcgctcttgagaagtatggcttggctcttcctcgctactctgactcccccaaggtcgcttatgttcttcaaggagctggaacagctggaatcgtgctccctgagaaggaggagaaagtgatagcaatcaagaaaggagactccatagctttaccttttggtgtagtgacatggtggttcaacaatgaggacactgagctagtcgttctcttccttggtgagactcacaagggtcacaaagctggacagttcaccgacttttacctaaccggatccaatggaatcttcaccggtttctctactgagtttgttggcagagcttgggatctcgatgagaccaccgtgaagaagcttgtcggatctcagacaggtaacggtatcgtgaaggttgatgcgagcttgaagatgcctgaaccaaagaaaggtgaccgaaaagggtttgttttgaactgtttggaggctcctcttgatgttgacattaaggatggaggaagagttgttgtgttgaacacaaagaatcttcctttggttggtgaagttggatttggagctgatcttgtgagaatcgatggacactctatgtgttctcctggattctcttgtgactcggctcttcaagttacttacattgttggtggaagtggtcgtgttcagattgttggtgctgatgggaagagagttcttgagactcatgtgaaagctggtgttttgttcattgttcctaggttctttgttgtctccaagattgctgattctgatggcttgtcttggttctccattgtgaccactcctgatccaatattcactcatttggccgggaggacttcggtgtggaaggctttgtcgccggaggttttgcaggcagcgttcaaggtggatcccgaggttgagaaggctttccgatctaagaggacctctgatgccattttcttctctccttccaactag

SEQ ID NO: 96748 - protein, 356 aa, Arabidopsis thaliana
  peptide (1)..(356): Ceres Seq. ID no. 12734592
MELDLSPRLPKKVYGGDGGSYFAWCPEELPMLRDGNIGASKLALEKYGLALPRYSDSPKVAYVLQGAGTAGIVLPEKEEKVIAIKKGDSIALPFGVVTWWFNNEDTELVVLFLGETHKGHKAGQFTDFYLTGSNGIFTGFSTEFVGRAWDLDETTVKKLVGSQTGNGIVKVDASLKMPEPKKGDRKGFVLNCLEAPLDVDIKDGGRVVVLNTKNLPLVGEVGFGADLVRIDGHSMCSPGFSCDSALQVTYIVGGSGRVQIVGADGKRVLETHVKAGVLFIVPRFFVVSKIADSDGLSWFSIVTTPDPIFTHLAGRTSVWKALSPEVLQAAFKVDPEVEKAFRSKRTSDAIFFSPSN

SEQ ID NO: 96749 - protein, 326 aa, Arabidopsis thaliana
  peptide (1)..(326): Ceres Seq. ID no. 12734593
MLRDGNIGASKLALEKYGLALPRYSDSPKVAYVLQGAGTAGIVLPEKEEKVIAIKKGDSIALPFGVVTWWFNNEDTELVVLFLGETHKGHKAGQFTDFYLTGSNGIFTGFSTEFVGRAWDLDETTVKKLVGSQTGNGIVKVDASLKMPEPKKGDRKGFVLNCLEAPLDVDIKDGGRVVVLNTKNLPLVGEVGFGADLVRIDGHSMCSPGFSCDSALQVTYIVGGSGRVQIVGADGKRVLETHVKAGVLFIVPRFFVVSKIADSDGLSWFSIVTTPDPIFTHLAGRTSVWKALSPEVLQAAFKVDPEVEKAFRSKRTSDAIFFSPSN

SEQ ID NO: 96750 - protein, 180 aa, Arabidopsis thaliana
  peptide (1)..(180): Ceres Seq. ID no. 12734594
MPEPKKGDRKGFVLNCLEAPLDVDIKDGGRVVVLNTKNLPLVGEVGFGADLVRIDGHSMCSPGFSCDSALQVTYIVGGSGRVQIVGADGKRVLETHVKAGVLFIVPRFFVVSKIADSDGLSWFSIVTTPDPIFTHLAGRTSVWKALSPEVLQAAFKVDPEVEKAFRSKRTSDAIFFSPSN

SEQ ID NO: 96751 - DNA, 1591 bp, Arabidopsis thaliana
  misc_feature (1)..(1591): Ceres Seq. ID no. 12734633
  misc_feature (1)..(1591): Ortholog of  Ceres SEQ ID NO 13654989 as cited in SEQ ID NO 63117
  misc_feature (1)..(1591): Ortholog of  Ceres SEQ ID NO 13584744 as cited in SEQ ID NO 69137
gtcaccatttttattttcgttgactcggtcggatttggggaagaagaagaacatgaagtgttttcacttcaccaatggcgacaagagaacaacaacaacaatcgaagaaggagtaggaggaggagacagtgttgtttcaagagcttcaagactctcatgggctcgttctctaagcgtagcatcatccaccacttcagacccaactcgccggtccgagtttgactcagactggagtttctcaccggaaagacttacttttcccaagccattaagtcaacgttggatcggtggacttgttcctgagaatgatctaaaggtgtttactttcaaagagctgaaaatagctactaaaggtttcaatagaggtcttttgattggcgaaggagggtttggttgcgtttatagaggtgttgttgatgtttcagactctaatggttttgattcgaagattaatgttgctgttaaacagcttaatcgtcaaggtttacagtgttcaggggcataaggaatggatcaatgaggtgaattttctaggagtagtgaatcatccaaatcttgtgaagttagttgggtattgtgctgatgatgatgaaagagggatgcaaaggcttctagtctatgaacttatgtgtaataagagcttggaggatcatctcgtaggccgagttgtgtcggtatctctaccgtggatgatgaggttgaagattgcgcaagatgctgctcaaggcttagcttatcttcatgaagaaatggattttcagttgatatttcgagatttcaagtcttcaaacatcttgcttgatgagagattcggtgcaaagctctcggattttggattagctaggcaaggacctcctgaaggacttggtcatgtctcaacttcagttgtaggtacggttggttacgcagctcctgagtatgtacaaaccgggaaattgacggcaaagagtgatgtatggagctttggggtagtgttgtatgaactgatcacgggaagacgagcagtggatagaaatcgacctcgaggtgaacagaagcttttagaatgggtgaagccttatgtatcagactcgaagaagttccatctgattgtcgatccacggctcgaaggccagtactactgtatgaagtctgttcaaagagtagctgctttagcaaacaaatgtctaatgaagcaaccgaaatctcggcctaaaatgagcgaagtcgtatcactacttggacgcatcatcgatgaagaagcggaaaacgttcctccgccagttgctgatgaaacagaagagataatcaaagctgagctcaatggagagagtgagcctgagctaaagaagcaaggtagtagttatcgtaagaaggttcttgatcttagggataagatgaacttaaacaagtcgctttcgaagctagactggcgaaactggacaccaggactggtcagaacatggtagtagaaatagtgtcttcactgtatataaacttcttaagcatttgcttatgtatatgtttgaaagcatctttctttgttcttatttcttctttacatgtaacactaacagagcttgaagttgaagacaatgagatcatttatact

SEQ ID NO: 96752 - protein, 343 aa, Arabidopsis thaliana
  peptide (1)..(343): Ceres Seq. ID no. 12734634
MFQTLMVLIRRLMLLLNSLIVKVYSVQGHKEWINEVNFLGVVNHPNLVKLVGYCADDDERGMQRLLVYELMCNKSLEDHLVGRVVSVSLPWMMRLKIAQDAAQGLAYLHEEMDFQLIFRDFKSSNILLDERFGAKLSDFGLARQGPPEGLGHVSTSVVGTVGYAAPEYVQTGKLTAKSDVWSFGVVLYELITGRRAVDRNRPRGEQKLLEWVKPYVSDSKKFHLIVDPRLEGQYYCMKSVQRVAALANKCLMKQPKSRPKMSEVVSLLGRIIDEEAENVPPPVADETEEIIKAELNGESEPELKKQGSSYRKKVLDLRDKMNLNKSLSKLDWRNWTPGLVRTW

SEQ ID NO: 96753 - protein, 338 aa, Arabidopsis thaliana
  peptide (1)..(338): Ceres Seq. ID no. 12734635
MVLIRRLMLLLNSLIVKVYSVQGHKEWINEVNFLGVVNHPNLVKLVGYCADDDERGMQRLLVYELMCNKSLEDHLVGRVVSVSLPWMMRLKIAQDAAQGLAYLHEEMDFQLIFRDFKSSNILLDERFGAKLSDFGLARQGPPEGLGHVSTSVVGTVGYAAPEYVQTGKLTAKSDVWSFGVVLYELITGRRAVDRNRPRGEQKLLEWVKPYVSDSKKFHLIVDPRLEGQYYCMKSVQRVAALANKCLMKQPKSRPKMSEVVSLLGRIIDEEAENVPPPVADETEEIIKAELNGESEPELKKQGSSYRKKVLDLRDKMNLNKSLSKLDWRNWTPGLVRTW

SEQ ID NO: 96754 - protein, 331 aa, Arabidopsis thaliana
  peptide (1)..(331): Ceres Seq. ID no. 12734636
MLLLNSLIVKVYSVQGHKEWINEVNFLGVVNHPNLVKLVGYCADDDERGMQRLLVYELMCNKSLEDHLVGRVVSVSLPWMMRLKIAQDAAQGLAYLHEEMDFQLIFRDFKSSNILLDERFGAKLSDFGLARQGPPEGLGHVSTSVVGTVGYAAPEYVQTGKLTAKSDVWSFGVVLYELITGRRAVDRNRPRGEQKLLEWVKPYVSDSKKFHLIVDPRLEGQYYCMKSVQRVAALANKCLMKQPKSRPKMSEVVSLLGRIIDEEAENVPPPVADETEEIIKAELNGESEPELKKQGSSYRKKVLDLRDKMNLNKSLSKLDWRNWTPGLVRTW

SEQ ID NO: 96755 - DNA, 2163 bp, Arabidopsis thaliana
  misc_feature (1)..(2163): Ceres Seq. ID no. 12734644
  misc_feature (1)..(2163): Ortholog of  Ceres SEQ ID NO 14310024 as cited in SEQ ID NO 20634
  misc_feature (1)..(2163): Ortholog of  Ceres SEQ ID NO 15177184 as cited in SEQ ID NO 58157
atggcaatggagaagtctagctcaaagtacagaacccagttctggtacgtggcaatggcctcattcctcctttggcttgtcttgctttacctttttagttcttccgctaaaaccgttcataaccacgagagattgttccggcaagaaaatatcatcgatctccctgtcgaaaacgtcccacaaaaccacgaacctgatgaagctcctgtcgttaacgttgtctctgaggacatttccgttgataacagctctcttcctgtttctgtcgattctcctccggatgatcagatgtcagaagacaagaaggttgtgactgatctcgttgaagaacttgagaaagaaagggttgaaaatgagaagaagagagttgattcggttgtaattggacggtcatctaaggcaaggagaggacatcgagagccacgaaaggcgagatcttcgggtagattggaggcagagaagaaaagggttcgtcgtaatgatgctgatgagagcaatgcggagaatagtgatgagaatcatcaagcattagacaaagaaccgaactttttcgaggctaagaaagacgtggaaccaaagaaagcgctagttgatgataatgacgacgatcttgagaccaagagaggcaaggagttgccgaatgattcttccagtaatgttgttgaagatgataatgacgacgatcttgagaccaagaaaggcaaggataacatctctaaatctgaaccaaaaactcagagaaattttgtattgaataagaataatacttccaaggcgaaaaacagagtaatttccaagagaaaccaacctagtagagtcggtaaagttatgttacggccaagagaaacgcgaagtaacgatccatgtaaaggaaaatatgtgtatatgcatgaggtgccagctttgtttaacgaagagcttctcaagaactgttggacattgagcaggtggactgatatgtgcgagttaacgtcgaatttcgggttaggccctcgtctaccaaacatggaaggagtttctggttggtatgccacaaaccagttcacattggaagtaatattccacaacaggatgaagcagtacaagtgcttgaccaaagactcgtctttagcttctgcggtgtatgttccttactatccgggtttagacttgatgcggtttttgtggggaccgttccctttcatgagagatgctgccgcgcttgatctcatgaagtggctgagggagagtcaggagtggaagaggatggacggacgagatcattttatggtggctggtcgaaccacttgggactttatgcgtacaccagagaatgaatccgattggggaaataggttaatgatattaccggaagtaagaaacatgacgatgctactaatcgaatcaagcccatggaactaccacgggttcgcggttccttacccgacctatttccacccttcaacatacgcagaaatcatccaatggcagatgagaatgagaagaattaatcgtcgttacttattctcatttgtcggtgccccacgaccaaacctcggtgacagcataagaaccgagatcatggaccaatgcaaagcttcaaaacgaaaatgcaagcttctagaatgcatatcgggttctcaaaaatgctacaaacccgaccaaatcatgaaattctttttgagctcaacgttctgtcttcaaccaccaggtgactcatacacacgtcgctccacttttgactccatcttagcaggttgtataccagttttctttcatccgggatcagcttatgcgcaatacatttggcatttaccgaaagatatcgcgaaatactctgtttttattccggagaaaaatgtgaaagaaggtaaagtgagtatagagaatgttttgagtagaataccgaggacaaaagttttcgctatgagagaacaagtgataagactgataccgaggttaatgtattttcacccgtcgagtaagagtgaagacacgggaaggtttgaagatgcattcgatgtcgcggtggaaggagttttggaaagagtggaggggttaaggaagaggatagaggaaggcaaggaggagatttttgattttccggagcagtattcttggaaatataatgtgtttgggaatgttgagaggcatgagtgggatccttacttcgatcggccttaa

SEQ ID NO: 96756 - protein, 720 aa, Arabidopsis thaliana
  peptide (1)..(720): Ceres Seq. ID no. 12734645
MAMEKSSSKYRTQFWYVAMASFLLWLVLLYLFSSSAKTVHNHERLFRQENIIDLPVENVPQNHEPDEAPVVNVVSEDISVDNSSLPVSVDSPPDDQMSEDKKVVTDLVEELEKERVENEKKRVDSVVIGRSSKARRGHREPRKARSSGRLEAEKKRVRRNDADESNAENSDENHQALDKEPNFFEAKKDVEPKKALVDDNDDDLETKRGKELPNDSSSNVVEDDNDDDLETKKGKDNISKSEPKTQRNFVLNKNNTSKAKNRVISKRNQPSRVGKVMLRPRETRSNDPCKGKYVYMHEVPALFNEELLKNCWTLSRWTDMCELTSNFGLGPRLPNMEGVSGWYATNQFTLEVIFHNRMKQYKCLTKDSSLASAVYVPYYPGLDLMRFLWGPFPFMRDAAALDLMKWLRESQEWKRMDGRDHFMVAGRTTWDFMRTPENESDWGNRLMILPEVRNMTMLLIESSPWNYHGFAVPYPTYFHPSTYAEIIQWQMRMRRINRRYLFSFVGAPRPNLGDSIRTEIMDQCKASKRKCKLLECISGSQKCYKPDQIMKFFLSSTFCLQPPGDSYTRRSTFDSILAGCIPVFFHPGSAYAQYIWHLPKDIAKYSVFIPEKNVKEGKVSIENVLSRIPRTKVFAMREQVIRLIPRLMYFHPSSKSEDTGRFEDAFDVAVEGVLERVEGLRKRIEEGKEEIFDFPEQYSWKYNVFGNVERHEWDPYFDRP

SEQ ID NO: 96757 - protein, 718 aa, Arabidopsis thaliana
  peptide (1)..(718): Ceres Seq. ID no. 12734646
MEKSSSKYRTQFWYVAMASFLLWLVLLYLFSSSAKTVHNHERLFRQENIIDLPVENVPQNHEPDEAPVVNVVSEDISVDNSSLPVSVDSPPDDQMSEDKKVVTDLVEELEKERVENEKKRVDSVVIGRSSKARRGHREPRKARSSGRLEAEKKRVRRNDADESNAENSDENHQALDKEPNFFEAKKDVEPKKALVDDNDDDLETKRGKELPNDSSSNVVEDDNDDDLETKKGKDNISKSEPKTQRNFVLNKNNTSKAKNRVISKRNQPSRVGKVMLRPRETRSNDPCKGKYVYMHEVPALFNEELLKNCWTLSRWTDMCELTSNFGLGPRLPNMEGVSGWYATNQFTLEVIFHNRMKQYKCLTKDSSLASAVYVPYYPGLDLMRFLWGPFPFMRDAAALDLMKWLRESQEWKRMDGRDHFMVAGRTTWDFMRTPENESDWGNRLMILPEVRNMTMLLIESSPWNYHGFAVPYPTYFHPSTYAEIIQWQMRMRRINRRYLFSFVGAPRPNLGDSIRTEIMDQCKASKRKCKLLECISGSQKCYKPDQIMKFFLSSTFCLQPPGDSYTRRSTFDSILAGCIPVFFHPGSAYAQYIWHLPKDIAKYSVFIPEKNVKEGKVSIENVLSRIPRTKVFAMREQVIRLIPRLMYFHPSSKSEDTGRFEDAFDVAVEGVLERVEGLRKRIEEGKEEIFDFPEQYSWKYNVFGNVERHEWDPYFDRP

SEQ ID NO: 96758 - protein, 702 aa, Arabidopsis thaliana
  peptide (1)..(702): Ceres Seq. ID no. 12734647
MASFLLWLVLLYLFSSSAKTVHNHERLFRQENIIDLPVENVPQNHEPDEAPVVNVVSEDISVDNSSLPVSVDSPPDDQMSEDKKVVTDLVEELEKERVENEKKRVDSVVIGRSSKARRGHREPRKARSSGRLEAEKKRVRRNDADESNAENSDENHQALDKEPNFFEAKKDVEPKKALVDDNDDDLETKRGKELPNDSSSNVVEDDNDDDLETKKGKDNISKSEPKTQRNFVLNKNNTSKAKNRVISKRNQPSRVGKVMLRPRETRSNDPCKGKYVYMHEVPALFNEELLKNCWTLSRWTDMCELTSNFGLGPRLPNMEGVSGWYATNQFTLEVIFHNRMKQYKCLTKDSSLASAVYVPYYPGLDLMRFLWGPFPFMRDAAALDLMKWLRESQEWKRMDGRDHFMVAGRTTWDFMRTPENESDWGNRLMILPEVRNMTMLLIESSPWNYHGFAVPYPTYFHPSTYAEIIQWQMRMRRINRRYLFSFVGAPRPNLGDSIRTEIMDQCKASKRKCKLLECISGSQKCYKPDQIMKFFLSSTFCLQPPGDSYTRRSTFDSILAGCIPVFFHPGSAYAQYIWHLPKDIAKYSVFIPEKNVKEGKVSIENVLSRIPRTKVFAMREQVIRLIPRLMYFHPSSKSEDTGRFEDAFDVAVEGVLERVEGLRKRIEEGKEEIFDFPEQYSWKYNVFGNVERHEWDPYFDRP

SEQ ID NO: 96759 - DNA, 879 bp, Arabidopsis thaliana
  misc_feature (1)..(879): Ceres Seq. ID no. 12734652
  misc_feature (1)..(879): Ortholog of  Ceres SEQ ID NO 14307265 as cited in SEQ ID NO 54298
atggatggagatggttctagctttgagcagtttatcatgcctccttccgctctcgatcgtcttgcttctttgcatattgaatacccaatgctgtttcaactgagtaatgtttctgttgagaagacctcacattgtggtgtactagaattcactgcagacgaaggcctagtttacttgccatattggatgatgcaaaacatgtctcttgaagagggagacgttatgcaagttaagaatatcagcttggtaaaagggacttacatcaagctgcagcctcacactcaagatttcttggatatttccaacccaaaagccatcttggagactacgcttaggagttactcttgcttaaccacgggtgatacaattatggttccgtataacaacaagcaatattacatcaatgtggttgaggcaaaaccttcttcagctgtgagtattatcgaaacggattgtgaggttgattttgctcctcctcttgattacaaagaacctgagaagccacagaagttgactccttcaaacaaacgacctctccaagttaaagaagaagaagaacctgcaagcaaagttcccaaattcacgccgttcactggatcaggaaaacgtttagatggaaaagcacaaacacaaactgaaccagaagatacaaaacagcaagaaaagccgactgagaatgggaaagacgatgagaagttgtcagtcactacaccaaggcaaatatcaggaaagctcgtctttggttcaaacagcaaatcagctgcaaaagaaacagcgaaagttgatgatccaaagaacattgtgcaagagagctcaacaaaatccgatgaagctaagttcaaagtgttcacagggaagaaatactcactcaatggttaa

SEQ ID NO: 96760 - protein, 292 aa, Arabidopsis thaliana
  peptide (1)..(292): Ceres Seq. ID no. 12734653
MDGDGSSFEQFIMPPSALDRLASLHIEYPMLFQLSNVSVEKTSHCGVLEFTADEGLVYLPYWMMQNMSLEEGDVMQVKNISLVKGTYIKLQPHTQDFLDISNPKAILETTLRSYSCLTTGDTIMVPYNNKQYYINVVEAKPSSAVSIIETDCEVDFAPPLDYKEPEKPQKLTPSNKRPLQVKEEEEPASKVPKFTPFTGSGKRLDGKAQTQTEPEDTKQQEKPTENGKDDEKLSVTTPRQISGKLVFGSNSKSAAKETAKVDDPKNIVQESSTKSDEAKFKVFTGKKYSLNG

SEQ ID NO: 96761 - protein, 280 aa, Arabidopsis thaliana
  peptide (1)..(280): Ceres Seq. ID no. 12734654
MPPSALDRLASLHIEYPMLFQLSNVSVEKTSHCGVLEFTADEGLVYLPYWMMQNMSLEEGDVMQVKNISLVKGTYIKLQPHTQDFLDISNPKAILETTLRSYSCLTTGDTIMVPYNNKQYYINVVEAKPSSAVSIIETDCEVDFAPPLDYKEPEKPQKLTPSNKRPLQVKEEEEPASKVPKFTPFTGSGKRLDGKAQTQTEPEDTKQQEKPTENGKDDEKLSVTTPRQISGKLVFGSNSKSAAKETAKVDDPKNIVQESSTKSDEAKFKVFTGKKYSLNG

SEQ ID NO: 96762 - protein, 263 aa, Arabidopsis thaliana
  peptide (1)..(263): Ceres Seq. ID no. 12734655
MLFQLSNVSVEKTSHCGVLEFTADEGLVYLPYWMMQNMSLEEGDVMQVKNISLVKGTYIKLQPHTQDFLDISNPKAILETTLRSYSCLTTGDTIMVPYNNKQYYINVVEAKPSSAVSIIETDCEVDFAPPLDYKEPEKPQKLTPSNKRPLQVKEEEEPASKVPKFTPFTGSGKRLDGKAQTQTEPEDTKQQEKPTENGKDDEKLSVTTPRQISGKLVFGSNSKSAAKETAKVDDPKNIVQESSTKSDEAKFKVFTGKKYSLNG

SEQ ID NO: 96763 - DNA, 1449 bp, Arabidopsis thaliana
  misc_feature (1)..(1449): Ceres Seq. ID no. 12734656
  misc_feature (1)..(1449): Ortholog of  Ceres SEQ ID NO 14303627 as cited in SEQ ID NO 62070
  misc_feature (1)..(1449): Ortholog of  Ceres SEQ ID NO 13597546 as cited in SEQ ID NO 65017
  misc_feature (1)..(1449): Ortholog of  Ceres SEQ ID NO 15176077 as cited in SEQ ID NO 66728
  misc_feature (1)..(1449): Ortholog of  Ceres SEQ ID NO 13654353 as cited in SEQ ID NO 68318
atgcaaatctcatcttcatcgtcttcaaatttcttctcttctctttatgctgatgaaccggcactaatcacattaacaattgttgtagtagtagtagtgttactatttaaatggtggttgcactggaaagagcaaagactacggctacctcctggctccatggggttgccttacatcggagagacactccgcctctacacagaaaatcccaattccttcttcgccactcgccaaaacaagtacggggatatattcaagacgcacatattaggatgtccatgtgtgatgataagtagtccagaggcggctcgaatggtgttagtgagcaaagctcacttgttcaagccaacttatcctccaagcaaagagcgtatgattggaccagaggctcttttcttccaccaaggtccataccattctacccttaagcggctggtccagtcttctttcatgccttctgctctcagaccaaccgtctctcacatcgagctccttgtcctccaaaccctttcctcttggacgtcccaaaagtccatcaacaccctcgaatacatgaaacgatatgcattcgatgtggcgatcatgtcagcgttcggggacaaagaggagcccactacgattgatgttattaagcttctctatcaacgtctcgaaaggggttacaactccatgcctctcgacctaccgggcacactttttcataagtccatgaaggcaagaatagaattaagcgaggaactaaggaaagtaatagagaagagaagagagaatgggagagaagaaggaggactattgggagtacttctgggagcaaaggatcaaaaacgcaacggcttaagtgattcacagattgctgacaacatcatcggtgttatattcgccgccaccgacaccaccgcttctgtcttaacttggcttctcaagtacttacacgaccaccccaatctcctccaagaagtctccagggagcaattcagcattcgacagaaaataaaaaaagaaaaccgaagaatctcatgggaagatacaagaaaaatgccactgaccactagggtgatacaagagacactaagagcagcaagtgtactgtcctttacatttagagaagcagtacaagacgtcgaatatgatggctacttgatcccaaagggttggaaggttcttcctcttttccggcgaatccatcactcctccgaattcttccccgatcctgaaaaattcgatccttctagattcgaggtggcaccaaaaccttacacgtacatgccattcggaaatggagtgcactcatgtccaggaagtgagctggctaaacttgagatgcttatcctccttcaccacctcactacttccttcagatgggaagtgattggagatgaagaaggtatacagtatggtcctttccctgtacccaagaagggtttaccaataagagtaaccccgatttaa

SEQ ID NO: 96764 - protein, 482 aa, Arabidopsis thaliana
  peptide (1)..(482): Ceres Seq. ID no. 12734657
MQISSSSSSNFFSSLYADEPALITLTIVVVVVVLLFKWWLHWKEQRLRLPPGSMGLPYIGETLRLYTENPNSFFATRQNKYGDIFKTHILGCPCVMISSPEAARMVLVSKAHLFKPTYPPSKERMIGPEALFFHQGPYHSTLKRLVQSSFMPSALRPTVSHIELLVLQTLSSWTSQKSINTLEYMKRYAFDVAIMSAFGDKEEPTTIDVIKLLYQRLERGYNSMPLDLPGTLFHKSMKARIELSEELRKVIEKRRENGREEGGLLGVLLGAKDQKRNGLSDSQIADNIIGVIFAATDTTASVLTWLLKYLHDHPNLLQEVSREQFSIRQKIKKENRRISWEDTRKMPLTTRVIQETLRAASVLSFTFREAVQDVEYDGYLIPKGWKVLPLFRRIHHSSEFFPDPEKFDPSRFEVAPKPYTYMPFGNGVHSCPGSELAKLEMLILLHHLTTSFRWEVIGDEEGIQYGPFPVPKKGLPIRVTPI

SEQ ID NO: 96765 - protein, 429 aa, Arabidopsis thaliana
  peptide (1)..(429): Ceres Seq. ID no. 12734658
MGLPYIGETLRLYTENPNSFFATRQNKYGDIFKTHILGCPCVMISSPEAARMVLVSKAHLFKPTYPPSKERMIGPEALFFHQGPYHSTLKRLVQSSFMPSALRPTVSHIELLVLQTLSSWTSQKSINTLEYMKRYAFDVAIMSAFGDKEEPTTIDVIKLLYQRLERGYNSMPLDLPGTLFHKSMKARIELSEELRKVIEKRRENGREEGGLLGVLLGAKDQKRNGLSDSQIADNIIGVIFAATDTTASVLTWLLKYLHDHPNLLQEVSREQFSIRQKIKKENRRISWEDTRKMPLTTRVIQETLRAASVLSFTFREAVQDVEYDGYLIPKGWKVLPLFRRIHHSSEFFPDPEKFDPSRFEVAPKPYTYMPFGNGVHSCPGSELAKLEMLILLHHLTTSFRWEVIGDEEGIQYGPFPVPKKGLPIRVTPI

SEQ ID NO: 96766 - protein, 387 aa, Arabidopsis thaliana
  peptide (1)..(387): Ceres Seq. ID no. 12734659
MISSPEAARMVLVSKAHLFKPTYPPSKERMIGPEALFFHQGPYHSTLKRLVQSSFMPSALRPTVSHIELLVLQTLSSWTSQKSINTLEYMKRYAFDVAIMSAFGDKEEPTTIDVIKLLYQRLERGYNSMPLDLPGTLFHKSMKARIELSEELRKVIEKRRENGREEGGLLGVLLGAKDQKRNGLSDSQIADNIIGVIFAATDTTASVLTWLLKYLHDHPNLLQEVSREQFSIRQKIKKENRRISWEDTRKMPLTTRVIQETLRAASVLSFTFREAVQDVEYDGYLIPKGWKVLPLFRRIHHSSEFFPDPEKFDPSRFEVAPKPYTYMPFGNGVHSCPGSELAKLEMLILLHHLTTSFRWEVIGDEEGIQYGPFPVPKKGLPIRVTPI

SEQ ID NO: 96767 - DNA, 807 bp, Arabidopsis thaliana
  misc_feature (1)..(807): Ceres Seq. ID no. 12734671
  misc_feature (1)..(807): Ortholog of  Ceres SEQ ID NO 15170458 as cited in SEQ ID NO 52842
  misc_feature (1)..(807): Ortholog of  Ceres SEQ ID NO 13597679 as cited in SEQ ID NO 65073
atggctaaagcaggagaaaactcgagagacaaatctagatggagccttgaaggcatgaccgctcttgttacaggtggctccaaaggcctcggagaagctgtagtggaggaactagccatgttgggagcaagagttcacacatgtgccagagacgaaactcagcttcaagaacgcttacgtgaatggcaagccaaaggatttgaggtcaccacttctgtctgcgacgtctcttctcgtgagcaacgagagaaactcatggaaaccgtttcctctgtcttccaaggaaaactcaacatcctcgtaaataatgcgggaacgggtataataaagccgagtacagagtatacagcagaagattactcgtttctgatggctacaaatctcgagtccgcttttcatctctcacagatcgcgcaccctttgttgaaagcctctggttccgggagcatcgtgttcatgtcctctgttgctggacttgtgcataccggtgcatcaatctatggagcatctaaaggagctatgaatcagctaggaagaagcttagcatgcgagtgggcaagtgacaacataagggttaactctgtgtgtccatgggtcataacaactcctttaactagctttattttcagtgatgaaaagttaagaaaagcagtggaggataagacaccaatgggacgtgttggagaagcaaatgaagtatcatcgcttgtcgcatttctctgttttccggcagcttcttatattacaggtcagactatctgcgtcgacggaggtgcttcggtgaatggcttctctttcaagccttag

SEQ ID NO: 96768 - protein, 268 aa, Arabidopsis thaliana
  peptide (1)..(268): Ceres Seq. ID no. 12734672
MAKAGENSRDKSRWSLEGMTALVTGGSKGLGEAVVEELAMLGARVHTCARDETQLQERLREWQAKGFEVTTSVCDVSSREQREKLMETVSSVFQGKLNILVNNAGTGIIKPSTEYTAEDYSFLMATNLESAFHLSQIAHPLLKASGSGSIVFMSSVAGLVHTGASIYGASKGAMNQLGRSLACEWASDNIRVNSVCPWVITTPLTSFIFSDEKLRKAVEDKTPMGRVGEANEVSSLVAFLCFPAASYITGQTICVDGGASVNGFSFKP

SEQ ID NO: 96769 - protein, 250 aa, Arabidopsis thaliana
  peptide (1)..(250): Ceres Seq. ID no. 12734673
MTALVTGGSKGLGEAVVEELAMLGARVHTCARDETQLQERLREWQAKGFEVTTSVCDVSSREQREKLMETVSSVFQGKLNILVNNAGTGIIKPSTEYTAEDYSFLMATNLESAFHLSQIAHPLLKASGSGSIVFMSSVAGLVHTGASIYGASKGAMNQLGRSLACEWASDNIRVNSVCPWVITTPLTSFIFSDEKLRKAVEDKTPMGRVGEANEVSSLVAFLCFPAASYITGQTICVDGGASVNGFSFKP

SEQ ID NO: 96770 - protein, 229 aa, Arabidopsis thaliana
  peptide (1)..(229): Ceres Seq. ID no. 12734674
MLGARVHTCARDETQLQERLREWQAKGFEVTTSVCDVSSREQREKLMETVSSVFQGKLNILVNNAGTGIIKPSTEYTAEDYSFLMATNLESAFHLSQIAHPLLKASGSGSIVFMSSVAGLVHTGASIYGASKGAMNQLGRSLACEWASDNIRVNSVCPWVITTPLTSFIFSDEKLRKAVEDKTPMGRVGEANEVSSLVAFLCFPAASYITGQTICVDGGASVNGFSFKP

SEQ ID NO: 96771 - DNA, 976 bp, Arabidopsis thaliana
  misc_feature (1)..(976): Ceres Seq. ID no. 12734683
  misc_feature (1)..(976): Ortholog of  Ceres SEQ ID NO 13597679 as cited in SEQ ID NO 65073
agtaacaagcaagaaaaatggataaaagatggagtctacaaggaatgactgctcttgtaaccggtgcagccagcggtatcggttatgccatagtagaggagttagctggttttggagctagaatccatgtatgcgacatatccgaaactctgcttaatcaaagcttaagagaatgggaaaagaaagggtttcaagtgagtggttcagtctgtgatgtaacctctcgtcccgagagagaaaaactgatgcaaaccgtctcttcgcttttcgatggcaaactaaacattcttgtaaacaatgtgggcgtacttcgcgcaaagccaacaacagaatatgtggcagacgatttcacttttcatatctcaacaaacttggaagctgcttaccatttttgccaactttcacatcctctcttaaagacttcaggctatggaagcatcgtgttcctttcctctgtttctggggttgtgtcaataactgactgtggatcactttatggtctaacaaaaggagctctaaatcagctagctagaaatttggcatgtgaatgggcaaaagacggcataagagccaatgcggttgcacctaatgttgtcaagactgctcagtctcaattctttcttcaagacgtcagtaaaaaggagggattgtttagtagaactccacttggtcggtctggagagccgaatgaagtagcatcactagtggtcttcttgtgtcttcctgcagcttcttatatcacaggtcaaaccatttgtattgatggaggcctcacggtttacggtttctcctctcaaccacaggcttgaaaatggtcttgtcgtttcttgtctgtttaaatattctctccctaataaaatctctcatcacgctatgagtttatgtcccttgtacaaaaacacacaatgtcaaattgttgctctttagtcttgtaagagaaatgagggacttatctatatgaaggatcaattaaact

SEQ ID NO: 96772 - protein, 263 aa, Arabidopsis thaliana
  peptide (1)..(263): Ceres Seq. ID no. 12734684
MDKRWSLQGMTALVTGAASGIGYAIVEELAGFGARIHVCDISETLLNQSLREWEKKGFQVSGSVCDVTSRPEREKLMQTVSSLFDGKLNILVNNVGVLRAKPTTEYVADDFTFHISTNLEAAYHFCQLSHPLLKTSGYGSIVFLSSVSGVVSITDCGSLYGLTKGALNQLARNLACEWAKDGIRANAVAPNVVKTAQSQFFLQDVSKKEGLFSRTPLGRSGEPNEVASLVVFLCLPAASYITGQTICIDGGLTVYGFSSQPQA

SEQ ID NO: 96773 - protein, 254 aa, Arabidopsis thaliana
  peptide (1)..(254): Ceres Seq. ID no. 12734685
MTALVTGAASGIGYAIVEELAGFGARIHVCDISETLLNQSLREWEKKGFQVSGSVCDVTSRPEREKLMQTVSSLFDGKLNILVNNVGVLRAKPTTEYVADDFTFHISTNLEAAYHFCQLSHPLLKTSGYGSIVFLSSVSGVVSITDCGSLYGLTKGALNQLARNLACEWAKDGIRANAVAPNVVKTAQSQFFLQDVSKKEGLFSRTPLGRSGEPNEVASLVVFLCLPAASYITGQTICIDGGLTVYGFSSQPQA

SEQ ID NO: 96774 - protein, 187 aa, Arabidopsis thaliana
  peptide (1)..(187): Ceres Seq. ID no. 12734686
MQTVSSLFDGKLNILVNNVGVLRAKPTTEYVADDFTFHISTNLEAAYHFCQLSHPLLKTSGYGSIVFLSSVSGVVSITDCGSLYGLTKGALNQLARNLACEWAKDGIRANAVAPNVVKTAQSQFFLQDVSKKEGLFSRTPLGRSGEPNEVASLVVFLCLPAASYITGQTICIDGGLTVYGFSSQPQA

SEQ ID NO: 96775 - DNA, 789 bp, Arabidopsis thaliana
  misc_feature (1)..(789): Ceres Seq. ID no. 12734687
  misc_feature (1)..(789): Ortholog of  Ceres SEQ ID NO 13597679 as cited in SEQ ID NO 65073
atggataagagatggagtctacaaggtatgactgctcttgtaaccggtgcagccagtggaatcgggtatgccatagtagaggagttagcaagttttggagctataatccatatatgtgacatctctgaaactcttctcagtcaaagtttaagtgaatgggaaaagaaagggtttcaagtgagtggttcaatctgtgatgtagcttctcggcccgatagagaaaaactgatgcaaaccgtctcctcgctgtttgatggcaaactcaacattcttgtaaacaatgttggtgtaatacgtggaaagccaacaacagaatatgtggcagaggatttctcttaccacatctcaacaaatttggaaccagctttccattttagccagctttcacatcttcttttaaaggcttcaggatttggaagcatcgtctttatgtcctctgctacaggggttgtatcagttcaatgtggatccatttatagtctaactaaaggagctttgaaccagttaactagaaatttagcatgtgaatgggcaaaagacggcataagagccaatgctgttgcacctaatgttgtcaagactcctttgtctcaatcttatctcgaggacgtcggtttcaaggaggcattgttcagtagaactccacttggtcgcgctggagagccgaatgaagttgcatcactagtggtcttcttgtgtctaccagcagcttcttatattactggtcaaaccatttgtattgatggtggtttcactgttaatgccttctcttataagccacaggcttga

SEQ ID NO: 96776 - protein, 262 aa, Arabidopsis thaliana
  peptide (1)..(262): Ceres Seq. ID no. 12734688
MDKRWSLQGMTALVTGAASGIGYAIVEELASFGAIIHICDISETLLSQSLSEWEKKGFQVSGSICDVASRPDREKLMQTVSSLFDGKLNILVNNVGVIRGKPTTEYVAEDFSYHISTNLEPAFHFSQLSHLLLKASGFGSIVFMSSATGVVSVQCGSIYSLTKGALNQLTRNLACEWAKDGIRANAVAPNVVKTPLSQSYLEDVGFKEALFSRTPLGRAGEPNEVASLVVFLCLPAASYITGQTICIDGGFTVNAFSYKPQA

SEQ ID NO: 96777 - protein, 253 aa, Arabidopsis thaliana
  peptide (1)..(253): Ceres Seq. ID no. 12734689
MTALVTGAASGIGYAIVEELASFGAIIHICDISETLLSQSLSEWEKKGFQVSGSICDVASRPDREKLMQTVSSLFDGKLNILVNNVGVIRGKPTTEYVAEDFSYHISTNLEPAFHFSQLSHLLLKASGFGSIVFMSSATGVVSVQCGSIYSLTKGALNQLTRNLACEWAKDGIRANAVAPNVVKTPLSQSYLEDVGFKEALFSRTPLGRAGEPNEVASLVVFLCLPAASYITGQTICIDGGFTVNAFSYKPQA

SEQ ID NO: 96778 - protein, 186 aa, Arabidopsis thaliana
  peptide (1)..(186): Ceres Seq. ID no. 12734690
MQTVSSLFDGKLNILVNNVGVIRGKPTTEYVAEDFSYHISTNLEPAFHFSQLSHLLLKASGFGSIVFMSSATGVVSVQCGSIYSLTKGALNQLTRNLACEWAKDGIRANAVAPNVVKTPLSQSYLEDVGFKEALFSRTPLGRAGEPNEVASLVVFLCLPAASYITGQTICIDGGFTVNAFSYKPQA

SEQ ID NO: 96779 - DNA, 983 bp, Arabidopsis thaliana
  misc_feature (1)..(983): Ceres Seq. ID no. 12734691
  misc_feature (1)..(983): Ortholog of  Ceres SEQ ID NO 13597679 as cited in SEQ ID NO 65073
aacttacaagcaaaatggacaaaagatggagtctcaaaggtatgactgctcttgtgaccggtggagccagtggaatcggttatgccatagtagaagagttggctggttttggagctagaatccatgtatgtgacatctctgaagctaagctcaatcaaagtttaagcgaatgggaaaagaaaggttttcaagtaagtggctcagtttgtgatgtagcctctcgtcccgagagagaagaactgatgcaaaccgtctcctcgcagttcgatggcaaactcaacattcttgtaagcaatgtgggcgtaatccgctcaaagccaacaacagaatataccgaagacgatttcgcttttcatatatcatcaaacgtggaagctgcttaccattttagccagctttcacatcctctcctaaaggcttcaggctatggaagcatcatctttgtttcctctattgcaggggttatatcttttgacgctggatccatttatggtctaacaaaaggagctttgattcagctagctaaaaatttggcatgtgaatgggcaaaagacggcataagagccaacgctgttgcgcctaatgtcatcaatactcctctgtctcaatctgtaataaactaacaactttttcttttctttttttatgtgaatgtaacaacgattttatgtgaattaatctaaccctctcttaattgtgtttctgcaagtatcttgaggacgtcagtttcaagaaggcattgttgagtaggactccacttggtcgtgttggagagccaaatgaagttgcatcactagtggccttcttgtgtctacctgcagcttcttatattactggtcagactatttgtgttgatggaggtctcaccgttaatggcttctcctatcagccagaggtttgagtatggtcatgtctcgttctttttgtttgtctagaattttcagtgttctctcaaataaaatatttcaaactatgagtatatg

SEQ ID NO: 96780 - protein, 206 aa, Arabidopsis thaliana
  peptide (1)..(206): Ceres Seq. ID no. 12734692
LTSKMDKRWSLKGMTALVTGGASGIGYAIVEELAGFGARIHVCDISEAKLNQSLSEWEKKGFQVSGSVCDVASRPEREELMQTVSSQFDGKLNILVSNVGVIRSKPTTEYTEDDFAFHISSNVEAAYHFSQLSHPLLKASGYGSIIFVSSIAGVISFDAGSIYGLTKGALIQLAKNLACEWAKDGIRANAVAPNVINTPLSQSVIN

SEQ ID NO: 96781 - protein, 202 aa, Arabidopsis thaliana
  peptide (1)..(202): Ceres Seq. ID no. 12734693
MDKRWSLKGMTALVTGGASGIGYAIVEELAGFGARIHVCDISEAKLNQSLSEWEKKGFQVSGSVCDVASRPEREELMQTVSSQFDGKLNILVSNVGVIRSKPTTEYTEDDFAFHISSNVEAAYHFSQLSHPLLKASGYGSIIFVSSIAGVISFDAGSIYGLTKGALIQLAKNLACEWAKDGIRANAVAPNVINTPLSQSVIN

SEQ ID NO: 96782 - protein, 193 aa, Arabidopsis thaliana
  peptide (1)..(193): Ceres Seq. ID no. 12734694
MTALVTGGASGIGYAIVEELAGFGARIHVCDISEAKLNQSLSEWEKKGFQVSGSVCDVASRPEREELMQTVSSQFDGKLNILVSNVGVIRSKPTTEYTEDDFAFHISSNVEAAYHFSQLSHPLLKASGYGSIIFVSSIAGVISFDAGSIYGLTKGALIQLAKNLACEWAKDGIRANAVAPNVINTPLSQSVIN

SEQ ID NO: 96783 - DNA, 552 bp, Arabidopsis thaliana
  misc_feature (1)..(552): Ceres Seq. ID no. 12734695
  misc_feature (1)..(552): Ortholog of  Ceres SEQ ID NO 13597679 as cited in SEQ ID NO 65073
atggaaactgtttcctctctcttccaaggaaaactcagcatcctcgtacccaatgtgggaataggtgtactaaagccgacgactgagtgtacagcagaagagttctcatttataatagctacaaatctggagtcaactttccatttctcgcaactcgcgcatcctttattgaaagcctctggttcagggaacattgtgctcatgtcttccgtggctggagttgtaaatttgggtaatacatcaatctatggagcaaccaaaggagccatgaatcagctggcgagaaatttagcatgcgagtgggcgagtgataatataagggctaattctgtttgtccatggttcattacaactccgtcaactaaagatttcctcggtgataaagatgtaaaagaaaaggtggagagtgtgacaccattgagacgtgttggagaggcaaatgaagtatcatcgcttgttgcatttctatgtcttcccgcagcttcttatataacaggtcaaaccatttgcgttgatggaggtttcactattaacggcttctctttgccttaa

SEQ ID NO: 96784 - protein, 183 aa, Arabidopsis thaliana
  peptide (1)..(183): Ceres Seq. ID no. 12734696
METVSSLFQGKLSILVPNVGIGVLKPTTECTAEEFSFIIATNLESTFHFSQLAHPLLKASGSGNIVLMSSVAGVVNLGNTSIYGATKGAMNQLARNLACEWASDNIRANSVCPWFITTPSTKDFLGDKDVKEKVESVTPLRRVGEANEVSSLVAFLCLPAASYITGQTICVDGGFTINGFSLP

SEQ ID NO: 96785 - protein, 116 aa, Arabidopsis thaliana
  peptide (1)..(116): Ceres Seq. ID no. 12734697
MSSVAGVVNLGNTSIYGATKGAMNQLARNLACEWASDNIRANSVCPWFITTPSTKDFLGDKDVKEKVESVTPLRRVGEANEVSSLVAFLCLPAASYITGQTICVDGGFTINGFSLP

SEQ ID NO: 96786 - protein, 94 aa, Arabidopsis thaliana
  peptide (1)..(94): Ceres Seq. ID no. 12734698
MNQLARNLACEWASDNIRANSVCPWFITTPSTKDFLGDKDVKEKVESVTPLRRVGEANEVSSLVAFLCLPAASYITGQTICVDGGFTINGFSLP

SEQ ID NO: 96787 - DNA, 1089 bp, Arabidopsis thaliana
  misc_feature (1)..(1089): Ceres Seq. ID no. 12734699
  misc_feature (1)..(1089): Ortholog of  Ceres SEQ ID NO 14302836 as cited in SEQ ID NO 65013
atggccgagatatgttacgaagtagtgaccgacgcatgtccgtcgtcggtttatgaatcaacgccggcacattcacggcggaggccgagattccaaacggtgatgcatgaagattgggagaagaattgtaagcgtagtaaacaggaggctttagctacgagatactcttcaattcctcgaagctctcgggaggatttctctgaccaaaatgtcgacgtatccagtccaagatacggtgtttcttcggtgtgcggtagaagaagagagatggaagatgcggtggcaattcatccttcattttcttctccgaagaattcggaatttcctcaacactactttggtgtgtatgacggccatggttgttcccacgttgcagcaaggtgtagagagaggcttcacaagctggtgcaagaagaactaagttcagatatggaagatgaagaagaatggaaaacgacgatggagcgtagcttcacacgcatggataaggaagttgtatcgtggggtgattccgtcgtgactgcaaattgcaagtgtgatctacaaacaccggcttgtgattccgtcggatcaaccgctgttgtctcagtcattacgccagataagatcgttgtcgccaattgtggcgattccagagcagttctctgccgcaatgggaaaccagtccctttatcaaccgatcacaagcctgatcggccagacgaattggatcgaatcgaaggagctggtggacgagtcatatattgggactgtccaagagttctcggagtcttagcaatgtcacgagcaataggagacaactatttgaaaccttacgtgagttgcgagccggaggtaaccataacggacaggagagacgatgactgcctcatactagctagtgatggtttatgggatgttgtgtcaaacgagaccgcctgctctgtagcgcgtatgtgtctccgtggtggtgggagaagacaagataatgaggatccggcgatttcggacaaggcttgtacggaagcgtcagtattgctaacaaagctggcgttggcaaggaacagtagtgacaacgtcagtgtcgttgtgattgatctcagaagataa

SEQ ID NO: 96788 - protein, 362 aa, Arabidopsis thaliana
  peptide (1)..(362): Ceres Seq. ID no. 12734700
MAEICYEVVTDACPSSVYESTPAHSRRRPRFQTVMHEDWEKNCKRSKQEALATRYSSIPRSSREDFSDQNVDVSSPRYGVSSVCGRRREMEDAVAIHPSFSSPKNSEFPQHYFGVYDGHGCSHVAARCRERLHKLVQEELSSDMEDEEEWKTTMERSFTRMDKEVVSWGDSVVTANCKCDLQTPACDSVGSTAVVSVITPDKIVVANCGDSRAVLCRNGKPVPLSTDHKPDRPDELDRIEGAGGRVIYWDCPRVLGVLAMSRAIGDNYLKPYVSCEPEVTITDRRDDDCLILASDGLWDVVSNETACSVARMCLRGGGRRQDNEDPAISDKACTEASVLLTKLALARNSSDNVSVVVIDLRR

SEQ ID NO: 96789 - protein, 328 aa, Arabidopsis thaliana
  peptide (1)..(328): Ceres Seq. ID no. 12734701
MHEDWEKNCKRSKQEALATRYSSIPRSSREDFSDQNVDVSSPRYGVSSVCGRRREMEDAVAIHPSFSSPKNSEFPQHYFGVYDGHGCSHVAARCRERLHKLVQEELSSDMEDEEEWKTTMERSFTRMDKEVVSWGDSVVTANCKCDLQTPACDSVGSTAVVSVITPDKIVVANCGDSRAVLCRNGKPVPLSTDHKPDRPDELDRIEGAGGRVIYWDCPRVLGVLAMSRAIGDNYLKPYVSCEPEVTITDRRDDDCLILASDGLWDVVSNETACSVARMCLRGGGRRQDNEDPAISDKACTEASVLLTKLALARNSSDNVSVVVIDLRR

SEQ ID NO: 96790 - protein, 273 aa, Arabidopsis thaliana
  peptide (1)..(273): Ceres Seq. ID no. 12734702
MEDAVAIHPSFSSPKNSEFPQHYFGVYDGHGCSHVAARCRERLHKLVQEELSSDMEDEEEWKTTMERSFTRMDKEVVSWGDSVVTANCKCDLQTPACDSVGSTAVVSVITPDKIVVANCGDSRAVLCRNGKPVPLSTDHKPDRPDELDRIEGAGGRVIYWDCPRVLGVLAMSRAIGDNYLKPYVSCEPEVTITDRRDDDCLILASDGLWDVVSNETACSVARMCLRGGGRRQDNEDPAISDKACTEASVLLTKLALARNSSDNVSVVVIDLRR

SEQ ID NO: 96791 - DNA, 847 bp, Arabidopsis thaliana
  misc_feature (1)..(847): Ceres Seq. ID no. 12734714
  misc_feature (1)..(847): Ortholog of  Ceres SEQ ID NO 15172729 as cited in SEQ ID NO 56037
  misc_feature (1)..(847): Ortholog of  Ceres SEQ ID NO 12615635 as cited in SEQ ID NO 63133
  misc_feature (1)..(847): Ortholog of  Ceres SEQ ID NO 13654441 as cited in SEQ ID NO 67814
  misc_feature (1)..(847): Ortholog of  Ceres SEQ ID NO 13596128 as cited in SEQ ID NO 67831
  misc_feature (1)..(847): Ortholog of  Ceres SEQ ID NO 12585194 as cited in SEQ ID NO 68878
  misc_feature (1)..(847): Ortholog of  Ceres SEQ ID NO 12589186 as cited in SEQ ID NO 0
aaaccacataaactagtcaaagaagaatagatgagttacattataaaaaagttcaagtgagagaaagagaggtccaatggcggagaaagaagaggatgtgaagcttctaggtttttgggcaagcccttttactcgtagagttgagatggctttcaagctcaaaggcgtgccttacgagtacttggagcaagatatagtgaacaagagccctttgcttctccagataaatccggtttacaagaaggttccggttcttgtctacaaagggaaaatattatccgagtcacatgtgatcctcgaatacatcgaccaaatatggaagaacaatccaattcttcctcaagatccttacgagaaagccatggctttattctgggccaagttcgttgatgaacaggttggaccagtagcttttatgtctgtggcaaaagcagagaagggagtagaggttgcaatcaaggaggctcaagaactctttatgtttcttgagaaggaagtcactggaaaagatttcttcggtggcaaaacaattggatttttggacttggtcgcaggaagtatgatcccgttttgtcttgctcgaggttgggaaggtatgggaattgatatgattccagaggaaaagtttccagagctaaacagatggatcaaaaatttgaaagaaattgagatcgtgagagaatgtattcctcctagagaggaacaaattgagcatatgaagaaagttgtagaaagaatcaaatcagcctaagagacaacaatgatactcttcgatcagtagatgttaactatatgtttgtgtaatcttgttataatagtttgtatgaacaataaatgaaacatttgt

SEQ ID NO: 96792 - protein, 224 aa, Arabidopsis thaliana
  peptide (1)..(224): Ceres Seq. ID no. 12734715
MAEKEEDVKLLGFWASPFTRRVEMAFKLKGVPYEYLEQDIVNKSPLLLQINPVYKKVPVLVYKGKILSESHVILEYIDQIWKNNPILPQDPYEKAMALFWAKFVDEQVGPVAFMSVAKAEKGVEVAIKEAQELFMFLEKEVTGKDFFGGKTIGFLDLVAGSMIPFCLARGWEGMGIDMIPEEKFPELNRWIKNLKEIEIVRECIPPREEQIEHMKKVVERIKSA

SEQ ID NO: 96793 - protein, 201 aa, Arabidopsis thaliana
  peptide (1)..(201): Ceres Seq. ID no. 12734716
MAFKLKGVPYEYLEQDIVNKSPLLLQINPVYKKVPVLVYKGKILSESHVILEYIDQIWKNNPILPQDPYEKAMALFWAKFVDEQVGPVAFMSVAKAEKGVEVAIKEAQELFMFLEKEVTGKDFFGGKTIGFLDLVAGSMIPFCLARGWEGMGIDMIPEEKFPELNRWIKNLKEIEIVRECIPPREEQIEHMKKVVERIKSA

SEQ ID NO: 96794 - protein, 129 aa, Arabidopsis thaliana
  peptide (1)..(129): Ceres Seq. ID no. 12734717
MALFWAKFVDEQVGPVAFMSVAKAEKGVEVAIKEAQELFMFLEKEVTGKDFFGGKTIGFLDLVAGSMIPFCLARGWEGMGIDMIPEEKFPELNRWIKNLKEIEIVRECIPPREEQIEHMKKVVERIKSA

SEQ ID NO: 96795 - DNA, 951 bp, Arabidopsis thaliana
  misc_feature (1)..(951): Ceres Seq. ID no. 12734718
  misc_feature (1)..(951): Ortholog of  Ceres SEQ ID NO 12587429 as cited in SEQ ID NO 63113
  misc_feature (1)..(951): Ortholog of  Ceres SEQ ID NO 13654441 as cited in SEQ ID NO 67814
  misc_feature (1)..(951): Ortholog of  Ceres SEQ ID NO 13596128 as cited in SEQ ID NO 67831
  misc_feature (1)..(951): Ortholog of  Ceres SEQ ID NO 12585194 as cited in SEQ ID NO 68878
  misc_feature (1)..(951): Ortholog of  Ceres SEQ ID NO 12589186 as cited in SEQ ID NO 0
atcttcaagataagcttgagagttgagactacaaaaaaaagcacaatattgtttttaaagtgacagagagagtcagagagagagatctaatggcgaagaaagaagagagtgtgaagcttctagggttttggataagcccttttagtcgtagagtcgagatggctctcaaacttaaaggcgtaccatacgagtacttggaagaagacttacccaaaaagagcactttacttcttgaactaaatccggttcacaagaaggttccggttcttgttcacaatgataaattattatccgagtcacatgtgatcctcgaatacatcgaccaaacttggaataacaatccaattctacctcacgatccctacgagaaggccatggttcggttctgggccaagttcgttgatgagcagatcctaccagttggcttcatgcccctagtaaaagcagagaagggaatagatgttgctattgaggagattcgagaaatgcttatgtttcttgagaaggaagtcactggaaaagatttctttggtggcaagacgatcggattcttggacatggttgcgggaagtatgatcccgttttgtcttgctcgggcttgggaatgtttggggattgatatgactccagaggatacgtttccagaattaaacagatggatcaagaacttgaatgaagttgagatcgtgagggaatgtatacctccaaaagagaaacatattgagcgtatgaagaaaattatagagagagctaagtctacgttctaaattaatgataacttcataactctgtgttctaaaataatgactatgtgcagcttgtatcgttttgttattgaaaaatttgaaacaaagaatgaatgtagctgcattggtagtggaaatcaattaatgggtgcaaagtgaaatgttgaaagctacctattataactataataacaaatattgattt

SEQ ID NO: 96796 - protein, 225 aa, Arabidopsis thaliana
  peptide (1)..(225): Ceres Seq. ID no. 12734719
MAKKEESVKLLGFWISPFSRRVEMALKLKGVPYEYLEEDLPKKSTLLLELNPVHKKVPVLVHNDKLLSESHVILEYIDQTWNNNPILPHDPYEKAMVRFWAKFVDEQILPVGFMPLVKAEKGIDVAIEEIREMLMFLEKEVTGKDFFGGKTIGFLDMVAGSMIPFCLARAWECLGIDMTPEDTFPELNRWIKNLNEVEIVRECIPPKEKHIERMKKIIERAKSTF

SEQ ID NO: 96797 - protein, 202 aa, Arabidopsis thaliana
  peptide (1)..(202): Ceres Seq. ID no. 12734720
MALKLKGVPYEYLEEDLPKKSTLLLELNPVHKKVPVLVHNDKLLSESHVILEYIDQTWNNNPILPHDPYEKAMVRFWAKFVDEQILPVGFMPLVKAEKGIDVAIEEIREMLMFLEKEVTGKDFFGGKTIGFLDMVAGSMIPFCLARAWECLGIDMTPEDTFPELNRWIKNLNEVEIVRECIPPKEKHIERMKKIIERAKSTF

SEQ ID NO: 96798 - protein, 130 aa, Arabidopsis thaliana
  peptide (1)..(130): Ceres Seq. ID no. 12734721
MVRFWAKFVDEQILPVGFMPLVKAEKGIDVAIEEIREMLMFLEKEVTGKDFFGGKTIGFLDMVAGSMIPFCLARAWECLGIDMTPEDTFPELNRWIKNLNEVEIVRECIPPKEKHIERMKKIIERAKSTF

SEQ ID NO: 96799 - DNA, 2215 bp, Arabidopsis thaliana
  misc_feature (1)..(2215): Ceres Seq. ID no. 12734728
  misc_feature (1)..(2215): Ortholog of  Ceres SEQ ID NO 13593946 as cited in SEQ ID NO 59535
gactcactcagtgtgcgcgattcatttcaaaaacgagccagcctcttcttccttcgtctactagatcagatccaaagcttcctcttccagctatggctgcttcagtacactgtaccttgatgtccgtcgtatgcaacaacaagaatcactctgctcggccgaaacttccaaactcgtctttgttacctggattcgatgttgttgttcaagctgctgctactcgattcaagaaggaaacaacaaccacaagagccactttgacgtttgatccaccaaccactaattctgagagagctaagcagagaaaacacaccattgatccttcttctcctgattttcaaccaattccatcttttgaagaatgctttcctaagagcactaaagaacacaaggaagttgtccatgaagaatctggtcatgttcttaaagttccctttcgtcgtgttcatttgtctggtggtgagccagcttttgataattatgacactagtggtcctcaaaatgttaatgcacacattgggcttgctaagctaaggaaggagtggattgatcgtcgggagaagctaggaacaccaagatacactcaaatgtactacgctaagcaagggatcataactgaggaaatgctctactgtgctactagggagaagctagaccctgagtttgtaagatcagaagttgcacgaggacgggcgattatcccttccaacaagaagcatttggagctggaaccgatgattgttggtagaaagttcttggtcaaggtcaatgcgaatatcggaaactctgctgttgccagctctattgaagaggaagtctacaaggttcagtgggcaaccatgtggggagctgatacaatcatggatctctcaactggtcgtcacatccatgagacacgtgagtggatcctaaggaattcagctgtgcctgttggtacggtgcctatttatcaagcacttgagaaagtggatggaattgctgagaatcttaactgggaggttttcagagagactctgattgaacaagctgagcaaggtgtagactatttcacaatccatgctggagttttgctgcgttacattcccttaactgccaagcgtttgaccgggatcgtttcgcgtggaggatccattcatgctaaatggtgcttagcttaccacaaggagaactttgcttacgagcactgggatgacattctagacatctgtaaccagtatgatgtggctctttccattggagatggtctgagacctggctccatttatgatgctaacgacactgctcagtttgcagagctccttactcaaggtgaactaactcgccgagcgtgggaaaaagatgtgcaggtgatgaatgaagggccagggcatgtcccaatgcacaagattccagagaatatgcagaagcagttggagtggtgtaacgaggcaccattctacacccttggtcctttgactactgatattgcccctggatatgatcacattacctctgccattggagctgccaatattggagccttgggtacagctcttctttgctatgtaacaccaaaagaacaccttgggctaccaaacagggacgatgtgaaggccggggttatagcatacaagatcgccgctcatgcagctgatctagccaaacagcatccacatgctcaggcatgggacgatgcgctgagcaaagcgcggtttgagtttagatggatggaccaatttgctctgtcgttggaccccatgactgctatgtctttccatgatgaaactcttccagctgatggagccaaggttgcacacttttgctccatgtgtggaccaaaattctgctctatgaagataacagaagacatccgaaagtatgcagaggagaatggttatggcagtgctgaagaagcaatcagacaaggaatggatgctatgagtgaagaattcaacatcgcaaagaaaaccattagcggagaacagcacggtgaagtaggtggagaaatatatttgccagagagctatgtcaaagctgctcagaaataaaaggcaaatgttttaaacaagaccttgcttacccaagtcttggtgcctgttggactatacctggataaaggcacaaactgttggtaagcttagtagtctctatgtcatgttacttttagaactatctatgttgtctgttcatttgagtcagagtcagcaataaagacaatctaagttgatgtttcaat

SEQ ID NO: 96800 - protein, 674 aa, Arabidopsis thaliana
  peptide (1)..(674): Ceres Seq. ID no. 12734729
LTQCARFISKTSQPLLPSSTRSDPKLPLPAMAASVHCTLMSVVCNNKNHSARPKLPNSSLLPGFDVVVQAAATRFKKETTTTRATLTFDPPTTNSERAKQRKHTIDPSSPDFQPIPSFEECFPKSTKEHKEVVHEESGHVLKVPFRRVHLSGGEPAFDNYDTSGPQNVNAHIGLAKLRKEWIDRREKLGTPRYTQMYYAKQGIITEEMLYCATREKLDPEFVRSEVARGRAIIPSNKKHLELEPMIVGRKFLVKVNANIGNSAVASSIEEEVYKVQWATMWGADTIMDLSTGRHIHETREWILRNSAVPVGTVPIYQALEKVDGIAENLNWEVFRETLIEQAEQGVDYFTIHAGVLLRYIPLTAKRLTGIVSRGGSIHAKWCLAYHKENFAYEHWDDILDICNQYDVALSIGDGLRPGSIYDANDTAQFAELLTQGELTRRAWEKDVQVMNEGPGHVPMHKIPENMQKQLEWCNEAPFYTLGPLTTDIAPGYDHITSAIGAANIGALGTALLCYVTPKEHLGLPNRDDVKAGVIAYKIAAHAADLAKQHPHAQAWDDALSKARFEFRWMDQFALSLDPMTAMSFHDETLPADGAKVAHFCSMCGPKFCSMKITEDIRKYAEENGYGSAEEAIRQGMDAMSEEFNIAKKTISGEQHGEVGGEIYLPESYVKAAQK

SEQ ID NO: 96801 - protein, 644 aa, Arabidopsis thaliana
  peptide (1)..(644): Ceres Seq. ID no. 12734730
MAASVHCTLMSVVCNNKNHSARPKLPNSSLLPGFDVVVQAAATRFKKETTTTRATLTFDPPTTNSERAKQRKHTIDPSSPDFQPIPSFEECFPKSTKEHKEVVHEESGHVLKVPFRRVHLSGGEPAFDNYDTSGPQNVNAHIGLAKLRKEWIDRREKLGTPRYTQMYYAKQGIITEEMLYCATREKLDPEFVRSEVARGRAIIPSNKKHLELEPMIVGRKFLVKVNANIGNSAVASSIEEEVYKVQWATMWGADTIMDLSTGRHIHETREWILRNSAVPVGTVPIYQALEKVDGIAENLNWEVFRETLIEQAEQGVDYFTIHAGVLLRYIPLTAKRLTGIVSRGGSIHAKWCLAYHKENFAYEHWDDILDICNQYDVALSIGDGLRPGSIYDANDTAQFAELLTQGELTRRAWEKDVQVMNEGPGHVPMHKIPENMQKQLEWCNEAPFYTLGPLTTDIAPGYDHITSAIGAANIGALGTALLCYVTPKEHLGLPNRDDVKAGVIAYKIAAHAADLAKQHPHAQAWDDALSKARFEFRWMDQFALSLDPMTAMSFHDETLPADGAKVAHFCSMCGPKFCSMKITEDIRKYAEENGYGSAEEAIRQGMDAMSEEFNIAKKTISGEQHGEVGGEIYLPESYVKAAQK

SEQ ID NO: 96802 - protein, 635 aa, Arabidopsis thaliana
  peptide (1)..(635): Ceres Seq. ID no. 12734731
MSVVCNNKNHSARPKLPNSSLLPGFDVVVQAAATRFKKETTTTRATLTFDPPTTNSERAKQRKHTIDPSSPDFQPIPSFEECFPKSTKEHKEVVHEESGHVLKVPFRRVHLSGGEPAFDNYDTSGPQNVNAHIGLAKLRKEWIDRREKLGTPRYTQMYYAKQGIITEEMLYCATREKLDPEFVRSEVARGRAIIPSNKKHLELEPMIVGRKFLVKVNANIGNSAVASSIEEEVYKVQWATMWGADTIMDLSTGRHIHETREWILRNSAVPVGTVPIYQALEKVDGIAENLNWEVFRETLIEQAEQGVDYFTIHAGVLLRYIPLTAKRLTGIVSRGGSIHAKWCLAYHKENFAYEHWDDILDICNQYDVALSIGDGLRPGSIYDANDTAQFAELLTQGELTRRAWEKDVQVMNEGPGHVPMHKIPENMQKQLEWCNEAPFYTLGPLTTDIAPGYDHITSAIGAANIGALGTALLCYVTPKEHLGLPNRDDVKAGVIAYKIAAHAADLAKQHPHAQAWDDALSKARFEFRWMDQFALSLDPMTAMSFHDETLPADGAKVAHFCSMCGPKFCSMKITEDIRKYAEENGYGSAEEAIRQGMDAMSEEFNIAKKTISGEQHGEVGGEIYLPESYVKAAQK

SEQ ID NO: 96803 - DNA, 1446 bp, Arabidopsis thaliana
  misc_feature (1)..(1446): Ceres Seq. ID no. 12734740
  misc_feature (1)..(1446): Ortholog of  Ceres SEQ ID NO 13597574 as cited in SEQ ID NO 64677
  misc_feature (1)..(1446): Ortholog of  Ceres SEQ ID NO 13597843 as cited in SEQ ID NO 64850
  misc_feature (1)..(1446): Ortholog of  Ceres SEQ ID NO 13597678 as cited in SEQ ID NO 65375
  misc_feature (1)..(1446): Ortholog of  Ceres SEQ ID NO 13596180 as cited in SEQ ID NO 67941
  misc_feature (1)..(1446): Ortholog of  Ceres SEQ ID NO 13591190 as cited in SEQ ID NO 68044
  misc_feature (1)..(1446): Ortholog of  Ceres SEQ ID NO 13595961 as cited in SEQ ID NO 68223
atggggaagcaagaagatgcagagctcgtcatcatacctttccctttctccggacacattctcgcaacaatcgaactcgccaaacgtctcataagtcaagacaatcctcggatccacaccatcaccatcctctattggggattaccttttattcctcaagctgacacaatcgctttcctccgatccctagtcaaaaatgagcctcgtatccgtctcgttacgttgcccgaagtccaagaccctccaccaatggaactctttgtggaatttgccgaatcttacattcttgaatacgtcaagaaaatggttcccatcatcagagaagctctctccactctcttgtcttcccgcgatgaatcgggttcagttcgtgtggctggattggttcttgacttcttctgcgtccctatgatcgatgtaggaaacgagtttaatctcccttcttacattttcttgacgtgtagcgcagggttcttgggtatgatgaagtatcttccagagagacaccgcgaaatcaaatcggaattcaaccggagcttcaacgaggagttgaatctcattcctggttatgtcaactctgttcctactaaggttttgccgtcaggtctattcatgaaagagacctacgagccttgggtcgaactagcagagaggtttcctgaagctaagggtattttggttaattcatacacagctctcgagccaaacggttttaaatatttcgatcgttgtccggataactacccaaccatttacccaatcgggccgatattatgctccaacgaccgtccgaatttggactcatcggaacgagatcggatcataacttggctagatgaccaacccgagtcatcggtcgtgttcctctgtttcgggagcttgaagaatctcagcgctactcagatcaacgagatagctcaagccttagagatcgttgactgcaaattcatctggtcgtttcgaaccaacccgaaggagtacgcgagcccttacgaggctctaccacacgggttcatggaccgggtcatggatcaaggcattgtttgtggttgggctcctcaagttgaaatcctagcccataaagctgtgggaggattcgtatctcattgtggttggaactcgatattggagagtttgggtttcggcgttccaatcgccacgtggccgatgtacgcggaacaacaactaaacgcgttcacgatggtgaaggagcttggtttagccttggagatgcggttggattacgtgtcggaagatggagatatagtgaaagctgatgagatcgcaggaaccgttagatctttaatggacggtgtggatgtgccgaagagtaaagtgaaggagattgctgaggcgggaaaagaagctgtggacggtggatcttcgtttcttgcggttaaaagattcatcggtgacttgatcgacggcgtttctataagtaagtag

SEQ ID NO: 96804 - protein, 481 aa, Arabidopsis thaliana
  peptide (1)..(481): Ceres Seq. ID no. 12734741
MGKQEDAELVIIPFPFSGHILATIELAKRLISQDNPRIHTITILYWGLPFIPQADTIAFLRSLVKNEPRIRLVTLPEVQDPPPMELFVEFAESYILEYVKKMVPIIREALSTLLSSRDESGSVRVAGLVLDFFCVPMIDVGNEFNLPSYIFLTCSAGFLGMMKYLPERHREIKSEFNRSFNEELNLIPGYVNSVPTKVLPSGLFMKETYEPWVELAERFPEAKGILVNSYTALEPNGFKYFDRCPDNYPTIYPIGPILCSNDRPNLDSSERDRIITWLDDQPESSVVFLCFGSLKNLSATQINEIAQALEIVDCKFIWSFRTNPKEYASPYEALPHGFMDRVMDQGIVCGWAPQVEILAHKAVGGFVSHCGWNSILESLGFGVPIATWPMYAEQQLNAFTMVKELGLALEMRLDYVSEDGDIVKADEIAGTVRSLMDGVDVPKSKVKEIAEAGKEAVDGGSSFLAVKRFIGDLIDGVSISK

SEQ ID NO: 96805 - protein, 398 aa, Arabidopsis thaliana
  peptide (1)..(398): Ceres Seq. ID no. 12734742
MELFVEFAESYILEYVKKMVPIIREALSTLLSSRDESGSVRVAGLVLDFFCVPMIDVGNEFNLPSYIFLTCSAGFLGMMKYLPERHREIKSEFNRSFNEELNLIPGYVNSVPTKVLPSGLFMKETYEPWVELAERFPEAKGILVNSYTALEPNGFKYFDRCPDNYPTIYPIGPILCSNDRPNLDSSERDRIITWLDDQPESSVVFLCFGSLKNLSATQINEIAQALEIVDCKFIWSFRTNPKEYASPYEALPHGFMDRVMDQGIVCGWAPQVEILAHKAVGGFVSHCGWNSILESLGFGVPIATWPMYAEQQLNAFTMVKELGLALEMRLDYVSEDGDIVKADEIAGTVRSLMDGVDVPKSKVKEIAEAGKEAVDGGSSFLAVKRFIGDLIDGVSISK

SEQ ID NO: 96806 - protein, 380 aa, Arabidopsis thaliana
  peptide (1)..(380): Ceres Seq. ID no. 12734743
MVPIIREALSTLLSSRDESGSVRVAGLVLDFFCVPMIDVGNEFNLPSYIFLTCSAGFLGMMKYLPERHREIKSEFNRSFNEELNLIPGYVNSVPTKVLPSGLFMKETYEPWVELAERFPEAKGILVNSYTALEPNGFKYFDRCPDNYPTIYPIGPILCSNDRPNLDSSERDRIITWLDDQPESSVVFLCFGSLKNLSATQINEIAQALEIVDCKFIWSFRTNPKEYASPYEALPHGFMDRVMDQGIVCGWAPQVEILAHKAVGGFVSHCGWNSILESLGFGVPIATWPMYAEQQLNAFTMVKELGLALEMRLDYVSEDGDIVKADEIAGTVRSLMDGVDVPKSKVKEIAEAGKEAVDGGSSFLAVKRFIGDLIDGVSISK

SEQ ID NO: 96807 - DNA, 2217 bp, Arabidopsis thaliana
  misc_feature (1)..(2217): Ceres Seq. ID no. 12734744
  misc_feature (1)..(2217): Ortholog of  Ceres SEQ ID NO 12586556 as cited in SEQ ID NO 64667
  misc_feature (1)..(2217): Ortholog of  Ceres SEQ ID NO 13660894 as cited in SEQ ID NO 67475
atggctatcttctccacagcacaacctctctctctgccacgtcatccaaacttctccaatccgaatcaaccaactaccaataacgaacgctcccgccacatttctctcatcgaacgatgtgtgtctctccgacaactaaagcaaacccatggtcacatgatccgtaccggtacgttttccgatccttactcagctagcaagctattcgcaatggctgcgctctcttccttcgctagtctcgagtatgcacgcaaggtgtttgatgaaattcctaaaccaaattctttcgcttggaatactcttatccgtgcttacgcttctggaccagaccctgttcttagcatctgggctttcttggatatggtttcggagagtcagtgttatccaaataagtacactttccctttcctcattaaggcagctgcagaagtttcatctttgtctttgggtcaatctcttcatgggatggctgttaagtcagcagttggaagtgatgttttcgttgctaattctttgatacattgttatttctcttgtggggatttagattcagcttgtaaagtgtttactacgatcaaagaaaaggatgttgtttcatggaattcgatgattaatgggtttgtgcaaaagggttctccagataaagctttggagctttttaagaagatggagtcagaggacgttaaggcaagtcatgtgacaatggttggtgtcttgtctgcttgtgcaaagatacggaatttagagtttgggaggcaggtttgttcttatatcgaagaaaacagggttaacgtgaacttgacattggctaatgcgatgcttgatatgtacacaaagtgtggaagcatagaagatgctaaaagactgtttgatgcaatggaggagaaagataacgttacatggacaacaatgcttgatgggtatgcaatttcagaagactacgaagcagctagagaggttcttaattctatgcctcagaaagatattgttgcttggaatgctcttatatctgcttatgagcagaatggtaaacctaatgaggcattaatagtgttccatgagctgcaacttcagaagaacatgaagctgaaccagatcacactggtaagtactttatcagcttgtgctcaggtaggggcactggaattaggtagatggatccatagctacatcaaaaagcacggtattaggatgaattttcatgttacaagcgcactgattcatatgtattcgaaatgcggagatcttgaaaagtcccgtgaagtgtttaattctgtagagaagagagatgtgtttgtgtggagtgcaatgattggtggcttggcaatgcacggatgtggaaatgaagctgttgatatgttttataaaatgcaagaggctaatgtaaagcctaatggtgtgaccttcaccaatgtcttctgtgcttgtagccataccggtttggtggatgaagctgagtctttattccaccagatggaatcgaattatggtattgtccctgaggaaaagcattatgcttgcatagttgatgttctcggccgctcgggttatttggaaaaagcagtgaagttcatagaggcgatgccgattcctccaagcacttctgtctggggagcgcttctaggagcttgtaagatccatgccaatctgaatcttgctgaaatggcttgtacccgtttgcttgaactggaacctaggaatgatggcgcgcatgtgctcctatcaaacatatatgctaaattgggtaagtgggaaaacgtttctgagctgagaaagcatatgagagtcactggacttaagaaagaaccaggatgcagctcaattgaaatcgatggcatgattcatgagtttctctctggagataacgctcatcctatgtctgagaaggtttacgggaagttacacgaggttatggagaaactgaaatcaaatggttatgagccagagatatctcaggttctgcagatcatcgaggaagaagaaatgaaggaacaatctctaaatctccacagcgagaagctggctatttgttatggactgatatcaacagaggctccaaaggtgatccgagttattaagaatctaagggtgtgtggagattgtcattcagtggctaaactaatatctcagctttatgatagagagattatagtgagggaccggtataggtttcatcatttcagaaatgggcagtgttcctgtaacgatttctggtga

SEQ ID NO: 96808 - protein, 738 aa, Arabidopsis thaliana
  peptide (1)..(738): Ceres Seq. ID no. 12734745
MAIFSTAQPLSLPRHPNFSNPNQPTTNNERSRHISLIERCVSLRQLKQTHGHMIRTGTFSDPYSASKLFAMAALSSFASLEYARKVFDEIPKPNSFAWNTLIRAYASGPDPVLSIWAFLDMVSESQCYPNKYTFPFLIKAAAEVSSLSLGQSLHGMAVKSAVGSDVFVANSLIHCYFSCGDLDSACKVFTTIKEKDVVSWNSMINGFVQKGSPDKALELFKKMESEDVKASHVTMVGVLSACAKIRNLEFGRQVCSYIEENRVNVNLTLANAMLDMYTKCGSIEDAKRLFDAMEEKDNVTWTTMLDGYAISEDYEAAREVLNSMPQKDIVAWNALISAYEQNGKPNEALIVFHELQLQKNMKLNQITLVSTLSACAQVGALELGRWIHSYIKKHGIRMNFHVTSALIHMYSKCGDLEKSREVFNSVEKRDVFVWSAMIGGLAMHGCGNEAVDMFYKMQEANVKPNGVTFTNVFCACSHTGLVDEAESLFHQMESNYGIVPEEKHYACIVDVLGRSGYLEKAVKFIEAMPIPPSTSVWGALLGACKIHANLNLAEMACTRLLELEPRNDGAHVLLSNIYAKLGKWENVSELRKHMRVTGLKKEPGCSSIEIDGMIHEFLSGDNAHPMSEKVYGKLHEVMEKLKSNGYEPEISQVLQIIEEEEMKEQSLNLHSEKLAICYGLISTEAPKVIRVIKNLRVCGDCHSVAKLISQLYDREIIVRDRYRFHHFRNGQCSCNDFW

SEQ ID NO: 96809 - protein, 686 aa, Arabidopsis thaliana
  peptide (1)..(686): Ceres Seq. ID no. 12734746
MIRTGTFSDPYSASKLFAMAALSSFASLEYARKVFDEIPKPNSFAWNTLIRAYASGPDPVLSIWAFLDMVSESQCYPNKYTFPFLIKAAAEVSSLSLGQSLHGMAVKSAVGSDVFVANSLIHCYFSCGDLDSACKVFTTIKEKDVVSWNSMINGFVQKGSPDKALELFKKMESEDVKASHVTMVGVLSACAKIRNLEFGRQVCSYIEENRVNVNLTLANAMLDMYTKCGSIEDAKRLFDAMEEKDNVTWTTMLDGYAISEDYEAAREVLNSMPQKDIVAWNALISAYEQNGKPNEALIVFHELQLQKNMKLNQITLVSTLSACAQVGALELGRWIHSYIKKHGIRMNFHVTSALIHMYSKCGDLEKSREVFNSVEKRDVFVWSAMIGGLAMHGCGNEAVDMFYKMQEANVKPNGVTFTNVFCACSHTGLVDEAESLFHQMESNYGIVPEEKHYACIVDVLGRSGYLEKAVKFIEAMPIPPSTSVWGALLGACKIHANLNLAEMACTRLLELEPRNDGAHVLLSNIYAKLGKWENVSELRKHMRVTGLKKEPGCSSIEIDGMIHEFLSGDNAHPMSEKVYGKLHEVMEKLKSNGYEPEISQVLQIIEEEEMKEQSLNLHSEKLAICYGLISTEAPKVIRVIKNLRVCGDCHSVAKLISQLYDREIIVRDRYRFHHFRNGQCSCNDFW

SEQ ID NO: 96810 - protein, 668 aa, Arabidopsis thaliana
  peptide (1)..(668): Ceres Seq. ID no. 12734747
MAALSSFASLEYARKVFDEIPKPNSFAWNTLIRAYASGPDPVLSIWAFLDMVSESQCYPNKYTFPFLIKAAAEVSSLSLGQSLHGMAVKSAVGSDVFVANSLIHCYFSCGDLDSACKVFTTIKEKDVVSWNSMINGFVQKGSPDKALELFKKMESEDVKASHVTMVGVLSACAKIRNLEFGRQVCSYIEENRVNVNLTLANAMLDMYTKCGSIEDAKRLFDAMEEKDNVTWTTMLDGYAISEDYEAAREVLNSMPQKDIVAWNALISAYEQNGKPNEALIVFHELQLQKNMKLNQITLVSTLSACAQVGALELGRWIHSYIKKHGIRMNFHVTSALIHMYSKCGDLEKSREVFNSVEKRDVFVWSAMIGGLAMHGCGNEAVDMFYKMQEANVKPNGVTFTNVFCACSHTGLVDEAESLFHQMESNYGIVPEEKHYACIVDVLGRSGYLEKAVKFIEAMPIPPSTSVWGALLGACKIHANLNLAEMACTRLLELEPRNDGAHVLLSNIYAKLGKWENVSELRKHMRVTGLKKEPGCSSIEIDGMIHEFLSGDNAHPMSEKVYGKLHEVMEKLKSNGYEPEISQVLQIIEEEEMKEQSLNLHSEKLAICYGLISTEAPKVIRVIKNLRVCGDCHSVAKLISQLYDREIIVRDRYRFHHFRNGQCSCNDFW

SEQ ID NO: 96811 - DNA, 1191 bp, Arabidopsis thaliana
  misc_feature (1)..(1191): Ceres Seq. ID no. 12734794
  misc_feature (1)..(1191): Ortholog of  Ceres SEQ ID NO 12609146 as cited in SEQ ID NO 52118
  misc_feature (1)..(1191): Ortholog of  Ceres SEQ ID NO 14316158 as cited in SEQ ID NO 52413
  misc_feature (1)..(1191): Ortholog of  Ceres SEQ ID NO 13594056 as cited in SEQ ID NO 55691
  misc_feature (1)..(1191): Ortholog of  Ceres SEQ ID NO 13638136 as cited in SEQ ID NO 58644
  misc_feature (1)..(1191): Ortholog of  Ceres SEQ ID NO 13596868 as cited in SEQ ID NO 62806
  misc_feature (1)..(1191): Ortholog of  Ceres SEQ ID NO 12587035 as cited in SEQ ID NO 63605
  misc_feature (1)..(1191): Ortholog of  Ceres SEQ ID NO 13595885 as cited in SEQ ID NO 69265
  misc_feature (1)..(1191): Ortholog of  Ceres SEQ ID NO 12566239 as cited in SEQ ID NO 0
  misc_feature (1)..(1191): Ortholog of  Ceres SEQ ID NO 13599119 as cited in SEQ ID NO 0
atgtcttgctccgtcgccgtatgtaattctccggtgttttcaccgtcgtcttctctattctgcaacaaatcttcgattctctcgtcaccgcaagaatctctttctctaacgctttctcatcgcaaacctcagacctcttctccttcctctccatccaccaccgtttcttctcctaaatctccatttcgtctccgtttccagaaacctccgtccggattcgctcctggtccattatcttttggatctgaatctgtttctgcatcctctcctccgggaggtgttttaaagaggaaacgacctacaaggcttgatataccgattggtgttgctggatttgtagctccgatttcttcatcggccgctgtggctgcgacgccgagagaggagtgtagagaggttgagagagaaggtgatggttattctgtttattgtaagagaggaagaagagaagctatggaggatcgtttctctgctatcaccaatcttcatggagatcgtaaacaggcgattttcggagtctatgatggtcatggaggagttaaagcggctgagtttgcagctaagaacttagataagaacattgtagaagaagtagttggtaagagagacgagtctgagatagctgaagcggtgaaacatggttacttggcaacagacgcgtcgtttcttaaggaggaagacgttaagggtggttcatgctgtgtcacggctctggttaacgaagggaaccttgttgtgtctaacgccggtgactgtcgtgctgttatgagtgtaggaggtgtagctaaggctttatcttctgatcaccgcccgtctagagacgatgaacggaaaagaattgaaaccacgggaggatatgttgatacgtttcacggtgtttggagaatccagggatctttagctgtgtcaagaggaattggagatgctcaacttaagaaatgggttatagctgaaccagagacaaagatttcgagaatcgagcatgaccatgagtttttgatcttggcatctgatggtttatgggataaagtgagtaaccaagaagcagtagacattgctcgtcctctctgcttaggaaccgagaagccattgttgttagctgcctgtaagaagcttgtcgatttatctgcttcacgaggctcgtctgatgatatcagtgtgatgttgatccctttacgccagttcatatag

SEQ ID NO: 96812 - protein, 396 aa, Arabidopsis thaliana
  peptide (1)..(396): Ceres Seq. ID no. 12734795
MSCSVAVCNSPVFSPSSSLFCNKSSILSSPQESLSLTLSHRKPQTSSPSSPSTTVSSPKSPFRLRFQKPPSGFAPGPLSFGSESVSASSPPGGVLKRKRPTRLDIPIGVAGFVAPISSSAAVAATPREECREVEREGDGYSVYCKRGRREAMEDRFSAITNLHGDRKQAIFGVYDGHGGVKAAEFAAKNLDKNIVEEVVGKRDESEIAEAVKHGYLATDASFLKEEDVKGGSCCVTALVNEGNLVVSNAGDCRAVMSVGGVAKALSSDHRPSRDDERKRIETTGGYVDTFHGVWRIQGSLAVSRGIGDAQLKKWVIAEPETKISRIEHDHEFLILASDGLWDKVSNQEAVDIARPLCLGTEKPLLLAACKKLVDLSASRGSSDDISVMLIPLRQFI

SEQ ID NO: 96813 - protein, 245 aa, Arabidopsis thaliana
  peptide (1)..(245): Ceres Seq. ID no. 12734796
MEDRFSAITNLHGDRKQAIFGVYDGHGGVKAAEFAAKNLDKNIVEEVVGKRDESEIAEAVKHGYLATDASFLKEEDVKGGSCCVTALVNEGNLVVSNAGDCRAVMSVGGVAKALSSDHRPSRDDERKRIETTGGYVDTFHGVWRIQGSLAVSRGIGDAQLKKWVIAEPETKISRIEHDHEFLILASDGLWDKVSNQEAVDIARPLCLGTEKPLLLAACKKLVDLSASRGSSDDISVMLIPLRQFI

SEQ ID NO: 96814 - DNA, 1284 bp, Arabidopsis thaliana
  misc_feature (1)..(1284): Ceres Seq. ID no. 12734807
  misc_feature (1)..(1284): Ortholog of  Ceres SEQ ID NO 14311576 as cited in SEQ ID NO 51551
agggaagtactttcacaaaccggagaagattatcggagatcgcaaactatggccggacgagatcgttatattccatcatcagcagtttcaacttcatcatcttcaagattattagaatctcaattaatcgaatccgatcgaaatcgagctcgatctgtaatcctcgaggatcgaatcgcaatccaacaccgtgaaatccaatctcttctcaacgacaatcaacgattagctgtagcacacatcggactcaaagaccagctcaatgtagctaagcgtgagctcgaacggttacttgaaaccgctgttaaagttaaagcggaaggagaagctaaagtgcgtgaggtttatcagaatgcgttgagaatggaggcggaggctcgtgtgattgatggacttggagctgagcttggtcaggttaggtctgatgtacagaggttaggtagtgatagacaggagttagctacggaattggctatgtttgatgatgagatggctaaggctaaaccgaattcggatcgagctattgaggttaaattggagattgagattcttcgaggagagattcgtaaaggaaggtgaaaatttgaattctctttgttgtttttgttggaacattggatttgttatcttgtagtgtatactcatatgatggttttttggatgcttatggagtagtaatgaatttgtttgaggtttgggatatgaaacagggctgctcttgagctggagaagaagacacgagctagtaaccttcaccatgagcgcggtatggagaagactatcgatcatttgaatcgagagattgtaaaacttgaggaagaattggttgatctggagactaaagctagagaagcaaatgcagctgctgaggcagctccaaccccaagtcctggattggctgcaagttatggaaacaacaccgatgatatatatggaggtcaaggccggcaatacccggaggctaatggtactcatgaggtacacatgagtctatagataagtagtaactttacgtgatcatctgttagaagttctcctaatttagcattattatggagaaggagaagattggactaattgtttgtaatgattggcataccaagttctgattgtcttacattctgaactgatatcttagcaaaatagctagttctcagggaaaaaagttatgttcataggttagtaagtgtccaacttgtacaagtatccgttggttagtgagaattgttgtaaactcataattgactgaattcaacgcttatgataagattgcggttttacttt

SEQ ID NO: 96815 - protein, 192 aa, Arabidopsis thaliana
  peptide (1)..(192): Ceres Seq. ID no. 12734808
REVLSQTGEDYRRSQTMAGRDRYIPSSAVSTSSSSRLLESQLIESDRNRARSVILEDRIAIQHREIQSLLNDNQRLAVAHIGLKDQLNVAKRELERLLETAVKVKAEGEAKVREVYQNALRMEAEARVIDGLGAELGQVRSDVQRLGSDRQELATELAMFDDEMAKAKPNSDRAIEVKLEIEILRGEIRKGR

SEQ ID NO: 96816 - protein, 176 aa, Arabidopsis thaliana
  peptide (1)..(176): Ceres Seq. ID no. 12734809
MAGRDRYIPSSAVSTSSSSRLLESQLIESDRNRARSVILEDRIAIQHREIQSLLNDNQRLAVAHIGLKDQLNVAKRELERLLETAVKVKAEGEAKVREVYQNALRMEAEARVIDGLGAELGQVRSDVQRLGSDRQELATELAMFDDEMAKAKPNSDRAIEVKLEIEILRGEIRKGR

SEQ ID NO: 96817 - DNA, 1077 bp, Arabidopsis thaliana
  misc_feature (1)..(1077): Ceres Seq. ID no. 12734814
  misc_feature (1)..(1077): Ortholog of  Ceres SEQ ID NO 13593955 as cited in SEQ ID NO 54278
  misc_feature (1)..(1077): Ortholog of  Ceres SEQ ID NO 13597380 as cited in SEQ ID NO 64054
  misc_feature (1)..(1077): Ortholog of  Ceres SEQ ID NO 12625474 as cited in SEQ ID NO 64169
  misc_feature (1)..(1077): Ortholog of  Ceres SEQ ID NO 13597502 as cited in SEQ ID NO 64681
atgtatatatctaaaaccatagtgtttggtctctttgttgcaacactcctcgtgtcttgcaatgcggatgcaaacaccacgcagccgcttttcccggcgattctaatattcggcgactcaacggcagacacaggcaataacaactactactcacaagccgtcttcaaggctaatcacctcccttatggcgttgatcttcccggccacgaagctaacggaagattctcaaacggaaagctaatctctgacgtaatctccacaaaactcaacatcaaagagtttgttcctccgtttctacaaccgaacatctccgaccaagacattgtcactggagtctgttttgcatccgcgggtgctggctacgatgacgagacctcactatctagcaaagctattccggtctcacaacagccaagcatgttcaagaattatattgctcgtctcaaaggtatcgtaggagacaagaaagcgatggagattattaacaacgctttagtggtcataagcgcagggcctaatgatttcatcttgaacttttacgatatccccataaggcgtctcgagtatcctactatctatggctaccaagattttgttctcaagaggcttgacggttttgtccgggagctttatagtttaggttgccggaatattctagtcggagggttgccgccaatgggatgtttaccgatccaattgaccgcgaaattgagaaccattttgggaatttgtgtggaacaagaaaacaaagactccattttgtacaatcagaagcttgtaaagaaattgcctgagatccaagcgtctctacccggaagcaagttcctttacgctaacgtctacgaccctgtgatggacatgatccgaaaccctagcaaatacggattcaaggagacgaagaaaggatgttgcggaacaggatacttggaaacaagcttcttgtgcacttccttgtcaaagacttgtccgaatcattcggatcacttgttttgggactccattcatccctccgaggcagcttacaaatacctagggaacttcatagatgctcagattcaagagtggcttaagacttaa

SEQ ID NO: 96818 - protein, 358 aa, Arabidopsis thaliana
  peptide (1)..(358): Ceres Seq. ID no. 12734815
MYISKTIVFGLFVATLLVSCNADANTTQPLFPAILIFGDSTADTGNNNYYSQAVFKANHLPYGVDLPGHEANGRFSNGKLISDVISTKLNIKEFVPPFLQPNISDQDIVTGVCFASAGAGYDDETSLSSKAIPVSQQPSMFKNYIARLKGIVGDKKAMEIINNALVVISAGPNDFILNFYDIPIRRLEYPTIYGYQDFVLKRLDGFVRELYSLGCRNILVGGLPPMGCLPIQLTAKLRTILGICVEQENKDSILYNQKLVKKLPEIQASLPGSKFLYANVYDPVMDMIRNPSKYGFKETKKGCCGTGYLETSFLCTSLSKTCPNHSDHLFWDSIHPSEAAYKYLGNFIDAQIQEWLKT

SEQ ID NO: 96819 - protein, 219 aa, Arabidopsis thaliana
  peptide (1)..(219): Ceres Seq. ID no. 12734816
MFKNYIARLKGIVGDKKAMEIINNALVVISAGPNDFILNFYDIPIRRLEYPTIYGYQDFVLKRLDGFVRELYSLGCRNILVGGLPPMGCLPIQLTAKLRTILGICVEQENKDSILYNQKLVKKLPEIQASLPGSKFLYANVYDPVMDMIRNPSKYGFKETKKGCCGTGYLETSFLCTSLSKTCPNHSDHLFWDSIHPSEAAYKYLGNFIDAQIQEWLKT

SEQ ID NO: 96820 - protein, 201 aa, Arabidopsis thaliana
  peptide (1)..(201): Ceres Seq. ID no. 12734817
MEIINNALVVISAGPNDFILNFYDIPIRRLEYPTIYGYQDFVLKRLDGFVRELYSLGCRNILVGGLPPMGCLPIQLTAKLRTILGICVEQENKDSILYNQKLVKKLPEIQASLPGSKFLYANVYDPVMDMIRNPSKYGFKETKKGCCGTGYLETSFLCTSLSKTCPNHSDHLFWDSIHPSEAAYKYLGNFIDAQIQEWLKT

SEQ ID NO: 96821 - DNA, 1503 bp, Arabidopsis thaliana
  misc_feature (1)..(1503): Ceres Seq. ID no. 12734824
  misc_feature (1)..(1503): Ortholog of  Ceres SEQ ID NO 13597411 as cited in SEQ ID NO 64125
atgtctcggaagattctcccgtggttgagtctagtcgctattctctggcttcaatctttcaatggcaccaacttgagtttcccagcttactcttcacagcttaaagagcttctcaaaatctcccagtttaagctaaattatctttctttcgcctccgacgctggaaaagtcctaggttttatctccggtatcgccgccgtttatcttcctctccctcttgtccttctcgccggaggttcattagggttcgccggctacggtctccagtatctctccatcatcaagaagattatctgttggatcaacacagcttgttacatcgtcgcaatcaatagttttccggtgaaccgtcaagtcgccgtggggatcacggcaagttatcaaggtttgagtgggaaaatctacaccgacatggtccactctttttttcacacgtctcaacgtgaagaagcttcgggttatctcttgctcaactctcttgttccattggtcgcttgtctcgtgacggctcctatgttgatgagacacggaggagacaaaacgatgtcgtattctaaggatgttaaagttggttttatcgttttgttcgtcttgactattgctacggggatttatgcggtggctacgagtcttgtctcggttcctgcggttttagtacttgtaggcattgctctgtttcttcttgctcctcttgctataccaattggagttggatttaaagagcttatgtcctctagaaaaactcaacaaaaggtgcacgatcttgaagctcctgtcgataaattttatttcgtagaagaagatcacacgaaagaagaagaagagtttgagaaggcaataattggagttaaagaagaggtcgagtggacacaactatggaagaaactcgatttttggatatactttggactctatttgttcggtccaacggtcgggctagtgtttacgaacaatcttggtcagatcgctgagtctcgtggctccaccgccaccagttccttggtcgctctctcgtcgtcgttcgggtttttcggccgcttgttaccatcattactcgactacttcttttctaggaacaaatacatgccatcaagtccggtttctatggcgggttcactggtagcaatggtagcttcgtttctcctcctccttattgactccgacattgctctctacatcggcacggcgatgattggcatcttctccggagccttgacttcactctctgtcacaatgacggcagagctttttgggacgaagcattttggagttaaccacaacattgttgtcggaagtattccccttggatctttttctttcggtttgttagccgctaaaatttaccgcgacggagctgctctttacggagatgatggcaagtgttttgggatgcattgctttcaaaccactttggtattttggggaatgctttgttcgatcgccgcacttctcgccgccgttttgtatatacgcaaccgcaagttctattcgcagaagccgtag

SEQ ID NO: 96822 - protein, 500 aa, Arabidopsis thaliana
  peptide (1)..(500): Ceres Seq. ID no. 12734825
MSRKILPWLSLVAILWLQSFNGTNLSFPAYSSQLKELLKISQFKLNYLSFASDAGKVLGFISGIAAVYLPLPLVLLAGGSLGFAGYGLQYLSIIKKIICWINTACYIVAINSFPVNRQVAVGITASYQGLSGKIYTDMVHSFFHTSQREEASGYLLLNSLVPLVACLVTAPMLMRHGGDKTMSYSKDVKVGFIVLFVLTIATGIYAVATSLVSVPAVLVLVGIALFLLAPLAIPIGVGFKELMSSRKTQQKVHDLEAPVDKFYFVEEDHTKEEEEFEKAIIGVKEEVEWTQLWKKLDFWIYFGLYLFGPTVGLVFTNNLGQIAESRGSTATSSLVALSSSFGFFGRLLPSLLDYFFSRNKYMPSSPVSMAGSLVAMVASFLLLLIDSDIALYIGTAMIGIFSGALTSLSVTMTAELFGTKHFGVNHNIVVGSIPLGSFSFGLLAAKIYRDGAALYGDDGKCFGMHCFQTTLVFWGMLCSIAALLAAVLYIRNRKFYSQKP

SEQ ID NO: 96823 - protein, 363 aa, Arabidopsis thaliana
  peptide (1)..(363): Ceres Seq. ID no. 12734826
MVHSFFHTSQREEASGYLLLNSLVPLVACLVTAPMLMRHGGDKTMSYSKDVKVGFIVLFVLTIATGIYAVATSLVSVPAVLVLVGIALFLLAPLAIPIGVGFKELMSSRKTQQKVHDLEAPVDKFYFVEEDHTKEEEEFEKAIIGVKEEVEWTQLWKKLDFWIYFGLYLFGPTVGLVFTNNLGQIAESRGSTATSSLVALSSSFGFFGRLLPSLLDYFFSRNKYMPSSPVSMAGSLVAMVASFLLLLIDSDIALYIGTAMIGIFSGALTSLSVTMTAELFGTKHFGVNHNIVVGSIPLGSFSFGLLAAKIYRDGAALYGDDGKCFGMHCFQTTLVFWGMLCSIAALLAAVLYIRNRKFYSQKP

SEQ ID NO: 96824 - protein, 329 aa, Arabidopsis thaliana
  peptide (1)..(329): Ceres Seq. ID no. 12734827
MLMRHGGDKTMSYSKDVKVGFIVLFVLTIATGIYAVATSLVSVPAVLVLVGIALFLLAPLAIPIGVGFKELMSSRKTQQKVHDLEAPVDKFYFVEEDHTKEEEEFEKAIIGVKEEVEWTQLWKKLDFWIYFGLYLFGPTVGLVFTNNLGQIAESRGSTATSSLVALSSSFGFFGRLLPSLLDYFFSRNKYMPSSPVSMAGSLVAMVASFLLLLIDSDIALYIGTAMIGIFSGALTSLSVTMTAELFGTKHFGVNHNIVVGSIPLGSFSFGLLAAKIYRDGAALYGDDGKCFGMHCFQTTLVFWGMLCSIAALLAAVLYIRNRKFYSQKP

SEQ ID NO: 96825 - DNA, 911 bp, Arabidopsis thaliana
  misc_feature (1)..(911): Ceres Seq. ID no. 12734828
  misc_feature (1)..(911): Ortholog of  Ceres SEQ ID NO 15178260 as cited in SEQ ID NO 59907
tccattgatactctaaaataaacttataaatagcatgcgtgaatgtcccgagaaagggaaggatttggagagtactacgagaccgtcaagaagataaagaaagatccagccttcgagacaacgacggatcatgccgtgatgggaatcaggagacatgtggcggtgcctccggggacaacgttgaacaccgtaacaccatgcgccgcttgtaagctcctccgccgtcgttgtgcggaggagtgtcctttctcgccttacttctcgccgcatgaacctcacaagttcgctgccgttcataaagtctttggtgcaagcaacgtctccaagatgcttctggaagtgggagagagccaaagaggagacgcagcaaatagtttagtatacgaagcaaacctaagacttagagatccaatctacggttgcatgggagcaatctcagctcttcaacaccacattcagtctcttcaatccgaactcacgaccgtccgtacggaaatcctacgccacaaataccaagaagccaccaccatcacttctctccaaaacaacttcaacagcactacaacaacttcatcagtgagttgtgatcagcatgctctcgcctcggcgattctcctcccaccaccaccgccaccacctcctactccacgaccaccaaggttgttgtcctctcagccagctccaccgcctacgccacccgtttctttgccatctccgtccatggttgtgtcgtcctcttcatcttctaattcatctgccaccaattctatgtataatcctcctccatcttcgacggctggatatagcaattctctgtccagtgataataatgttcattactttgattaaatcagaattctgtgttccttaatttttttaaaatactattatagcccttattataagctacg

SEQ ID NO: 96826 - protein, 268 aa, Arabidopsis thaliana
  peptide (1)..(268): Ceres Seq. ID no. 12734829
MSREREGFGEYYETVKKIKKDPAFETTTDHAVMGIRRHVAVPPGTTLNTVTPCAACKLLRRRCAEECPFSPYFSPHEPHKFAAVHKVFGASNVSKMLLEVGESQRGDAANSLVYEANLRLRDPIYGCMGAISALQHHIQSLQSELTTVRTEILRHKYQEATTITSLQNNFNSTTTTSSVSCDQHALASAILLPPPPPPPPTPRPPRLLSSQPAPPPTPPVSLPSPSMVVSSSSSSNSSATNSMYNPPPSSTAGYSNSLSSDNNVHYFD

SEQ ID NO: 96827 - protein, 236 aa, Arabidopsis thaliana
  peptide (1)..(236): Ceres Seq. ID no. 12734830
MGIRRHVAVPPGTTLNTVTPCAACKLLRRRCAEECPFSPYFSPHEPHKFAAVHKVFGASNVSKMLLEVGESQRGDAANSLVYEANLRLRDPIYGCMGAISALQHHIQSLQSELTTVRTEILRHKYQEATTITSLQNNFNSTTTTSSVSCDQHALASAILLPPPPPPPPTPRPPRLLSSQPAPPPTPPVSLPSPSMVVSSSSSSNSSATNSMYNPPPSSTAGYSNSLSSDNNVHYFD

SEQ ID NO: 96828 - protein, 173 aa, Arabidopsis thaliana
  peptide (1)..(173): Ceres Seq. ID no. 12734831
MLLEVGESQRGDAANSLVYEANLRLRDPIYGCMGAISALQHHIQSLQSELTTVRTEILRHKYQEATTITSLQNNFNSTTTTSSVSCDQHALASAILLPPPPPPPPTPRPPRLLSSQPAPPPTPPVSLPSPSMVVSSSSSSNSSATNSMYNPPPSSTAGYSNSLSSDNNVHYFD

SEQ ID NO: 96829 - DNA, 1524 bp, Arabidopsis thaliana
  misc_feature (1)..(1524): Ceres Seq. ID no. 12734868
  misc_feature (1)..(1524): Ortholog of  Ceres SEQ ID NO 14314755 as cited in SEQ ID NO 59919
  misc_feature (1)..(1524): Ortholog of  Ceres SEQ ID NO 13662880 as cited in SEQ ID NO 65422
  misc_feature (1)..(1524): Ortholog of  Ceres SEQ ID NO 13596180 as cited in SEQ ID NO 67941
  misc_feature (1)..(1524): Ortholog of  Ceres SEQ ID NO 13591190 as cited in SEQ ID NO 68044
atggaatcaaaaatagtttcaaaagccaaaagacttcactttgttttgatccctctcatggctcaagggcatctgatccccatggtcgacatctccaagattcttgcacgacaaggcaacatcgttaccatagttacaacccctcaaaatgcttctaggtttgcgaagacagttgaccgagcaagattagagtcgggtctcgaaatcaatgtcgttaaatttccaattccttacaaagaattcggtcttcccaaagattgtgagactctggacactttgccctccaaagacctcctacgaagattctatgacgctgtggataaactccaagagcccatggaacggtttcttgagcaacaagatatccctccaagttgcataatctccgataaatgccttttttggacgtcaagaaccgcaaagaggttcaaaatcccgaggatcgtgttccatggaatgtgttgcttctctcttttgagttcgcacaatatccatcttcatagcccgcacctctcggtttcttcggccgtagagccattccctataccaggaatgccacataggattgagatagctagagctcagttacctggtgcttttgagaagttagcaaatatggatgacgttcgcgagaagatgcgtgaatctgaatcagaagcctttggggttattgttaatagcttccaggaattggagcctggctatgcagaggcctacgctgaggccatcaataagaaggtatggttcgttggacccgtttctttatgcaacgaccgtatggctgacctattcgatagaggaagtaatggtaacatcgcaataagcgagaccgaatgcttgcagtttcttgactcgatgagaccaaggtcagtcttatatgtttctcttggtagcctctgtcgactaatacctaatcaattgatagaactaggtttagggttagaagaatcgggaaaaccctttatttgggtgataaagaccgaggaaaaacacatgattgagctagacgaatggctaaaacgcgaaaattttgaagagcgagttagaggaagagggatagtaataaagggttggagtcctcaggctatgatactctcacatggttcaaccggcgggttcttgactcattgcggttggaattctacaatagaagcgatatgttttggtgtaccaatgatcacatggccgttgttcgctgaacaatttctcaatgagaaactcatcgtggaggttttgaacatcggggttagggttggggtggagattccggtgagatggggagacgaggagagacttggagtgttggtcaagaaaccgagtgttgtgaaagctataaagcttttgatggaccaagattgtcaacgtgtagacgaaaatgatgatgataatgaattcgtgagacgaaggagacgtattcaagaacttgcagtaatggcgaaaaaggctgtggaagaaaagggatcttcgagtattaacgtttcaattttaatccaagatgttttggagcaattgagtctcgtgtag

SEQ ID NO: 96830 - protein, 507 aa, Arabidopsis thaliana
  peptide (1)..(507): Ceres Seq. ID no. 12734869
MESKIVSKAKRLHFVLIPLMAQGHLIPMVDISKILARQGNIVTIVTTPQNASRFAKTVDRARLESGLEINVVKFPIPYKEFGLPKDCETLDTLPSKDLLRRFYDAVDKLQEPMERFLEQQDIPPSCIISDKCLFWTSRTAKRFKIPRIVFHGMCCFSLLSSHNIHLHSPHLSVSSAVEPFPIPGMPHRIEIARAQLPGAFEKLANMDDVREKMRESESEAFGVIVNSFQELEPGYAEAYAEAINKKVWFVGPVSLCNDRMADLFDRGSNGNIAISETECLQFLDSMRPRSVLYVSLGSLCRLIPNQLIELGLGLEESGKPFIWVIKTEEKHMIELDEWLKRENFEERVRGRGIVIKGWSPQAMILSHGSTGGFLTHCGWNSTIEAICFGVPMITWPLFAEQFLNEKLIVEVLNIGVRVGVEIPVRWGDEERLGVLVKKPSVVKAIKLLMDQDCQRVDENDDDNEFVRRRRRIQELAVMAKKAVEEKGSSSINVSILIQDVLEQLSLV

SEQ ID NO: 96831 - protein, 488 aa, Arabidopsis thaliana
  peptide (1)..(488): Ceres Seq. ID no. 12734870
MAQGHLIPMVDISKILARQGNIVTIVTTPQNASRFAKTVDRARLESGLEINVVKFPIPYKEFGLPKDCETLDTLPSKDLLRRFYDAVDKLQEPMERFLEQQDIPPSCIISDKCLFWTSRTAKRFKIPRIVFHGMCCFSLLSSHNIHLHSPHLSVSSAVEPFPIPGMPHRIEIARAQLPGAFEKLANMDDVREKMRESESEAFGVIVNSFQELEPGYAEAYAEAINKKVWFVGPVSLCNDRMADLFDRGSNGNIAISETECLQFLDSMRPRSVLYVSLGSLCRLIPNQLIELGLGLEESGKPFIWVIKTEEKHMIELDEWLKRENFEERVRGRGIVIKGWSPQAMILSHGSTGGFLTHCGWNSTIEAICFGVPMITWPLFAEQFLNEKLIVEVLNIGVRVGVEIPVRWGDEERLGVLVKKPSVVKAIKLLMDQDCQRVDENDDDNEFVRRRRRIQELAVMAKKAVEEKGSSSINVSILIQDVLEQLSLV

SEQ ID NO: 96832 - protein, 480 aa, Arabidopsis thaliana
  peptide (1)..(480): Ceres Seq. ID no. 12734871
MVDISKILARQGNIVTIVTTPQNASRFAKTVDRARLESGLEINVVKFPIPYKEFGLPKDCETLDTLPSKDLLRRFYDAVDKLQEPMERFLEQQDIPPSCIISDKCLFWTSRTAKRFKIPRIVFHGMCCFSLLSSHNIHLHSPHLSVSSAVEPFPIPGMPHRIEIARAQLPGAFEKLANMDDVREKMRESESEAFGVIVNSFQELEPGYAEAYAEAINKKVWFVGPVSLCNDRMADLFDRGSNGNIAISETECLQFLDSMRPRSVLYVSLGSLCRLIPNQLIELGLGLEESGKPFIWVIKTEEKHMIELDEWLKRENFEERVRGRGIVIKGWSPQAMILSHGSTGGFLTHCGWNSTIEAICFGVPMITWPLFAEQFLNEKLIVEVLNIGVRVGVEIPVRWGDEERLGVLVKKPSVVKAIKLLMDQDCQRVDENDDDNEFVRRRRRIQELAVMAKKAVEEKGSSSINVSILIQDVLEQLSLV

SEQ ID NO: 96833 - DNA, 1473 bp, Arabidopsis thaliana
  misc_feature (1)..(1473): Ceres Seq. ID no. 12734872
  misc_feature (1)..(1473): Ortholog of  Ceres SEQ ID NO 13594345 as cited in SEQ ID NO 58043
  misc_feature (1)..(1473): Ortholog of  Ceres SEQ ID NO 14314755 as cited in SEQ ID NO 59919
  misc_feature (1)..(1473): Ortholog of  Ceres SEQ ID NO 13597574 as cited in SEQ ID NO 64677
  misc_feature (1)..(1473): Ortholog of  Ceres SEQ ID NO 13597678 as cited in SEQ ID NO 65375
  misc_feature (1)..(1473): Ortholog of  Ceres SEQ ID NO 13662880 as cited in SEQ ID NO 65422
  misc_feature (1)..(1473): Ortholog of  Ceres SEQ ID NO 12779098 as cited in SEQ ID NO 67698
  misc_feature (1)..(1473): Ortholog of  Ceres SEQ ID NO 13596180 as cited in SEQ ID NO 67941
  misc_feature (1)..(1473): Ortholog of  Ceres SEQ ID NO 13591190 as cited in SEQ ID NO 68044
  misc_feature (1)..(1473): Ortholog of  Ceres SEQ ID NO 13595961 as cited in SEQ ID NO 68223
atgtgttctcatgatcctcttcacttcgtcgtaataccctttatggcccaaggccatatgatcccattggtcgacatctctaggctcttgtcccagcgccaaggcgtgactgtctgcatcatcacaactactcaaaatgtagccaagatcaagacttcactctcattttcctctttgtttgcgactatcaacatcgttgaagttaagtttctgtctcaacaaacgggtttgccagaagggtgcgagagtttagatatgttggcttcaatgggcgatatggtgaagttctttgatgctgccaactcacttgaggagcaagttgagaaagctatggaagagatggttcagccgcggccaagctgcatcattggagacatgagccttcctttcacttcaagacttgccaagaaattcaagatccccaaacttatcttccatgggttttcttgtttcagcctcatgtctatacaagtggttcgagaaagcgggatcttgaaaatgatagaatcaaacgacgagtattttgatttgcccggcttgcctgacaaagttgagttcacgaaacctcaggtctctgtgttgcaacctgttgaaggaaatatgaaagagagtacggccaagattattgaagctgataatgactcttatggtgttattgtgaacacttttgaagagttagaggttgattatgcaagagaatataggaaagcaagggctggaaaagtttggtgcgttggacctgtttccttgtgcaataggttagggttagacaaagctaaaagaggagataaggcttctattggtcaagaccaatgtcttcaatggcttgactctcaagaaactggttcagtgctctacgtttgccttggaagtctatgtaatcttcccttggctcagctcaaagagctgggactaggccttgaggcatctaataaacctttcatatgggttataagagaatggggaaaatatggagatttagcaaattggatgcaacaaagcggatttgaagagcggatcaaagatagaggactggtgatcaaaggttgggcgccgcaagttttcatcctctcacacgcatccattggagggtttttgactcactgtggatggaactcgacactagaaggaattactgcaggagttccattattgacatggcctttgtttgctgaacaattcttgaatgagaagttagttgtgcagatactaaaagcagggttaaagataggagtagagaaattgatgaaatatggaaaagaagaggagataggagcgatggtgagcagagaatgtgtgagaaaagctgtggatgagctaatgggtgatagtgaagaagcagaagagagaagaagaaaagttacagaacttagtgacttggcaaataaggctttggaaaaaggaggatcttcagattctaatatcacattgctcattcaagatattatggagcaatcacaaaatcaattttaa

SEQ ID NO: 96834 - protein, 490 aa, Arabidopsis thaliana
  peptide (1)..(490): Ceres Seq. ID no. 12734873
MCSHDPLHFVVIPFMAQGHMIPLVDISRLLSQRQGVTVCIITTTQNVAKIKTSLSFSSLFATINIVEVKFLSQQTGLPEGCESLDMLASMGDMVKFFDAANSLEEQVEKAMEEMVQPRPSCIIGDMSLPFTSRLAKKFKIPKLIFHGFSCFSLMSIQVVRESGILKMIESNDEYFDLPGLPDKVEFTKPQVSVLQPVEGNMKESTAKIIEADNDSYGVIVNTFEELEVDYAREYRKARAGKVWCVGPVSLCNRLGLDKAKRGDKASIGQDQCLQWLDSQETGSVLYVCLGSLCNLPLAQLKELGLGLEASNKPFIWVIREWGKYGDLANWMQQSGFEERIKDRGLVIKGWAPQVFILSHASIGGFLTHCGWNSTLEGITAGVPLLTWPLFAEQFLNEKLVVQILKAGLKIGVEKLMKYGKEEEIGAMVSRECVRKAVDELMGDSEEAEERRRKVTELSDLANKALEKGGSSDSNITLLIQDIMEQSQNQF

SEQ ID NO: 96835 - protein, 476 aa, Arabidopsis thaliana
  peptide (1)..(476): Ceres Seq. ID no. 12734874
MAQGHMIPLVDISRLLSQRQGVTVCIITTTQNVAKIKTSLSFSSLFATINIVEVKFLSQQTGLPEGCESLDMLASMGDMVKFFDAANSLEEQVEKAMEEMVQPRPSCIIGDMSLPFTSRLAKKFKIPKLIFHGFSCFSLMSIQVVRESGILKMIESNDEYFDLPGLPDKVEFTKPQVSVLQPVEGNMKESTAKIIEADNDSYGVIVNTFEELEVDYAREYRKARAGKVWCVGPVSLCNRLGLDKAKRGDKASIGQDQCLQWLDSQETGSVLYVCLGSLCNLPLAQLKELGLGLEASNKPFIWVIREWGKYGDLANWMQQSGFEERIKDRGLVIKGWAPQVFILSHASIGGFLTHCGWNSTLEGITAGVPLLTWPLFAEQFLNEKLVVQILKAGLKIGVEKLMKYGKEEEIGAMVSRECVRKAVDELMGDSEEAEERRRKVTELSDLANKALEKGGSSDSNITLLIQDIMEQSQNQF

SEQ ID NO: 96836 - protein, 471 aa, Arabidopsis thaliana
  peptide (1)..(471): Ceres Seq. ID no. 12734875
MIPLVDISRLLSQRQGVTVCIITTTQNVAKIKTSLSFSSLFATINIVEVKFLSQQTGLPEGCESLDMLASMGDMVKFFDAANSLEEQVEKAMEEMVQPRPSCIIGDMSLPFTSRLAKKFKIPKLIFHGFSCFSLMSIQVVRESGILKMIESNDEYFDLPGLPDKVEFTKPQVSVLQPVEGNMKESTAKIIEADNDSYGVIVNTFEELEVDYAREYRKARAGKVWCVGPVSLCNRLGLDKAKRGDKASIGQDQCLQWLDSQETGSVLYVCLGSLCNLPLAQLKELGLGLEASNKPFIWVIREWGKYGDLANWMQQSGFEERIKDRGLVIKGWAPQVFILSHASIGGFLTHCGWNSTLEGITAGVPLLTWPLFAEQFLNEKLVVQILKAGLKIGVEKLMKYGKEEEIGAMVSRECVRKAVDELMGDSEEAEERRRKVTELSDLANKALEKGGSSDSNITLLIQDIMEQSQNQF

SEQ ID NO: 96837 - DNA, 2448 bp, Arabidopsis thaliana
  misc_feature (1)..(2448): Ceres Seq. ID no. 12734884
  misc_feature (1)..(2448): Ortholog of  Ceres SEQ ID NO 15172609 as cited in SEQ ID NO 61938
  misc_feature (1)..(2448): Ortholog of  Ceres SEQ ID NO 13595870 as cited in SEQ ID NO 62101
  misc_feature (1)..(2448): Ortholog of  Ceres SEQ ID NO 13590241 as cited in SEQ ID NO 63878
  misc_feature (1)..(2448): Ortholog of  Ceres SEQ ID NO 13657939 as cited in SEQ ID NO 66349
  misc_feature (1)..(2448): Ortholog of  Ceres SEQ ID NO 13660597 as cited in SEQ ID NO 67655
  misc_feature (1)..(2448): Ortholog of  Ceres SEQ ID NO 13654484 as cited in SEQ ID NO 67717
atggcgaatcaagctgaatcatctgattcgaaggggacgaagaaggattttagcaccgcgattctggagaaaaagaaggcagcgaatcgtttggttgtggatgaagccattaacgatgataactccgtcgtttctcttcaccctgataccatggagaagctacagctttttcgtggtgatactatcttaatcaagggaaagaagaggaaggatactgtgtgtattgctttagctgatgagacatgtgatgaaccaaaaattagaatgaacaaggttgttaggtctaatctcagagttaggcttggggatgttatttctgttcatcaatgtcctgatgtcaagtatgggaaccgtgttcacatcttacctttagatgataccattgaaggagtaagtggcaatatatttgatgcataccttaaaccttatttcttagaggcatatcgtccggtgaggaagggcgatcttttcctagttagaggagggatgagaagtattgagtttaaggttattgaaactgatcctgctgagtactgtgtggttgctccagatacagaaattttctgtgaaggtgaaccgataaagagagaggatgaggagaggttggatgaagttgggtatgatgatgttggtggtgtcaggaaacaaatggctcagattcgtgaacttgttgagctcccattgaggcatccacagctcttcaagtctattggtgtgaaacctcccaaaggaatcttgctctatggccctcctggttctgggaagacacttattgcccgtgctgttgctaatgagactggtgcatttttcttctgtatcaatggtcccgagatcatgtcgaagctagctggtgagagtgaaagtaacctcaggaaagcgtttgaggaagctgagaagaatgccccttcgatcatattcattgatgagatcgattcgattgctccaaaaagagagaagactcacggagaagttgaaagacggattgtatcccagctcttgacacttatggatggtcttaaatccagagcccatgtgattgttatgggagctaccaaccgtcccaacagcattgaccctgctttgagaagatttggacgttttgatagagaaattgatattggtgttcctgatgagattggtcgtcttgaagttctcaggattcacaccaagaacatgaagcttgcggaagatgttgatttggaaagagtatctaaagacacccatgggtatgttggtgctgatcttgcagcattatgcactgaagctgctctccaatgcattagggagaagatggatgtaattgacctagatgacgaggagatagatgctgaaattctcaattctatggctgtcagtaatgatcatttccagactgcccttggtaacagcaatccttcagctctacgtgagactgtcgttgaggtgcctaatgtgtcttgggaggacattggtggtcttgagaatgtcaagagggagctccaagagactgttcaatatccagtggagcatcctgagaaattcgagaagtttgggatgtcaccgtctaaaggagtcctattctatggcccccctggttgtggaaagaccctcttggctaaggctattgcgaacgagtgtcaagccaacttcattagtatcaagggtcctgagctcctcacaatgtggtttggagagagtgaagccaatgtgagagagatattcgacaaggcacgacagtctgccccttgtgttcttttctttgatgagctggactccatcgccactcagagagggaacagtgttggagatgctggtggtgcagcagatagagtattgaaccagcttcttacggagatggatggaatgaatgctaagaagacggtcttcatcatcggagctacaaacagaccagacattattgatcctgcacttctgcgtcctggtcgtctcgatcagctcatctacattcctcttcctgatgaggagtctcgttaccagatctttaagtcttgcttgaggaaatcacctgtggcgaaagatgttgacctgagggctcttgctaagtacacccaaggcttcagtggtgcggacatcacagagatttgccagcgttcttgcaagtatgcgatcagagaaaacatcgagaaggatattgagaaggagaggaagagagcagagtcgccagaagcaatggaagaggatgaggaggagattgcagagattaaagctggtcactttgaggaatccatgaaatacgctaggagatcagtgagtgatgcagacattcgcaagtatcaggcttttgctcagactctccagcaatcacgtgggtttggaagcgagttcaggtttccagatgcgccgacagggactactggagctttccctggagctgctgccacagttgggggagtcgacccgtttgccacatccggaggagcagcggatgatgatgatctctacagttga

SEQ ID NO: 96838 - protein, 815 aa, Arabidopsis thaliana
  peptide (1)..(815): Ceres Seq. ID no. 12734885
MANQAESSDSKGTKKDFSTAILEKKKAANRLVVDEAINDDNSVVSLHPDTMEKLQLFRGDTILIKGKKRKDTVCIALADETCDEPKIRMNKVVRSNLRVRLGDVISVHQCPDVKYGNRVHILPLDDTIEGVSGNIFDAYLKPYFLEAYRPVRKGDLFLVRGGMRSIEFKVIETDPAEYCVVAPDTEIFCEGEPIKREDEERLDEVGYDDVGGVRKQMAQIRELVELPLRHPQLFKSIGVKPPKGILLYGPPGSGKTLIARAVANETGAFFFCINGPEIMSKLAGESESNLRKAFEEAEKNAPSIIFIDEIDSIAPKREKTHGEVERRIVSQLLTLMDGLKSRAHVIVMGATNRPNSIDPALRRFGRFDREIDIGVPDEIGRLEVLRIHTKNMKLAEDVDLERVSKDTHGYVGADLAALCTEAALQCIREKMDVIDLDDEEIDAEILNSMAVSNDHFQTALGNSNPSALRETVVEVPNVSWEDIGGLENVKRELQETVQYPVEHPEKFEKFGMSPSKGVLFYGPPGCGKTLLAKAIANECQANFISIKGPELLTMWFGESEANVREIFDKARQSAPCVLFFDELDSIATQRGNSVGDAGGAADRVLNQLLTEMDGMNAKKTVFIIGATNRPDIIDPALLRPGRLDQLIYIPLPDEESRYQIFKSCLRKSPVAKDVDLRALAKYTQGFSGADITEICQRSCKYAIRENIEKDIEKERKRAESPEAMEEDEEEIAEIKAGHFEESMKYARRSVSDADIRKYQAFAQTLQQSRGFGSEFRFPDAPTGTTGAFPGAAATVGGVDPFATSGGAADDDDLYS

SEQ ID NO: 96839 - protein, 765 aa, Arabidopsis thaliana
  peptide (1)..(765): Ceres Seq. ID no. 12734886
MEKLQLFRGDTILIKGKKRKDTVCIALADETCDEPKIRMNKVVRSNLRVRLGDVISVHQCPDVKYGNRVHILPLDDTIEGVSGNIFDAYLKPYFLEAYRPVRKGDLFLVRGGMRSIEFKVIETDPAEYCVVAPDTEIFCEGEPIKREDEERLDEVGYDDVGGVRKQMAQIRELVELPLRHPQLFKSIGVKPPKGILLYGPPGSGKTLIARAVANETGAFFFCINGPEIMSKLAGESESNLRKAFEEAEKNAPSIIFIDEIDSIAPKREKTHGEVERRIVSQLLTLMDGLKSRAHVIVMGATNRPNSIDPALRRFGRFDREIDIGVPDEIGRLEVLRIHTKNMKLAEDVDLERVSKDTHGYVGADLAALCTEAALQCIREKMDVIDLDDEEIDAEILNSMAVSNDHFQTALGNSNPSALRETVVEVPNVSWEDIGGLENVKRELQETVQYPVEHPEKFEKFGMSPSKGVLFYGPPGCGKTLLAKAIANECQANFISIKGPELLTMWFGESEANVREIFDKARQSAPCVLFFDELDSIATQRGNSVGDAGGAADRVLNQLLTEMDGMNAKKTVFIIGATNRPDIIDPALLRPGRLDQLIYIPLPDEESRYQIFKSCLRKSPVAKDVDLRALAKYTQGFSGADITEICQRSCKYAIRENIEKDIEKERKRAESPEAMEEDEEEIAEIKAGHFEESMKYARRSVSDADIRKYQAFAQTLQQSRGFGSEFRFPDAPTGTTGAFPGAAATVGGVDPFATSGGAADDDDLYS

SEQ ID NO: 96840 - protein, 727 aa, Arabidopsis thaliana
  peptide (1)..(727): Ceres Seq. ID no. 12734887
MNKVVRSNLRVRLGDVISVHQCPDVKYGNRVHILPLDDTIEGVSGNIFDAYLKPYFLEAYRPVRKGDLFLVRGGMRSIEFKVIETDPAEYCVVAPDTEIFCEGEPIKREDEERLDEVGYDDVGGVRKQMAQIRELVELPLRHPQLFKSIGVKPPKGILLYGPPGSGKTLIARAVANETGAFFFCINGPEIMSKLAGESESNLRKAFEEAEKNAPSIIFIDEIDSIAPKREKTHGEVERRIVSQLLTLMDGLKSRAHVIVMGATNRPNSIDPALRRFGRFDREIDIGVPDEIGRLEVLRIHTKNMKLAEDVDLERVSKDTHGYVGADLAALCTEAALQCIREKMDVIDLDDEEIDAEILNSMAVSNDHFQTALGNSNPSALRETVVEVPNVSWEDIGGLENVKRELQETVQYPVEHPEKFEKFGMSPSKGVLFYGPPGCGKTLLAKAIANECQANFISIKGPELLTMWFGESEANVREIFDKARQSAPCVLFFDELDSIATQRGNSVGDAGGAADRVLNQLLTEMDGMNAKKTVFIIGATNRPDIIDPALLRPGRLDQLIYIPLPDEESRYQIFKSCLRKSPVAKDVDLRALAKYTQGFSGADITEICQRSCKYAIRENIEKDIEKERKRAESPEAMEEDEEEIAEIKAGHFEESMKYARRSVSDADIRKYQAFAQTLQQSRGFGSEFRFPDAPTGTTGAFPGAAATVGGVDPFATSGGAADDDDLYS

SEQ ID NO: 96841 - DNA, 1643 bp, Arabidopsis thaliana
  misc_feature (1)..(1643): Ceres Seq. ID no. 12734891
  misc_feature (1)..(1643): Ortholog of  Ceres SEQ ID NO 13594209 as cited in SEQ ID NO 59089
  misc_feature (1)..(1643): Ortholog of  Ceres SEQ ID NO 13502874 as cited in SEQ ID NO 66298
  misc_feature (1)..(1643): Ortholog of  Ceres SEQ ID NO 12614124 as cited in SEQ ID NO 68392
gataagaaaatgtctatctttctttgtttcctcttacttcttccactctctttaatcttcttgaaaaagctcttaccgtcgaaagggaagcttcctccgggacctaagggtcttccgatcatcggtaacttgcaccagtttggaagatttcttcacaaatctcttcacaaaatctcccaagaatatggaccggtgatgcttctccatttcggggtggtccctgtgataattgtctcttccaaagaaggagctgaggaagtgctcaagactcacgatcttgagacttgtagccgacctaagacggtggggagcgggttgtttacttacaactttaaagatattggttttgctccgtatggtgagaattggcgagagatgaggaaaattgcggtttccgagctctttagccagaagaagctcaaatctttcaggtatattagagaggacgagagccaattgttggtccggaaggtatcaaaatctgctcttgagacaccaacttcatcagttaatttgaggaaggtcatttttaccttcgcggcaagtatcatttgtagactttcttttggacaaaatttttgcgattttgtcgatatggagacagtggaagagttggtgcttgaatcggagaccaacctcggctccctggcgtttgctgacttcttacctgcagggtggatcatagatcggatctccggtcagcattccacggtgatgaaagccttttccaaactcaccaatttctttgaacttgtgattgatgatcatttgaagagtgggaaaatcgaagatcactcagacatcatcagtgtcatgttggatatgatcaacaaacccaccgaagttggttcttataaagtcaccgatgatcatctcaaaggacttatgtcggatgtgtttttggctggagtgaacgcgggttccatcacaatgatatggacgatgacagagttaagtagacatccgagagtgatgagaaaacttcaagaagagattcgagcagcgctcggacccaacaaagagaaaatcacagaagaagacctcgagaaagttgagtacttgaagatggtgatcgaggaagcattcagattacacccaccggctcctctcttactcccaagactaacaatgtccgacatcaatattcaaggctacagcattccaaagaacaccatgatccaaatcaacacgtacacaattggacgtgaccccaaaaactggacaaaacccgacgagttcatccccgagaggtttgtcgataaccctatcgaatacaagggtcaacattttgagctattgccgtttggagccggacgtagggtctgtcccgggatggccacggggatcaccatcgtcgagcttgggcttcttagccttctttacttcttcgattggagtttgcccaatggaatgaccactaaagatattgacatggaagaagacggagcttttgtcatcgccaagaaagtctctcttgagctcgtaccaactcttcatcgctggtgaagcatgcaactataactatgttaaataatgacaagaattctatatttatgtccactttactaccggtttggattttgctttgttcatgtaatccgcatgtttcatgttatctttcaagttctgtttttatgttattg

SEQ ID NO: 96842 - protein, 501 aa, Arabidopsis thaliana
  peptide (1)..(501): Ceres Seq. ID no. 12734892
DKKMSIFLCFLLLLPLSLIFLKKLLPSKGKLPPGPKGLPIIGNLHQFGRFLHKSLHKISQEYGPVMLLHFGVVPVIIVSSKEGAEEVLKTHDLETCSRPKTVGSGLFTYNFKDIGFAPYGENWREMRKIAVSELFSQKKLKSFRYIREDESQLLVRKVSKSALETPTSSVNLRKVIFTFAASIICRLSFGQNFCDFVDMETVEELVLESETNLGSLAFADFLPAGWIIDRISGQHSTVMKAFSKLTNFFELVIDDHLKSGKIEDHSDIISVMLDMINKPTEVGSYKVTDDHLKGLMSDVFLAGVNAGSITMIWTMTELSRHPRVMRKLQEEIRAALGPNKEKITEEDLEKVEYLKMVIEEAFRLHPPAPLLLPRLTMSDINIQGYSIPKNTMIQINTYTIGRDPKNWTKPDEFIPERFVDNPIEYKGQHFELLPFGAGRRVCPGMATGITIVELGLLSLLYFFDWSLPNGMTTKDIDMEEDGAFVIAKKVSLELVPTLHRW

SEQ ID NO: 96843 - protein, 498 aa, Arabidopsis thaliana
  peptide (1)..(498): Ceres Seq. ID no. 12734893
MSIFLCFLLLLPLSLIFLKKLLPSKGKLPPGPKGLPIIGNLHQFGRFLHKSLHKISQEYGPVMLLHFGVVPVIIVSSKEGAEEVLKTHDLETCSRPKTVGSGLFTYNFKDIGFAPYGENWREMRKIAVSELFSQKKLKSFRYIREDESQLLVRKVSKSALETPTSSVNLRKVIFTFAASIICRLSFGQNFCDFVDMETVEELVLESETNLGSLAFADFLPAGWIIDRISGQHSTVMKAFSKLTNFFELVIDDHLKSGKIEDHSDIISVMLDMINKPTEVGSYKVTDDHLKGLMSDVFLAGVNAGSITMIWTMTELSRHPRVMRKLQEEIRAALGPNKEKITEEDLEKVEYLKMVIEEAFRLHPPAPLLLPRLTMSDINIQGYSIPKNTMIQINTYTIGRDPKNWTKPDEFIPERFVDNPIEYKGQHFELLPFGAGRRVCPGMATGITIVELGLLSLLYFFDWSLPNGMTTKDIDMEEDGAFVIAKKVSLELVPTLHRW

SEQ ID NO: 96844 - protein, 436 aa, Arabidopsis thaliana
  peptide (1)..(436): Ceres Seq. ID no. 12734894
MLLHFGVVPVIIVSSKEGAEEVLKTHDLETCSRPKTVGSGLFTYNFKDIGFAPYGENWREMRKIAVSELFSQKKLKSFRYIREDESQLLVRKVSKSALETPTSSVNLRKVIFTFAASIICRLSFGQNFCDFVDMETVEELVLESETNLGSLAFADFLPAGWIIDRISGQHSTVMKAFSKLTNFFELVIDDHLKSGKIEDHSDIISVMLDMINKPTEVGSYKVTDDHLKGLMSDVFLAGVNAGSITMIWTMTELSRHPRVMRKLQEEIRAALGPNKEKITEEDLEKVEYLKMVIEEAFRLHPPAPLLLPRLTMSDINIQGYSIPKNTMIQINTYTIGRDPKNWTKPDEFIPERFVDNPIEYKGQHFELLPFGAGRRVCPGMATGITIVELGLLSLLYFFDWSLPNGMTTKDIDMEEDGAFVIAKKVSLELVPTLHRW

SEQ ID NO: 96845 - DNA, 1224 bp, Arabidopsis thaliana
  misc_feature (1)..(1224): Ceres Seq. ID no. 12734895
  misc_feature (1)..(1224): Ortholog of  Ceres SEQ ID NO 13594209 as cited in SEQ ID NO 59089
  misc_feature (1)..(1224): Ortholog of  Ceres SEQ ID NO 13502874 as cited in SEQ ID NO 66298
  misc_feature (1)..(1224): Ortholog of  Ceres SEQ ID NO 12614124 as cited in SEQ ID NO 68392
atgttcttttatctttatttatcatcatcagctaaagaagttctcaagactcatgacctagagacatgcactcgacctaagatggtcacgaccggtttgttttcttacaacttcaaagacattggtttcactcaatatggagaggaatggggagagatgaaaaagcttatagggcttgagctctttagtccaaaaacgcaaaagtcttttaggtatatcagagaggaagagagtgacttgctggtcaagaaaatttcaaaatctgctcaaacacaaaccctagtggatttgggaaaaccccttttctccttcactgccggtattatatttagacttgcgtttggacagaacttccgtaagtgcgattttatcgatagggagagagtcgaagagctggtggtagagtcagagaccaacgtaggcaccttggcattttctgacttcttccccacgggtctcggatggcttatagaccggctctctggtcaaagttcgaggatgaacaaagtcttttccaaactcaccaatttatttgaacatgtgattgatgatcatttaaagactgaacaacatcaagatcactcaaacctcatcagtgccatgttgaatatgatcaataaacccaccaatataggctctttcaagatcacttccgatcatctcaaaggagtcatgtcggttagtgtgtatgatttcttaactggtactctgattcgagcaacactcggttccaacaaagagagaatcacagaagaagatctagagaaagttgagtacctaaagatggtgatcgaggaaacattcagactacacccacctgctccactcttgctcccaagattaacaatgtccgacgtcacaattcaaggctacaacattcccaaaaacaccatgattgagatcaacacttataccataggtcgtgatccaaaatgttggactaaccctgaagaattcattcctgagaggttttccaacacctctataaactacaagggtcagcatttcgagctcttgccctttggagctggtcgtaggagctgtcccggaatgtccttgggaatcaccattcttgagctaggccttcttaaccttctttatttctttgattggcgtttgcccaatggaatgaccattgctgacattgacatggaagaagttggagctttaaacatagctaagaaagtacctcttgagctcgtaccaactcttcatcattcgtga

SEQ ID NO: 96846 - protein, 407 aa, Arabidopsis thaliana
  peptide (1)..(407): Ceres Seq. ID no. 12734896
MFFYLYLSSSAKEVLKTHDLETCTRPKMVTTGLFSYNFKDIGFTQYGEEWGEMKKLIGLELFSPKTQKSFRYIREEESDLLVKKISKSAQTQTLVDLGKPLFSFTAGIIFRLAFGQNFRKCDFIDRERVEELVVESETNVGTLAFSDFFPTGLGWLIDRLSGQSSRMNKVFSKLTNLFEHVIDDHLKTEQHQDHSNLISAMLNMINKPTNIGSFKITSDHLKGVMSVSVYDFLTGTLIRATLGSNKERITEEDLEKVEYLKMVIEETFRLHPPAPLLLPRLTMSDVTIQGYNIPKNTMIEINTYTIGRDPKCWTNPEEFIPERFSNTSINYKGQHFELLPFGAGRRSCPGMSLGITILELGLLNLLYFFDWRLPNGMTIADIDMEEVGALNIAKKVPLELVPTLHHS

SEQ ID NO: 96847 - protein, 380 aa, Arabidopsis thaliana
  peptide (1)..(380): Ceres Seq. ID no. 12734897
MVTTGLFSYNFKDIGFTQYGEEWGEMKKLIGLELFSPKTQKSFRYIREEESDLLVKKISKSAQTQTLVDLGKPLFSFTAGIIFRLAFGQNFRKCDFIDRERVEELVVESETNVGTLAFSDFFPTGLGWLIDRLSGQSSRMNKVFSKLTNLFEHVIDDHLKTEQHQDHSNLISAMLNMINKPTNIGSFKITSDHLKGVMSVSVYDFLTGTLIRATLGSNKERITEEDLEKVEYLKMVIEETFRLHPPAPLLLPRLTMSDVTIQGYNIPKNTMIEINTYTIGRDPKCWTNPEEFIPERFSNTSINYKGQHFELLPFGAGRRSCPGMSLGITILELGLLNLLYFFDWRLPNGMTIADIDMEEVGALNIAKKVPLELVPTLHHS

SEQ ID NO: 96848 - protein, 355 aa, Arabidopsis thaliana
  peptide (1)..(355): Ceres Seq. ID no. 12734898
MKKLIGLELFSPKTQKSFRYIREEESDLLVKKISKSAQTQTLVDLGKPLFSFTAGIIFRLAFGQNFRKCDFIDRERVEELVVESETNVGTLAFSDFFPTGLGWLIDRLSGQSSRMNKVFSKLTNLFEHVIDDHLKTEQHQDHSNLISAMLNMINKPTNIGSFKITSDHLKGVMSVSVYDFLTGTLIRATLGSNKERITEEDLEKVEYLKMVIEETFRLHPPAPLLLPRLTMSDVTIQGYNIPKNTMIEINTYTIGRDPKCWTNPEEFIPERFSNTSINYKGQHFELLPFGAGRRSCPGMSLGITILELGLLNLLYFFDWRLPNGMTIADIDMEEVGALNIAKKVPLELVPTLHHS

SEQ ID NO: 96849 - DNA, 1017 bp, Arabidopsis thaliana
  misc_feature (1)..(1017): Ceres Seq. ID no. 12734899
  misc_feature (1)..(1017): Ortholog of  Ceres SEQ ID NO 13594209 as cited in SEQ ID NO 59089
  misc_feature (1)..(1017): Ortholog of  Ceres SEQ ID NO 13502874 as cited in SEQ ID NO 66298
atgcttctccgttttggagttgtccctgtggtcgtgttctcttccaaggaagcagctaaagaagttctcaaaactcatgacttagatacttgcacccgacctaagctagtcgcgaatgggttgttttctcgcaacttcaaagacattggtttcactcagtacggtgaagactggcgagagatgaaaaagctggtggggcttgagctctttagtccgaaaaagcataagtctttcaggtatatcagagaggaagaaggtgacttgctggtcaagaaaatatcaaattccgctcaaacacagaccctaatagatttgagaaaagcctctttctccttcaccgccggtacaatcttcagactagcctttggacagaacttccaccagtgcgatttcatggatatggacagacttgaagagctggtgctagaggcggaaaccaacggatgcatcttggcactcacagacttcttacccacgggtcttggttggcttgtagaccggatatctggatgtggttttggcgggagtgaatgcgggaacaatcacaatgatctacaaaaagtcgagtacttgaatatggtgatcaaagaaacattcagattacatccaccatctcccctcttgctaccaagagaaacaatgtccgatatcgagattcaaggctaccacattcccaagaacgcccttatcaggatcaacacttacactataggacgtgatctgaaatgttggtctaaccctgagaggtttttgaatacctcaatcaactacaaaggtcaggattacaagctcttgcccttcggagcaggccgtagaagctgtcctggtatgaacttgggaatcaccattcttgagctaggccttcttaacattctttacttctttgattggagttttcccaatggaatgaccattgaagacattgacatggaggaaaacggagctttaaacaaaacccttgagctcataccaactcttccatcagcactgtcagatggatcatctggatggagatga

SEQ ID NO: 96850 - protein, 338 aa, Arabidopsis thaliana
  peptide (1)..(338): Ceres Seq. ID no. 12734900
MLLRFGVVPVVVFSSKEAAKEVLKTHDLDTCTRPKLVANGLFSRNFKDIGFTQYGEDWREMKKLVGLELFSPKKHKSFRYIREEEGDLLVKKISNSAQTQTLIDLRKASFSFTAGTIFRLAFGQNFHQCDFMDMDRLEELVLEAETNGCILALTDFLPTGLGWLVDRISGCGFGGSECGNNHNDLQKVEYLNMVIKETFRLHPPSPLLLPRETMSDIEIQGYHIPKNALIRINTYTIGRDLKCWSNPERFLNTSINYKGQDYKLLPFGAGRRSCPGMNLGITILELGLLNILYFFDWSFPNGMTIEDIDMEENGALNKTLELIPTLPSALSDGSSGWR

SEQ ID NO: 96851 - protein, 278 aa, Arabidopsis thaliana
  peptide (1)..(278): Ceres Seq. ID no. 12734901
MKKLVGLELFSPKKHKSFRYIREEEGDLLVKKISNSAQTQTLIDLRKASFSFTAGTIFRLAFGQNFHQCDFMDMDRLEELVLEAETNGCILALTDFLPTGLGWLVDRISGCGFGGSECGNNHNDLQKVEYLNMVIKETFRLHPPSPLLLPRETMSDIEIQGYHIPKNALIRINTYTIGRDLKCWSNPERFLNTSINYKGQDYKLLPFGAGRRSCPGMNLGITILELGLLNILYFFDWSFPNGMTIEDIDMEENGALNKTLELIPTLPSALSDGSSGWR

SEQ ID NO: 96852 - protein, 207 aa, Arabidopsis thaliana
  peptide (1)..(207): Ceres Seq. ID no. 12734902
MDMDRLEELVLEAETNGCILALTDFLPTGLGWLVDRISGCGFGGSECGNNHNDLQKVEYLNMVIKETFRLHPPSPLLLPRETMSDIEIQGYHIPKNALIRINTYTIGRDLKCWSNPERFLNTSINYKGQDYKLLPFGAGRRSCPGMNLGITILELGLLNILYFFDWSFPNGMTIEDIDMEENGALNKTLELIPTLPSALSDGSSGWR

SEQ ID NO: 96853 - DNA, 2307 bp, Arabidopsis thaliana
  misc_feature (1)..(2307): Ceres Seq. ID no. 12734907
  misc_feature (1)..(2307): Ortholog of  Ceres SEQ ID NO 12586556 as cited in SEQ ID NO 64667
  misc_feature (1)..(2307): Ortholog of  Ceres SEQ ID NO 13660894 as cited in SEQ ID NO 67475
atggcgacaatgttacggttgggagctagagtttccgtcagcaacagtcagatactggcaacatcaagtgttgtatcaaccatcaagaccgaagaattaatgaatgatcacattaattccctatgtaaaagtaatttctaccgggaagcattggaagcgtttgattttgcgcagaagaactcaagcttcaagataaggttaagaacctacatctctttaatttgtgcttgctcttcatcgagatctctagcacaaggcagaaagatacatgatcacattttgaattccaactgcaagtatgatactattcttaataatcacattctaagtatgtatggaaaatgtggctcgctgagggatgccagagaggtttttgattttatgcctgaaaggaatttggtctcttacacatctgtcattactggctattcacagaacggtcagggagccgaggctatcagattatacttgaaaatgcttcaggaagatttagttcctgaccagtttgcatttggaagcattatcaaagcatgtgccagtagtagtgatgttgggttagggaagcaactgcatgctcaagtcattaagttggaatccagttctcatcttattgctcaaaatgctctgattgctatgtatgttcgcttcaatcaaatgtcagatgctagcagagtgttttatggtatcccaatgaaggatctaatttcgtggagttcaatcattgcagggttctcgcaacttgggtttgagtttgaagccctgagccacctaaaagaaatgttgtcttttggtgttttccatccaaatgaatatatatttggtagttctttaaaagcttgtagcagtctccttagaccagattatggaagccaaatacatgggttatgcattaagtcggagttagctggaaacgcaattgcaggctgttcgctctgtgacatgtatgctagatgcggtttcctgaattctgcaaggagagtgtttgatcagatagaaagacccgatacagcatcatggaatgtgatcattgctggacttgcaaataatggttacgctgatgaggctgtatcagttttctctcagatgaggagttctggttttattcctgatgccatctccttgcgttctttgctttgtgctcagacaaaaccaatggctttgtctcaaggaatgcaaattcactcttacattatcaagtggggtttcctggcagatcttacggtttgcaactctctgcttaccatgtacaccttctgctcagacttgtattgttgttttaatttatttgaagatttcagaaacaacgcagattctgtttcttggaatactattctgacggcttgtttgcaacacgaacagccagtagagatgttgagattgtttaagctgatgcttgtgtctgaatgtgagccagatcacataactatgggtaatctgttgcggggttgtgtggaaatctcatctctaaagttgggaagccaagtccattgctatagtttgaaaaccgggttggcgcctgagcaatttataaaaaatggactgattgatatgtatgccaagtgtggatcactggggcaagcgagaaggatttttgattcaatggataacagagatgtagtttcgtggagcaccttgatagttggatatgcacagtctggatttggagaggaagctctcatattgttcaaggaaatgaaaagtgcgggcatagagccaaatcatgtaacttttgtcggtgttcttactgcctgtagtcatgttgggctggtggaagaaggcttgaaactgtatgcgaccatgcaaactgaacacgggatttcaccaacaaaagagcactgctcttgcgtggtggacttactggctcgtgctggccgtttaaatgaagctgagagattcatcgatgaaatgaagttggaacctgatgttgtcgtgtggaagactctactgtctgcatgtaaaacccaaggaaatgttcatctcgcccaaaaagctgctgaaaatattctgaaaatcgatcctttcaactctacagctcatgtattgctctgcagcatgcatgcttcttctggaaattgggaaaatgctgcattgttgaggagctcaatgaaaaagcatgatgttaaaaaaattccaggacagagctggatcgaaattgaggacaaaattcatatattctttgctgaggatatttttcatccagagagggacgatatatatacagtcctgcacaacatctggtcgcagatgctagatgagtgtaatccgcaacacaagaaaagactccagtttatccatgaaaccggataa

SEQ ID NO: 96854 - protein, 768 aa, Arabidopsis thaliana
  peptide (1)..(768): Ceres Seq. ID no. 12734908
MATMLRLGARVSVSNSQILATSSVVSTIKTEELMNDHINSLCKSNFYREALEAFDFAQKNSSFKIRLRTYISLICACSSSRSLAQGRKIHDHILNSNCKYDTILNNHILSMYGKCGSLRDAREVFDFMPERNLVSYTSVITGYSQNGQGAEAIRLYLKMLQEDLVPDQFAFGSIIKACASSSDVGLGKQLHAQVIKLESSSHLIAQNALIAMYVRFNQMSDASRVFYGIPMKDLISWSSIIAGFSQLGFEFEALSHLKEMLSFGVFHPNEYIFGSSLKACSSLLRPDYGSQIHGLCIKSELAGNAIAGCSLCDMYARCGFLNSARRVFDQIERPDTASWNVIIAGLANNGYADEAVSVFSQMRSSGFIPDAISLRSLLCAQTKPMALSQGMQIHSYIIKWGFLADLTVCNSLLTMYTFCSDLYCCFNLFEDFRNNADSVSWNTILTACLQHEQPVEMLRLFKLMLVSECEPDHITMGNLLRGCVEISSLKLGSQVHCYSLKTGLAPEQFIKNGLIDMYAKCGSLGQARRIFDSMDNRDVVSWSTLIVGYAQSGFGEEALILFKEMKSAGIEPNHVTFVGVLTACSHVGLVEEGLKLYATMQTEHGISPTKEHCSCVVDLLARAGRLNEAERFIDEMKLEPDVVVWKTLLSACKTQGNVHLAQKAAENILKIDPFNSTAHVLLCSMHASSGNWENAALLRSSMKKHDVKKIPGQSWIEIEDKIHIFFAEDIFHPERDDIYTVLHNIWSQMLDECNPQHKKRLQFIHETG

SEQ ID NO: 96855 - protein, 765 aa, Arabidopsis thaliana
  peptide (1)..(765): Ceres Seq. ID no. 12734909
MLRLGARVSVSNSQILATSSVVSTIKTEELMNDHINSLCKSNFYREALEAFDFAQKNSSFKIRLRTYISLICACSSSRSLAQGRKIHDHILNSNCKYDTILNNHILSMYGKCGSLRDAREVFDFMPERNLVSYTSVITGYSQNGQGAEAIRLYLKMLQEDLVPDQFAFGSIIKACASSSDVGLGKQLHAQVIKLESSSHLIAQNALIAMYVRFNQMSDASRVFYGIPMKDLISWSSIIAGFSQLGFEFEALSHLKEMLSFGVFHPNEYIFGSSLKACSSLLRPDYGSQIHGLCIKSELAGNAIAGCSLCDMYARCGFLNSARRVFDQIERPDTASWNVIIAGLANNGYADEAVSVFSQMRSSGFIPDAISLRSLLCAQTKPMALSQGMQIHSYIIKWGFLADLTVCNSLLTMYTFCSDLYCCFNLFEDFRNNADSVSWNTILTACLQHEQPVEMLRLFKLMLVSECEPDHITMGNLLRGCVEISSLKLGSQVHCYSLKTGLAPEQFIKNGLIDMYAKCGSLGQARRIFDSMDNRDVVSWSTLIVGYAQSGFGEEALILFKEMKSAGIEPNHVTFVGVLTACSHVGLVEEGLKLYATMQTEHGISPTKEHCSCVVDLLARAGRLNEAERFIDEMKLEPDVVVWKTLLSACKTQGNVHLAQKAAENILKIDPFNSTAHVLLCSMHASSGNWENAALLRSSMKKHDVKKIPGQSWIEIEDKIHIFFAEDIFHPERDDIYTVLHNIWSQMLDECNPQHKKRLQFIHETG

SEQ ID NO: 96856 - protein, 735 aa, Arabidopsis thaliana
  peptide (1)..(735): Ceres Seq. ID no. 12734910
MNDHINSLCKSNFYREALEAFDFAQKNSSFKIRLRTYISLICACSSSRSLAQGRKIHDHILNSNCKYDTILNNHILSMYGKCGSLRDAREVFDFMPERNLVSYTSVITGYSQNGQGAEAIRLYLKMLQEDLVPDQFAFGSIIKACASSSDVGLGKQLHAQVIKLESSSHLIAQNALIAMYVRFNQMSDASRVFYGIPMKDLISWSSIIAGFSQLGFEFEALSHLKEMLSFGVFHPNEYIFGSSLKACSSLLRPDYGSQIHGLCIKSELAGNAIAGCSLCDMYARCGFLNSARRVFDQIERPDTASWNVIIAGLANNGYADEAVSVFSQMRSSGFIPDAISLRSLLCAQTKPMALSQGMQIHSYIIKWGFLADLTVCNSLLTMYTFCSDLYCCFNLFEDFRNNADSVSWNTILTACLQHEQPVEMLRLFKLMLVSECEPDHITMGNLLRGCVEISSLKLGSQVHCYSLKTGLAPEQFIKNGLIDMYAKCGSLGQARRIFDSMDNRDVVSWSTLIVGYAQSGFGEEALILFKEMKSAGIEPNHVTFVGVLTACSHVGLVEEGLKLYATMQTEHGISPTKEHCSCVVDLLARAGRLNEAERFIDEMKLEPDVVVWKTLLSACKTQGNVHLAQKAAENILKIDPFNSTAHVLLCSMHASSGNWENAALLRSSMKKHDVKKIPGQSWIEIEDKIHIFFAEDIFHPERDDIYTVLHNIWSQMLDECNPQHKKRLQFIHETG

SEQ ID NO: 96857 - DNA, 417 bp, Arabidopsis thaliana
  misc_feature (1)..(417): Ceres Seq. ID no. 12734943
  misc_feature (1)..(417): Ortholog of  Ceres SEQ ID NO 12783998 as cited in SEQ ID NO 61535
atggctccgaaagcggcagagaagaaaccggctgggaagaagccagcagaaaaagctccggcagagaaattaccaaaggcggagaagaagatcaccaaggaaggtggaagcgaaaagaagaagaagaaatcgaagaagaacatcgagacgtacaagatctacatcttcaaggttctgaaacaagttcatcctgatatcggaatctccgggaaagcgatggggatcatgaacagtttcatcaacgacatcttcgagaaactagctcaggaatcatcgcgattggctaggtacaacaagaaaccgacgatcacttctcgggaaattcagacggcggtgagacttgtgttgcctggagagctctcgaaacacgctgtttctgaaggcactaaggcggttactaaattcactagctcgtag

SEQ ID NO: 96858 - protein, 138 aa, Arabidopsis thaliana
  peptide (1)..(138): Ceres Seq. ID no. 12734944
MAPKAAEKKPAGKKPAEKAPAEKLPKAEKKITKEGGSEKKKKKSKKNIETYKIYIFKVLKQVHPDIGISGKAMGIMNSFINDIFEKLAQESSRLARYNKKPTITSREIQTAVRLVLPGELSKHAVSEGTKAVTKFTSS

SEQ ID NO: 96859 - DNA, 2393 bp, Arabidopsis thaliana
  misc_feature (1)..(2393): Ceres Seq. ID no. 12734949
  misc_feature (1)..(2393): Ortholog of  Ceres SEQ ID NO 13657677 as cited in SEQ ID NO 66119
atcttctctggaaactgaaaactatggctttctcttcatgtctcaaattctatccattttctatctctcaagctgtaaccctaactcatcattccttctctctcaatctaactcctccttcttctaccatctccttcgcttctcctcactcagcagctctctcctctaccgatgtcaagcttctcgactcactccgtagccagcctgatgattccgccgcacttcgtctctttaatctggcctctaagaagccaaatttctcacctgaacctgctctatacgaagagattctccttcggctaggtcggtctggttcgtttgatgacatgaagaaaattcttgaagacatgaagagttccagatgcgaaatgggtacttctactttcttgatattaatcgagagttatgctcagttcgaattgcaagatgagattttaagtgttgttgattggatgattgacgaattcgggttaaaacccgatacccatttttataaccggatgttgaatcttctcgttgatgggaatagtctgaaactcgttgagatttctcacgcgaagatgagtgtctgggggattaaaccagatgtatctacgtttaatgttttgatcaaagctttgtgtagagctcatcagcttagacctgcgattttgatgttggaggatatgcctagttacggtcttgttcctgatgagaagacatttacaacggttatgcaaggctatattgaagaaggggacttggatggagctttgaggattagggaacagatggttgagtttggttgttcatggtctaatgtgagtgttaatgttattgttcatggtttttgtaaggaagggagagtcgaagacgctctcaatttcattcaggagatgtctaatcaagacgggttttttccggatcagtacacgtttaatacgttagttaatggtttgtgtaaagcagggcatgtgaagcatgctattgagattatggatgtgatgcttcaagaagggtatgatccagatgtgtatacttataactcggtgatttcgggtttgtgtaagcttggagaggtgaaagaagcagtggaggttcttgatcagatgattactagagattgttctccgaacacggttacttacaacactttgatcagcacgttatgtaaagagaatcaggtcgaggaagctacggagcttgcccgtgttctcaccagcaaagggatccttcctgacgtttgtacatttaactctttgatccaaggtttgtgtttgactaggaatcaccgggttgcgatggagttgtttgaagagatgaggagcaaaggatgtgagcctgacgagttcacttacaatatgctgattgatagcttatgctccaaagggaagctagatgaagctctgaacatgcttaaacaaatggaattgagtggttgtgcacggagtgtgataacttacaacactttgattgatgggttttgcaaagccaacaagactagagaagccgaggagatatttgatgagatggaagtacatggagtttcaagaaactctgttacatacaacacactcatcgatgggctttgtaaaagcaggcgagtagaggacgcggctcagctcatggatcaaatgattatggaaggacagaaacctgacaagtacacatacaactcgcttttaacacatttctgcagaggaggtgacataaagaaagctgcggatatcgtgcaagccatgacctcaaatgggtgtgaaccagacattgtgacctatggaaccttgataagcggtttgtgtaaagctggtagagttgaagttgcaagtaagcttttgaggtcaattcagatgaaagggattaatttgacaccgcatgcttataatccggtgattcaagggttgtttagaaagaggaaaacaacagaagctataaatttgtttagagaaatgcttgaacagaatgaagctccaccagatgcagtatcctacagaatcgttttccgtgggctatgtaatggaggtggaccaatccgtgaagcagtggactttcttgttgagctgttagagaaaggatttgtacctgagttttcttctttgtacatgttggctgaaggtcttctcactttgtcaatggaagaaacactagtcaagttagtgaacatggtgatgcagaaagctagattctcggaggaagaggtttcaatggtgaaaggtttgcttaaaatcaggaaatttcaggacgctttggccactcttggcggcgtcttggacagtcgccagccgaggagaacctaccggtcaagatgatagatacctttagaaaaagtatcgttcccaatttcgtagaagatatgtatgatgttatgaatatgatttcctataaagttttggggtaattcatccatttaatac

SEQ ID NO: 96860 - protein, 761 aa, Arabidopsis thaliana
  peptide (1)..(761): Ceres Seq. ID no. 12734950
LLWKLKTMAFSSCLKFYPFSISQAVTLTHHSFSLNLTPPSSTISFASPHSAALSSTDVKLLDSLRSQPDDSAALRLFNLASKKPNFSPEPALYEEILLRLGRSGSFDDMKKILEDMKSSRCEMGTSTFLILIESYAQFELQDEILSVVDWMIDEFGLKPDTHFYNRMLNLLVDGNSLKLVEISHAKMSVWGIKPDVSTFNVLIKALCRAHQLRPAILMLEDMPSYGLVPDEKTFTTVMQGYIEEGDLDGALRIREQMVEFGCSWSNVSVNVIVHGFCKEGRVEDALNFIQEMSNQDGFFPDQYTFNTLVNGLCKAGHVKHAIEIMDVMLQEGYDPDVYTYNSVISGLCKLGEVKEAVEVLDQMITRDCSPNTVTYNTLISTLCKENQVEEATELARVLTSKGILPDVCTFNSLIQGLCLTRNHRVAMELFEEMRSKGCEPDEFTYNMLIDSLCSKGKLDEALNMLKQMELSGCARSVITYNTLIDGFCKANKTREAEEIFDEMEVHGVSRNSVTYNTLIDGLCKSRRVEDAAQLMDQMIMEGQKPDKYTYNSLLTHFCRGGDIKKAADIVQAMTSNGCEPDIVTYGTLISGLCKAGRVEVASKLLRSIQMKGINLTPHAYNPVIQGLFRKRKTTEAINLFREMLEQNEAPPDAVSYRIVFRGLCNGGGPIREAVDFLVELLEKGFVPEFSSLYMLAEGLLTLSMEETLVKLVNMVMQKARFSEEEVSMVKGLLKIRKFQDALATLGGVLDSRQPRRTYRSR

SEQ ID NO: 96861 - protein, 754 aa, Arabidopsis thaliana
  peptide (1)..(754): Ceres Seq. ID no. 12734951
MAFSSCLKFYPFSISQAVTLTHHSFSLNLTPPSSTISFASPHSAALSSTDVKLLDSLRSQPDDSAALRLFNLASKKPNFSPEPALYEEILLRLGRSGSFDDMKKILEDMKSSRCEMGTSTFLILIESYAQFELQDEILSVVDWMIDEFGLKPDTHFYNRMLNLLVDGNSLKLVEISHAKMSVWGIKPDVSTFNVLIKALCRAHQLRPAILMLEDMPSYGLVPDEKTFTTVMQGYIEEGDLDGALRIREQMVEFGCSWSNVSVNVIVHGFCKEGRVEDALNFIQEMSNQDGFFPDQYTFNTLVNGLCKAGHVKHAIEIMDVMLQEGYDPDVYTYNSVISGLCKLGEVKEAVEVLDQMITRDCSPNTVTYNTLISTLCKENQVEEATELARVLTSKGILPDVCTFNSLIQGLCLTRNHRVAMELFEEMRSKGCEPDEFTYNMLIDSLCSKGKLDEALNMLKQMELSGCARSVITYNTLIDGFCKANKTREAEEIFDEMEVHGVSRNSVTYNTLIDGLCKSRRVEDAAQLMDQMIMEGQKPDKYTYNSLLTHFCRGGDIKKAADIVQAMTSNGCEPDIVTYGTLISGLCKAGRVEVASKLLRSIQMKGINLTPHAYNPVIQGLFRKRKTTEAINLFREMLEQNEAPPDAVSYRIVFRGLCNGGGPIREAVDFLVELLEKGFVPEFSSLYMLAEGLLTLSMEETLVKLVNMVMQKARFSEEEVSMVKGLLKIRKFQDALATLGGVLDSRQPRRTYRSR

SEQ ID NO: 96862 - protein, 653 aa, Arabidopsis thaliana
  peptide (1)..(653): Ceres Seq. ID no. 12734952
MKKILEDMKSSRCEMGTSTFLILIESYAQFELQDEILSVVDWMIDEFGLKPDTHFYNRMLNLLVDGNSLKLVEISHAKMSVWGIKPDVSTFNVLIKALCRAHQLRPAILMLEDMPSYGLVPDEKTFTTVMQGYIEEGDLDGALRIREQMVEFGCSWSNVSVNVIVHGFCKEGRVEDALNFIQEMSNQDGFFPDQYTFNTLVNGLCKAGHVKHAIEIMDVMLQEGYDPDVYTYNSVISGLCKLGEVKEAVEVLDQMITRDCSPNTVTYNTLISTLCKENQVEEATELARVLTSKGILPDVCTFNSLIQGLCLTRNHRVAMELFEEMRSKGCEPDEFTYNMLIDSLCSKGKLDEALNMLKQMELSGCARSVITYNTLIDGFCKANKTREAEEIFDEMEVHGVSRNSVTYNTLIDGLCKSRRVEDAAQLMDQMIMEGQKPDKYTYNSLLTHFCRGGDIKKAADIVQAMTSNGCEPDIVTYGTLISGLCKAGRVEVASKLLRSIQMKGINLTPHAYNPVIQGLFRKRKTTEAINLFREMLEQNEAPPDAVSYRIVFRGLCNGGGPIREAVDFLVELLEKGFVPEFSSLYMLAEGLLTLSMEETLVKLVNMVMQKARFSEEEVSMVKGLLKIRKFQDALATLGGVLDSRQPRRTYRSR

SEQ ID NO: 96863 - DNA, 1623 bp, Arabidopsis thaliana
  misc_feature (1)..(1623): Ceres Seq. ID no. 12734957
  misc_feature (1)..(1623): Ortholog of  Ceres SEQ ID NO 12615972 as cited in SEQ ID NO 62455
  misc_feature (1)..(1623): Ortholog of  Ceres SEQ ID NO 13596229 as cited in SEQ ID NO 68800
atttatttttcttactaaaacttttgtttataaattagtttgtaaacaattttgagacacgaaataacataacttttcctttttttgttttgatgattgttttttaggaaccatgtgtgatgcatatttggtaaagaccattgacttatttaactctttcctttttttcttgttttcagactcaaaaactccaaccaaaatttgcttattgttgtatagattgaactttgcacttagctcccaaagtccaacacccgattaaaaactcccataaagagctaaacacgaaacctaatttctccctacacacatctcaaatctctccaattttgttcaaagctcgaattctgttcaaagctcggatttttaattgcttcaatgggtgagaaagattcagaaacagctccgatttgggggaaaactcgagagagagagaggagcaacaacaacaatatacagccaatggatttagagtcgtcctcttctgtatctgggcaacaacgatcgttgactcagagtcgaagttcttatgaagaacgaggtagaggagttaaagagtttcggagttggtttccttggctcattccttgtttcgttgttgctaacgttgccgtcttcgtgatcaccataacaccagagaaaatcctcttctgggtccttcctctctcacgttacaaacaatgggtggattagatgttaaaaaagtggttaaaggagatgaaggatggcgtctactttcttgcaattggttacatggaggagttgttcatttactgatgaacatgttgactcttttattcatcggtatacgtatggaacgtgaatttggttttattcggattggattgctttatttgatatcagggtttggaggaagcatattgtcagctcttttcctccgttcaaacatctctgttggagcatctggtgccgtgtttggtttacttggaggaatgctctctgagatctttatcaactggacaatctattctaacaaggttgtgacgattgtaactcttgtattgattgtggcggtgaacttggggctcggtgtgctccctggagtagataactttgctcatatcggagggtttgctacaggttttcttcttggatttgtgctcttaatccgtccccattacggatggatcaaccaaagaaacggtcctggagctaaaccccacaggttcaagatatatcagggcatattatggactatctctcttctcatcttggtcgctgggttcattgttggattgatctctctcttcaacaatgtcgatggaaacgaacattgttcgtggtgtcattatctttcatgtgttccaacatctaaatggagctgtaaccgagaaccagcctcttgcacgacgactcaattaggtaaccaattgagcatgacttgtttgaggaatgggaaatcagcatcttacattttggcaaatccctcggattcacggattaatagcttatgtgttcagctttgccgttgatttactgatttttagaaatattattatgtacacaaacacactctacactgtatctatcatatttttttcttgcttattatgtgtatgttttatagaggcccttgttcaataaataatacaatgttttcct

SEQ ID NO: 96864 - protein, 270 aa, Arabidopsis thaliana
  peptide (1)..(270): Ceres Seq. ID no. 12734958
MGGLDVKKVVKGDEGWRLLSCNWLHGGVVHLLMNMLTLLFIGIRMEREFGFIRIGLLYLISGFGGSILSALFLRSNISVGASGAVFGLLGGMLSEIFINWTIYSNKVVTIVTLVLIVAVNLGLGVLPGVDNFAHIGGFATGFLLGFVLLIRPHYGWINQRNGPGAKPHRFKIYQGILWTISLLILVAGFIVGLISLFNNVDGNEHCSWCHYLSCVPTSKWSCNREPASCTTTQLGNQLSMTCLRNGKSASYILANPSDSRINSLCVQLCR

SEQ ID NO: 96865 - protein, 238 aa, Arabidopsis thaliana
  peptide (1)..(238): Ceres Seq. ID no. 12734959
MNMLTLLFIGIRMEREFGFIRIGLLYLISGFGGSILSALFLRSNISVGASGAVFGLLGGMLSEIFINWTIYSNKVVTIVTLVLIVAVNLGLGVLPGVDNFAHIGGFATGFLLGFVLLIRPHYGWINQRNGPGAKPHRFKIYQGILWTISLLILVAGFIVGLISLFNNVDGNEHCSWCHYLSCVPTSKWSCNREPASCTTTQLGNQLSMTCLRNGKSASYILANPSDSRINSLCVQLCR

SEQ ID NO: 96866 - protein, 236 aa, Arabidopsis thaliana
  peptide (1)..(236): Ceres Seq. ID no. 12734960
MLTLLFIGIRMEREFGFIRIGLLYLISGFGGSILSALFLRSNISVGASGAVFGLLGGMLSEIFINWTIYSNKVVTIVTLVLIVAVNLGLGVLPGVDNFAHIGGFATGFLLGFVLLIRPHYGWINQRNGPGAKPHRFKIYQGILWTISLLILVAGFIVGLISLFNNVDGNEHCSWCHYLSCVPTSKWSCNREPASCTTTQLGNQLSMTCLRNGKSASYILANPSDSRINSLCVQLCR

SEQ ID NO: 96867 - DNA, 2034 bp, Arabidopsis thaliana
  misc_feature (1)..(2034): Ceres Seq. ID no. 12734965
  misc_feature (1)..(2034): Ortholog of  Ceres SEQ ID NO 13655640 as cited in SEQ ID NO 63844
atgttcgtcaagctcaagctcatcttcttcttcttcctactctgtcaaattatgatttcttcctctcaaaatctcaacttcacctacaatggtttccatcctccattaacagatatctcactccaaggtctcgcaacagtaacacccaatggtctcttgaagcttaccaacacatcggtacaaaaaaccggtcacgccttctgtactgaacgaatccggttcaaagattcccaaaacggcaacgtatcatccttctccacaaccttcgtcttcgcgatacattctcagatcccaacactaagcggccatggaatcgccttcgttgtagctccaacgctaggtcttccttttgcacttcctagtcaatacatcggtctcttcaacatctctaacaatggtaacgacacgaatcacatctttgccgtcgaattcgatacaatccagagtagcgagtttggagatccaaacgataatcacgtcggaatcgatctcaacggtttacgatcggcgaattactcgacggcgggatatagggatgatcacgataagtttcagaatctgagtttgattagtcgcaaacggatccaagtttggatcgattacgataatcgtagtcatcgaattgatgtcaccgtggctccgtttgattctgataaacctagaaaacctctagtttcgtatgtgagagatctttcttcgattcttctagaagatatgtatgtaggtttctcatctgcgactggttcagttctctcggagcatttcttagtcggatggagtttccggttaaacggagaagctccgatgctctcgttatcgaaactcccgaagcttcctcgatttgagcctagaagaatctctgaattctacaaaatcggtatgcctttgatttcactatctctgatcttctctatcatcttcctcgctttctacatcgtgaggaggaagaagaagtacgaggaagagcttgatgattgggaaacagagtttgggaagaatcgattcagattcaaggagctctatcacgcgaccaaaggttttaaggagaaggatcttctcggctccggtggatttgggagagtttacagaggcattttaccaacgacgaagcttgaagtcgctgtgaagagagtctcacatgattcaaaacaaggtatgaaagagtttgtggcggagattgtgagtattggtaggatgagtcaccggaatttagttcctctcttgggttactgtcgccggagaggagagcttcttttggtttacgattacatgcctaatgggagcttagataagtatctttacaacaatccggagactaccttagattggaaacaaagatctacgattatcaaaggagttgcttcaggattgttctatcttcatgaggaatgggaacaagttgtgattcaccgtgacgtgaaagctagcaatgttctgttagatgctgatttcaatggtagactcggtgattttgggttggctcggttgtatgatcacggctcggatcctcagaccactcacgttgttggaacattgggttacttagcacctgaacattcccggactggacgtgccactaccacgactgatgtctatgcgtttggtgcgtttcttttagaagttgtttccggtagacgacccatcgagttccatagtgcaagcgatgatacgttcttgcttgtggaatgggttttcagtttgtggctcagaggtaacataatggaagcgaaagatccgaagctcggttcttcaggttatgatcttgaagaggttgaaatggtattgaaactcggtctgttgtgttcgcattcagaccctcgggctagaccaagtatgaggcaggtcttacaatatctaagaggagacatggcactgcctgaattaacgcccttggatttgtcggcggggagcgtgatgaatctgggaggccgggacggttttagcggtattgcaatgactgatttttccactgtgtttaaagggtttaccggcggatcttccattgctgactctctactctccggtgggaggtga

SEQ ID NO: 96868 - protein, 677 aa, Arabidopsis thaliana
  peptide (1)..(677): Ceres Seq. ID no. 12734966
MFVKLKLIFFFFLLCQIMISSSQNLNFTYNGFHPPLTDISLQGLATVTPNGLLKLTNTSVQKTGHAFCTERIRFKDSQNGNVSSFSTTFVFAIHSQIPTLSGHGIAFVVAPTLGLPFALPSQYIGLFNISNNGNDTNHIFAVEFDTIQSSEFGDPNDNHVGIDLNGLRSANYSTAGYRDDHDKFQNLSLISRKRIQVWIDYDNRSHRIDVTVAPFDSDKPRKPLVSYVRDLSSILLEDMYVGFSSATGSVLSEHFLVGWSFRLNGEAPMLSLSKLPKLPRFEPRRISEFYKIGMPLISLSLIFSIIFLAFYIVRRKKKYEEELDDWETEFGKNRFRFKELYHATKGFKEKDLLGSGGFGRVYRGILPTTKLEVAVKRVSHDSKQGMKEFVAEIVSIGRMSHRNLVPLLGYCRRRGELLLVYDYMPNGSLDKYLYNNPETTLDWKQRSTIIKGVASGLFYLHEEWEQVVIHRDVKASNVLLDADFNGRLGDFGLARLYDHGSDPQTTHVVGTLGYLAPEHSRTGRATTTTDVYAFGAFLLEVVSGRRPIEFHSASDDTFLLVEWVFSLWLRGNIMEAKDPKLGSSGYDLEEVEMVLKLGLLCSHSDPRARPSMRQVLQYLRGDMALPELTPLDLSAGSVMNLGGRDGFSGIAMTDFSTVFKGFTGGSSIADSLLSGGR

SEQ ID NO: 96869 - protein, 660 aa, Arabidopsis thaliana
  peptide (1)..(660): Ceres Seq. ID no. 12734967
MISSSQNLNFTYNGFHPPLTDISLQGLATVTPNGLLKLTNTSVQKTGHAFCTERIRFKDSQNGNVSSFSTTFVFAIHSQIPTLSGHGIAFVVAPTLGLPFALPSQYIGLFNISNNGNDTNHIFAVEFDTIQSSEFGDPNDNHVGIDLNGLRSANYSTAGYRDDHDKFQNLSLISRKRIQVWIDYDNRSHRIDVTVAPFDSDKPRKPLVSYVRDLSSILLEDMYVGFSSATGSVLSEHFLVGWSFRLNGEAPMLSLSKLPKLPRFEPRRISEFYKIGMPLISLSLIFSIIFLAFYIVRRKKKYEEELDDWETEFGKNRFRFKELYHATKGFKEKDLLGSGGFGRVYRGILPTTKLEVAVKRVSHDSKQGMKEFVAEIVSIGRMSHRNLVPLLGYCRRRGELLLVYDYMPNGSLDKYLYNNPETTLDWKQRSTIIKGVASGLFYLHEEWEQVVIHRDVKASNVLLDADFNGRLGDFGLARLYDHGSDPQTTHVVGTLGYLAPEHSRTGRATTTTDVYAFGAFLLEVVSGRRPIEFHSASDDTFLLVEWVFSLWLRGNIMEAKDPKLGSSGYDLEEVEMVLKLGLLCSHSDPRARPSMRQVLQYLRGDMALPELTPLDLSAGSVMNLGGRDGFSGIAMTDFSTVFKGFTGGSSIADSLLSGGR

SEQ ID NO: 96870 - protein, 439 aa, Arabidopsis thaliana
  peptide (1)..(439): Ceres Seq. ID no. 12734968
MYVGFSSATGSVLSEHFLVGWSFRLNGEAPMLSLSKLPKLPRFEPRRISEFYKIGMPLISLSLIFSIIFLAFYIVRRKKKYEEELDDWETEFGKNRFRFKELYHATKGFKEKDLLGSGGFGRVYRGILPTTKLEVAVKRVSHDSKQGMKEFVAEIVSIGRMSHRNLVPLLGYCRRRGELLLVYDYMPNGSLDKYLYNNPETTLDWKQRSTIIKGVASGLFYLHEEWEQVVIHRDVKASNVLLDADFNGRLGDFGLARLYDHGSDPQTTHVVGTLGYLAPEHSRTGRATTTTDVYAFGAFLLEVVSGRRPIEFHSASDDTFLLVEWVFSLWLRGNIMEAKDPKLGSSGYDLEEVEMVLKLGLLCSHSDPRARPSMRQVLQYLRGDMALPELTPLDLSAGSVMNLGGRDGFSGIAMTDFSTVFKGFTGGSSIADSLLSGGR

SEQ ID NO: 96871 - DNA, 1134 bp, Arabidopsis thaliana
  misc_feature (1)..(1134): Ceres Seq. ID no. 12734972
  misc_feature (1)..(1134): Ortholog of  Ceres SEQ ID NO 13585143 as cited in SEQ ID NO 67757
gaacgaacactctcgagacggaatcgatggcgaattctcagacggtgatggctatgatcaggttggctagacctcctttccgcaacaatcacgataaggttgctttcgctattcactcttctttcgtcgcttccggttatatcctcaccgccaccggacggcctgctttcgccgacgaggctctctcttcgtcttctcagaatgatgttggaatcgaaggatggaacgaattcgagggagagtatgcgtttgtctatgcgaatccgaagaaagggtcaaagaaaattctggttaagtgtttggcgatggatgataaacttcttgttgatgccatagctgatggtggagcagaacctgctcatcttgagattaaagttggggattatgctgaggaaagcaatgagggggattactctgcgcagttcaagaatttggataagttagtgactgatttgcagagtgagattatcgataagcttgatggaaaaccaaaacctgttgcttcgagagcacagtccagctctgagactaatgaagagcctagatattacgatgatacgcctaatccattaggccctcagattcacccctcaggcgtggtagttcctccgatacctggtaatggtggttacagtgatctcttccctggcccaggtgctggaatgtaccctggcaggggtggttttggggatggaagcatgcttgtaggacctactgatcctcgctttttcccatttggtgatggttctgatcgacctggcttcatgggaccaccacacccgggtatgccacctcctggtgcgcgttttgatccttatggtccacccggtgttccaggttttgagccaggccggttcacaagacaacctccaagagggccaggaggtgggcatccagacctcgagcattttcccggcggttcagattttatatagtaaagtaaagccatcgccaaggaaatagagaaagtgtgtgcacaacttaaagtatggtagtaactacatatagacaataggatctatgtggtttgttttttctcagctgtttttttgtttggtggtgttgttggttttattccccagcacactttttataacttcaataaatatataaataaagacttggtttatttcg

SEQ ID NO: 96872 - protein, 310 aa, Arabidopsis thaliana
  peptide (1)..(310): Ceres Seq. ID no. 12734973
TNTLETESMANSQTVMAMIRLARPPFRNNHDKVAFAIHSSFVASGYILTATGRPAFADEALSSSSQNDVGIEGWNEFEGEYAFVYANPKKGSKKILVKCLAMDDKLLVDAIADGGAEPAHLEIKVGDYAEESNEGDYSAQFKNLDKLVTDLQSEIIDKLDGKPKPVASRAQSSSETNEEPRYYDDTPNPLGPQIHPSGVVVPPIPGNGGYSDLFPGPGAGMYPGRGGFGDGSMLVGPTDPRFFPFGDGSDRPGFMGPPHPGMPPPGARFDPYGPPGVPGFEPGRFTRQPPRGPGGGHPDLEHFPGGSDFI

SEQ ID NO: 96873 - protein, 302 aa, Arabidopsis thaliana
  peptide (1)..(302): Ceres Seq. ID no. 12734974
MANSQTVMAMIRLARPPFRNNHDKVAFAIHSSFVASGYILTATGRPAFADEALSSSSQNDVGIEGWNEFEGEYAFVYANPKKGSKKILVKCLAMDDKLLVDAIADGGAEPAHLEIKVGDYAEESNEGDYSAQFKNLDKLVTDLQSEIIDKLDGKPKPVASRAQSSSETNEEPRYYDDTPNPLGPQIHPSGVVVPPIPGNGGYSDLFPGPGAGMYPGRGGFGDGSMLVGPTDPRFFPFGDGSDRPGFMGPPHPGMPPPGARFDPYGPPGVPGFEPGRFTRQPPRGPGGGHPDLEHFPGGSDFI

SEQ ID NO: 96874 - protein, 295 aa, Arabidopsis thaliana
  peptide (1)..(295): Ceres Seq. ID no. 12734975
MAMIRLARPPFRNNHDKVAFAIHSSFVASGYILTATGRPAFADEALSSSSQNDVGIEGWNEFEGEYAFVYANPKKGSKKILVKCLAMDDKLLVDAIADGGAEPAHLEIKVGDYAEESNEGDYSAQFKNLDKLVTDLQSEIIDKLDGKPKPVASRAQSSSETNEEPRYYDDTPNPLGPQIHPSGVVVPPIPGNGGYSDLFPGPGAGMYPGRGGFGDGSMLVGPTDPRFFPFGDGSDRPGFMGPPHPGMPPPGARFDPYGPPGVPGFEPGRFTRQPPRGPGGGHPDLEHFPGGSDFI

SEQ ID NO: 96875 - DNA, 960 bp, Arabidopsis thaliana
  misc_feature (1)..(960): Ceres Seq. ID no. 12734980
  misc_feature (1)..(960): Ortholog of  Ceres SEQ ID NO 14306349 as cited in SEQ ID NO 59320
aacatatacgcgtcctatttccacgttctctctatattacatttttccttgaaaacatctcgaggttcaaaatctttaacccctacaaatcaagaaaaggagacagaggagaagagagaaaagaaaaacgcagaaacaatgtctttttcttccctcaaattgccaatctttctcattctctcaagtcttctccatgcggctataggggaaaacattgtttgcgagaatctgccaacaaatatgtgctcgttctcaatatccgcttccgggaaaagatgtatattggagacggctaatgtcgccggagaattcacttgccgcacttccgcagtggacgtggaagggattgtaaaccacgtggagaccgacgagtgcgtttccgcttgtggggttgatcggaaaaccgtagggatctcgtcagactccttgatggaggcaggtttcgccgctaagctttgctcatccgcttgcttggactattgccctaacattcttgatctctatttcaacctcgccgccggtgaaggtgcatttttacctgatctatgtgatgctcaacggatgaatccccagcgttcgatgatggaattcatcagctccggcgccgcaccaggccctgtctccgaaattgcaccaggccccacctccgaagaagtctcatctcctgctctagctccggcttctatgtaaaatgttcattaattccacatgtgtttaatactttatatttatattttcgattgatgatgatccatatataatggaccgtatcttacattttctatgatttgatacggatatcatcaattgattcatatgaaagaagaaggatacagagtgagcttgatttttgtttatgtttcttaatcaacatttcactgtataataacaacttcgtataccagtgtgttgtcttgttcgttaaataaatatacgtatgccaagtgcaatcgcatattt

SEQ ID NO: 96876 - protein, 229 aa, Arabidopsis thaliana
  peptide (1)..(229): Ceres Seq. ID no. 12734981
NIYASYFHVLSILHFSLKTSRGSKSLTPTNQEKETEEKREKKNAETMSFSSLKLPIFLILSSLLHAAIGENIVCENLPTNMCSFSISASGKRCILETANVAGEFTCRTSAVDVEGIVNHVETDECVSACGVDRKTVGISSDSLMEAGFAAKLCSSACLDYCPNILDLYFNLAAGEGAFLPDLCDAQRMNPQRSMMEFISSGAAPGPVSEIAPGPTSEEVSSPALAPASM

SEQ ID NO: 96877 - protein, 183 aa, Arabidopsis thaliana
  peptide (1)..(183): Ceres Seq. ID no. 12734982
MSFSSLKLPIFLILSSLLHAAIGENIVCENLPTNMCSFSISASGKRCILETANVAGEFTCRTSAVDVEGIVNHVETDECVSACGVDRKTVGISSDSLMEAGFAAKLCSSACLDYCPNILDLYFNLAAGEGAFLPDLCDAQRMNPQRSMMEFISSGAAPGPVSEIAPGPTSEEVSSPALAPASM

SEQ ID NO: 96878 - protein, 149 aa, Arabidopsis thaliana
  peptide (1)..(149): Ceres Seq. ID no. 12734983
MCSFSISASGKRCILETANVAGEFTCRTSAVDVEGIVNHVETDECVSACGVDRKTVGISSDSLMEAGFAAKLCSSACLDYCPNILDLYFNLAAGEGAFLPDLCDAQRMNPQRSMMEFISSGAAPGPVSEIAPGPTSEEVSSPALAPASM

SEQ ID NO: 96879 - DNA, 612 bp, Arabidopsis thaliana
  misc_feature (1)..(612): Ceres Seq. ID no. 12734991
  misc_feature (1)..(612): Ortholog of  Ceres SEQ ID NO 13595084 as cited in SEQ ID NO 56095
  misc_feature (1)..(612): Ortholog of  Ceres SEQ ID NO 13594430 as cited in SEQ ID NO 60181
atgagttcttcttcggacaagttgttcaacagagacaggacaatacatgagattctgggaggaggcattgttgcagatgtgatgctgtggaggaagaagaatgtgagtgttggtatagttacagtgacaatagcttcatggatggtgtttgaggcatttgcttacactatctttactcttatttcaagtgttcttcttctcttgctctctattctcttcctctggtccaaatctgcttccattctcaacaggccatcaccgccgttaccggagtttcaaataagtgaagcgatggcggaagaagcttcgatatggttacgtattcatgtgaacaagctactccaagtttcgcatgacattgcaatggcaagagactcagagttgtataccaaagtagcagtgtcactgtttcttctctcattgatcggaagtctcatggattttcagacactttgccacaccagcgttttggtggttatgacggttccagctttctatgagagatatgaggattacattgttggctctattgagtttatctgcaacaaaactagagagctttaccttagactcgagatatgggctaatccggaaaataagaaactgagctga

SEQ ID NO: 96880 - protein, 203 aa, Arabidopsis thaliana
  peptide (1)..(203): Ceres Seq. ID no. 12734992
MSSSSDKLFNRDRTIHEILGGGIVADVMLWRKKNVSVGIVTVTIASWMVFEAFAYTIFTLISSVLLLLLSILFLWSKSASILNRPSPPLPEFQISEAMAEEASIWLRIHVNKLLQVSHDIAMARDSELYTKVAVSLFLLSLIGSLMDFQTLCHTSVLVVMTVPAFYERYEDYIVGSIEFICNKTRELYLRLEIWANPENKKLS

SEQ ID NO: 96881 - protein, 176 aa, Arabidopsis thaliana
  peptide (1)..(176): Ceres Seq. ID no. 12734993
MLWRKKNVSVGIVTVTIASWMVFEAFAYTIFTLISSVLLLLLSILFLWSKSASILNRPSPPLPEFQISEAMAEEASIWLRIHVNKLLQVSHDIAMARDSELYTKVAVSLFLLSLIGSLMDFQTLCHTSVLVVMTVPAFYERYEDYIVGSIEFICNKTRELYLRLEIWANPENKKLS

SEQ ID NO: 96882 - protein, 156 aa, Arabidopsis thaliana
  peptide (1)..(156): Ceres Seq. ID no. 12734994
MVFEAFAYTIFTLISSVLLLLLSILFLWSKSASILNRPSPPLPEFQISEAMAEEASIWLRIHVNKLLQVSHDIAMARDSELYTKVAVSLFLLSLIGSLMDFQTLCHTSVLVVMTVPAFYERYEDYIVGSIEFICNKTRELYLRLEIWANPENKKLS

SEQ ID NO: 96883 - DNA, 822 bp, Arabidopsis thaliana
  misc_feature (1)..(822): Ceres Seq. ID no. 12735009
  misc_feature (1)..(822): Ortholog of  Ceres SEQ ID NO 15176306 as cited in SEQ ID NO 52784
  misc_feature (1)..(822): Ortholog of  Ceres SEQ ID NO 13582624 as cited in SEQ ID NO 56287
  misc_feature (1)..(822): Ortholog of  Ceres SEQ ID NO 14316536 as cited in SEQ ID NO 60272
  misc_feature (1)..(822): Ortholog of  Ceres SEQ ID NO 13597264 as cited in SEQ ID NO 63897
  misc_feature (1)..(822): Ortholog of  Ceres SEQ ID NO 13598570 as cited in SEQ ID NO 65434
  misc_feature (1)..(822): Ortholog of  Ceres SEQ ID NO 13656452 as cited in SEQ ID NO 65745
  misc_feature (1)..(822): Ortholog of  Ceres SEQ ID NO 13596238 as cited in SEQ ID NO 68834
  misc_feature (1)..(822): Ortholog of  Ceres SEQ ID NO 15174329 as cited in SEQ ID NO 0
atgttgactcccaccatttctaaatccatctctttagtaaccattctattagttctacaagctttctctaacacaacaaaggctcaaaattgcggttgttcgtcagagctatgttgtagtcagtttggcttttgcggtaacacttcagactattgtggtgtaggttgccaacaaggaccttgttttgctcctccccctgcaaatggtgtctctgtggctgagattgtaacgcaagaattcttcaatggaatcatcagtcaagccgcgtctagttgcgccggcaatagattttacagtcggggagcttttcttgaggccttagactcatattctcgtttcggtagagttggatcgaccgacgactctaggcgtgagattgcagcgttctttgctcatgtcacacatgaaacaggacatttctgctacatagaagagatagacggagcctcaaaggattactgcgacgagaatgcaacacaatatccatgcaatcctaacaaaggctactacggccgcggaccgatccaactctcttggaatttcaactacgggccagccgggacagcaattggtttcgacggcctgaatgcaccggaaacagtagccacggatccagtcatatccttcaaaaccgccttgtggtactggaccaatagggttcagcctgttatctctcaaggttttggtgcaacaatccgtgccattaacggtgctttggagtgtgacggggccaacacagccaccgttcaagctagagttcgttactacacggattattgtcgtcaacttggcgttgatcctggaaacaacctcacttgctaa

SEQ ID NO: 96884 - protein, 273 aa, Arabidopsis thaliana
  peptide (1)..(273): Ceres Seq. ID no. 12735010
MLTPTISKSISLVTILLVLQAFSNTTKAQNCGCSSELCCSQFGFCGNTSDYCGVGCQQGPCFAPPPANGVSVAEIVTQEFFNGIISQAASSCAGNRFYSRGAFLEALDSYSRFGRVGSTDDSRREIAAFFAHVTHETGHFCYIEEIDGASKDYCDENATQYPCNPNKGYYGRGPIQLSWNFNYGPAGTAIGFDGLNAPETVATDPVISFKTALWYWTNRVQPVISQGFGATIRAINGALECDGANTATVQARVRYYTDYCRQLGVDPGNNLTC

SEQ ID NO: 96885 - DNA, 702 bp, Arabidopsis thaliana
  misc_feature (1)..(702): Ceres Seq. ID no. 12735023
  misc_feature (1)..(702): Ortholog of  Ceres SEQ ID NO 12614253 as cited in SEQ ID NO 68518
atggaggagacaatggccgaagaagggtgctgtgaaaatgttgagtcgacgtttgacgacggtaccaactgtatttcgaagactgaggacaccggaggaatcgaaagcaagaggttttacttggctcgcacgacagcttttgagatgcttcgcgatagaggctacgaagttaatgaagctgagctctctctcactctttctgagtttcgttctgtttttggtgagaagcctgagcttgaacgcctccgtatctgcgttcctcttcgctcagatcccaagaaaaagatccttgttgtgttcatgggaactgaaccaatcaccgtgaagtcagttcgtgctcttcatattcagatttccaacaatgtaggcttgcatgctatgattctggttttacagagcaaaatgaaccactttgcccagaaggcattgactaccttcccttttacagttgaaactttcccgattgaagatttgttggtcaacatcacaaagcacattcagcagccaaagattgagattttaaacaaagaggagaaagaacaactgctgaggaagcatgcacttgaggacaaacagcttccttatttgcaggagaaggacagctttgtgaggtactatgggttaaagaaaaaacaggtggtgaagattacatacagtaaagagcctgttggggattttgtgacataccgatgcatcatctga

SEQ ID NO: 96886 - protein, 233 aa, Arabidopsis thaliana
  peptide (1)..(233): Ceres Seq. ID no. 12735024
MEETMAEEGCCENVESTFDDGTNCISKTEDTGGIESKRFYLARTTAFEMLRDRGYEVNEAELSLTLSEFRSVFGEKPELERLRICVPLRSDPKKKILVVFMGTEPITVKSVRALHIQISNNVGLHAMILVLQSKMNHFAQKALTTFPFTVETFPIEDLLVNITKHIQQPKIEILNKEEKEQLLRKHALEDKQLPYLQEKDSFVRYYGLKKKQVVKITYSKEPVGDFVTYRCII

SEQ ID NO: 96887 - protein, 229 aa, Arabidopsis thaliana
  peptide (1)..(229): Ceres Seq. ID no. 12735025
MAEEGCCENVESTFDDGTNCISKTEDTGGIESKRFYLARTTAFEMLRDRGYEVNEAELSLTLSEFRSVFGEKPELERLRICVPLRSDPKKKILVVFMGTEPITVKSVRALHIQISNNVGLHAMILVLQSKMNHFAQKALTTFPFTVETFPIEDLLVNITKHIQQPKIEILNKEEKEQLLRKHALEDKQLPYLQEKDSFVRYYGLKKKQVVKITYSKEPVGDFVTYRCII

SEQ ID NO: 96888 - protein, 185 aa, Arabidopsis thaliana
  peptide (1)..(185): Ceres Seq. ID no. 12735026
MLRDRGYEVNEAELSLTLSEFRSVFGEKPELERLRICVPLRSDPKKKILVVFMGTEPITVKSVRALHIQISNNVGLHAMILVLQSKMNHFAQKALTTFPFTVETFPIEDLLVNITKHIQQPKIEILNKEEKEQLLRKHALEDKQLPYLQEKDSFVRYYGLKKKQVVKITYSKEPVGDFVTYRCII

SEQ ID NO: 96889 - DNA, 2856 bp, Arabidopsis thaliana
  misc_feature (1)..(2856): Ceres Seq. ID no. 12735047
  misc_feature (1)..(2856): Ortholog of  Ceres SEQ ID NO 13638292 as cited in SEQ ID NO 57738
atggggccttcaacccatctcatttgcgctctaggagttgtcatcatggcaacaatggttgctgcatatgatccatacacagatagctctccaccaccactgtattcctcaccgcttcctaagattgaatacaaaactcccccactaccatacatcgacagttccccaccaccaacttactcaccggctcctgaagtagaatacaaatctcctccaccaccatatgtttacagctcaccaccaccaccgacctactctccatccccaaaggttgagtacaaatctcctccaccaccgtatgtctacagctccccaccaccaccaacctactctccatccccaaaggttgagtacaaatctcctccaccaccctatgtttacagctccccaccaccgccaacctactctccatccccaaaggttgagtacaaatctcctccaccaccgtacgtgtacagctccccaccaccaccaacctattccccatccccaaaggttgaatacaaatctcctccaccaccgtacgtctacagctccccaccaccaccaacctactccccatctcctaaggttgagtacaagtctcctccacccccgtacgtctacagctctccaccaccaccatactactcaccgtccccaaaggtagagtacaagtctcctccaccaccgtacgtctacagctctccaccaccaccaacatactctccatccccaaaggttgattacaagtctcctccacccccgtacgtctacagctctccaccaccaccatactactcaccgtccccaaaggtagagtacaagtctcctccaccaccgtacgtctacagctctccaccaccaccaacatactctccatccccaaaggttgattacaagtctcctccaccaccgtacgtctacagctccccaccacctccatactactcaccatctccaaaggttgactacaaatctcctccaccaccctatgtttacagctccccaccaccgccaacctactctccatccccaaaggttgagtacaaatctcctccaccaccctatgtctacagctccccaccaccgccaacctactctccatccccaaaggttgagtacaaatctcctccaccaccgtacgtctacagctctccaccaccaccaacctattccccatccccaaaggttgaatacaaatctcctccaccaccgtacgtctacagctccccaccaccaccaacctactccccatctcctaaggttgagtacaagtctcctccacccccgtacgtctacagctctccaccaccaccatactactcaccgtccccaaaggtagagtacaagtctcctccaccaccgtacgtctacagctctccaccaccaccaacatactctccatccccaaaggttgattacaagtctcctccacccccgtacgtctacagctctccaccaccaccatactactcaccttctcctaaggtgtactacaagtccccaccaccaccttacgtctacagttctccaccaccaccatactattcaccttctcctaaagtgtactacaagtctcctccaccaccgtacgtttacagctccccaccaccaccatactactcaccttcgcctaaggtttactacaaatctccaccaccaccatactattcaccttctcctaaggtgtactacaagtctcctccaccaccgtacgtttacagctccccaccaccaccatactactcaccttcgcctaaggtttactacaaatctccaccaccaccgtacgtctacagctctccaccaccaccataccactcaccttcgcccaaggtgcaatacaaatccccaccaccaccatacgtttacagttctcccccaccaccatactattcaccatctcctaaggtgtactacaaatctccaccaccaccttacgtctacagttctcccccaccaccatactactctccttcacctaaagtgtactacaagtctccaccaccaccgtatgtctacagctccccaccacctccatactactcgccttcacctaaggtgtactacaagtctccaccacatcctcatgtttgtgtttgtccaccacctcctccatgttattctccatcccccaaggttgtgtacaagtctcctccaccaccatatgtctacagttctccaccaccaccacactactcaccttcccctaaggtatattacaagtcacccccaccaccatatgtttacagttctccacccccaccatattactcaccttcccctaaggtgcactacaaatctcctccaccaccatactacgcacctactcctaaggtacattacaagtctcctccaccaccatatgtctacagttctccaccacctccatattactcaccttctcctaaggttcactacaaatctcctccaccaccatacgtctacagctccccaccaccaccatactattcaccctctcctaaggtagaatacaagtctcccccaccaccgtatgtttacagttctcctccaccaccatactactcaccttcccctaaggttgactacaaatctcctccaccaccatatgtctacagttcaccaccaccaccatattattcaccttcccctaaggtagactacaagtctcctccaccaccgtatgtctacagttctccaccacctccatattactcaccttctcctgtggtagactacaagtctcctccaccaccatatgtctacagttccccaccaccaccttattattctccttctccaaaggttgaatacaaatctcccccaccaccatatgtttacaaatccccacctccaccttcgtattcaccttctccaaaaactgagtactaa

SEQ ID NO: 96890 - protein, 951 aa, Arabidopsis thaliana
  peptide (1)..(951): Ceres Seq. ID no. 12735048
MGPSTHLICALGVVIMATMVAAYDPYTDSSPPPLYSSPLPKIEYKTPPLPYIDSSPPPTYSPAPEVEYKSPPPPYVYSSPPPPTYSPSPKVEYKSPPPPYVYSSPPPPTYSPSPKVEYKSPPPPYVYSSPPPPTYSPSPKVEYKSPPPPYVYSSPPPPTYSPSPKVEYKSPPPPYVYSSPPPPTYSPSPKVEYKSPPPPYVYSSPPPPYYSPSPKVEYKSPPPPYVYSSPPPPTYSPSPKVDYKSPPPPYVYSSPPPPYYSPSPKVEYKSPPPPYVYSSPPPPTYSPSPKVDYKSPPPPYVYSSPPPPYYSPSPKVDYKSPPPPYVYSSPPPPTYSPSPKVEYKSPPPPYVYSSPPPPTYSPSPKVEYKSPPPPYVYSSPPPPTYSPSPKVEYKSPPPPYVYSSPPPPTYSPSPKVEYKSPPPPYVYSSPPPPYYSPSPKVEYKSPPPPYVYSSPPPPTYSPSPKVDYKSPPPPYVYSSPPPPYYSPSPKVYYKSPPPPYVYSSPPPPYYSPSPKVYYKSPPPPYVYSSPPPPYYSPSPKVYYKSPPPPYYSPSPKVYYKSPPPPYVYSSPPPPYYSPSPKVYYKSPPPPYVYSSPPPPYHSPSPKVQYKSPPPPYVYSSPPPPYYSPSPKVYYKSPPPPYVYSSPPPPYYSPSPKVYYKSPPPPYVYSSPPPPYYSPSPKVYYKSPPHPHVCVCPPPPPCYSPSPKVVYKSPPPPYVYSSPPPPHYSPSPKVYYKSPPPPYVYSSPPPPYYSPSPKVHYKSPPPPYYAPTPKVHYKSPPPPYVYSSPPPPYYSPSPKVHYKSPPPPYVYSSPPPPYYSPSPKVEYKSPPPPYVYSSPPPPYYSPSPKVDYKSPPPPYVYSSPPPPYYSPSPKVDYKSPPPPYVYSSPPPPYYSPSPVVDYKSPPPPYVYSSPPPPYYSPSPKVEYKSPPPPYVYKSPPPPSYSPSPKTEY

SEQ ID NO: 96891 - protein, 936 aa, Arabidopsis thaliana
  peptide (1)..(936): Ceres Seq. ID no. 12735049
MATMVAAYDPYTDSSPPPLYSSPLPKIEYKTPPLPYIDSSPPPTYSPAPEVEYKSPPPPYVYSSPPPPTYSPSPKVEYKSPPPPYVYSSPPPPTYSPSPKVEYKSPPPPYVYSSPPPPTYSPSPKVEYKSPPPPYVYSSPPPPTYSPSPKVEYKSPPPPYVYSSPPPPTYSPSPKVEYKSPPPPYVYSSPPPPYYSPSPKVEYKSPPPPYVYSSPPPPTYSPSPKVDYKSPPPPYVYSSPPPPYYSPSPKVEYKSPPPPYVYSSPPPPTYSPSPKVDYKSPPPPYVYSSPPPPYYSPSPKVDYKSPPPPYVYSSPPPPTYSPSPKVEYKSPPPPYVYSSPPPPTYSPSPKVEYKSPPPPYVYSSPPPPTYSPSPKVEYKSPPPPYVYSSPPPPTYSPSPKVEYKSPPPPYVYSSPPPPYYSPSPKVEYKSPPPPYVYSSPPPPTYSPSPKVDYKSPPPPYVYSSPPPPYYSPSPKVYYKSPPPPYVYSSPPPPYYSPSPKVYYKSPPPPYVYSSPPPPYYSPSPKVYYKSPPPPYYSPSPKVYYKSPPPPYVYSSPPPPYYSPSPKVYYKSPPPPYVYSSPPPPYHSPSPKVQYKSPPPPYVYSSPPPPYYSPSPKVYYKSPPPPYVYSSPPPPYYSPSPKVYYKSPPPPYVYSSPPPPYYSPSPKVYYKSPPHPHVCVCPPPPPCYSPSPKVVYKSPPPPYVYSSPPPPHYSPSPKVYYKSPPPPYVYSSPPPPYYSPSPKVHYKSPPPPYYAPTPKVHYKSPPPPYVYSSPPPPYYSPSPKVHYKSPPPPYVYSSPPPPYYSPSPKVEYKSPPPPYVYSSPPPPYYSPSPKVDYKSPPPPYVYSSPPPPYYSPSPKVDYKSPPPPYVYSSPPPPYYSPSPVVDYKSPPPPYVYSSPPPPYYSPSPKVEYKSPPPPYVYKSPPPPSYSPSPKTEY

SEQ ID NO: 96892 - protein, 933 aa, Arabidopsis thaliana
  peptide (1)..(933): Ceres Seq. ID no. 12735050
MVAAYDPYTDSSPPPLYSSPLPKIEYKTPPLPYIDSSPPPTYSPAPEVEYKSPPPPYVYSSPPPPTYSPSPKVEYKSPPPPYVYSSPPPPTYSPSPKVEYKSPPPPYVYSSPPPPTYSPSPKVEYKSPPPPYVYSSPPPPTYSPSPKVEYKSPPPPYVYSSPPPPTYSPSPKVEYKSPPPPYVYSSPPPPYYSPSPKVEYKSPPPPYVYSSPPPPTYSPSPKVDYKSPPPPYVYSSPPPPYYSPSPKVEYKSPPPPYVYSSPPPPTYSPSPKVDYKSPPPPYVYSSPPPPYYSPSPKVDYKSPPPPYVYSSPPPPTYSPSPKVEYKSPPPPYVYSSPPPPTYSPSPKVEYKSPPPPYVYSSPPPPTYSPSPKVEYKSPPPPYVYSSPPPPTYSPSPKVEYKSPPPPYVYSSPPPPYYSPSPKVEYKSPPPPYVYSSPPPPTYSPSPKVDYKSPPPPYVYSSPPPPYYSPSPKVYYKSPPPPYVYSSPPPPYYSPSPKVYYKSPPPPYVYSSPPPPYYSPSPKVYYKSPPPPYYSPSPKVYYKSPPPPYVYSSPPPPYYSPSPKVYYKSPPPPYVYSSPPPPYHSPSPKVQYKSPPPPYVYSSPPPPYYSPSPKVYYKSPPPPYVYSSPPPPYYSPSPKVYYKSPPPPYVYSSPPPPYYSPSPKVYYKSPPHPHVCVCPPPPPCYSPSPKVVYKSPPPPYVYSSPPPPHYSPSPKVYYKSPPPPYVYSSPPPPYYSPSPKVHYKSPPPPYYAPTPKVHYKSPPPPYVYSSPPPPYYSPSPKVHYKSPPPPYVYSSPPPPYYSPSPKVEYKSPPPPYVYSSPPPPYYSPSPKVDYKSPPPPYVYSSPPPPYYSPSPKVDYKSPPPPYVYSSPPPPYYSPSPVVDYKSPPPPYVYSSPPPPYYSPSPKVEYKSPPPPYVYKSPPPPSYSPSPKTEY

SEQ ID NO: 96893 - DNA, 1608 bp, Arabidopsis thaliana
  misc_feature (1)..(1608): Ceres Seq. ID no. 12735060
  misc_feature (1)..(1608): Ortholog of  Ceres SEQ ID NO 15173087 as cited in SEQ ID NO 67193
atggcaggagatcaactaaacgtgctaaacgcactcgacgtcgccaaaacgcaatggtaccatttcacggcgattataatcgccggaatgggattcttcaccgacgcttacgaccttttttgtatctcactcgtcacaaagcttcttggccgtatttactatcacgtggacggctcagagaagccaggaacgctgccaccaaacgtctcagccgctgttaatggagtcgccttctgcggtacactcgcaggccagctcttctttggctggctcggtgacaagcttgggaggaaaaaagtttacggtatgaccctcatggtcatggttctttgttccatcgcttcgggtctatcctttgggagtaacccaaaaacagtgatgactacactatgtttcttccggttctggcttggtttcggcattggtggtgattatccgttatccgccacgattatgtctgaatacgctaataaaaagacccgtggtgcgtttatagccgccgtttttgctatgcaagggtttggaatcttgaccggggggatttttgccatcatcgtgtctgccgctttcgaggctaaatttccagctccaacctatcaaatagatgccttggcatccacggttcctcaggcggattatgtgtggcggatcatactgatggtgggtgctttgcctgcagcgatgacgtattactcaaggtccaagatgcctgagactgcccggtacacggctcttgtggccaaggacgcgaaactagcggcttcaaacatgtctaaggttttgcaagtggagatcgaagcagagcagcagggaactgaagataagtccaattcctttggcttgttttccaaggaattcatgaaacgccatggccttcatttgctaggaactacaagcacatggttcctactcgacatcgccttctacagtcagaacctattccagaaagatattttcagcgcaatcggatggatccctccggctcagacaatgaacgcaattcaagaggttttcaagattgcacgtgcacaaaccctaatcgccttgtgtagcacggtacctggttactggttcacagtggcctttattgacgtcattggtagatttgcgatacagatgatgggtttcttctttatgaccgtctttatgttcgctctcgccattccttacgaccattggactcacaaggagaacagaatcggattcgttgctatgtactctctaacattcttcttcgccaactttggacctaatgcaacaactttcgttgtgcccgctgagatcttcccggctaggtttagatcaacctgccatggaatttccgcggcttctggaaaattaggagcaatggttggtgcgtttgggttcttgtacttagcacaaagtcctgacaagaccaagacagagcatggatatcctccaggtattggagtcaagaactccctcattgttttgggtgtggttaatcttttggggatggtttttacactgttggttcctgaatctaaaggcaagtctctcgaggaaatgtccggtgagaacgaacaaaatgatgaaagcagcagcagcagcaacaacaacagtaacaacgcagtgtcaactgcatag

SEQ ID NO: 96894 - protein, 535 aa, Arabidopsis thaliana
  peptide (1)..(535): Ceres Seq. ID no. 12735061
MAGDQLNVLNALDVAKTQWYHFTAIIIAGMGFFTDAYDLFCISLVTKLLGRIYYHVDGSEKPGTLPPNVSAAVNGVAFCGTLAGQLFFGWLGDKLGRKKVYGMTLMVMVLCSIASGLSFGSNPKTVMTTLCFFRFWLGFGIGGDYPLSATIMSEYANKKTRGAFIAAVFAMQGFGILTGGIFAIIVSAAFEAKFPAPTYQIDALASTVPQADYVWRIILMVGALPAAMTYYSRSKMPETARYTALVAKDAKLAASNMSKVLQVEIEAEQQGTEDKSNSFGLFSKEFMKRHGLHLLGTTSTWFLLDIAFYSQNLFQKDIFSAIGWIPPAQTMNAIQEVFKIARAQTLIALCSTVPGYWFTVAFIDVIGRFAIQMMGFFFMTVFMFALAIPYDHWTHKENRIGFVAMYSLTFFFANFGPNATTFVVPAEIFPARFRSTCHGISAASGKLGAMVGAFGFLYLAQSPDKTKTEHGYPPGIGVKNSLIVLGVVNLLGMVFTLLVPESKGKSLEEMSGENEQNDESSSSSNNNSNNAVSTA

SEQ ID NO: 96895 - protein, 506 aa, Arabidopsis thaliana
  peptide (1)..(506): Ceres Seq. ID no. 12735062
MGFFTDAYDLFCISLVTKLLGRIYYHVDGSEKPGTLPPNVSAAVNGVAFCGTLAGQLFFGWLGDKLGRKKVYGMTLMVMVLCSIASGLSFGSNPKTVMTTLCFFRFWLGFGIGGDYPLSATIMSEYANKKTRGAFIAAVFAMQGFGILTGGIFAIIVSAAFEAKFPAPTYQIDALASTVPQADYVWRIILMVGALPAAMTYYSRSKMPETARYTALVAKDAKLAASNMSKVLQVEIEAEQQGTEDKSNSFGLFSKEFMKRHGLHLLGTTSTWFLLDIAFYSQNLFQKDIFSAIGWIPPAQTMNAIQEVFKIARAQTLIALCSTVPGYWFTVAFIDVIGRFAIQMMGFFFMTVFMFALAIPYDHWTHKENRIGFVAMYSLTFFFANFGPNATTFVVPAEIFPARFRSTCHGISAASGKLGAMVGAFGFLYLAQSPDKTKTEHGYPPGIGVKNSLIVLGVVNLLGMVFTLLVPESKGKSLEEMSGENEQNDESSSSSNNNSNNAVSTA

SEQ ID NO: 96896 - protein, 433 aa, Arabidopsis thaliana
  peptide (1)..(433): Ceres Seq. ID no. 12735063
MTLMVMVLCSIASGLSFGSNPKTVMTTLCFFRFWLGFGIGGDYPLSATIMSEYANKKTRGAFIAAVFAMQGFGILTGGIFAIIVSAAFEAKFPAPTYQIDALASTVPQADYVWRIILMVGALPAAMTYYSRSKMPETARYTALVAKDAKLAASNMSKVLQVEIEAEQQGTEDKSNSFGLFSKEFMKRHGLHLLGTTSTWFLLDIAFYSQNLFQKDIFSAIGWIPPAQTMNAIQEVFKIARAQTLIALCSTVPGYWFTVAFIDVIGRFAIQMMGFFFMTVFMFALAIPYDHWTHKENRIGFVAMYSLTFFFANFGPNATTFVVPAEIFPARFRSTCHGISAASGKLGAMVGAFGFLYLAQSPDKTKTEHGYPPGIGVKNSLIVLGVVNLLGMVFTLLVPESKGKSLEEMSGENEQNDESSSSSNNNSNNAVSTA

SEQ ID NO: 96897 - DNA, 3156 bp, Arabidopsis thaliana
  misc_feature (1)..(3156): Ceres Seq. ID no. 12735080
  misc_feature (1)..(3156): Ortholog of  Ceres SEQ ID NO 13600310 as cited in SEQ ID NO 5086
atgagttcgtcaaattcctcctccgccgtcagatcgtcggcgaaacacgcggcggagcgaattcagcagcacttgcctcccaacagcaatcacgcggtatctctctcttcttcttccttgaatttgcctgctagaacctctatcgtcgctcccggaatagcacactcttctcgccttaaagatcgaccctccgcttcctcctcctcctcttcgtcctctgtctccgcctcttctccctccacacgccgctccggcactcccgttcgccgatctcaatcgaaagacttcgacgacgacaatgatcctgggagggtaagagtctctgtaagagttcgacctcgaaacggagaggagcttatctcggatgctgattttgctgatcttgttgagttacaaccagaaataaagaggcttaagttgaggaagaacaactggaactctgagtcatacaaatttgatgaagtctttacagacacagcttcgcaaaagcgtgtctatgaaggagtagcaaaacctgtcgtcgagggtgttctgagtggatacaatggtaccattatggcttatggtcaaaccggcacaggtaaaacttacacggttggaaaaattggtaaagatgatgcagctgagcgtggtattatggttagagctctggaggatatacttctcaacgcatcttctgcttcgatttccgtcgagatctcctatttgcagctatatatggaaactatacaagatcttcttgcacctgagaaaaacaacatttcaatcaatgaggatgcaaagactggggaagtatcagtaccaggcgctacagtagttaacattcaagatttagaccatttcttgcaggttttgcaagtcggtgagacaaaccgtcatgcagcaaatacaaagatgaatacagaatcctctcgtagtcatgcaattcttacggtttacgttagacgtgctatgaatgaaaaaactgagaaggcaaaaccggaatcattgggagataaagccattcctagagttagaaagagcaaactactaattgttgatcttgctggttccgaaagaattaataaatctggaactgacggccacatgattgaagaagcaaaattcatcaatctttcactgacatccctgggaaaatgcataaatgcgttagctgaaggcagttctcatataccaacaagagattctaagctaacaaggcttctgcgtgattcttttgggggttctgcgaggacttcacttataataacaattgggccatctgcacgttatcatgcagaaaccactagcacaataatgtttggacaaagggcaatgaaaatagtaaacatggtaaagcttaaggaagaatttgattatgagagtttgtgtcggaagcttgagactcaggtggaccatcttactgcagaagtcgaaagacaaaacaaactaagaaatagtgagaaacatgagttggaaaaaagattgagagaatgtgaaaactccttcgctgaagcagaaaagaacgcggttactaggtcaaagtttctggagaaggaaaacacccgcttggagctcagcatgaaagaacttttgaaggatctgcaactgcagaaagatcagtgtgatctaatgcatgacaaagccatacagttagagatgaaactgaaaaataccaagcagcaacagctggaaaattcagcatatgaggcaaaacttgcagataccagtcaagtatatgagaaaaaaattgcggagttggtccagcgggttgaggatgaacaagcacggtctacaaacgccgagcatcaattgactgaaatgaaaaatattttgagtaaacagcagaagtctattcatgaacaagagaagggcaattaccaatatcaaagggaacttgcggaaaccactcacacatatgaatctaaaattgcagagctgcaaaagaaactggaaggtgaaaatgctcggtctaacgctgcagaagatcaacttagacaaatgaaaaggcttataagcgatcgccaagttatatcacaggaaaatgaagaggcaaacgaacttaagataaaattagaagaactttcacaaatgtatgaatcgacagtagatgaactccagacagtgaaactagactatgatgatctgctccaacaaaaggaaaaacttggtgaagaggttcgagatatgaaggaaaggctccttttggaagaaaagcagagaaagcaaatggagagtgagctttcaaaactaaagaagaatctaagggaaagtgaaaatgttgttgaggaaaagcgatatatgaaggaagatctttcaaaaggatcagcagaatctggagctcaaactggctctcagagatcacaagggttaaaaaagtcgttatctggtcagagagctaccatggctagactttgtgaagaagtcggaattcagaagatcttacaactcattaagtctgaagacttggaagttcaaattcaagcagtaaaagtggttgctaatctagccgctgaagaggctaatcaggtaaagattgtggaggaagggggtgtagaagctttgcttatgctagtccagtcatctcaaaattcaacgattctcagggtggcttctggtgcaattgctaatttagcaatgaacgagaagagtcaagatcttataatgaataaaggaggtgctcaactcctagcaaagatggtgactaaaacagacgatccacagactctaagaatggtagctggtgcgcttgccaatttatgtgggaacgagaagtttcttaagctgctgaaagaagaggaaggcatcaagggactactcactatggcacagtctggaaacatagatatcattgctcaagtggcaagagggatggcaaattttgcgaagtgtgaaactcgagaaattatgcaagggcgtagaaaaggccgttctcttctgttggaagagggtgttcttgaatggttgacttcaaattcacatattgattcagcatcaacacaacgtcacatcgaacttgcgctttgccatttagctcaaaatgaggaaaatgcaaatgatttcaaaagaacaggaagcgtgacagagattgtaagaatatctgtggagtcaagtagagatgatattcgcagtttagcaaagaagatactcaaaacaaacccttacttctcaagctga

SEQ ID NO: 96898 - protein, 1051 aa, Arabidopsis thaliana
  peptide (1)..(1051): Ceres Seq. ID no. 12735081
MSSSNSSSAVRSSAKHAAERIQQHLPPNSNHAVSLSSSSLNLPARTSIVAPGIAHSSRLKDRPSASSSSSSSSVSASSPSTRRSGTPVRRSQSKDFDDDNDPGRVRVSVRVRPRNGEELISDADFADLVELQPEIKRLKLRKNNWNSESYKFDEVFTDTASQKRVYEGVAKPVVEGVLSGYNGTIMAYGQTGTGKTYTVGKIGKDDAAERGIMVRALEDILLNASSASISVEISYLQLYMETIQDLLAPEKNNISINEDAKTGEVSVPGATVVNIQDLDHFLQVLQVGETNRHAANTKMNTESSRSHAILTVYVRRAMNEKTEKAKPESLGDKAIPRVRKSKLLIVDLAGSERINKSGTDGHMIEEAKFINLSLTSLGKCINALAEGSSHIPTRDSKLTRLLRDSFGGSARTSLIITIGPSARYHAETTSTIMFGQRAMKIVNMVKLKEEFDYESLCRKLETQVDHLTAEVERQNKLRNSEKHELEKRLRECENSFAEAEKNAVTRSKFLEKENTRLELSMKELLKDLQLQKDQCDLMHDKAIQLEMKLKNTKQQQLENSAYEAKLADTSQVYEKKIAELVQRVEDEQARSTNAEHQLTEMKNILSKQQKSIHEQEKGNYQYQRELAETTHTYESKIAELQKKLEGENARSNAAEDQLRQMKRLISDRQVISQENEEANELKIKLEELSQMYESTVDELQTVKLDYDDLLQQKEKLGEEVRDMKERLLLEEKQRKQMESELSKLKKNLRESENVVEEKRYMKEDLSKGSAESGAQTGSQRSQGLKKSLSGQRATMARLCEEVGIQKILQLIKSEDLEVQIQAVKVVANLAAEEANQVKIVEEGGVEALLMLVQSSQNSTILRVASGAIANLAMNEKSQDLIMNKGGAQLLAKMVTKTDDPQTLRMVAGALANLCGNEKFLKLLKEEEGIKGLLTMAQSGNIDIIAQVARGMANFAKCETREIMQGRRKGRSLLLEEGVLEWLTSNSHIDSASTQRHIELALCHLAQNEENANDFKRTGSVTEIVRISVESSRDDIRSLAKKILKTNPYFSS

SEQ ID NO: 96899 - protein, 866 aa, Arabidopsis thaliana
  peptide (1)..(866): Ceres Seq. ID no. 12735082
MAYGQTGTGKTYTVGKIGKDDAAERGIMVRALEDILLNASSASISVEISYLQLYMETIQDLLAPEKNNISINEDAKTGEVSVPGATVVNIQDLDHFLQVLQVGETNRHAANTKMNTESSRSHAILTVYVRRAMNEKTEKAKPESLGDKAIPRVRKSKLLIVDLAGSERINKSGTDGHMIEEAKFINLSLTSLGKCINALAEGSSHIPTRDSKLTRLLRDSFGGSARTSLIITIGPSARYHAETTSTIMFGQRAMKIVNMVKLKEEFDYESLCRKLETQVDHLTAEVERQNKLRNSEKHELEKRLRECENSFAEAEKNAVTRSKFLEKENTRLELSMKELLKDLQLQKDQCDLMHDKAIQLEMKLKNTKQQQLENSAYEAKLADTSQVYEKKIAELVQRVEDEQARSTNAEHQLTEMKNILSKQQKSIHEQEKGNYQYQRELAETTHTYESKIAELQKKLEGENARSNAAEDQLRQMKRLISDRQVISQENEEANELKIKLEELSQMYESTVDELQTVKLDYDDLLQQKEKLGEEVRDMKERLLLEEKQRKQMESELSKLKKNLRESENVVEEKRYMKEDLSKGSAESGAQTGSQRSQGLKKSLSGQRATMARLCEEVGIQKILQLIKSEDLEVQIQAVKVVANLAAEEANQVKIVEEGGVEALLMLVQSSQNSTILRVASGAIANLAMNEKSQDLIMNKGGAQLLAKMVTKTDDPQTLRMVAGALANLCGNEKFLKLLKEEEGIKGLLTMAQSGNIDIIAQVARGMANFAKCETREIMQGRRKGRSLLLEEGVLEWLTSNSHIDSASTQRHIELALCHLAQNEENANDFKRTGSVTEIVRISVESSRDDIRSLAKKILKTNPYFSS

SEQ ID NO: 96900 - protein, 839 aa, Arabidopsis thaliana
  peptide (1)..(839): Ceres Seq. ID no. 12735083
MVRALEDILLNASSASISVEISYLQLYMETIQDLLAPEKNNISINEDAKTGEVSVPGATVVNIQDLDHFLQVLQVGETNRHAANTKMNTESSRSHAILTVYVRRAMNEKTEKAKPESLGDKAIPRVRKSKLLIVDLAGSERINKSGTDGHMIEEAKFINLSLTSLGKCINALAEGSSHIPTRDSKLTRLLRDSFGGSARTSLIITIGPSARYHAETTSTIMFGQRAMKIVNMVKLKEEFDYESLCRKLETQVDHLTAEVERQNKLRNSEKHELEKRLRECENSFAEAEKNAVTRSKFLEKENTRLELSMKELLKDLQLQKDQCDLMHDKAIQLEMKLKNTKQQQLENSAYEAKLADTSQVYEKKIAELVQRVEDEQARSTNAEHQLTEMKNILSKQQKSIHEQEKGNYQYQRELAETTHTYESKIAELQKKLEGENARSNAAEDQLRQMKRLISDRQVISQENEEANELKIKLEELSQMYESTVDELQTVKLDYDDLLQQKEKLGEEVRDMKERLLLEEKQRKQMESELSKLKKNLRESENVVEEKRYMKEDLSKGSAESGAQTGSQRSQGLKKSLSGQRATMARLCEEVGIQKILQLIKSEDLEVQIQAVKVVANLAAEEANQVKIVEEGGVEALLMLVQSSQNSTILRVASGAIANLAMNEKSQDLIMNKGGAQLLAKMVTKTDDPQTLRMVAGALANLCGNEKFLKLLKEEEGIKGLLTMAQSGNIDIIAQVARGMANFAKCETREIMQGRRKGRSLLLEEGVLEWLTSNSHIDSASTQRHIELALCHLAQNEENANDFKRTGSVTEIVRISVESSRDDIRSLAKKILKTNPYFSS

SEQ ID NO: 96901 - DNA, 2053 bp, Arabidopsis thaliana
  misc_feature (1)..(2053): Ceres Seq. ID no. 12735105
  misc_feature (1)..(2053): Ortholog of  Ceres SEQ ID NO 13598865 as cited in SEQ ID NO 0
aattcagaaagaagagaatagagagcttcttcttcttcaatggcgaaaatggcgaaattttctttcttctcttcgtcatctcctaaatatcatccttcttcgccttcttcattcacttctttcccggcttctcctctaaaccagaactttactcaggctatgatggaggaaaccgtggagacagcggactccgtcatcagaaaatgggacccgaacacgccttccttcaccaagattgtctctctgttcaaccatagcaggaaggaggctaaagagttcatcagatgtgtccgtgatttgcgcagagcgatgcactttcttgtctctcaagactctcaatctccaaagcttgctctagctcagaccctgatgcagatcgccatggcaaggctcgaaaaagagttcttccagatattatcttcaaacagagacaagcttgatcctgaatcagtttccggtcaatcctcaatctccagcaattctgaatttgaagatgttatgggatctgacgacgacgatgaaagtgacaatgagatgaggaaagctggcgaatcgatcactcaggttgagaaagcttcagctatggtgatgtctgaccttaaggcgatagcagagagtatgataagttgcggatatggtaaggagtgcgtaaagatttataagcgggtcagaaaatctattgtagatgaagggctgagcttgctcgggattgaaatctacaaaggctccagatttcacagaacggactgggtcacgctcgagcatatgatcaagaactggataaaagctgcaaagattggcattgccacgctcttccgtggagagaaacttctttgtgatcatgtcttttctgcttccaattcaacaagggagtcatgcttctacgagattgcaaacgaagcagccactaaccttttcaagttccctgaatttgttgccaaggagaagaaatcgcacgagaggatcttcccgctaatggatctgcaggctgcaatctctgatctctggcaagacatagagatgatattccactttgatgcagtagctggtgtgaaatctcaggcgctcacatcgctgcaaaaactaaaggtctcaatccacagtgctctcacggattttgaatcaatcattcagaaagatacgacgaaagctctaacacctggaggagggattcataaactgacacgatcaacaatgaacttcatctcttccctttctaagtacagcggagtcttgtcggaaatcctagcagaccatccactcccgagaaacactcgcctgctggaatcctatgtcagagctccaatttcggaagatgaacaacacaatcacgcactctctgtccattttgcttggctaatcctggttttgctatgcaaactagacaccaaagcagagcattacaaggatgtttctttgtcttaccttttccttgcaaacaaccttcagatcatcattgaaacggttggttcaactcccctaaggaatctccttggagatgattggctcaataagcacgaagataaactctgcgcttatgctgggaattatgagatagcagcatggtccaatgttttcatgtctttaccagaagaacccacagacctatcaccagaggaagctaaaatatatttcagaagatttcacacggcatttgaggaagcatatatgaaacaatcatcacgagttgtaccaaatgcgaaacttagggacgaactaaaggtttcaatagcaaagaaacttgtaccagaatacagagagttttacaggaagtacttaccaatgctcggccaggagagaaacattgagatcttggtgagattcaagccagataatttggagaattacatctctgatcttttccacggtacaccaattcatgcatcctcttctttttcttcatcttcttcctcttcatcctggaaatcacttgggtgtgtttcaggctgagagacttgatccatagttttggctaaatattccattttttacatgatgtgaagtgaaaaaaatgtagatacgtgtgtttgcattgtgtgtgcaacagaaaatg

SEQ ID NO: 96902 - protein, 636 aa, Arabidopsis thaliana
  peptide (1)..(636): Ceres Seq. ID no. 12735106
MAKMAKFSFFSSSSPKYHPSSPSSFTSFPASPLNQNFTQAMMEETVETADSVIRKWDPNTPSFTKIVSLFNHSRKEAKEFIRCVRDLRRAMHFLVSQDSQSPKLALAQTLMQIAMARLEKEFFQILSSNRDKLDPESVSGQSSISSNSEFEDVMGSDDDDESDNEMRKAGESITQVEKASAMVMSDLKAIAESMISCGYGKECVKIYKRVRKSIVDEGLSLLGIEIYKGSRFHRTDWVTLEHMIKNWIKAAKIGIATLFRGEKLLCDHVFSASNSTRESCFYEIANEAATNLFKFPEFVAKEKKSHERIFPLMDLQAAISDLWQDIEMIFHFDAVAGVKSQALTSLQKLKVSIHSALTDFESIIQKDTTKALTPGGGIHKLTRSTMNFISSLSKYSGVLSEILADHPLPRNTRLLESYVRAPISEDEQHNHALSVHFAWLILVLLCKLDTKAEHYKDVSLSYLFLANNLQIIIETVGSTPLRNLLGDDWLNKHEDKLCAYAGNYEIAAWSNVFMSLPEEPTDLSPEEAKIYFRRFHTAFEEAYMKQSSRVVPNAKLRDELKVSIAKKLVPEYREFYRKYLPMLGQERNIEILVRFKPDNLENYISDLFHGTPIHASSSFSSSSSSSSWKSLGCVSG

SEQ ID NO: 96903 - protein, 633 aa, Arabidopsis thaliana
  peptide (1)..(633): Ceres Seq. ID no. 12735107
MAKFSFFSSSSPKYHPSSPSSFTSFPASPLNQNFTQAMMEETVETADSVIRKWDPNTPSFTKIVSLFNHSRKEAKEFIRCVRDLRRAMHFLVSQDSQSPKLALAQTLMQIAMARLEKEFFQILSSNRDKLDPESVSGQSSISSNSEFEDVMGSDDDDESDNEMRKAGESITQVEKASAMVMSDLKAIAESMISCGYGKECVKIYKRVRKSIVDEGLSLLGIEIYKGSRFHRTDWVTLEHMIKNWIKAAKIGIATLFRGEKLLCDHVFSASNSTRESCFYEIANEAATNLFKFPEFVAKEKKSHERIFPLMDLQAAISDLWQDIEMIFHFDAVAGVKSQALTSLQKLKVSIHSALTDFESIIQKDTTKALTPGGGIHKLTRSTMNFISSLSKYSGVLSEILADHPLPRNTRLLESYVRAPISEDEQHNHALSVHFAWLILVLLCKLDTKAEHYKDVSLSYLFLANNLQIIIETVGSTPLRNLLGDDWLNKHEDKLCAYAGNYEIAAWSNVFMSLPEEPTDLSPEEAKIYFRRFHTAFEEAYMKQSSRVVPNAKLRDELKVSIAKKLVPEYREFYRKYLPMLGQERNIEILVRFKPDNLENYISDLFHGTPIHASSSFSSSSSSSSWKSLGCVSG

SEQ ID NO: 96904 - protein, 596 aa, Arabidopsis thaliana
  peptide (1)..(596): Ceres Seq. ID no. 12735108
MMEETVETADSVIRKWDPNTPSFTKIVSLFNHSRKEAKEFIRCVRDLRRAMHFLVSQDSQSPKLALAQTLMQIAMARLEKEFFQILSSNRDKLDPESVSGQSSISSNSEFEDVMGSDDDDESDNEMRKAGESITQVEKASAMVMSDLKAIAESMISCGYGKECVKIYKRVRKSIVDEGLSLLGIEIYKGSRFHRTDWVTLEHMIKNWIKAAKIGIATLFRGEKLLCDHVFSASNSTRESCFYEIANEAATNLFKFPEFVAKEKKSHERIFPLMDLQAAISDLWQDIEMIFHFDAVAGVKSQALTSLQKLKVSIHSALTDFESIIQKDTTKALTPGGGIHKLTRSTMNFISSLSKYSGVLSEILADHPLPRNTRLLESYVRAPISEDEQHNHALSVHFAWLILVLLCKLDTKAEHYKDVSLSYLFLANNLQIIIETVGSTPLRNLLGDDWLNKHEDKLCAYAGNYEIAAWSNVFMSLPEEPTDLSPEEAKIYFRRFHTAFEEAYMKQSSRVVPNAKLRDELKVSIAKKLVPEYREFYRKYLPMLGQERNIEILVRFKPDNLENYISDLFHGTPIHASSSFSSSSSSSSWKSLGCVSG

SEQ ID NO: 96905 - DNA, 921 bp, Arabidopsis thaliana
  misc_feature (1)..(921): Ceres Seq. ID no. 12735123
  misc_feature (1)..(921): Ortholog of  Ceres SEQ ID NO 15168492 as cited in SEQ ID NO 58104
atggccaaagctcttagccttacaatctttctctttctcttgatagcttccaatgtccaatccgctcgacttctcgatgaggttcaaactcagccacaattagtcccccaggtaccggaagaggaagatgatagtccacaagccgtaacaacaactccaacaccaattcctctcccaggacccgccacgggaggacccgagccaatcctagagttctttatgcatgacgtgctaggcgggtcacacccatcagcacgtgtggttacagggatagtagcacaaacagaggtgaatggaataccgttttctaaatccagcaacaacattttcccagtagataacgcagtgccgcttgtgaacgcaaacagcatcaacaacttaatcaatccaaacacagctccactcctaacaggacttagtggctctcaagccaacaccgtaatccaaaacagtaacggtaactctcaaggatcccttagctccaacaaccttccctttgtaaccacgggtcagctccctcccatagctgccctccaacagcttatgtttggctctatcaccgtggttgacgatgagctcaccgagggccatgagttgggctctgcgatcattgggagagcccaagggttttatctcgctagctctttggatggaactagccagaccctttcgttgacagtgttactccacgaagatcatgatcatcatgacacccttgatgatgccatcagcttctttggggttcaccgaaccgcttctcatgcgtcgcatatcgctgttgtgggtggaactgggagattcgagcatgctaaagggtatgctgtcgtggagactctacacaaccaggaagaccaacatgttactgatggtcatgataccattctccatttcagtgtttatcttacatactacaaagcttga

SEQ ID NO: 96906 - protein, 306 aa, Arabidopsis thaliana
  peptide (1)..(306): Ceres Seq. ID no. 12735124
MAKALSLTIFLFLLIASNVQSARLLDEVQTQPQLVPQVPEEEDDSPQAVTTTPTPIPLPGPATGGPEPILEFFMHDVLGGSHPSARVVTGIVAQTEVNGIPFSKSSNNIFPVDNAVPLVNANSINNLINPNTAPLLTGLSGSQANTVIQNSNGNSQGSLSSNNLPFVTTGQLPPIAALQQLMFGSITVVDDELTEGHELGSAIIGRAQGFYLASSLDGTSQTLSLTVLLHEDHDHHDTLDDAISFFGVHRTASHASHIAVVGGTGRFEHAKGYAVVETLHNQEDQHVTDGHDTILHFSVYLTYYKA

SEQ ID NO: 96907 - protein, 233 aa, Arabidopsis thaliana
  peptide (1)..(233): Ceres Seq. ID no. 12735125
MHDVLGGSHPSARVVTGIVAQTEVNGIPFSKSSNNIFPVDNAVPLVNANSINNLINPNTAPLLTGLSGSQANTVIQNSNGNSQGSLSSNNLPFVTTGQLPPIAALQQLMFGSITVVDDELTEGHELGSAIIGRAQGFYLASSLDGTSQTLSLTVLLHEDHDHHDTLDDAISFFGVHRTASHASHIAVVGGTGRFEHAKGYAVVETLHNQEDQHVTDGHDTILHFSVYLTYYKA

SEQ ID NO: 96908 - DNA, 897 bp, Arabidopsis thaliana
  misc_feature (1)..(897): Ceres Seq. ID no. 12735126
  misc_feature (1)..(897): Ortholog of  Ceres SEQ ID NO 14316459 as cited in SEQ ID NO 57754
atggatatgatcactctccatattaccgtgattttaatcgtaaaatctgattgttacatgtcaatcatgtgtttcgtgttgaagcagttggagccatggtgtgaacttaaagacaaagtggttcttgtgacaggagcttcctctggtattggaagagagatctgtcttgatcttgccaaagctggttgccaggttattgcagcagctcgtcgtgttgatcgactcaactctctctgctctgaaatcaacagcttcagttcaactggaatccaagccgcagctcttgagttagacgtttcatcagacgcagccaccattcaaaaagcggtcagggaagcttgggacatctttggaaagatcgatgcattgatcaacaatgctggaatcagaggcaatgtcaagttgagtttggatttgtccgaggacgaatgggacaacgtcttcaataccaacttaaagggaccttggttagtagccaaatatgtttgtgttttaatgcgtgacgctaaacgtggtggctcggtgataaacatctcatcggttgctggggtccgcagtatcgtgcccggtggacttgcatattcttgttccaaaggcggtgttgacaccatgtcaaggatgatggcaattgagttaggtgttcacaagatcagagtgaactcgatcgcaccggggcttttcaagtcagagatcacacaagctcttatgcaaaaggagtggctcaagaatgtgaccgagaggactgtgccgttaaaggtgcaacagaccattgatccagggcttacttctctggttcgctatctcattcatgactcttctcaatatatatccgggaatacatacattgttgattccggtgctacattgcccggtgtgcctatcttttcatctctctga

SEQ ID NO: 96909 - protein, 298 aa, Arabidopsis thaliana
  peptide (1)..(298): Ceres Seq. ID no. 12735127
MDMITLHITVILIVKSDCYMSIMCFVLKQLEPWCELKDKVVLVTGASSGIGREICLDLAKAGCQVIAAARRVDRLNSLCSEINSFSSTGIQAAALELDVSSDAATIQKAVREAWDIFGKIDALINNAGIRGNVKLSLDLSEDEWDNVFNTNLKGPWLVAKYVCVLMRDAKRGGSVINISSVAGVRSIVPGGLAYSCSKGGVDTMSRMMAIELGVHKIRVNSIAPGLFKSEITQALMQKEWLKNVTERTVPLKVQQTIDPGLTSLVRYLIHDSSQYISGNTYIVDSGATLPGVPIFSSL

SEQ ID NO: 96910 - protein, 296 aa, Arabidopsis thaliana
  peptide (1)..(296): Ceres Seq. ID no. 12735128
MITLHITVILIVKSDCYMSIMCFVLKQLEPWCELKDKVVLVTGASSGIGREICLDLAKAGCQVIAAARRVDRLNSLCSEINSFSSTGIQAAALELDVSSDAATIQKAVREAWDIFGKIDALINNAGIRGNVKLSLDLSEDEWDNVFNTNLKGPWLVAKYVCVLMRDAKRGGSVINISSVAGVRSIVPGGLAYSCSKGGVDTMSRMMAIELGVHKIRVNSIAPGLFKSEITQALMQKEWLKNVTERTVPLKVQQTIDPGLTSLVRYLIHDSSQYISGNTYIVDSGATLPGVPIFSSL

SEQ ID NO: 96911 - protein, 279 aa, Arabidopsis thaliana
  peptide (1)..(279): Ceres Seq. ID no. 12735129
MSIMCFVLKQLEPWCELKDKVVLVTGASSGIGREICLDLAKAGCQVIAAARRVDRLNSLCSEINSFSSTGIQAAALELDVSSDAATIQKAVREAWDIFGKIDALINNAGIRGNVKLSLDLSEDEWDNVFNTNLKGPWLVAKYVCVLMRDAKRGGSVINISSVAGVRSIVPGGLAYSCSKGGVDTMSRMMAIELGVHKIRVNSIAPGLFKSEITQALMQKEWLKNVTERTVPLKVQQTIDPGLTSLVRYLIHDSSQYISGNTYIVDSGATLPGVPIFSSL

SEQ ID NO: 96912 - DNA, 2046 bp, Arabidopsis thaliana
  misc_feature (1)..(2046): Ceres Seq. ID no. 12735130
  misc_feature (1)..(2046): Ortholog of  Ceres SEQ ID NO 15170272 as cited in SEQ ID NO 54941
gtttttggcggtctcagtgaagaagatggtgctgtcgaacaagaagctgaagcagaggattcgacaagatttggctgaatcactatctgtctctgtatccgaaacaaatccacaatctcagtctctgaaattgctccttgattcatctagccacaaacccagattgtcgaagagagagaaacgaagaaattgcgaaactttcgctagagaagacgacgaaatcagagagaatgaagttgggaatggtgggtcaagcgagaagactgatacgaagattaaaaagaagagaaagagagacgatgctgtggaagtcgacgagttagaaggagatgaaggaactaaggaagagcaaaaaccccagaagaagaaaaataagaagaagaagaagaagagaaaggtaaacaaaacgccaaagaaggctgaggaaggcaatgtagaagagaaggtgaaggtagaagagattgaagttaatacagacaataaagaagaagatggggttgttcctaacaagttatatgttgggggtattccttatcagagtacagaagatgagattcgtagctactttagaagctgtggagtcatcattaaagttgattgcaagatgcgtcctgaagatggggctttcagtggtattgccttcatcacttttgacactgaagatggcgcaaaacgtgctttggcttttgatagagctgctatgggtgatcgatatttgacaatccagcaatacgtgaaaaccaccaccccttccattccaagaaggaaaacatcttctggtttcgctccagaaatggtggatggctataacagggtatacattgggaatttagcctgggacacaacagagcgtgacatacggaagctcttctctgactgcgtaataaactctgtgcggttgggtaaaaacaaagaaacaggagagtttaaagggtatgcgcatgtggatttcaaggatagtgtgtctgtggcgattgcgctgaagctggatcagcaggttatttgcggaagacctgtcaagatatgttgtgcacttaaagacagaccagctactgatcatacacctggtgaaacgaacaatgctggttcgtacaacatggaagatacttatgctgctgctgatccagtaccggctttagctgggcgtagcgaagttgatgacggaaactactttgcaactacggttagcagcagtaaggtcaaaaggagggtctgttatgagtgtggagaaaagggtcatctttctacagcctgtcccataaagcttcaaaaggctgatgatcaggcaaactcaaagctgggtcaagagactgttgatggtagaccggctatgcaaagctatggtcttccaaagaatagtggtgattcttactacatgaatgagacatacgcttctacaaatgaaacttataatggaggatactcagcatctgctgttggcactggtaaggtcaaaaggaggaactgttatgagtgtggagaaaagggtcatctttctacagcctgtcccataaagcttcaaaacacttctcacacaaactcaacgctggatcaccaaactgttgaggcaggaccgactcaggtaacaagctatagtcttcaaaagaaaacaagagacactgaaaacaatggtggttcgttcatggatgagagctatgctactgttccgatatccattgatgtgacaaatggagctaatgatgcaagcttaacatctgcggttagcactggtaagatcaaaaagagaaactgttacgagtgcggagaaaaaggtcatctttcttcagcttgccctaacaagctgcaaaaacaaggctgatgatcccacaagctctacaaagacagcttatacattttgttcttaaactttacatttgaatcattggaggaatatggaaggacgtggaccacttggtagaagagtggagttttggtcctcttttagaaaaccataaattttattctgtattgttttatgatctttcatagaatgctctaaagtctaaaaaccaaaagtatcttaatatattggattattatttcttg

SEQ ID NO: 96913 - protein, 605 aa, Arabidopsis thaliana
  peptide (1)..(605): Ceres Seq. ID no. 12735131
FLAVSVKKMVLSNKKLKQRIRQDLAESLSVSVSETNPQSQSLKLLLDSSSHKPRLSKREKRRNCETFAREDDEIRENEVGNGGSSEKTDTKIKKKRKRDDAVEVDELEGDEGTKEEQKPQKKKNKKKKKKRKVNKTPKKAEEGNVEEKVKVEEIEVNTDNKEEDGVVPNKLYVGGIPYQSTEDEIRSYFRSCGVIIKVDCKMRPEDGAFSGIAFITFDTEDGAKRALAFDRAAMGDRYLTIQQYVKTTTPSIPRRKTSSGFAPEMVDGYNRVYIGNLAWDTTERDIRKLFSDCVINSVRLGKNKETGEFKGYAHVDFKDSVSVAIALKLDQQVICGRPVKICCALKDRPATDHTPGETNNAGSYNMEDTYAAADPVPALAGRSEVDDGNYFATTVSSSKVKRRVCYECGEKGHLSTACPIKLQKADDQANSKLGQETVDGRPAMQSYGLPKNSGDSYYMNETYASTNETYNGGYSASAVGTGKVKRRNCYECGEKGHLSTACPIKLQNTSHTNSTLDHQTVEAGPTQVTSYSLQKKTRDTENNGGSFMDESYATVPISIDVTNGANDASLTSAVSTGKIKKRNCYECGEKGHLSSACPNKLQKQG

SEQ ID NO: 96914 - protein, 597 aa, Arabidopsis thaliana
  peptide (1)..(597): Ceres Seq. ID no. 12735132
MVLSNKKLKQRIRQDLAESLSVSVSETNPQSQSLKLLLDSSSHKPRLSKREKRRNCETFAREDDEIRENEVGNGGSSEKTDTKIKKKRKRDDAVEVDELEGDEGTKEEQKPQKKKNKKKKKKRKVNKTPKKAEEGNVEEKVKVEEIEVNTDNKEEDGVVPNKLYVGGIPYQSTEDEIRSYFRSCGVIIKVDCKMRPEDGAFSGIAFITFDTEDGAKRALAFDRAAMGDRYLTIQQYVKTTTPSIPRRKTSSGFAPEMVDGYNRVYIGNLAWDTTERDIRKLFSDCVINSVRLGKNKETGEFKGYAHVDFKDSVSVAIALKLDQQVICGRPVKICCALKDRPATDHTPGETNNAGSYNMEDTYAAADPVPALAGRSEVDDGNYFATTVSSSKVKRRVCYECGEKGHLSTACPIKLQKADDQANSKLGQETVDGRPAMQSYGLPKNSGDSYYMNETYASTNETYNGGYSASAVGTGKVKRRNCYECGEKGHLSTACPIKLQNTSHTNSTLDHQTVEAGPTQVTSYSLQKKTRDTENNGGSFMDESYATVPISIDVTNGANDASLTSAVSTGKIKKRNCYECGEKGHLSSACPNKLQKQG

SEQ ID NO: 96915 - protein, 404 aa, Arabidopsis thaliana
  peptide (1)..(404): Ceres Seq. ID no. 12735133
MRPEDGAFSGIAFITFDTEDGAKRALAFDRAAMGDRYLTIQQYVKTTTPSIPRRKTSSGFAPEMVDGYNRVYIGNLAWDTTERDIRKLFSDCVINSVRLGKNKETGEFKGYAHVDFKDSVSVAIALKLDQQVICGRPVKICCALKDRPATDHTPGETNNAGSYNMEDTYAAADPVPALAGRSEVDDGNYFATTVSSSKVKRRVCYECGEKGHLSTACPIKLQKADDQANSKLGQETVDGRPAMQSYGLPKNSGDSYYMNETYASTNETYNGGYSASAVGTGKVKRRNCYECGEKGHLSTACPIKLQNTSHTNSTLDHQTVEAGPTQVTSYSLQKKTRDTENNGGSFMDESYATVPISIDVTNGANDASLTSAVSTGKIKKRNCYECGEKGHLSSACPNKLQKQG

SEQ ID NO: 96916 - DNA, 1095 bp, Arabidopsis thaliana
  misc_feature (1)..(1095): Ceres Seq. ID no. 12735150
  misc_feature (1)..(1095): Ortholog of  Ceres SEQ ID NO 15170447 as cited in SEQ ID NO 52849
  misc_feature (1)..(1095): Ortholog of  Ceres SEQ ID NO 13589042 as cited in SEQ ID NO 60626
  misc_feature (1)..(1095): Ortholog of  Ceres SEQ ID NO 14302887 as cited in SEQ ID NO 66146
atgaaagctcttattcttgttggaggttttggcactcgcttgagaccattgactctcagtctcccaaagccgcttgtcgatttcgctaataaacctatgattctacatcagatagaggcactaaaggcaattggagtggatgaagtcgtcttggccattaactacgagccagagcaactgctagtgatgtccaaattctcaaacgacgttgaggcaactctcgggatcaagatcacctgctcacaagagactgagcctttaggtacagctggtcctttggctttagccagggacaaactggttgatggctctggccaaccattctttgtccttaacagcgatgttattagcgactacccgcttgaagagatgattgcttttcacaatgctcatggaggagaggcctctataatggtgacaaaggtagatgagccttcgaaatatggagttgttgttatggaagaagccacagggagagtggaaagattcgtcgaaaaaccgaaactatttgttggtaacaagatcaatgctgggatttatcttctaaatccttcagttcttgatcggattgagctaagaccaacatcaatagagaaagagatcttccctcaaatcgcagaagcggaaaagctctatgcaatgctacttcccggattctggatggacattggtcaaccacgagactacattactggtctaagactttacttagactctctgaggaagaaatctccttcaaagttagccactggtccacacattttgggaaatgttcttgtggatgaaaccgcagagattggtgaaggatgtttgattggccctaacgttgctataggccctggctgtgttgttgagtccggggttagactatcgcactgcacggtaatgcgtggggtacacgtgaagagatatgcgtgtatctcgagtagtatcattgggtggcactcgacggtcggacaatgggctcgggtcgagaacatgtccatacttgggaaaaatgtttacgtgtgcgatgagatatattgtaatggaggggttgtgttgcataacaaagagatcaaatcagacatcttgaaaccagatatagtgatgtga

SEQ ID NO: 96917 - protein, 364 aa, Arabidopsis thaliana
  peptide (1)..(364): Ceres Seq. ID no. 12735151
MKALILVGGFGTRLRPLTLSLPKPLVDFANKPMILHQIEALKAIGVDEVVLAINYEPEQLLVMSKFSNDVEATLGIKITCSQETEPLGTAGPLALARDKLVDGSGQPFFVLNSDVISDYPLEEMIAFHNAHGGEASIMVTKVDEPSKYGVVVMEEATGRVERFVEKPKLFVGNKINAGIYLLNPSVLDRIELRPTSIEKEIFPQIAEAEKLYAMLLPGFWMDIGQPRDYITGLRLYLDSLRKKSPSKLATGPHILGNVLVDETAEIGEGCLIGPNVAIGPGCVVESGVRLSHCTVMRGVHVKRYACISSSIIGWHSTVGQWARVENMSILGKNVYVCDEIYCNGGVVLHNKEIKSDILKPDIVM

SEQ ID NO: 96918 - protein, 332 aa, Arabidopsis thaliana
  peptide (1)..(332): Ceres Seq. ID no. 12735152
MILHQIEALKAIGVDEVVLAINYEPEQLLVMSKFSNDVEATLGIKITCSQETEPLGTAGPLALARDKLVDGSGQPFFVLNSDVISDYPLEEMIAFHNAHGGEASIMVTKVDEPSKYGVVVMEEATGRVERFVEKPKLFVGNKINAGIYLLNPSVLDRIELRPTSIEKEIFPQIAEAEKLYAMLLPGFWMDIGQPRDYITGLRLYLDSLRKKSPSKLATGPHILGNVLVDETAEIGEGCLIGPNVAIGPGCVVESGVRLSHCTVMRGVHVKRYACISSSIIGWHSTVGQWARVENMSILGKNVYVCDEIYCNGGVVLHNKEIKSDILKPDIVM

SEQ ID NO: 96919 - protein, 302 aa, Arabidopsis thaliana
  peptide (1)..(302): Ceres Seq. ID no. 12735153
MSKFSNDVEATLGIKITCSQETEPLGTAGPLALARDKLVDGSGQPFFVLNSDVISDYPLEEMIAFHNAHGGEASIMVTKVDEPSKYGVVVMEEATGRVERFVEKPKLFVGNKINAGIYLLNPSVLDRIELRPTSIEKEIFPQIAEAEKLYAMLLPGFWMDIGQPRDYITGLRLYLDSLRKKSPSKLATGPHILGNVLVDETAEIGEGCLIGPNVAIGPGCVVESGVRLSHCTVMRGVHVKRYACISSSIIGWHSTVGQWARVENMSILGKNVYVCDEIYCNGGVVLHNKEIKSDILKPDIVM

SEQ ID NO: 96920 - DNA, 1653 bp, Arabidopsis thaliana
  misc_feature (1)..(1653): Ceres Seq. ID no. 12735158
  misc_feature (1)..(1653): Ortholog of  Ceres SEQ ID NO 13639469 as cited in SEQ ID NO 54825
  misc_feature (1)..(1653): Ortholog of  Ceres SEQ ID NO 15179301 as cited in SEQ ID NO 0
aatctctaaacccatttctctacgattagagaagctgacatcaaaattgaaacttgggaaatttttggatttgttcttcttctatggcaactgaagacgatggtgaattgtcagctcgttaccagaacacgttggatgcattgtcgtctttgatcacaaaacgtggccgtttagctagtaacaaccaatctcaccgattccgtttgctctttcattatctcaaggttcttgagcttgaagatgcagtttcacaaatgaaaatcattcatgtggccggaactaaaggaaagggatcaacatgtacatttgcggagtctattcttcgttgttacggtcttcgaactggtctcttcacatctcctcacttaatcgatgtccgagagagattccgtcttaacggcattgagataagccaggagaaatttgtgaactacttttggtgttgctttcataagctcaaggagaaaaccagcaatgaggttccaatgcctacttatttctgcttccttgctttattagctttcaagattttcacaacagaacaggttgatgttgttatactagaagttggcttaggtgggagattcgatgcgactaatattcagaaacctgtcgtctgtggtatttcttctctagggtatgaccatatggagattcttggatacacacttgctgaaattgctgcagagaaagccggtatcttcaagagtggagttcctgcttttacagtggctcaacctgatgaagcaatgcgtgtactcaatgaaaaagcttcaaaattggaggtgaatcttcaggtggtggaaccgttggactcaagccagagactcgggcttcaaggcgaacatcaatatctaaacgctggtcttgctgttgcgttgtgctctacatttcttaaagagattggtattgaggacaagaatggtttggatcagacaaacggtttacccgaaaaattcatctctggattgtcaaatgcttatttgatgggacgagctatgatagtgcctgattcagaactccctgaagagattgtgtattaccttgatggagctcatagtcctgaaagcatggaagcttgcgctatatggttttcaaaacagatcaaacaaaaccaagaaagaaaccagaaaagatcagagcagatactcttgttcaattgtatgtctgttcgtgacccgagtttgcttcttccgcgattaaggagtaaatgcattgatcaaggagttgatttcaagagagccgtttttgtgccaaacgtatcagtgtacaaccaagtgggatcttcgacaaacgttggcacacgtgtcgagtcgatgtcgtggcagttcggtcttcagaggatttgggagagtttagctcgaggtgaagcaaaatctaattcaaaaagtgattctaaaggcaaagaagaagagaagagtttcgttttctcgtcacttcctgtggctgttgactggctccgggacaatgctcgccaaagtaaacaagttcgttttcaggtgttggtaactggttcattacatttggtgggtgatctcttgagatttatcaagaaatgaatatgtttctgccatgtattcttggccaatctttgcctgtaatgactatatatctcacaacatgatttaacaaaagaaaagaaaagatatttcg

SEQ ID NO: 96921 - protein, 491 aa, Arabidopsis thaliana
  peptide (1)..(491): Ceres Seq. ID no. 12735159
MATEDDGELSARYQNTLDALSSLITKRGRLASNNQSHRFRLLFHYLKVLELEDAVSQMKIIHVAGTKGKGSTCTFAESILRCYGLRTGLFTSPHLIDVRERFRLNGIEISQEKFVNYFWCCFHKLKEKTSNEVPMPTYFCFLALLAFKIFTTEQVDVVILEVGLGGRFDATNIQKPVVCGISSLGYDHMEILGYTLAEIAAEKAGIFKSGVPAFTVAQPDEAMRVLNEKASKLEVNLQVVEPLDSSQRLGLQGEHQYLNAGLAVALCSTFLKEIGIEDKNGLDQTNGLPEKFISGLSNAYLMGRAMIVPDSELPEEIVYYLDGAHSPESMEACAIWFSKQIKQNQERNQKRSEQILLFNCMSVRDPSLLLPRLRSKCIDQGVDFKRAVFVPNVSVYNQVGSSTNVGTRVESMSWQFGLQRIWESLARGEAKSNSKSDSKGKEEEKSFVFSSLPVAVDWLRDNARQSKQVRFQVLVTGSLHLVGDLLRFIKK

SEQ ID NO: 96922 - protein, 434 aa, Arabidopsis thaliana
  peptide (1)..(434): Ceres Seq. ID no. 12735160
MKIIHVAGTKGKGSTCTFAESILRCYGLRTGLFTSPHLIDVRERFRLNGIEISQEKFVNYFWCCFHKLKEKTSNEVPMPTYFCFLALLAFKIFTTEQVDVVILEVGLGGRFDATNIQKPVVCGISSLGYDHMEILGYTLAEIAAEKAGIFKSGVPAFTVAQPDEAMRVLNEKASKLEVNLQVVEPLDSSQRLGLQGEHQYLNAGLAVALCSTFLKEIGIEDKNGLDQTNGLPEKFISGLSNAYLMGRAMIVPDSELPEEIVYYLDGAHSPESMEACAIWFSKQIKQNQERNQKRSEQILLFNCMSVRDPSLLLPRLRSKCIDQGVDFKRAVFVPNVSVYNQVGSSTNVGTRVESMSWQFGLQRIWESLARGEAKSNSKSDSKGKEEEKSFVFSSLPVAVDWLRDNARQSKQVRFQVLVTGSLHLVGDLLRFIKK

SEQ ID NO: 96923 - protein, 357 aa, Arabidopsis thaliana
  peptide (1)..(357): Ceres Seq. ID no. 12735161
MPTYFCFLALLAFKIFTTEQVDVVILEVGLGGRFDATNIQKPVVCGISSLGYDHMEILGYTLAEIAAEKAGIFKSGVPAFTVAQPDEAMRVLNEKASKLEVNLQVVEPLDSSQRLGLQGEHQYLNAGLAVALCSTFLKEIGIEDKNGLDQTNGLPEKFISGLSNAYLMGRAMIVPDSELPEEIVYYLDGAHSPESMEACAIWFSKQIKQNQERNQKRSEQILLFNCMSVRDPSLLLPRLRSKCIDQGVDFKRAVFVPNVSVYNQVGSSTNVGTRVESMSWQFGLQRIWESLARGEAKSNSKSDSKGKEEEKSFVFSSLPVAVDWLRDNARQSKQVRFQVLVTGSLHLVGDLLRFIKK

SEQ ID NO: 96924 - DNA, 1395 bp, Arabidopsis thaliana
  misc_feature (1)..(1395): Ceres Seq. ID no. 12735166
  misc_feature (1)..(1395): Ortholog of  Ceres SEQ ID NO 13597574 as cited in SEQ ID NO 64677
  misc_feature (1)..(1395): Ortholog of  Ceres SEQ ID NO 13662880 as cited in SEQ ID NO 65422
  misc_feature (1)..(1395): Ortholog of  Ceres SEQ ID NO 14302071 as cited in SEQ ID NO 66585
  misc_feature (1)..(1395): Ortholog of  Ceres SEQ ID NO 14316013 as cited in SEQ ID NO 67181
  misc_feature (1)..(1395): Ortholog of  Ceres SEQ ID NO 12779098 as cited in SEQ ID NO 67698
  misc_feature (1)..(1395): Ortholog of  Ceres SEQ ID NO 13596180 as cited in SEQ ID NO 67941
  misc_feature (1)..(1395): Ortholog of  Ceres SEQ ID NO 13591190 as cited in SEQ ID NO 68044
  misc_feature (1)..(1395): Ortholog of  Ceres SEQ ID NO 13596089 as cited in SEQ ID NO 68373
atggaagagagaaaagtgaagagaattatcatgttccctctaccgtttacaggacacttcaaccctatgatcgagcttgctggaatattccacaaccgtggcttctccgtcacgatactccacacttctttcaacttcccggatccttctcgccatccacagtttacttttcgaactatcactcacaaaaacgaaggagaagaagaccctctctctcaatcagaaacttcttcgggtaaggacctcgtcgtccttattagtctgctgaaacaatactacaccgagccgtctcttgcagaggaagtaggcgaaggagggacggtgtgttgtttggtctccgacgctctatgggggaggaacacggagattgtagcgaaagagattggagtgtgtacaatggtgatgaggactagtggtgcggcaacgttttgtgcttatacagctttccctctccttatagataagggttaccttcctatacaaggttctagattagatgagctagtgacagagcttccacctttgaaagtgaaggatcttcctgtaataaaaacgaaagagcctgagggactaaaccgaatacttaacgacatggtggaaggagccaagttatcttccggagtcgtatggaacacatttgaagatcttgaaagacattcactcatggattgtcgcagcaagttacaagttccgttgttcccaatcggaccgtttcacaaacatagaaccgatcttccaccgaagccaaagaacaaggacaaggacgatgatgaaatattaaccgattggcttaacaagcaagctccgcagtctgtggtctatgtgagttttggaagccttgcagctatagaagagaatgagtttttcgaaattgcttggggtctaagaaacagcgaactaccattcttgtgggtggttaggcccgggatggtccggggaaccgagtggcttgagtcattgccttgtgggtttttggaaaatattggtcatcagggaaaaattgtgaaatgggtgaatcaactagagacattggcccatcctgcggttggagcgttttggacgcactgtggatggaactcaacaatagagagcatatgtgaaggtgttccaatgatatgtacgccgtgtttctcggaccagcatgtgaacgcgaggtacatcgttgatgtatggcgagtcgggatgatgttagagagatgtaagatggaaaggacggagattgagaaggtagtaacaagtgtaatgatggagaatggagctggattgacagagatgtgtttggagttgaaagagaaagctaatgtttgcttaagtgaagatgggtcttcttccaagtatctagacaaacttgtcagtcatgtcctgtcttttgattcctcggcttttgcaagttaa

SEQ ID NO: 96925 - protein, 464 aa, Arabidopsis thaliana
  peptide (1)..(464): Ceres Seq. ID no. 12735167
MEERKVKRIIMFPLPFTGHFNPMIELAGIFHNRGFSVTILHTSFNFPDPSRHPQFTFRTITHKNEGEEDPLSQSETSSGKDLVVLISLLKQYYTEPSLAEEVGEGGTVCCLVSDALWGRNTEIVAKEIGVCTMVMRTSGAATFCAYTAFPLLIDKGYLPIQGSRLDELVTELPPLKVKDLPVIKTKEPEGLNRILNDMVEGAKLSSGVVWNTFEDLERHSLMDCRSKLQVPLFPIGPFHKHRTDLPPKPKNKDKDDDEILTDWLNKQAPQSVVYVSFGSLAAIEENEFFEIAWGLRNSELPFLWVVRPGMVRGTEWLESLPCGFLENIGHQGKIVKWVNQLETLAHPAVGAFWTHCGWNSTIESICEGVPMICTPCFSDQHVNARYIVDVWRVGMMLERCKMERTEIEKVVTSVMMENGAGLTEMCLELKEKANVCLSEDGSSSKYLDKLVSHVLSFDSSAFAS

SEQ ID NO: 96926 - protein, 454 aa, Arabidopsis thaliana
  peptide (1)..(454): Ceres Seq. ID no. 12735168
MFPLPFTGHFNPMIELAGIFHNRGFSVTILHTSFNFPDPSRHPQFTFRTITHKNEGEEDPLSQSETSSGKDLVVLISLLKQYYTEPSLAEEVGEGGTVCCLVSDALWGRNTEIVAKEIGVCTMVMRTSGAATFCAYTAFPLLIDKGYLPIQGSRLDELVTELPPLKVKDLPVIKTKEPEGLNRILNDMVEGAKLSSGVVWNTFEDLERHSLMDCRSKLQVPLFPIGPFHKHRTDLPPKPKNKDKDDDEILTDWLNKQAPQSVVYVSFGSLAAIEENEFFEIAWGLRNSELPFLWVVRPGMVRGTEWLESLPCGFLENIGHQGKIVKWVNQLETLAHPAVGAFWTHCGWNSTIESICEGVPMICTPCFSDQHVNARYIVDVWRVGMMLERCKMERTEIEKVVTSVMMENGAGLTEMCLELKEKANVCLSEDGSSSKYLDKLVSHVLSFDSSAFAS

SEQ ID NO: 96927 - protein, 442 aa, Arabidopsis thaliana
  peptide (1)..(442): Ceres Seq. ID no. 12735169
MIELAGIFHNRGFSVTILHTSFNFPDPSRHPQFTFRTITHKNEGEEDPLSQSETSSGKDLVVLISLLKQYYTEPSLAEEVGEGGTVCCLVSDALWGRNTEIVAKEIGVCTMVMRTSGAATFCAYTAFPLLIDKGYLPIQGSRLDELVTELPPLKVKDLPVIKTKEPEGLNRILNDMVEGAKLSSGVVWNTFEDLERHSLMDCRSKLQVPLFPIGPFHKHRTDLPPKPKNKDKDDDEILTDWLNKQAPQSVVYVSFGSLAAIEENEFFEIAWGLRNSELPFLWVVRPGMVRGTEWLESLPCGFLENIGHQGKIVKWVNQLETLAHPAVGAFWTHCGWNSTIESICEGVPMICTPCFSDQHVNARYIVDVWRVGMMLERCKMERTEIEKVVTSVMMENGAGLTEMCLELKEKANVCLSEDGSSSKYLDKLVSHVLSFDSSAFAS

SEQ ID NO: 96928 - DNA, 1054 bp, Arabidopsis thaliana
  misc_feature (1)..(1054): Ceres Seq. ID no. 12735170
  misc_feature (1)..(1054): Ortholog of  Ceres SEQ ID NO 12627215 as cited in SEQ ID NO 60976
  misc_feature (1)..(1054): Ortholog of  Ceres SEQ ID NO 15178542 as cited in SEQ ID NO 65410
  misc_feature (1)..(1054): Ortholog of  Ceres SEQ ID NO 12635657 as cited in SEQ ID NO 0
  misc_feature (1)..(1054): Ortholog of  Ceres SEQ ID NO 13599649 as cited in SEQ ID NO 0
  misc_feature (1)..(1054): Ortholog of  Ceres SEQ ID NO 14309404 as cited in SEQ ID NO 0
aacttaaaaaacaaggctcgaggcggttctcttatctgcaaaactaaagactgttgtctaaagcgaaccaacaaaaagtcttcatctttaatcattcaatggcttcttcgtcttctatgcagatggttcacacttcccgctccattgcccagattgggttcggtgttaagtcgcaattagtttctgcaaatcgaacaactcaatcagtttgctttggagctcgttcctctggaattgcattatcttcgagattgcactatgcatcacccattaagcaattttctggggtttatgcgaccaccaagcatcagagaaccgcttgtgttaaatccatggctgctgaggaagaagaagtaatcgaacctcaagctaaagtgacaaacaaggtttactttgatgtggaaattggaggtgaagttgctggcagaattgtgatgggtctctttggagaagttgtgcctaaaaccgttgaaaacttccgtgccttgtgtactggtgagaagaaatacgggtacaagggttcctctttccatcgtattattaaggatttcatgatccaaggaggtgatttcaccgagggaaatggtactggaggtattagtatttacggtgccaagttcgaagatgaaaacttcaccctgaagcatactggacctggaatcttgagcatggcaaacgctggtcctaatactaatggaagccagtttttcatttgtaccgtcaagacttcatggttagataacaagcatgtcgtgtttggacaagtaattgaaggtatgaagcttgttaggactcttgagtctcaagagactcgcgctttcgatgttcccaagaaaggttgtagaatctatgcctgcggagagctcccgttagatgcttgataatcactattgaccgatgcattgtctttgccatctttgttctgttttttgctattatgactattgaggaatccaaaccatcaaaaagccaaagattttcaaattctggtcttttatttattatatatttcggatacatgagttataagttcttttaatcgatgtgggattct

SEQ ID NO: 96929 - protein, 260 aa, Arabidopsis thaliana; identical to SEQ ID NO: 21204
  peptide (1)..(260): Ceres Seq. ID no. 12735171

SEQ ID NO: 96930 - protein, 254 aa, Arabidopsis thaliana; identical to SEQ ID NO: 21205
  peptide (1)..(254): Ceres Seq. ID no. 12735172

SEQ ID NO: 96931 - protein, 252 aa, Arabidopsis thaliana; identical to SEQ ID NO: 21206
  peptide (1)..(252): Ceres Seq. ID no. 12735173

SEQ ID NO: 96932 - DNA, 1431 bp, Arabidopsis thaliana
  misc_feature (1)..(1431): Ceres Seq. ID no. 12735272
  misc_feature (1)..(1431): Ortholog of  Ceres SEQ ID NO 13600220 as cited in SEQ ID NO 0
atgaaacatttcaatctgttatccattattctggttatcgttttggcgacaagctacattgatgccttcaccagaaacgattttccagaggatttcctcttcggagccggtacttctgcttatcagtgggaaggagctgctaatgaagacggaagaactcctagcgtctgggatacaacctcccactgttataatggaagtaatggagatatagcatgtgatgggtatcacaaatacaaggaagatgttaagttgatggcagaaatgggcttagaatcattcagattctctatctcctggtcaagacttatacctaatggaagaggacgcattaacccaaaaggtttattgttttacaagaatctcatcaaagagctacgaagccatggaatcgaacctcacgttacactttaccactacgatcttcctcagtctcttgaagatgaagaagactttacagcttttgcagatgtatgcttcagagagtttggggaggatgtgaagttatggactacaatcaacgaagctacaatcttcgcctttgctttttatggcaaagacgttaggtatggaaattgtactacaggaaattattgtatggaaacatatattgcaggccataacatgttgctagctcatgcctctgcttcaaatttgtataaactaaagtacaagagtaagcaaagaggatccataggccttagtatatttgcattggggttaactccttatacaaactccaaggacgatgaaatcgcaactcaaagagctaaagctttcctctatggatggatgttgaagcctttggtatttggggactatccggatgaaatgaagagaaccttgggatcgagattaccggttttctcagaggaagaatcagagcaagttaaaggatcatctgactttgtaggaattatacattacacgacagtttatgtcacaaaccagcccgcaccttatatctttcccagcagcactaacaaagacttctttacagacatgggcgcccactgggaactcttcatcattcgtggtaagtttgatgctgttccatggggtctggaaggtgttcttcagcatataaagcatcgctataacaatcctccaatctacattcttgaaaatggttcaccgatgaaacacgattcgatgctacaagacacaccaagagttgaatacattcaagcttacattggtgctgtcctcaacgctatcaagtatggtcatcctttttcaaattttagtcctcacgttggatataaaagcagcttcggaatgtactatgtcaattttagcgatcctggtcgcaagaggtcgccaaagctctctgcttcttggtacactggttttctcaatggtacaattgatgttgcttctcaagatatgactcagttgcagagaaatttctctggctcttcttcactgtaa

SEQ ID NO: 96933 - protein, 476 aa, Arabidopsis thaliana
  peptide (1)..(476): Ceres Seq. ID no. 12735273
MKHFNLLSIILVIVLATSYIDAFTRNDFPEDFLFGAGTSAYQWEGAANEDGRTPSVWDTTSHCYNGSNGDIACDGYHKYKEDVKLMAEMGLESFRFSISWSRLIPNGRGRINPKGLLFYKNLIKELRSHGIEPHVTLYHYDLPQSLEDEEDFTAFADVCFREFGEDVKLWTTINEATIFAFAFYGKDVRYGNCTTGNYCMETYIAGHNMLLAHASASNLYKLKYKSKQRGSIGLSIFALGLTPYTNSKDDEIATQRAKAFLYGWMLKPLVFGDYPDEMKRTLGSRLPVFSEEESEQVKGSSDFVGIIHYTTVYVTNQPAPYIFPSSTNKDFFTDMGAHWELFIIRGKFDAVPWGLEGVLQHIKHRYNNPPIYILENGSPMKHDSMLQDTPRVEYIQAYIGAVLNAIKYGHPFSNFSPHVGYKSSFGMYYVNFSDPGRKRSPKLSASWYTGFLNGTIDVASQDMTQLQRNFSGSSSL

SEQ ID NO: 96934 - protein, 391 aa, Arabidopsis thaliana
  peptide (1)..(391): Ceres Seq. ID no. 12735274
MAEMGLESFRFSISWSRLIPNGRGRINPKGLLFYKNLIKELRSHGIEPHVTLYHYDLPQSLEDEEDFTAFADVCFREFGEDVKLWTTINEATIFAFAFYGKDVRYGNCTTGNYCMETYIAGHNMLLAHASASNLYKLKYKSKQRGSIGLSIFALGLTPYTNSKDDEIATQRAKAFLYGWMLKPLVFGDYPDEMKRTLGSRLPVFSEEESEQVKGSSDFVGIIHYTTVYVTNQPAPYIFPSSTNKDFFTDMGAHWELFIIRGKFDAVPWGLEGVLQHIKHRYNNPPIYILENGSPMKHDSMLQDTPRVEYIQAYIGAVLNAIKYGHPFSNFSPHVGYKSSFGMYYVNFSDPGRKRSPKLSASWYTGFLNGTIDVASQDMTQLQRNFSGSSSL

SEQ ID NO: 96935 - protein, 388 aa, Arabidopsis thaliana
  peptide (1)..(388): Ceres Seq. ID no. 12735275
MGLESFRFSISWSRLIPNGRGRINPKGLLFYKNLIKELRSHGIEPHVTLYHYDLPQSLEDEEDFTAFADVCFREFGEDVKLWTTINEATIFAFAFYGKDVRYGNCTTGNYCMETYIAGHNMLLAHASASNLYKLKYKSKQRGSIGLSIFALGLTPYTNSKDDEIATQRAKAFLYGWMLKPLVFGDYPDEMKRTLGSRLPVFSEEESEQVKGSSDFVGIIHYTTVYVTNQPAPYIFPSSTNKDFFTDMGAHWELFIIRGKFDAVPWGLEGVLQHIKHRYNNPPIYILENGSPMKHDSMLQDTPRVEYIQAYIGAVLNAIKYGHPFSNFSPHVGYKSSFGMYYVNFSDPGRKRSPKLSASWYTGFLNGTIDVASQDMTQLQRNFSGSSSL

SEQ ID NO: 96936 - DNA, 4170 bp, Arabidopsis thaliana
  misc_feature (1)..(4170): Ceres Seq. ID no. 12735301
  misc_feature (1)..(4170): Ortholog of  Ceres SEQ ID NO 15180400 as cited in SEQ ID NO 0
atggaggagtctgaacttgaagaaggagaggcttgctcttacaatattactaacgaatacgctggaagcatagaccctgataacgatctctcttacattctgagaatcttgaaactcttcttcttggttggggcgaaatatggtggctatggctctttcttgccaacttatcaacgttctcctgtttggtctcacccgaagacaccagcaaaacctcagagttctacagggactagatctccaaacaacttactaggggagtcccagagtggcaatgcagcttcgtctagtgttcctaaaaaggcaaaatctggtcttgcttcctctggaaaccccaaaaaatcagtgaaatctaagaaacctagttccagtgccagaatggaatctgcaactaagaaaccttgtgtcttcagtaagcagaattctctgaagcttcggataaagatggtaccagatggtttatctaccgaaaagaatgctgctgcaatatacagtggccttggacttgatgtgtcaccttctttgtccttagataacaatagtctttcaggtagtgaagggatgaatgaggagcctcagggttattctccaacggagtctcccaccagtattcttaatgtaatgacttcacttcctgtggatcattgtcagttcctatctcctctctctgaggatctgattcgattcattgaaagggaaaaatccgaaaagggatataagtatacatctccatccaggcttttcactgcgagttcttctgctatggcatacggtttggaacctcagaagtctggagagaaaccatcagtagagaagaaaaaaaagatggtggagaggagcagcttttctgctgagacaaatgtccgcagtaagaagggcctgtttgattcaactgatgccattaccaaggagtcaatggaaacaaacacattatatcctacatttgcggagaaagaaacagccagtagtaaattatttgatgcatccaaggaaaactacaatggcactgttaggggcgaaatggtgggtgatgtcgacagaaggttgtggggtctaactcgtcataaagatcttggggcgcatcatgagaatccaaagactatttctgctggaagtgttcgtgaagataaaaaggctaaacttggtgataatgaggcttcaggatacccaaggaaagttggcaaatacaaaggcagcaaagcttctgattcagtcaaaaaggaatcgagtgcatcaaaggcgaaaagtggtcataaagtggagctagaacatcctcttagaaagcagaagtatgaccagatagaacaggagccaccgtcttcatcaaagttcaaggaacagcaaacctctgttgtttttgagactaagctgaatggtcaagctgagaagaaggaagtggtagccgtgaaaccacaaagtgatagcaaaaaagccgaggacacttacaaagacttttttggagacataggggactctgaagaagaagaggaacaagacgtaaaagatttgcggatttcagaaaagggacttccgcccttagaagatatgcctgaaaaatcgagcttgccgctagtagaacctcagaacgttggtcctgaacccatgttgagaaaacttggttctgatgcttctcttccgaaagcaaatcccgtgatcatacaagaacattgggttgcttgtgacaaatgtggaaagtggcggcttcttccttttggcgtcttcccagaagaccttcctgagaaatggatgtgcacaatgcttaattggctgcctggagtgaactattgcaatgttcctgaagatgaaacaacgaaagcactgtatgcaatgtatcagatccctgtccctgagaaccaggcttcgatgcagagtaatcccagtggccctaagcctcagtttacccagggagatgacaacacaaagaagaagaaaaagggtttcaaaaagatagacaatggaatggataaagaaggtgctcgaactgcagaaactaacaagaccatccaaacatcgtcaagaaatggtattcaaaattcgcagggacttggcgacttggccgaggatgagaggcaaatacataaacagaaagagaaaggaaaagcagtggatcacctctctgatgagtcgaagagcttgaaggcgaataacaaaagaaaaacagatctagagagttctatgctggccaaaaaaatgaagatcgaaagttttctgtttcctgatgaatctgaatatggaaatggacgtcctacctcgagtagtggtgtccctatcacgtcagcagatataaagccaaagccccgagtctcctccaaaatgccaaaagaggaaggaggagcttcagacactggaaatagcaatagcactggggggattaaaaagaggaaactgagagaaagccatggttctaggatttacagtgagaacgaaaatcatgaacgaaagaaagctcgagttcgtaaagaagagaaggagcctagttattcacaaggcaatgggaagttggaaaagaaaaatagaagtcattcgaaaatagagtatgcaaatgttcagaactcaatcgcggcaacctcaagttcttctaagatttctgattctcataaacccagaaacagctcccgcgaagctaaatgttctcctgttgagtcggtgtcttcctcacctatgaggctttccaacccggagaaacgtatatctgtgagtaaaaagaaagaagaatcttatgatgctaacgtctttgcagcaggtagtttgaaaaaattctcagatggtgaaggtgaagatgatggtgggagtgatagatcgcagagtcagatgaaggataaacatggatcccatgagtcttctgtgcttgatatttgggataataaaggatctttgaaagcgaaagagcgcgctgatccttctctcgatgccaattttgaaaatggtggccacaagactttaccgcggaaactggatcatattctcggtgaaggaaaacagtctagcgatcatcatcgacgtagcaatgattccctggcaaagaagtcaggaaaaggttcatcttctcggtccaaagaaaagagccaaagcattaggtctgattcacgggatggtccgagacatattgaaaagaagatatatgatggtagtcctgacagtagagcggatatgatcgtgagaccaaacattccaaaaccgcacgactccgaaagaataccagagaggagtaatatagcagatttagcttctccatcacggccaccatctagaggtgtccaaggggattcctctatgctttctgtccgtaagaaagtcgataaatgcagcacatcagctggaaataataatatccaagctgatgatgtgacaaaggcaacagcccaaataagaaggaaaagcgagccttctccaagccccttgcgaaaggaaataacatctgcgcaggccgcccataatactttaaaagaagctaaagacttgaaacatacagctgaccgtctcaagaattctgtatcaaaccttgagcacattgagctctacttccaagcttgccttaagtttcttcacggtgcttttcttttggagatgagtagcaacgagagtgctagacaaggagaaacaatggtccaatctatgaagatttatagtagcactgcgaatctttgcggattttgtgcccatgagtatgagaagtctaaagatatgggagctgctgccctggcttacaaatgcatggaggtcgcgtatatgagagtggttaattcctcctacaccagtgctaatagatatcgaaatgaattgcagacttctctacaaatggttccgccaggtgaatctccttcttcatctgcctcggatgttgataacgtgaaccatccagcagcagtagacagagttggtacctcaaggggcatcagttctcctttagttgctgggaaccacgtcatttctgcacaaaaccgttctaatctcttacgtctgcttcaatttgctcaggacgtaaatctgtcaatggatgcctcgaggaaatcacgtgtggcattaacagcttgtattgaaaactcaggggaggcccaacaacaaggagagggtataatatctattaaaagcgcccttgattataacttccaagacatggagggattgctacgtttagtgaagcttgctatgaaggccaacaaccggtga

SEQ ID NO: 96937 - protein, 1389 aa, Arabidopsis thaliana
  peptide (1)..(1389): Ceres Seq. ID no. 12735302
MEESELEEGEACSYNITNEYAGSIDPDNDLSYILRILKLFFLVGAKYGGYGSFLPTYQRSPVWSHPKTPAKPQSSTGTRSPNNLLGESQSGNAASSSVPKKAKSGLASSGNPKKSVKSKKPSSSARMESATKKPCVFSKQNSLKLRIKMVPDGLSTEKNAAAIYSGLGLDVSPSLSLDNNSLSGSEGMNEEPQGYSPTESPTSILNVMTSLPVDHCQFLSPLSEDLIRFIEREKSEKGYKYTSPSRLFTASSSAMAYGLEPQKSGEKPSVEKKKKMVERSSFSAETNVRSKKGLFDSTDAITKESMETNTLYPTFAEKETASSKLFDASKENYNGTVRGEMVGDVDRRLWGLTRHKDLGAHHENPKTISAGSVREDKKAKLGDNEASGYPRKVGKYKGSKASDSVKKESSASKAKSGHKVELEHPLRKQKYDQIEQEPPSSSKFKEQQTSVVFETKLNGQAEKKEVVAVKPQSDSKKAEDTYKDFFGDIGDSEEEEEQDVKDLRISEKGLPPLEDMPEKSSLPLVEPQNVGPEPMLRKLGSDASLPKANPVIIQEHWVACDKCGKWRLLPFGVFPEDLPEKWMCTMLNWLPGVNYCNVPEDETTKALYAMYQIPVPENQASMQSNPSGPKPQFTQGDDNTKKKKKGFKKIDNGMDKEGARTAETNKTIQTSSRNGIQNSQGLGDLAEDERQIHKQKEKGKAVDHLSDESKSLKANNKRKTDLESSMLAKKMKIESFLFPDESEYGNGRPTSSSGVPITSADIKPKPRVSSKMPKEEGGASDTGNSNSTGGIKKRKLRESHGSRIYSENENHERKKARVRKEEKEPSYSQGNGKLEKKNRSHSKIEYANVQNSIAATSSSSKISDSHKPRNSSREAKCSPVESVSSSPMRLSNPEKRISVSKKKEESYDANVFAAGSLKKFSDGEGEDDGGSDRSQSQMKDKHGSHESSVLDIWDNKGSLKAKERADPSLDANFENGGHKTLPRKLDHILGEGKQSSDHHRRSNDSLAKKSGKGSSSRSKEKSQSIRSDSRDGPRHIEKKIYDGSPDSRADMIVRPNIPKPHDSERIPERSNIADLASPSRPPSRGVQGDSSMLSVRKKVDKCSTSAGNNNIQADDVTKATAQIRRKSEPSPSPLRKEITSAQAAHNTLKEAKDLKHTADRLKNSVSNLEHIELYFQACLKFLHGAFLLEMSSNESARQGETMVQSMKIYSSTANLCGFCAHEYEKSKDMGAAALAYKCMEVAYMRVVNSSYTSANRYRNELQTSLQMVPPGESPSSSASDVDNVNHPAAVDRVGTSRGISSPLVAGNHVISAQNRSNLLRLLQFAQDVNLSMDASRKSRVALTACIENSGEAQQQGEGIISIKSALDYNFQDMEGLLRLVKLAMKANNR

SEQ ID NO: 96938 - protein, 1263 aa, Arabidopsis thaliana
  peptide (1)..(1263): Ceres Seq. ID no. 12735303
MESATKKPCVFSKQNSLKLRIKMVPDGLSTEKNAAAIYSGLGLDVSPSLSLDNNSLSGSEGMNEEPQGYSPTESPTSILNVMTSLPVDHCQFLSPLSEDLIRFIEREKSEKGYKYTSPSRLFTASSSAMAYGLEPQKSGEKPSVEKKKKMVERSSFSAETNVRSKKGLFDSTDAITKESMETNTLYPTFAEKETASSKLFDASKENYNGTVRGEMVGDVDRRLWGLTRHKDLGAHHENPKTISAGSVREDKKAKLGDNEASGYPRKVGKYKGSKASDSVKKESSASKAKSGHKVELEHPLRKQKYDQIEQEPPSSSKFKEQQTSVVFETKLNGQAEKKEVVAVKPQSDSKKAEDTYKDFFGDIGDSEEEEEQDVKDLRISEKGLPPLEDMPEKSSLPLVEPQNVGPEPMLRKLGSDASLPKANPVIIQEHWVACDKCGKWRLLPFGVFPEDLPEKWMCTMLNWLPGVNYCNVPEDETTKALYAMYQIPVPENQASMQSNPSGPKPQFTQGDDNTKKKKKGFKKIDNGMDKEGARTAETNKTIQTSSRNGIQNSQGLGDLAEDERQIHKQKEKGKAVDHLSDESKSLKANNKRKTDLESSMLAKKMKIESFLFPDESEYGNGRPTSSSGVPITSADIKPKPRVSSKMPKEEGGASDTGNSNSTGGIKKRKLRESHGSRIYSENENHERKKARVRKEEKEPSYSQGNGKLEKKNRSHSKIEYANVQNSIAATSSSSKISDSHKPRNSSREAKCSPVESVSSSPMRLSNPEKRISVSKKKEESYDANVFAAGSLKKFSDGEGEDDGGSDRSQSQMKDKHGSHESSVLDIWDNKGSLKAKERADPSLDANFENGGHKTLPRKLDHILGEGKQSSDHHRRSNDSLAKKSGKGSSSRSKEKSQSIRSDSRDGPRHIEKKIYDGSPDSRADMIVRPNIPKPHDSERIPERSNIADLASPSRPPSRGVQGDSSMLSVRKKVDKCSTSAGNNNIQADDVTKATAQIRRKSEPSPSPLRKEITSAQAAHNTLKEAKDLKHTADRLKNSVSNLEHIELYFQACLKFLHGAFLLEMSSNESARQGETMVQSMKIYSSTANLCGFCAHEYEKSKDMGAAALAYKCMEVAYMRVVNSSYTSANRYRNELQTSLQMVPPGESPSSSASDVDNVNHPAAVDRVGTSRGISSPLVAGNHVISAQNRSNLLRLLQFAQDVNLSMDASRKSRVALTACIENSGEAQQQGEGIISIKSALDYNFQDMEGLLRLVKLAMKANNR

SEQ ID NO: 96939 - protein, 1241 aa, Arabidopsis thaliana
  peptide (1)..(1241): Ceres Seq. ID no. 12735304
MVPDGLSTEKNAAAIYSGLGLDVSPSLSLDNNSLSGSEGMNEEPQGYSPTESPTSILNVMTSLPVDHCQFLSPLSEDLIRFIEREKSEKGYKYTSPSRLFTASSSAMAYGLEPQKSGEKPSVEKKKKMVERSSFSAETNVRSKKGLFDSTDAITKESMETNTLYPTFAEKETASSKLFDASKENYNGTVRGEMVGDVDRRLWGLTRHKDLGAHHENPKTISAGSVREDKKAKLGDNEASGYPRKVGKYKGSKASDSVKKESSASKAKSGHKVELEHPLRKQKYDQIEQEPPSSSKFKEQQTSVVFETKLNGQAEKKEVVAVKPQSDSKKAEDTYKDFFGDIGDSEEEEEQDVKDLRISEKGLPPLEDMPEKSSLPLVEPQNVGPEPMLRKLGSDASLPKANPVIIQEHWVACDKCGKWRLLPFGVFPEDLPEKWMCTMLNWLPGVNYCNVPEDETTKALYAMYQIPVPENQASMQSNPSGPKPQFTQGDDNTKKKKKGFKKIDNGMDKEGARTAETNKTIQTSSRNGIQNSQGLGDLAEDERQIHKQKEKGKAVDHLSDESKSLKANNKRKTDLESSMLAKKMKIESFLFPDESEYGNGRPTSSSGVPITSADIKPKPRVSSKMPKEEGGASDTGNSNSTGGIKKRKLRESHGSRIYSENENHERKKARVRKEEKEPSYSQGNGKLEKKNRSHSKIEYANVQNSIAATSSSSKISDSHKPRNSSREAKCSPVESVSSSPMRLSNPEKRISVSKKKEESYDANVFAAGSLKKFSDGEGEDDGGSDRSQSQMKDKHGSHESSVLDIWDNKGSLKAKERADPSLDANFENGGHKTLPRKLDHILGEGKQSSDHHRRSNDSLAKKSGKGSSSRSKEKSQSIRSDSRDGPRHIEKKIYDGSPDSRADMIVRPNIPKPHDSERIPERSNIADLASPSRPPSRGVQGDSSMLSVRKKVDKCSTSAGNNNIQADDVTKATAQIRRKSEPSPSPLRKEITSAQAAHNTLKEAKDLKHTADRLKNSVSNLEHIELYFQACLKFLHGAFLLEMSSNESARQGETMVQSMKIYSSTANLCGFCAHEYEKSKDMGAAALAYKCMEVAYMRVVNSSYTSANRYRNELQTSLQMVPPGESPSSSASDVDNVNHPAAVDRVGTSRGISSPLVAGNHVISAQNRSNLLRLLQFAQDVNLSMDASRKSRVALTACIENSGEAQQQGEGIISIKSALDYNFQDMEGLLRLVKLAMKANNR

SEQ ID NO: 96940 - DNA, 432 bp, Arabidopsis thaliana
  misc_feature (1)..(432): Ceres Seq. ID no. 12735364
  misc_feature (1)..(432): Ortholog of  Ceres SEQ ID NO 15179764 as cited in SEQ ID NO 69028
atggtggaagacaagaaaaaggctgaggaaatgaagatggtggaaacggagaagatggtggaaacaaagaagaaggctaggaggatgaaacattcggtgaatcggcctccgacaccagatgaagacgatgtggcggatggtttcgagaaagacaaggtcacgcttcgagaaatcatcaacgtcaagttggtggagagtggagagaaggagaatctaatggagcttgtgagagatagattggtggagtgtggttggaaagatgagatgagaattgcttgcagggagcatgtaaagaagaaagggagaaaagatgttacagtcgatgaactgatccgagtgatcactcctaaaggcagagcttcagtaccagattctgtgaaggcagagctgttgaacagaattcaaaacttcattgtatcagctgctctttga

SEQ ID NO: 96941 - protein, 143 aa, Arabidopsis thaliana
  peptide (1)..(143): Ceres Seq. ID no. 12735365
MVEDKKKAEEMKMVETEKMVETKKKARRMKHSVNRPPTPDEDDVADGFEKDKVTLREIINVKLVESGEKENLMELVRDRLVECGWKDEMRIACREHVKKKGRKDVTVDELIRVITPKGRASVPDSVKAELLNRIQNFIVSAAL

SEQ ID NO: 96942 - protein, 133 aa, Arabidopsis thaliana
  peptide (1)..(133): Ceres Seq. ID no. 12735366
MKMVETEKMVETKKKARRMKHSVNRPPTPDEDDVADGFEKDKVTLREIINVKLVESGEKENLMELVRDRLVECGWKDEMRIACREHVKKKGRKDVTVDELIRVITPKGRASVPDSVKAELLNRIQNFIVSAAL

SEQ ID NO: 96943 - protein, 131 aa, Arabidopsis thaliana
  peptide (1)..(131): Ceres Seq. ID no. 12735367
MVETEKMVETKKKARRMKHSVNRPPTPDEDDVADGFEKDKVTLREIINVKLVESGEKENLMELVRDRLVECGWKDEMRIACREHVKKKGRKDVTVDELIRVITPKGRASVPDSVKAELLNRIQNFIVSAAL

SEQ ID NO: 96944 - DNA, 984 bp, Arabidopsis thaliana
  misc_feature (1)..(984): Ceres Seq. ID no. 12735368
  misc_feature (1)..(984): Ortholog of  Ceres SEQ ID NO 13595870 as cited in SEQ ID NO 62101
  misc_feature (1)..(984): Ortholog of  Ceres SEQ ID NO 13590241 as cited in SEQ ID NO 63878
  misc_feature (1)..(984): Ortholog of  Ceres SEQ ID NO 13660597 as cited in SEQ ID NO 67655
atgcccatttacttactatcctgttctagtttggagatgctctgtggtcctgatggtgagcttcccgagaagttgagaaatttggaacctcgtcttatagagcatgtcagcaacgagattatggatcgagaccccaatgtccgctgggatgatattgctggtctggagcatgctaaaaagtgtgtaactgagatggtcatttggccattgttgcgtcctgacattttcaaaggttgtcgttcacctggaaaaggacttcttctctttggcccaccaggaactggtaaaacaatgattggaaaagctatagctggagaagcgaaagcaacctttttctatatatcagccagttcattgacaagcaagtggattggcgaaggtgaaaagctagtgagggccctttttggagttgcgagttgccgccagcctgcagtaatatttgtcgatgaaatagattctctactatctcagcgtaagtcagatggtgaacatgaatcgagtagaagactcaagacacaattcctgattgaaatggaaggtttcgacagtggcagcgagcaaattctcctaataggagcaacaaatagaccgcaagagctcgatgaagcagcaagaagacgactaaccaagagactctacattcctcttccttcatctgaagcaagagcatggataatacagaatctcctaaagaaagatgggttgtttactctgtcggatgatgatatgaacatcatatgcaacctaacggaagggtactcgggatcagatatgaagaacctggtgaaagatgcaactatgggtccattaagagaagctctcaaacgaggcatagatataactaacctgactaaagatgacatgcgtctagtaactcttcaggactttaaagacgcattgcaagaagtaaggccttctgtttctcagaacgaacttggaatctatgaaaattggaacaatcagtttggtagtttaagcctctaa

SEQ ID NO: 96945 - protein, 327 aa, Arabidopsis thaliana
  peptide (1)..(327): Ceres Seq. ID no. 12735369
MPIYLLSCSSLEMLCGPDGELPEKLRNLEPRLIEHVSNEIMDRDPNVRWDDIAGLEHAKKCVTEMVIWPLLRPDIFKGCRSPGKGLLLFGPPGTGKTMIGKAIAGEAKATFFYISASSLTSKWIGEGEKLVRALFGVASCRQPAVIFVDEIDSLLSQRKSDGEHESSRRLKTQFLIEMEGFDSGSEQILLIGATNRPQELDEAARRRLTKRLYIPLPSSEARAWIIQNLLKKDGLFTLSDDDMNIICNLTEGYSGSDMKNLVKDATMGPLREALKRGIDITNLTKDDMRLVTLQDFKDALQEVRPSVSQNELGIYENWNNQFGSLSL

SEQ ID NO: 96946 - protein, 315 aa, Arabidopsis thaliana
  peptide (1)..(315): Ceres Seq. ID no. 12735370
MLCGPDGELPEKLRNLEPRLIEHVSNEIMDRDPNVRWDDIAGLEHAKKCVTEMVIWPLLRPDIFKGCRSPGKGLLLFGPPGTGKTMIGKAIAGEAKATFFYISASSLTSKWIGEGEKLVRALFGVASCRQPAVIFVDEIDSLLSQRKSDGEHESSRRLKTQFLIEMEGFDSGSEQILLIGATNRPQELDEAARRRLTKRLYIPLPSSEARAWIIQNLLKKDGLFTLSDDDMNIICNLTEGYSGSDMKNLVKDATMGPLREALKRGIDITNLTKDDMRLVTLQDFKDALQEVRPSVSQNELGIYENWNNQFGSLSL

SEQ ID NO: 96947 - protein, 287 aa, Arabidopsis thaliana
  peptide (1)..(287): Ceres Seq. ID no. 12735371
MDRDPNVRWDDIAGLEHAKKCVTEMVIWPLLRPDIFKGCRSPGKGLLLFGPPGTGKTMIGKAIAGEAKATFFYISASSLTSKWIGEGEKLVRALFGVASCRQPAVIFVDEIDSLLSQRKSDGEHESSRRLKTQFLIEMEGFDSGSEQILLIGATNRPQELDEAARRRLTKRLYIPLPSSEARAWIIQNLLKKDGLFTLSDDDMNIICNLTEGYSGSDMKNLVKDATMGPLREALKRGIDITNLTKDDMRLVTLQDFKDALQEVRPSVSQNELGIYENWNNQFGSLSL

SEQ ID NO: 96948 - DNA, 738 bp, Arabidopsis thaliana
  misc_feature (1)..(738): Ceres Seq. ID no. 12735372
  misc_feature (1)..(738): Ortholog of  Ceres SEQ ID NO 12587035 as cited in SEQ ID NO 63605
atggaggatcggttctccactatcaccaatcttcatggagatcgtaaacaggcaatatttggagtctatgttggtcatggaggagttaaagcggctgagtgtccagctaagaacttagataagaacattgtagaagaagtagttggtaaaagacacgagttggagatagctgaagcgggtggttcatcctgtgtcacggctttggttagcgaagggagccttgttgtgtcaaacgccggtgactgtcgtgctgttatgagtgtaggaggtgtagctaaaggatccttagttgtgccaagaggaatcggagatgctcaacttaagaaatgggttatagctgaaccagagacaaagatctcgagagttgagcatgaccatgagttcttaatcttggcatcacatggtttatgggataaggtgagtaaccaagaagcagtagacattgctcgtcccttctgcttacgaaccgagaagccattgttgttagcagcttgtaagaagcttgttgatctctcggcttcacgaggctcgtttgatgatatcagtgtgatgttgatcccattgcggccagttcgtatagaaaagagaggcatcttagaagatgtttcatcctcaaaggcgaattcaatagcaagggacattgctataagtgtgacaagggatggtcgtttcagatcttatttagctagaggaggccctggatggttactttccagaattgaagaagacaagcgatga

SEQ ID NO: 96949 - protein, 245 aa, Arabidopsis thaliana
  peptide (1)..(245): Ceres Seq. ID no. 12735373
MEDRFSTITNLHGDRKQAIFGVYVGHGGVKAAECPAKNLDKNIVEEVVGKRHELEIAEAGGSSCVTALVSEGSLVVSNAGDCRAVMSVGGVAKGSLVVPRGIGDAQLKKWVIAEPETKISRVEHDHEFLILASHGLWDKVSNQEAVDIARPFCLRTEKPLLLAACKKLVDLSASRGSFDDISVMLIPLRPVRIEKRGILEDVSSSKANSIARDIAISVTRDGRFRSYLARGGPGWLLSRIEEDKR

SEQ ID NO: 96950 - protein, 160 aa, Arabidopsis thaliana
  peptide (1)..(160): Ceres Seq. ID no. 12735374
MSVGGVAKGSLVVPRGIGDAQLKKWVIAEPETKISRVEHDHEFLILASHGLWDKVSNQEAVDIARPFCLRTEKPLLLAACKKLVDLSASRGSFDDISVMLIPLRPVRIEKRGILEDVSSSKANSIARDIAISVTRDGRFRSYLARGGPGWLLSRIEEDKR

SEQ ID NO: 96951 - DNA, 1456 bp, Arabidopsis thaliana
  misc_feature (1)..(1456): Ceres Seq. ID no. 12735395
  misc_feature (1)..(1456): Ortholog of  Ceres SEQ ID NO 13600617 as cited in SEQ ID NO 0
aaatcatcactgtttctcgttgcggtctatatgaatgagatgtctctttcaatagctctgcataaacacaaatggcgaataaacctgatcatcatcatcatcatcaccaatcttcaaggagattgatgcttgtgttgtacttcaccagtgttcttgggattggattcatcgcagcttttctttgtctctcttcttcaattccctcagtatccgctgttttttcaatctgggttcccgttaaccggccggagatacagattccgatcatcgattccaaaattgttcaaaagagaagcaaacaatcgaatgatacaaaagatcatgtccgattcttatcggcaatatttgccgatataccggcgccggagttaaaatgggaggaaatggaatcagctccagttcctcgtcttgatggatactcagttcaaatcaataaccttttgtatgtcttctccggttacggcagtctcgactatgttcattctcatgtggatgtgttcaatttcacagacaataagtggtgtgacagattccacactcctaaagaaatggcgaattcgcacctcgggattgtgacggatggacggtatgtatatgtggtttcagggcagcttggtccacaatgtagaggacctacttctcgttcctttgttttagactcattcacaaagacttggctcgaatttccttcactaccagctccaaggtatgctcctgcgactcagatatggagagggaggcttcatgtgatgggtggaagcaaagagaatcgcaatgccgttgcttttgaccattggagcatagctgtaaaagatggcaaagcactcgacgaatggcgggaagaggtccctattcctcgaggtggaccacacagggcttgtgtagttgctaacgataaactacttgtaatcggtggccaagaaggtgacttcatggccaaacctaactcacccatcttcaagtgctcacgtagacgcgagatctttaatggtgaggtgtacatgatggacgaggagatgaagtggaaaatgttgccaccaatgccaaaaaacaattcccacattgaatctgcgtggatcattgtcaataactcaattgttatcgttggtggtaccacagattggcatccagtgacgaaaaggcttgttcttgttggagagatattccggtttcagttagatacgttgacttggtctgtgattggacggttaccataccgtgtcaaaacagcgatggccggattctggaacggttatttgtacttcacgtcgggacagagggatagaggaccagataatccacagcctgggaaagttattggagaaatgtggagaaccaagttgaagttttgagtcttagtgtgtactttttaatatagaaaaatcatttttttttagacaaactgttgaatctgaacttttgattagttcttcaaagagaaatcttcaatgagaac

SEQ ID NO: 96952 - protein, 426 aa, Arabidopsis thaliana
  peptide (1)..(426): Ceres Seq. ID no. 12735396
MANKPDHHHHHHQSSRRLMLVLYFTSVLGIGFIAAFLCLSSSIPSVSAVFSIWVPVNRPEIQIPIIDSKIVQKRSKQSNDTKDHVRFLSAIFADIPAPELKWEEMESAPVPRLDGYSVQINNLLYVFSGYGSLDYVHSHVDVFNFTDNKWCDRFHTPKEMANSHLGIVTDGRYVYVVSGQLGPQCRGPTSRSFVLDSFTKTWLEFPSLPAPRYAPATQIWRGRLHVMGGSKENRNAVAFDHWSIAVKDGKALDEWREEVPIPRGGPHRACVVANDKLLVIGGQEGDFMAKPNSPIFKCSRRREIFNGEVYMMDEEMKWKMLPPMPKNNSHIESAWIIVNNSIVIVGGTTDWHPVTKRLVLVGEIFRFQLDTLTWSVIGRLPYRVKTAMAGFWNGYLYFTSGQRDRGPDNPQPGKVIGEMWRTKLKF

SEQ ID NO: 96953 - protein, 408 aa, Arabidopsis thaliana
  peptide (1)..(408): Ceres Seq. ID no. 12735397
MLVLYFTSVLGIGFIAAFLCLSSSIPSVSAVFSIWVPVNRPEIQIPIIDSKIVQKRSKQSNDTKDHVRFLSAIFADIPAPELKWEEMESAPVPRLDGYSVQINNLLYVFSGYGSLDYVHSHVDVFNFTDNKWCDRFHTPKEMANSHLGIVTDGRYVYVVSGQLGPQCRGPTSRSFVLDSFTKTWLEFPSLPAPRYAPATQIWRGRLHVMGGSKENRNAVAFDHWSIAVKDGKALDEWREEVPIPRGGPHRACVVANDKLLVIGGQEGDFMAKPNSPIFKCSRRREIFNGEVYMMDEEMKWKMLPPMPKNNSHIESAWIIVNNSIVIVGGTTDWHPVTKRLVLVGEIFRFQLDTLTWSVIGRLPYRVKTAMAGFWNGYLYFTSGQRDRGPDNPQPGKVIGEMWRTKLKF

SEQ ID NO: 96954 - protein, 322 aa, Arabidopsis thaliana
  peptide (1)..(322): Ceres Seq. ID no. 12735398
MESAPVPRLDGYSVQINNLLYVFSGYGSLDYVHSHVDVFNFTDNKWCDRFHTPKEMANSHLGIVTDGRYVYVVSGQLGPQCRGPTSRSFVLDSFTKTWLEFPSLPAPRYAPATQIWRGRLHVMGGSKENRNAVAFDHWSIAVKDGKALDEWREEVPIPRGGPHRACVVANDKLLVIGGQEGDFMAKPNSPIFKCSRRREIFNGEVYMMDEEMKWKMLPPMPKNNSHIESAWIIVNNSIVIVGGTTDWHPVTKRLVLVGEIFRFQLDTLTWSVIGRLPYRVKTAMAGFWNGYLYFTSGQRDRGPDNPQPGKVIGEMWRTKLKF

SEQ ID NO: 96955 - DNA, 849 bp, Arabidopsis thaliana
  misc_feature (1)..(849): Ceres Seq. ID no. 12735399
  misc_feature (1)..(849): Ortholog of  Ceres SEQ ID NO 14314775 as cited in SEQ ID NO 56844
  misc_feature (1)..(849): Ortholog of  Ceres SEQ ID NO 14314628 as cited in SEQ ID NO 56888
atggatcaagatgactggttgggaacgctaagatacgccggtaaggcgcaggataaagtttccgttgacgctctcatgctccggtaccgtccgatcgctccaaagccgacgactggtcagccatgtggtgtggcagataacaacaacaatagctcatacggtatgagcaaacgaaccaaacgaaagtacgttagggtttcgaagaataataaaggcacgtgtcgaggtaagagcagatctgacttgtctgatgatcgggaacaaactgatgtcgtgacgttgcaactcttgccggaaaaatcagatatttccggtgagtactcgccgttggatcaagatagtctcgatccgtcggtgaaatcgataatcggagaggaaacacaagaaaccaacacgtggggtatgtttaacggcagcgtcacggcggagatggagacgtgggtgacggtggagtccgtcacaagcgtgtgtgagggtagtttgagttcccatgcggtggggattacggacgttgagatcgttgataatcttggtaaggacacgtgtccagcgttcgtatcggatggctcgaaccgtgtggtgtgggtcaacgaggcttaccggagaaatgtttccggtgatgattcaacggcgtcagtatcgccggaagttgtggtgtggttggtggcggaggaggcaacggcggcgatgcattgtaactaccaagctttcacgtgtagggtgaggatgcaatacacgtggaaggaaacaaagtataccaaaacggtgccgtgtgatgtgtggaaaatggagtttggtggttttgcatggaggctagacacaacagctgctctgactctctggctttga

SEQ ID NO: 96956 - protein, 282 aa, Arabidopsis thaliana
  peptide (1)..(282): Ceres Seq. ID no. 12735400
MDQDDWLGTLRYAGKAQDKVSVDALMLRYRPIAPKPTTGQPCGVADNNNNSSYGMSKRTKRKYVRVSKNNKGTCRGKSRSDLSDDREQTDVVTLQLLPEKSDISGEYSPLDQDSLDPSVKSIIGEETQETNTWGMFNGSVTAEMETWVTVESVTSVCEGSLSSHAVGITDVEIVDNLGKDTCPAFVSDGSNRVVWVNEAYRRNVSGDDSTASVSPEVVVWLVAEEATAAMHCNYQAFTCRVRMQYTWKETKYTKTVPCDVWKMEFGGFAWRLDTTAALTLWL

SEQ ID NO: 96957 - protein, 257 aa, Arabidopsis thaliana
  peptide (1)..(257): Ceres Seq. ID no. 12735401
MLRYRPIAPKPTTGQPCGVADNNNNSSYGMSKRTKRKYVRVSKNNKGTCRGKSRSDLSDDREQTDVVTLQLLPEKSDISGEYSPLDQDSLDPSVKSIIGEETQETNTWGMFNGSVTAEMETWVTVESVTSVCEGSLSSHAVGITDVEIVDNLGKDTCPAFVSDGSNRVVWVNEAYRRNVSGDDSTASVSPEVVVWLVAEEATAAMHCNYQAFTCRVRMQYTWKETKYTKTVPCDVWKMEFGGFAWRLDTTAALTLWL

SEQ ID NO: 96958 - protein, 228 aa, Arabidopsis thaliana
  peptide (1)..(228): Ceres Seq. ID no. 12735402
MSKRTKRKYVRVSKNNKGTCRGKSRSDLSDDREQTDVVTLQLLPEKSDISGEYSPLDQDSLDPSVKSIIGEETQETNTWGMFNGSVTAEMETWVTVESVTSVCEGSLSSHAVGITDVEIVDNLGKDTCPAFVSDGSNRVVWVNEAYRRNVSGDDSTASVSPEVVVWLVAEEATAAMHCNYQAFTCRVRMQYTWKETKYTKTVPCDVWKMEFGGFAWRLDTTAALTLWL

SEQ ID NO: 96959 - DNA, 1170 bp, Arabidopsis thaliana
  misc_feature (1)..(1170): Ceres Seq. ID no. 12735464
  misc_feature (1)..(1170): Ortholog of  Ceres SEQ ID NO 14310896 as cited in SEQ ID NO 53480
  misc_feature (1)..(1170): Ortholog of  Ceres SEQ ID NO 13660685 as cited in SEQ ID NO 67678
atggcggagtctgcgatccgaaccatcgtcgaatcaattcactcatcgccgacgcaagccgtcgtgtatctctccggcggtgcctctcagtctttaggttggttaatgtcagttcctggagcttcgaacacacttctcgaagccgtggttccgtattccatgatctctatggttcaattactcggcagggttccgaaccaacactgtagccaatcaatggcgaatgaaatggctttgttagcttataatcgtgctcttaagctttctaagccaggatgtgcggttcttggtgttggttttactggaacgttagcaacttctcgtccaaagcgtggggatcataggttctttttgtcgataagagcttccaaccggatatgggaaacttcagttactctaacaaagggaaaacgaagccgagaggaagaagataaagtggcaagctctgtactgattcaggctatggctaaggcatgccaagtttctgagacacttgactctggcttgactgattctgaggtgcttaatgagtctgtaatccagtttagtgaagaagaagaactagaacagcttatagatggacaaatatgctctaagatctatccattttctaaagaatcatacgggtcggataaagatagaaagattatactgcctggttcttttaacccattacatgacggtgatctcaagctgttggaagctgctatgagtgtttctgaggaaggagggtatccatgttttgaaatatctgcactgaatgcagacaaaccatcgcttacagttacagagattaaagatcgtgtcaaacaatttgaagtacttgaaaagacggtaatagtttcaaatcagcctttcttctacaagaaagctgaactcttcccaggaagcagttttgtaattggtgctgatactgcagcaaggattgttaatccaaagtactatgaaggaagccacaaaaggatgttggaggtactaggtgattgcaaacgaacaggttgcaagttccttgttggtggccgtaatgtagatagtgtattcaaggttcttgacgatcatgagattccaaaggaaataagtacaatgtttacctcaatttcagcagatacattccgtatggatatatcctctacagagctaagaaagaaccaaggaggtgttatttcataa

SEQ ID NO: 96960 - protein, 389 aa, Arabidopsis thaliana
  peptide (1)..(389): Ceres Seq. ID no. 12735465
MAESAIRTIVESIHSSPTQAVVYLSGGASQSLGWLMSVPGASNTLLEAVVPYSMISMVQLLGRVPNQHCSQSMANEMALLAYNRALKLSKPGCAVLGVGFTGTLATSRPKRGDHRFFLSIRASNRIWETSVTLTKGKRSREEEDKVASSVLIQAMAKACQVSETLDSGLTDSEVLNESVIQFSEEEELEQLIDGQICSKIYPFSKESYGSDKDRKIILPGSFNPLHDGDLKLLEAAMSVSEEGGYPCFEISALNADKPSLTVTEIKDRVKQFEVLEKTVIVSNQPFFYKKAELFPGSSFVIGADTAARIVNPKYYEGSHKRMLEVLGDCKRTGCKFLVGGRNVDSVFKVLDDHEIPKEISTMFTSISADTFRMDISSTELRKNQGGVIS

SEQ ID NO: 96961 - protein, 354 aa, Arabidopsis thaliana
  peptide (1)..(354): Ceres Seq. ID no. 12735466
MSVPGASNTLLEAVVPYSMISMVQLLGRVPNQHCSQSMANEMALLAYNRALKLSKPGCAVLGVGFTGTLATSRPKRGDHRFFLSIRASNRIWETSVTLTKGKRSREEEDKVASSVLIQAMAKACQVSETLDSGLTDSEVLNESVIQFSEEEELEQLIDGQICSKIYPFSKESYGSDKDRKIILPGSFNPLHDGDLKLLEAAMSVSEEGGYPCFEISALNADKPSLTVTEIKDRVKQFEVLEKTVIVSNQPFFYKKAELFPGSSFVIGADTAARIVNPKYYEGSHKRMLEVLGDCKRTGCKFLVGGRNVDSVFKVLDDHEIPKEISTMFTSISADTFRMDISSTELRKNQGGVIS

SEQ ID NO: 96962 - protein, 336 aa, Arabidopsis thaliana
  peptide (1)..(336): Ceres Seq. ID no. 12735467
MISMVQLLGRVPNQHCSQSMANEMALLAYNRALKLSKPGCAVLGVGFTGTLATSRPKRGDHRFFLSIRASNRIWETSVTLTKGKRSREEEDKVASSVLIQAMAKACQVSETLDSGLTDSEVLNESVIQFSEEEELEQLIDGQICSKIYPFSKESYGSDKDRKIILPGSFNPLHDGDLKLLEAAMSVSEEGGYPCFEISALNADKPSLTVTEIKDRVKQFEVLEKTVIVSNQPFFYKKAELFPGSSFVIGADTAARIVNPKYYEGSHKRMLEVLGDCKRTGCKFLVGGRNVDSVFKVLDDHEIPKEISTMFTSISADTFRMDISSTELRKNQGGVIS

SEQ ID NO: 96963 - DNA, 687 bp, Arabidopsis thaliana
  misc_feature (1)..(687): Ceres Seq. ID no. 12735496
  misc_feature (1)..(687): Ortholog of  Ceres SEQ ID NO 13595569 as cited in SEQ ID NO 56778
  misc_feature (1)..(687): Ortholog of  Ceres SEQ ID NO 12611159 as cited in SEQ ID NO 59821
atgagaataaggagaagagatgaaaaagagaatcaagaatacaagaaaggtttatggacagttgaagaagacaacatccttatggactatgttcttaatcatggcactggccaatggaaccgcatcgtcagaaaaactgggctaaagagatgtgggaaaagttgtagactgagatggatgaattatttgagccctaatgtgaacaaaggcaatttcactgaacaagaagaagacctcattattcgtctccacaagctcctcggcaatagatggtctttgatagctaaaagagtaccgggaagaacagataaccaagtcaagaactactggaacactcatctcagcaaaaaactcgtcggagattactcctccgccgtcaaaaccaccggagaagacgacgactctccaccgtcattgttcatcactgccgccacaccttcttcttgtcatcatcaacaagaaaatatctacgagaatatagccaagagctttaacggcgtcgtatcagcttcgtacgaggataaaccaaaacaagaactggctcaaaaagatgtcctaatggcaactactaatgatccaagtcactattatggcaataacgctttatgggttcatgacgacgattttgagcttagttcactcgtaatgatgaattttgcttctggtgatgttgagtactgcctttag

SEQ ID NO: 96964 - protein, 228 aa, Arabidopsis thaliana
  peptide (1)..(228): Ceres Seq. ID no. 12735497
MRIRRRDEKENQEYKKGLWTVEEDNILMDYVLNHGTGQWNRIVRKTGLKRCGKSCRLRWMNYLSPNVNKGNFTEQEEDLIIRLHKLLGNRWSLIAKRVPGRTDNQVKNYWNTHLSKKLVGDYSSAVKTTGEDDDSPPSLFITAATPSSCHHQQENIYENIAKSFNGVVSASYEDKPKQELAQKDVLMATTNDPSHYYGNNALWVHDDDFELSSLVMMNFASGDVEYCL

SEQ ID NO: 96965 - protein, 201 aa, Arabidopsis thaliana
  peptide (1)..(201): Ceres Seq. ID no. 12735498
MDYVLNHGTGQWNRIVRKTGLKRCGKSCRLRWMNYLSPNVNKGNFTEQEEDLIIRLHKLLGNRWSLIAKRVPGRTDNQVKNYWNTHLSKKLVGDYSSAVKTTGEDDDSPPSLFITAATPSSCHHQQENIYENIAKSFNGVVSASYEDKPKQELAQKDVLMATTNDPSHYYGNNALWVHDDDFELSSLVMMNFASGDVEYCL

SEQ ID NO: 96966 - protein, 169 aa, Arabidopsis thaliana
  peptide (1)..(169): Ceres Seq. ID no. 12735499
MNYLSPNVNKGNFTEQEEDLIIRLHKLLGNRWSLIAKRVPGRTDNQVKNYWNTHLSKKLVGDYSSAVKTTGEDDDSPPSLFITAATPSSCHHQQENIYENIAKSFNGVVSASYEDKPKQELAQKDVLMATTNDPSHYYGNNALWVHDDDFELSSLVMMNFASGDVEYCL

SEQ ID NO: 96967 - DNA, 1131 bp, Arabidopsis thaliana
  misc_feature (1)..(1131): Ceres Seq. ID no. 12735519
  misc_feature (1)..(1131): Ortholog of  Ceres SEQ ID NO 13664220 as cited in SEQ ID NO 61151
  misc_feature (1)..(1131): Ortholog of  Ceres SEQ ID NO 13597477 as cited in SEQ ID NO 65160
atgatgaaactcctcttggtggtggcaacttctgttgcccttatctttagcgtcactgatttatccggtgagggaccaaaacatggaggagaatccatgttgacagtccaaatccctgatttccgtctgattcctaccaccggagctttgggaccggagagttttgtctttgattttttcggcgatggtccttacaccggtttatctgacggtcgaattgttaagtggctagctaatgagagccgttggatcgatttcgccgtcaccacctccgcaagagaaggttgtgagggcccgcacgagcaccaacgaacagaacacgtgtgtggacgaccattgggccttgcctttgacaaatccactggtgacctttatatagccgatgcttatatgggccttcttaaagttggcccaacaggtggtgtcgccactcaggtgttaccacgtgagctaaatgaggcccttcgatttaccaattctttggatatcaatccacggaccggagttgtctactttaccgacagtagttcggtttatcaacggaggaactatataggggcgatgatgagtggggacaaaactggtagactgatgaagtacgacaacacgaaacaagtgaccactcttctaagcaacttagcgtttgtaaacggtgtcgctttaagccaaaacggtgattaccttctcgtcgtcgagaccgccatgtgtcgtatcttacgttactggctcaacgaaacgtcggtaaagtctcaatctcacgataactacgagattttcgcggaggggctccctgggtttccagacaacataaagagaagtccacgtggcggattctgggtaggcttgaacacaaaacactcaaagctgacaaagttcgccatgtcgaacgcgtggcttggacgtgccgctttgggcctgccggtggattggatgaaggtccattcggtttgggccaggtacaatgggaacggcatggccgtgaggttgagcgaggatagtggcgttatattagaggtattcgaaggtaaaaatgaaaataagtggatatctataagtgaggttgaagaaaaagatggaactctttgggttggatcggtgaatactcctttcgctggcatgtataaaatctaa

SEQ ID NO: 96968 - protein, 376 aa, Arabidopsis thaliana
  peptide (1)..(376): Ceres Seq. ID no. 12735520
MMKLLLVVATSVALIFSVTDLSGEGPKHGGESMLTVQIPDFRLIPTTGALGPESFVFDFFGDGPYTGLSDGRIVKWLANESRWIDFAVTTSAREGCEGPHEHQRTEHVCGRPLGLAFDKSTGDLYIADAYMGLLKVGPTGGVATQVLPRELNEALRFTNSLDINPRTGVVYFTDSSSVYQRRNYIGAMMSGDKTGRLMKYDNTKQVTTLLSNLAFVNGVALSQNGDYLLVVETAMCRILRYWLNETSVKSQSHDNYEIFAEGLPGFPDNIKRSPRGGFWVGLNTKHSKLTKFAMSNAWLGRAALGLPVDWMKVHSVWARYNGNGMAVRLSEDSGVILEVFEGKNENKWISISEVEEKDGTLWVGSVNTPFAGMYKI

SEQ ID NO: 96969 - protein, 375 aa, Arabidopsis thaliana
  peptide (1)..(375): Ceres Seq. ID no. 12735521
MKLLLVVATSVALIFSVTDLSGEGPKHGGESMLTVQIPDFRLIPTTGALGPESFVFDFFGDGPYTGLSDGRIVKWLANESRWIDFAVTTSAREGCEGPHEHQRTEHVCGRPLGLAFDKSTGDLYIADAYMGLLKVGPTGGVATQVLPRELNEALRFTNSLDINPRTGVVYFTDSSSVYQRRNYIGAMMSGDKTGRLMKYDNTKQVTTLLSNLAFVNGVALSQNGDYLLVVETAMCRILRYWLNETSVKSQSHDNYEIFAEGLPGFPDNIKRSPRGGFWVGLNTKHSKLTKFAMSNAWLGRAALGLPVDWMKVHSVWARYNGNGMAVRLSEDSGVILEVFEGKNENKWISISEVEEKDGTLWVGSVNTPFAGMYKI

SEQ ID NO: 96970 - protein, 344 aa, Arabidopsis thaliana
  peptide (1)..(344): Ceres Seq. ID no. 12735522
MLTVQIPDFRLIPTTGALGPESFVFDFFGDGPYTGLSDGRIVKWLANESRWIDFAVTTSAREGCEGPHEHQRTEHVCGRPLGLAFDKSTGDLYIADAYMGLLKVGPTGGVATQVLPRELNEALRFTNSLDINPRTGVVYFTDSSSVYQRRNYIGAMMSGDKTGRLMKYDNTKQVTTLLSNLAFVNGVALSQNGDYLLVVETAMCRILRYWLNETSVKSQSHDNYEIFAEGLPGFPDNIKRSPRGGFWVGLNTKHSKLTKFAMSNAWLGRAALGLPVDWMKVHSVWARYNGNGMAVRLSEDSGVILEVFEGKNENKWISISEVEEKDGTLWVGSVNTPFAGMYKI

SEQ ID NO: 96971 - DNA, 1269 bp, Arabidopsis thaliana
  misc_feature (1)..(1269): Ceres Seq. ID no. 12735527
  misc_feature (1)..(1269): Ortholog of  Ceres SEQ ID NO 13581701 as cited in SEQ ID NO 51151
  misc_feature (1)..(1269): Ortholog of  Ceres SEQ ID NO 14306565 as cited in SEQ ID NO 53000
  misc_feature (1)..(1269): Ortholog of  Ceres SEQ ID NO 14315491 as cited in SEQ ID NO 57026
  misc_feature (1)..(1269): Ortholog of  Ceres SEQ ID NO 14312192 as cited in SEQ ID NO 59249
gttcttcttctctgttctgcttcgaaattatgggttcctctgtttctaaaaccgcttcctctgcttctgcttcttctataacatcgattttgaattcacctccggagacggaattcaacatcccttcttcatcggtacctaaagctttcacatttccgatgccgtcgattcatcatccacctgctaaaaaaggcgacacacaccactttgtctctcttacatcgaccacttacggttctcttgttctcgacgacagacaaacattgcctcacatctccgtttccgggaagagtaacaagaagatgcctgaaacagaggaggctcgcgactcgttctctcctgactcagtgatcaacacatgggagctcatgaacgacctcgacgacgaattcgattccgcgaattccgatacaagtaagagtaattccgtcgtaaatttggattccttttctaaacccatcacgaatcgagacgtggttattaatgggtctgcgtatggatcttacgaagatgaggaagattggagattattgccttttaaacctaagcaacctctgtggaaacatatgtctgaagaatcatttctctctgatttagatcctaacattatctcatcttacaaaagagcactgtcctccaaacagctaggcaagaacagtagcaatggccactcaaatcattcggttttagtcagtttaccagaatatgtatcttctagtccattgagttctcagacttcggaaaaagaccaagagaaaccaagattgcttgaaaaagaagataacgagaacaagatagtagtatacttcactagcctcagaggaattcgaaagacgtatgaagattgttgttgcgttagagcgatattgagagggtttcaggttgcggtagaggagcgtgacatctcaatggactccaaatacaggaaagagcttcagaatgcactcggcgaagagaaaccggtttgtttgcctcaggtgtttataagaggcgtccgcattggtggaattgaggagatcaagatactcaacgatggaggtgaactggcagagatgttaaaagattttcctgcttgcgaatccattggagcctgcgatagctgcggagatgcaaggtttgtgccgtgtactaattgtggcggtagtactaaagtgtttgaggaacaagaagatgggtttaagagatgcaatggatgcaatgagaatggattggtacgttgtaacaagtgttgtctttagtaattggattcgtttgagtgatgttgttgtg

SEQ ID NO: 96972 - protein, 411 aa, Arabidopsis thaliana
  peptide (1)..(411): Ceres Seq. ID no. 12735528
SSSLFCFEIMGSSVSKTASSASASSITSILNSPPETEFNIPSSSVPKAFTFPMPSIHHPPAKKGDTHHFVSLTSTTYGSLVLDDRQTLPHISVSGKSNKKMPETEEARDSFSPDSVINTWELMNDLDDEFDSANSDTSKSNSVVNLDSFSKPITNRDVVINGSAYGSYEDEEDWRLLPFKPKQPLWKHMSEESFLSDLDPNIISSYKRALSSKQLGKNSSNGHSNHSVLVSLPEYVSSSPLSSQTSEKDQEKPRLLEKEDNENKIVVYFTSLRGIRKTYEDCCCVRAILRGFQVAVEERDISMDSKYRKELQNALGEEKPVCLPQVFIRGVRIGGIEEIKILNDGGELAEMLKDFPACESIGACDSCGDARFVPCTNCGGSTKVFEEQEDGFKRCNGCNENGLVRCNKCCL

SEQ ID NO: 96973 - protein, 402 aa, Arabidopsis thaliana
  peptide (1)..(402): Ceres Seq. ID no. 12735529
MGSSVSKTASSASASSITSILNSPPETEFNIPSSSVPKAFTFPMPSIHHPPAKKGDTHHFVSLTSTTYGSLVLDDRQTLPHISVSGKSNKKMPETEEARDSFSPDSVINTWELMNDLDDEFDSANSDTSKSNSVVNLDSFSKPITNRDVVINGSAYGSYEDEEDWRLLPFKPKQPLWKHMSEESFLSDLDPNIISSYKRALSSKQLGKNSSNGHSNHSVLVSLPEYVSSSPLSSQTSEKDQEKPRLLEKEDNENKIVVYFTSLRGIRKTYEDCCCVRAILRGFQVAVEERDISMDSKYRKELQNALGEEKPVCLPQVFIRGVRIGGIEEIKILNDGGELAEMLKDFPACESIGACDSCGDARFVPCTNCGGSTKVFEEQEDGFKRCNGCNENGLVRCNKCCL

SEQ ID NO: 96974 - protein, 359 aa, Arabidopsis thaliana
  peptide (1)..(359): Ceres Seq. ID no. 12735530
MPSIHHPPAKKGDTHHFVSLTSTTYGSLVLDDRQTLPHISVSGKSNKKMPETEEARDSFSPDSVINTWELMNDLDDEFDSANSDTSKSNSVVNLDSFSKPITNRDVVINGSAYGSYEDEEDWRLLPFKPKQPLWKHMSEESFLSDLDPNIISSYKRALSSKQLGKNSSNGHSNHSVLVSLPEYVSSSPLSSQTSEKDQEKPRLLEKEDNENKIVVYFTSLRGIRKTYEDCCCVRAILRGFQVAVEERDISMDSKYRKELQNALGEEKPVCLPQVFIRGVRIGGIEEIKILNDGGELAEMLKDFPACESIGACDSCGDARFVPCTNCGGSTKVFEEQEDGFKRCNGCNENGLVRCNKCCL

SEQ ID NO: 96975 - DNA, 715 bp, Arabidopsis thaliana
  misc_feature (1)..(715): Ceres Seq. ID no. 12735531
  misc_feature (1)..(715): Ortholog of  Ceres SEQ ID NO 13598160 as cited in SEQ ID NO 61317
  misc_feature (1)..(715): Ortholog of  Ceres SEQ ID NO 12614253 as cited in SEQ ID NO 68518
gagagagagagagagacgatggaggggaaagggaaagagatagtggttggacattccattagtaaatcaagtgtagagtgtcacaaatattacctggcacgtcgaaccaccatggagatgctccgagacagaggatacgatgtctccgacgaagatattaacctctccctccagcaatttcgagcgctctatggggaacatcctgacgtagatctacttcgtatctcagccaaacatcgctttgattcttcgaaaaagatctcggtagtgttttgtggaactggtatagttaaagtcaatgcgatgcgcgtcattgcagcagatgtgcttagccgagaaaatataaccggactgatactggttttgcaaagtcatataacgaaccaagctcttaaagccgttgaacttttctcctttaaggtcgagttattcgagattaccgatttgttggttaacgtaagcaaacatgtcttgaggccaaaacatcaggttctgaacgataaagagaaggaatcacttctcaagaagttcagtattgaggagaaacaacttcctcggttatcgagcaaagacccgattgtgcgatactatggactagagacagggcaagtcatgaaggtcacatacaaagacgagctcagtgagtcgcatgttacataccgatgcgtttcttaaactcgttttgtttatattttcagctctttctttgtgtagc

SEQ ID NO: 96976 - protein, 224 aa, Arabidopsis thaliana
  peptide (1)..(224): Ceres Seq. ID no. 12735532
ERERETMEGKGKEIVVGHSISKSSVECHKYYLARRTTMEMLRDRGYDVSDEDINLSLQQFRALYGEHPDVDLLRISAKHRFDSSKKISVVFCGTGIVKVNAMRVIAADVLSRENITGLILVLQSHITNQALKAVELFSFKVELFEITDLLVNVSKHVLRPKHQVLNDKEKESLLKKFSIEEKQLPRLSSKDPIVRYYGLETGQVMKVTYKDELSESHVTYRCVS

SEQ ID NO: 96977 - protein, 218 aa, Arabidopsis thaliana
  peptide (1)..(218): Ceres Seq. ID no. 12735533
MEGKGKEIVVGHSISKSSVECHKYYLARRTTMEMLRDRGYDVSDEDINLSLQQFRALYGEHPDVDLLRISAKHRFDSSKKISVVFCGTGIVKVNAMRVIAADVLSRENITGLILVLQSHITNQALKAVELFSFKVELFEITDLLVNVSKHVLRPKHQVLNDKEKESLLKKFSIEEKQLPRLSSKDPIVRYYGLETGQVMKVTYKDELSESHVTYRCVS

SEQ ID NO: 96978 - protein, 187 aa, Arabidopsis thaliana
  peptide (1)..(187): Ceres Seq. ID no. 12735534
MEMLRDRGYDVSDEDINLSLQQFRALYGEHPDVDLLRISAKHRFDSSKKISVVFCGTGIVKVNAMRVIAADVLSRENITGLILVLQSHITNQALKAVELFSFKVELFEITDLLVNVSKHVLRPKHQVLNDKEKESLLKKFSIEEKQLPRLSSKDPIVRYYGLETGQVMKVTYKDELSESHVTYRCVS

SEQ ID NO: 96979 - DNA, 1002 bp, Arabidopsis thaliana
  misc_feature (1)..(1002): Ceres Seq. ID no. 12735539
  misc_feature (1)..(1002): Ortholog of  Ceres SEQ ID NO 12616162 as cited in SEQ ID NO 63260
aagttaaaaaaattattcaagaaacacgagaacaaaaacaatggcgaaattattcatcaagcaagcagagcaatatgcagcagcccgacccagttaccccaccaaactcttcgaatatatcgcatcgaaaacaccgtgccacgaccttgcctgggacgttggcgccggaagcggccaagcctcacgatcgctagccggaatctacaagaacgtgattgctacagacacgagctcaaagcaacttgaatttgctgcaaagcttcccaacgtccgttacgagatcactccaccgacgatgtcttcatcggagatcgagaagctagtagcacctgaatcatcagttgatttagtcaccgtcgctcaagcccttcattggttcgacctcacgaacttttacagcaacgtgaaacacgtgctcaagaaacccaacggagtaatcgccgcctggtgctacaccaatccggaagttaacgacgccgtggacaaggtctttcaacggttttacgatgagaaacttggtcctcattgggatctagcgcgacggcttgtggaggatgggtacagaggaattgagtttccgttcgagaaagtggataatgatgagtcaacggaaagtcaaagttttccggtgaggtttgtaacggagaaagaaatggtgtttgaagagtatatgacgtatctgaggtcatcttcggcgtatcagacggctaaggagaaaggtttagagcttttgacggctgagatggaaggagagtttgctggttcgtggaaagaagatgggaaagagaagaaagttgttaggtatccgatttatctgttgatcggaagagttgcagaagaacgtgtataaattgatatctctcagttaggcatttcgtcgaacaccttgtgcttacacacaagaagacattagttttgattggttcaatgtaaaaataaaactttgtcgttccagcattcctggggatctctaatctttccttttttaccccacgcgcgact

SEQ ID NO: 96980 - protein, 269 aa, Arabidopsis thaliana
  peptide (1)..(269): Ceres Seq. ID no. 12735540
MAKLFIKQAEQYAAARPSYPTKLFEYIASKTPCHDLAWDVGAGSGQASRSLAGIYKNVIATDTSSKQLEFAAKLPNVRYEITPPTMSSSEIEKLVAPESSVDLVTVAQALHWFDLTNFYSNVKHVLKKPNGVIAAWCYTNPEVNDAVDKVFQRFYDEKLGPHWDLARRLVEDGYRGIEFPFEKVDNDESTESQSFPVRFVTEKEMVFEEYMTYLRSSSAYQTAKEKGLELLTAEMEGEFAGSWKEDGKEKKVVRYPIYLLIGRVAEERV

SEQ ID NO: 96981 - protein, 184 aa, Arabidopsis thaliana
  peptide (1)..(184): Ceres Seq. ID no. 12735541
MSSSEIEKLVAPESSVDLVTVAQALHWFDLTNFYSNVKHVLKKPNGVIAAWCYTNPEVNDAVDKVFQRFYDEKLGPHWDLARRLVEDGYRGIEFPFEKVDNDESTESQSFPVRFVTEKEMVFEEYMTYLRSSSAYQTAKEKGLELLTAEMEGEFAGSWKEDGKEKKVVRYPIYLLIGRVAEERV

SEQ ID NO: 96982 - DNA, 1770 bp, Arabidopsis thaliana
  misc_feature (1)..(1770): Ceres Seq. ID no. 12735549
  misc_feature (1)..(1770): Ortholog of  Ceres SEQ ID NO 12637422 as cited in SEQ ID NO 1006
atgaacaacgttcttcagtttggtctccagagctccgccatatatgtcgccaagtttctggtggtgcctcttaggagtttgagagttggttcatctttcgttggagttggagtgggaacaagaagtttcaacaagaggctaatgtcaaatgctacagctttctctatcaacaacagcaagcgaaaggaactcaagataccaggagcagctattgatcagaattgtcatcagatgggaagtgatactgatagagatgaaatgggaactcttcaagatgatcgaaaggaaattgaggcgatgactgttcaagaacttagatccacgttgaggaaacttggggtacctgtgaaaggacgcaaacaagaacttatctcaactttacgacttcatatggacagcaatttacctgatcaaaaggaaacttcttcgtccacccgttcggatagtgtcaccatcaaaagaaagatcagcaacagggaagagcctactgaagatgaatgcactaactctgaagcttatgacattgaacacggagaaaaaagagtaaaacagtctactgagaaaaacttgaaagctaaagtttctgcgaaagctatcgcgaaagaacagaagtcattgatgagaacaggtaagcagcaaattcagtcaaaagaagaaacatcatcgaccatctctagtgaattactgaaaactgaagaaattatctcatccccgagtcaaagtgaaccgtggactgtacttgctcataagaagcctcagaaggactggaaagcttacaacccaaagacaatgagacctccccctctaccagagggtaccaaatgtgtgaaagttatgacttggaatgttaatggactgagaggattgttgaagtttgagagcttctctgctctgcagcttgcccaaagagaaaattttgacatcttgtgcttgcaggagactaaactccaggtgaaagatgttgaggaaattaagaaaactcttattgatggctatgatcatagtttctggtcctgcagcgtctcaaaacttggctactctggaactgcaataatctcacggataaaaccactctcagttagatatggtactggtctatctggtcatgacacggaagggcgtattgtaactgctgaattcgactccttctacttgataaatacttatgtccctaattccggagatggattaaaaagactgtcatacaggatcgaagaatgggatcgaaccctcagcaatcacatcaaagagctggagaagtctaagcctgtagtcttgacgggtgatctaaactgtgctcatgaagaaattgacatcttcaatcctgcggggaacaaaagaagtgctggttttacaatagaagaaaggcagtcctttggtgcaaacttgttagacaagggatttgtagatacctttagaaaacaacatcctggtgttgtcggttacacttattggggttatcgccatggtggccgcaaaaccaacaaaggatggagactggactacttcttggtgtcccaatcaattgcggccaatgtccatgattcttacatcctccctgatatcaatggaagtgatcattgccccattggccttattctcaagctctgatttgttcaaaatttcaccattcccagctttttgctaaagtcttgagtagattgtagctagagagtcacatgttttgcttctagagagagcttgctcatgtaaaaatatggaataatatatctatcagtaaacaggctccaaacaatctgagtcttgtcc

SEQ ID NO: 96983 - protein, 536 aa, Arabidopsis thaliana
  peptide (1)..(536): Ceres Seq. ID no. 12735550
MNNVLQFGLQSSAIYVAKFLVVPLRSLRVGSSFVGVGVGTRSFNKRLMSNATAFSINNSKRKELKIPGAAIDQNCHQMGSDTDRDEMGTLQDDRKEIEAMTVQELRSTLRKLGVPVKGRKQELISTLRLHMDSNLPDQKETSSSTRSDSVTIKRKISNREEPTEDECTNSEAYDIEHGEKRVKQSTEKNLKAKVSAKAIAKEQKSLMRTGKQQIQSKEETSSTISSELLKTEEIISSPSQSEPWTVLAHKKPQKDWKAYNPKTMRPPPLPEGTKCVKVMTWNVNGLRGLLKFESFSALQLAQRENFDILCLQETKLQVKDVEEIKKTLIDGYDHSFWSCSVSKLGYSGTAIISRIKPLSVRYGTGLSGHDTEGRIVTAEFDSFYLINTYVPNSGDGLKRLSYRIEEWDRTLSNHIKELEKSKPVVLTGDLNCAHEEIDIFNPAGNKRSAGFTIEERQSFGANLLDKGFVDTFRKQHPGVVGYTYWGYRHGGRKTNKGWRLDYFLVSQSIAANVHDSYILPDINGSDHCPIGLILKL

SEQ ID NO: 96984 - protein, 489 aa, Arabidopsis thaliana
  peptide (1)..(489): Ceres Seq. ID no. 12735551
MSNATAFSINNSKRKELKIPGAAIDQNCHQMGSDTDRDEMGTLQDDRKEIEAMTVQELRSTLRKLGVPVKGRKQELISTLRLHMDSNLPDQKETSSSTRSDSVTIKRKISNREEPTEDECTNSEAYDIEHGEKRVKQSTEKNLKAKVSAKAIAKEQKSLMRTGKQQIQSKEETSSTISSELLKTEEIISSPSQSEPWTVLAHKKPQKDWKAYNPKTMRPPPLPEGTKCVKVMTWNVNGLRGLLKFESFSALQLAQRENFDILCLQETKLQVKDVEEIKKTLIDGYDHSFWSCSVSKLGYSGTAIISRIKPLSVRYGTGLSGHDTEGRIVTAEFDSFYLINTYVPNSGDGLKRLSYRIEEWDRTLSNHIKELEKSKPVVLTGDLNCAHEEIDIFNPAGNKRSAGFTIEERQSFGANLLDKGFVDTFRKQHPGVVGYTYWGYRHGGRKTNKGWRLDYFLVSQSIAANVHDSYILPDINGSDHCPIGLILKL

SEQ ID NO: 96985 - protein, 459 aa, Arabidopsis thaliana
  peptide (1)..(459): Ceres Seq. ID no. 12735552
MGSDTDRDEMGTLQDDRKEIEAMTVQELRSTLRKLGVPVKGRKQELISTLRLHMDSNLPDQKETSSSTRSDSVTIKRKISNREEPTEDECTNSEAYDIEHGEKRVKQSTEKNLKAKVSAKAIAKEQKSLMRTGKQQIQSKEETSSTISSELLKTEEIISSPSQSEPWTVLAHKKPQKDWKAYNPKTMRPPPLPEGTKCVKVMTWNVNGLRGLLKFESFSALQLAQRENFDILCLQETKLQVKDVEEIKKTLIDGYDHSFWSCSVSKLGYSGTAIISRIKPLSVRYGTGLSGHDTEGRIVTAEFDSFYLINTYVPNSGDGLKRLSYRIEEWDRTLSNHIKELEKSKPVVLTGDLNCAHEEIDIFNPAGNKRSAGFTIEERQSFGANLLDKGFVDTFRKQHPGVVGYTYWGYRHGGRKTNKGWRLDYFLVSQSIAANVHDSYILPDINGSDHCPIGLILKL

SEQ ID NO: 96986 - DNA, 735 bp, Arabidopsis thaliana
  misc_feature (1)..(735): Ceres Seq. ID no. 12735583
  misc_feature (1)..(735): Ortholog of  Ceres SEQ ID NO 14315455 as cited in SEQ ID NO 56988
atggaagatgctggtgaacatttacggtgtaacgataacgttaacgacgaggagcgtttgccattggagtttatgatcggaaactcaacatccacggcggagctacagccgcctccaccgttcttggtaaagacatacaaagtggtggaggatccgacgacggacggggttatatcttggaacgaatacggaactggtttcgtcgtgtggcagccggcagaattcgctagagatctgttaccaacacttttcaagcattgcaacttctctagcttcgttcgccagctcaatacttacggttttcgaaaagtaacgacgataagatgggaatttagtaatgagatgtttcgaaaggggcaaagagagcttatgagcaatatccgaagaaggaagagccaacattggtcacacaacaagtctaatcaccaggttgtaccaacaacaacgatggtgaatcaagaaggtcatcaacggattgggattgatcatcaccatgaggatcaacagtcttccgccacttcatcctctttcgtatacactgcattactcgacgaaaacaaatgcttgaagaatgaaaacgagttattaagctgcgaacttgggaaaaccaagaagaaatgcaagcagcttatggagttggtggagagatacagaggagaagacgaagatgcaactgatgaaagtgatgatgaagaagatgaagggcttaagttgttcggagtaaaacttgaatga

SEQ ID NO: 96987 - protein, 244 aa, Arabidopsis thaliana
  peptide (1)..(244): Ceres Seq. ID no. 12735584
MEDAGEHLRCNDNVNDEERLPLEFMIGNSTSTAELQPPPPFLVKTYKVVEDPTTDGVISWNEYGTGFVVWQPAEFARDLLPTLFKHCNFSSFVRQLNTYGFRKVTTIRWEFSNEMFRKGQRELMSNIRRRKSQHWSHNKSNHQVVPTTTMVNQEGHQRIGIDHHHEDQQSSATSSSFVYTALLDENKCLKNENELLSCELGKTKKKCKQLMELVERYRGEDEDATDESDDEEDEGLKLFGVKLE

SEQ ID NO: 96988 - protein, 220 aa, Arabidopsis thaliana
  peptide (1)..(220): Ceres Seq. ID no. 12735585
MIGNSTSTAELQPPPPFLVKTYKVVEDPTTDGVISWNEYGTGFVVWQPAEFARDLLPTLFKHCNFSSFVRQLNTYGFRKVTTIRWEFSNEMFRKGQRELMSNIRRRKSQHWSHNKSNHQVVPTTTMVNQEGHQRIGIDHHHEDQQSSATSSSFVYTALLDENKCLKNENELLSCELGKTKKKCKQLMELVERYRGEDEDATDESDDEEDEGLKLFGVKLE

SEQ ID NO: 96989 - protein, 130 aa, Arabidopsis thaliana
  peptide (1)..(130): Ceres Seq. ID no. 12735586
MFRKGQRELMSNIRRRKSQHWSHNKSNHQVVPTTTMVNQEGHQRIGIDHHHEDQQSSATSSSFVYTALLDENKCLKNENELLSCELGKTKKKCKQLMELVERYRGEDEDATDESDDEEDEGLKLFGVKLE

SEQ ID NO: 96990 - DNA, 831 bp, Arabidopsis thaliana
  misc_feature (1)..(831): Ceres Seq. ID no. 12735623
  misc_feature (1)..(831): Ortholog of  Ceres SEQ ID NO 14312951 as cited in SEQ ID NO 58487
  misc_feature (1)..(831): Ortholog of  Ceres SEQ ID NO 13597120 as cited in SEQ ID NO 64165
atggaatcaaaatcagaacaaaacgagtggagctccggcgtgtgggctcacttaaccgccgtacggcaacaatcgccgcttgttcagtgcatcaccaacttcgtctcgatggatctcgttgccaacacgcttttatccgccggtgcatctccagcgatggtccattccgtcgttgagattcctgatttcactcctcatattcacgcgctctgcgtcaacgtcggaacacttacacctgactggcttccgtcaatgaaagctgccgctgaactcgcttctcagctccgaaagccttgggttcttgatcccgccgccgtgagttgctccggattccgattaaaagcgtgtttggagctcatcgagctaaaacctactgtaatcaaaggaaacggttctgagattattgctctctcctctgcttcacgtggacaaactaagggtgctgatagctcacatgaatcaacagacgctatagaagctgcaaagtcattagcgatgtcaagtggtgctgttgttgcagtgtcaggagctgttgatattgttactgatgggaaacaggttattggtgttcacaacgggacgaagatgatgcaacagattactgcaactggttgttctctagctggtttgattgtagcgtttcttgctattgattcatcacgggtactggaagctacggtttccgctatggctgtctttggcattgcaggtgagttgggtgaagcgatggcgaatggtccagcgtcattgagaatgcatttgatagattgtctttatgggttggatgaaaccacagtgcttaaacgtgtgaatgtgaccaggttgggttga

SEQ ID NO: 96991 - protein, 276 aa, Arabidopsis thaliana
  peptide (1)..(276): Ceres Seq. ID no. 12735624
MESKSEQNEWSSGVWAHLTAVRQQSPLVQCITNFVSMDLVANTLLSAGASPAMVHSVVEIPDFTPHIHALCVNVGTLTPDWLPSMKAAAELASQLRKPWVLDPAAVSCSGFRLKACLELIELKPTVIKGNGSEIIALSSASRGQTKGADSSHESTDAIEAAKSLAMSSGAVVAVSGAVDIVTDGKQVIGVHNGTKMMQQITATGCSLAGLIVAFLAIDSSRVLEATVSAMAVFGIAGELGEAMANGPASLRMHLIDCLYGLDETTVLKRVNVTRLG

SEQ ID NO: 96992 - protein, 240 aa, Arabidopsis thaliana
  peptide (1)..(240): Ceres Seq. ID no. 12735625
MDLVANTLLSAGASPAMVHSVVEIPDFTPHIHALCVNVGTLTPDWLPSMKAAAELASQLRKPWVLDPAAVSCSGFRLKACLELIELKPTVIKGNGSEIIALSSASRGQTKGADSSHESTDAIEAAKSLAMSSGAVVAVSGAVDIVTDGKQVIGVHNGTKMMQQITATGCSLAGLIVAFLAIDSSRVLEATVSAMAVFGIAGELGEAMANGPASLRMHLIDCLYGLDETTVLKRVNVTRLG

SEQ ID NO: 96993 - protein, 224 aa, Arabidopsis thaliana
  peptide (1)..(224): Ceres Seq. ID no. 12735626
MVHSVVEIPDFTPHIHALCVNVGTLTPDWLPSMKAAAELASQLRKPWVLDPAAVSCSGFRLKACLELIELKPTVIKGNGSEIIALSSASRGQTKGADSSHESTDAIEAAKSLAMSSGAVVAVSGAVDIVTDGKQVIGVHNGTKMMQQITATGCSLAGLIVAFLAIDSSRVLEATVSAMAVFGIAGELGEAMANGPASLRMHLIDCLYGLDETTVLKRVNVTRLG

SEQ ID NO: 96994 - DNA, 1143 bp, Arabidopsis thaliana
  misc_feature (1)..(1143): Ceres Seq. ID no. 12735645
  misc_feature (1)..(1143): Ortholog of  Ceres SEQ ID NO 15179513 as cited in SEQ ID NO 0
atggataaagattactcggcaccaaacttcttaggtgaatcctcaggcggtaacgatgataacagctctggtatgatagactatatgttcaatagaaaccttcaacaacaacaaaagcaatcgatgccacaacagcagcaacatcaactctctccttccggatttggagcaacaccttttgataaaatgaacttctctgatgtgatgcagtttgcggacttcggttcgaaacttgcgttgaaccagaccagaaaccaagacgatcaagaaaccgggattgaccccgtttatttcttgaagttccctgtcttgaacgacaaaatagaggaccataaccaaacccaacatctcatgccttctcatcagacgtctcaagaaggaggtgagtgtggaggaaacataggcaatgtgtttcttgaagaaaaagaagatcaagacgatgacaacgacaacaactccgtgcaactacgttttattggaggagaagaagaagatagggagaacaagaatgttacgaaaaaggaggtgaagagcaagaggaagagagctagaacgagcaagaccagcgaagaagtggaaagccaacggatgactcatatcgcggtcgaaagaaaccgtaggaagcaaatgaatgagcatcttcgtgtccttagatctctcatgcctggctcctacgttcaaaggggagaccaagcgtcaatcataggaggagcaatagagtttgtgagagagctcgagcaactcctacaatgtcttgaatcacagaagcgtcgaagaatcttaggagaaaccggtagggacatgacaacgacaacgacttcttcttcttctcccataactacggtagcgaaccaagcacaaccgctcattattacgggaaatgtaaccgagctagagggcggaggagggcttcgggaggagactgcggagaacaagtcgtgcttggctgacgtggaggtgaagctgctagggtttgacgccatgatcaagatactttcaagaagaaggccgggacagctgattaagactatagctgctttggaggatcttcatctctctattcttcacactaacatcactaccatggaacaaaccgtcctctactcctttaatgtcaaggcaagtttatatgttaaaaagtaa

SEQ ID NO: 96995 - protein, 380 aa, Arabidopsis thaliana
  peptide (1)..(380): Ceres Seq. ID no. 12735646
MDKDYSAPNFLGESSGGNDDNSSGMIDYMFNRNLQQQQKQSMPQQQQHQLSPSGFGATPFDKMNFSDVMQFADFGSKLALNQTRNQDDQETGIDPVYFLKFPVLNDKIEDHNQTQHLMPSHQTSQEGGECGGNIGNVFLEEKEDQDDDNDNNSVQLRFIGGEEEDRENKNVTKKEVKSKRKRARTSKTSEEVESQRMTHIAVERNRRKQMNEHLRVLRSLMPGSYVQRGDQASIIGGAIEFVRELEQLLQCLESQKRRRILGETGRDMTTTTTSSSSPITTVANQAQPLIITGNVTELEGGGGLREETAENKSCLADVEVKLLGFDAMIKILSRRRPGQLIKTIAALEDLHLSILHTNITTMEQTVLYSFNVKASLYVKK

SEQ ID NO: 96996 - protein, 356 aa, Arabidopsis thaliana
  peptide (1)..(356): Ceres Seq. ID no. 12735647
MIDYMFNRNLQQQQKQSMPQQQQHQLSPSGFGATPFDKMNFSDVMQFADFGSKLALNQTRNQDDQETGIDPVYFLKFPVLNDKIEDHNQTQHLMPSHQTSQEGGECGGNIGNVFLEEKEDQDDDNDNNSVQLRFIGGEEEDRENKNVTKKEVKSKRKRARTSKTSEEVESQRMTHIAVERNRRKQMNEHLRVLRSLMPGSYVQRGDQASIIGGAIEFVRELEQLLQCLESQKRRRILGETGRDMTTTTTSSSSPITTVANQAQPLIITGNVTELEGGGGLREETAENKSCLADVEVKLLGFDAMIKILSRRRPGQLIKTIAALEDLHLSILHTNITTMEQTVLYSFNVKASLYVKK

SEQ ID NO: 96997 - protein, 352 aa, Arabidopsis thaliana
  peptide (1)..(352): Ceres Seq. ID no. 12735648
MFNRNLQQQQKQSMPQQQQHQLSPSGFGATPFDKMNFSDVMQFADFGSKLALNQTRNQDDQETGIDPVYFLKFPVLNDKIEDHNQTQHLMPSHQTSQEGGECGGNIGNVFLEEKEDQDDDNDNNSVQLRFIGGEEEDRENKNVTKKEVKSKRKRARTSKTSEEVESQRMTHIAVERNRRKQMNEHLRVLRSLMPGSYVQRGDQASIIGGAIEFVRELEQLLQCLESQKRRRILGETGRDMTTTTTSSSSPITTVANQAQPLIITGNVTELEGGGGLREETAENKSCLADVEVKLLGFDAMIKILSRRRPGQLIKTIAALEDLHLSILHTNITTMEQTVLYSFNVKASLYVKK

SEQ ID NO: 96998 - DNA, 1032 bp, Arabidopsis thaliana
  misc_feature (1)..(1032): Ceres Seq. ID no. 12735649
  misc_feature (1)..(1032): Ortholog of  Ceres SEQ ID NO 14310520 as cited in SEQ ID NO 58736
atgccgaggccaggaccaagaccttacgagtgtgtgaaacgagcttggcatagcgatcgtcatcaacctattcgtggttcgattattcgccagattttcagactcgcaatggaagcacatagcgcagcgacgaggaagaacaaagaatggcaggagaaattgcctgtggttgtgttaaaagctgaagaaatcatgtactctaaagccaattccgaggaagagtatacagatgctgatactatgtggaatagagtaaatgatgccattgatacaattattagaagagatgagagtacagaaactggtcctcttttgcctccatgtgttgaagctgctcttaatttgggatgtattgctgtaagagcttcaagaagccaacgacatagtagcggaaggacttacctcggtcctaaaattcaggaaccggtttctgcgtcgactaatgagccgtcttaccatcatgaatatcgtcagcaagctcaacaatcatcaaccaaaccaagccagacagttcaagctgcagtccctgttgatgtacttgataacagcaacaagcgtgtagctactcctcgcggttacccgtttcttcatgaatccatgcagatgcatcaaaagccattggcaattagacaaggaactggtcctgcttctgctcctgctccagctccagtcaacttgggttcggtctatcctttgtattacgaaggtaataatcaaacgcagcaagctgacatgtcttttagagtccctgaagcgcccataatcattggcatgcctattggtataaagccctcagaagaagcaactgagagggtctgtgatttatccttgaggctcggtatatcttcagaaccgtctacaagaatagatgtcgggtctagtcgggcttacccgggaagaaaccaagaagagttatgtttattcgcagaggtaaagaagaatgataggtttgaatggttttcaaatagtgaaggtcagaattcagattcgagagttaaaaagcacagaactttgtgtggagacttcctttag

SEQ ID NO: 96999 - protein, 343 aa, Arabidopsis thaliana
  peptide (1)..(343): Ceres Seq. ID no. 12735650
MPRPGPRPYECVKRAWHSDRHQPIRGSIIRQIFRLAMEAHSAATRKNKEWQEKLPVVVLKAEEIMYSKANSEEEYTDADTMWNRVNDAIDTIIRRDESTETGPLLPPCVEAALNLGCIAVRASRSQRHSSGRTYLGPKIQEPVSASTNEPSYHHEYRQQAQQSSTKPSQTVQAAVPVDVLDNSNKRVATPRGYPFLHESMQMHQKPLAIRQGTGPASAPAPAPVNLGSVYPLYYEGNNQTQQADMSFRVPEAPIIIGMPIGIKPSEEATERVCDLSLRLGISSEPSTRIDVGSSRAYPGRNQEELCLFAEVKKNDRFEWFSNSEGQNSDSRVKKHRTLCGDFL

SEQ ID NO: 97000 - protein, 307 aa, Arabidopsis thaliana
  peptide (1)..(307): Ceres Seq. ID no. 12735651
MEAHSAATRKNKEWQEKLPVVVLKAEEIMYSKANSEEEYTDADTMWNRVNDAIDTIIRRDESTETGPLLPPCVEAALNLGCIAVRASRSQRHSSGRTYLGPKIQEPVSASTNEPSYHHEYRQQAQQSSTKPSQTVQAAVPVDVLDNSNKRVATPRGYPFLHESMQMHQKPLAIRQGTGPASAPAPAPVNLGSVYPLYYEGNNQTQQADMSFRVPEAPIIIGMPIGIKPSEEATERVCDLSLRLGISSEPSTRIDVGSSRAYPGRNQEELCLFAEVKKNDRFEWFSNSEGQNSDSRVKKHRTLCGDFL

SEQ ID NO: 97001 - protein, 279 aa, Arabidopsis thaliana
  peptide (1)..(279): Ceres Seq. ID no. 12735652
MYSKANSEEEYTDADTMWNRVNDAIDTIIRRDESTETGPLLPPCVEAALNLGCIAVRASRSQRHSSGRTYLGPKIQEPVSASTNEPSYHHEYRQQAQQSSTKPSQTVQAAVPVDVLDNSNKRVATPRGYPFLHESMQMHQKPLAIRQGTGPASAPAPAPVNLGSVYPLYYEGNNQTQQADMSFRVPEAPIIIGMPIGIKPSEEATERVCDLSLRLGISSEPSTRIDVGSSRAYPGRNQEELCLFAEVKKNDRFEWFSNSEGQNSDSRVKKHRTLCGDFL

SEQ ID NO: 97002 - DNA, 1530 bp, Arabidopsis thaliana
  misc_feature (1)..(1530): Ceres Seq. ID no. 12735657
  misc_feature (1)..(1530): Ortholog of  Ceres SEQ ID NO 14312347 as cited in SEQ ID NO 55274
atgtctaaggacagggtgctcgcaaggaatcttaggacaagtgtctgtggaacaaggattttgcagaggacttgttcgactgttgtgacacatgatgtttctacttcttgttccaatgagagcaatgcattaaataattccactgacgatggtccacaacatgacattgctattgttggtggtggaatggttggaatcgctttagctgcttcattggccagcaagccattgacaaagcacttgaatgtcgctattattgacaataatcctcttttggggagaagaaatatcatagagaaagggcatcaacctgatcccagagtcagtacagtcacacctgcaacaatatccttcctcaaagatattggtgcctggaaatacattgagcaacagcgacatgcgtattttgataagatgcaggccttggatatacaagatacaatgctaatgatgtacatcaagatgttttggggtaagcatattgctatatacatctgcatccttgatgatgttaatagctgtgtactcattgttgacatgatccaggaatcagatctccagaagactgtttatcccgcgaggttaaatgcgatggatatgctacctagctcttcgttgacaggtcttggtgaagtaccatccacaacagacttgttcatgcgaggacgccttgctaagctggagctaagcgatggaaatcgcgtctacgcaaaactggtggtaggcgctgatgggtctaagtcgcgagtaagggagttggctgggatcaaaacgactggatggaactactcacagaacgctataatttgtactgttgagcatacagccgaaaactacacagcatggcaacggtttttacccaatggcccaatcgcacttcttcccattggtgacaagtttagcaacatagtatggaccatggacccaaaagaggcatcagatcgaaaattgatgaacgaggatgacttcatcaaagctgtaaatgatgctctggattctggatatggtcctaatccagagactacaagttcacgggatagtctctcttggcttacaggagatgcgaccatatctgccaaagagaggtttgaaactcctcccaaggttgtgaagctttcttcagagagaatgatgttccctttgtctttaaggcacgcaaaagactatgtgtcaaaacgtgtggctcttgttggtgactcagctcatacagttcacccgttggctggtcaaggagtaaatctaggatttgcagatgcgtgtgctctctccaaagctatagcagagggcattgctcttggtactgatataggcgaggcgaatctgctcaaacgttatgaagcagagagaaaacctgcaaatatagcaatgatggcggttttagacggaatccagaagatgtactcgttggatttcggaccgctgaatgctctaagagcagctgcattccacggggctcactacatttcgccgcttaaaaagcgtatcatatcttatgcttcaggagagcaatctttgccgctattttcttga

SEQ ID NO: 97003 - protein, 509 aa, Arabidopsis thaliana
  peptide (1)..(509): Ceres Seq. ID no. 12735658
MSKDRVLARNLRTSVCGTRILQRTCSTVVTHDVSTSCSNESNALNNSTDDGPQHDIAIVGGGMVGIALAASLASKPLTKHLNVAIIDNNPLLGRRNIIEKGHQPDPRVSTVTPATISFLKDIGAWKYIEQQRHAYFDKMQALDIQDTMLMMYIKMFWGKHIAIYICILDDVNSCVLIVDMIQESDLQKTVYPARLNAMDMLPSSSLTGLGEVPSTTDLFMRGRLAKLELSDGNRVYAKLVVGADGSKSRVRELAGIKTTGWNYSQNAIICTVEHTAENYTAWQRFLPNGPIALLPIGDKFSNIVWTMDPKEASDRKLMNEDDFIKAVNDALDSGYGPNPETTSSRDSLSWLTGDATISAKERFETPPKVVKLSSERMMFPLSLRHAKDYVSKRVALVGDSAHTVHPLAGQGVNLGFADACALSKAIAEGIALGTDIGEANLLKRYEAERKPANIAMMAVLDGIQKMYSLDFGPLNALRAAAFHGAHYISPLKKRIISYASGEQSLPLFS

SEQ ID NO: 97004 - protein, 447 aa, Arabidopsis thaliana
  peptide (1)..(447): Ceres Seq. ID no. 12735659
MVGIALAASLASKPLTKHLNVAIIDNNPLLGRRNIIEKGHQPDPRVSTVTPATISFLKDIGAWKYIEQQRHAYFDKMQALDIQDTMLMMYIKMFWGKHIAIYICILDDVNSCVLIVDMIQESDLQKTVYPARLNAMDMLPSSSLTGLGEVPSTTDLFMRGRLAKLELSDGNRVYAKLVVGADGSKSRVRELAGIKTTGWNYSQNAIICTVEHTAENYTAWQRFLPNGPIALLPIGDKFSNIVWTMDPKEASDRKLMNEDDFIKAVNDALDSGYGPNPETTSSRDSLSWLTGDATISAKERFETPPKVVKLSSERMMFPLSLRHAKDYVSKRVALVGDSAHTVHPLAGQGVNLGFADACALSKAIAEGIALGTDIGEANLLKRYEAERKPANIAMMAVLDGIQKMYSLDFGPLNALRAAAFHGAHYISPLKKRIISYASGEQSLPLFS

SEQ ID NO: 97005 - protein, 371 aa, Arabidopsis thaliana
  peptide (1)..(371): Ceres Seq. ID no. 12735660
MQALDIQDTMLMMYIKMFWGKHIAIYICILDDVNSCVLIVDMIQESDLQKTVYPARLNAMDMLPSSSLTGLGEVPSTTDLFMRGRLAKLELSDGNRVYAKLVVGADGSKSRVRELAGIKTTGWNYSQNAIICTVEHTAENYTAWQRFLPNGPIALLPIGDKFSNIVWTMDPKEASDRKLMNEDDFIKAVNDALDSGYGPNPETTSSRDSLSWLTGDATISAKERFETPPKVVKLSSERMMFPLSLRHAKDYVSKRVALVGDSAHTVHPLAGQGVNLGFADACALSKAIAEGIALGTDIGEANLLKRYEAERKPANIAMMAVLDGIQKMYSLDFGPLNALRAAAFHGAHYISPLKKRIISYASGEQSLPLFS

SEQ ID NO: 97006 - DNA, 1134 bp, Arabidopsis thaliana
  misc_feature (1)..(1134): Ceres Seq. ID no. 12735701
  misc_feature (1)..(1134): Ortholog of  Ceres SEQ ID NO 14311489 as cited in SEQ ID NO 51404
  misc_feature (1)..(1134): Ortholog of  Ceres SEQ ID NO 12607391 as cited in SEQ ID NO 59508
  misc_feature (1)..(1134): Ortholog of  Ceres SEQ ID NO 15169292 as cited in SEQ ID NO 59616
atgtcggcaaggcatgggcaatcgtcgtatcgagatcggagtgacgaattcttcaaaattgtggagactctaaggagatcgattgctccggctccggcggcgaataatgtgccgtatggtaataatcggaacgatggtgcgagaagagaggatcttatcaacaaatccgagttcaacaagagagcttctcatattggtttagctattaatcaaacgtcgcagaagctatcgaagcttgcgaaacgaattagaatggtgcttagatcgagaaccgatttatttagtggtgtgaatttctcaagtgcttatcttagtactcgagaatgtgtaattgttgcaaagaggacatcagtgtttgatgatcctactcaggagatacaagagctgacggtagtcatcaagcaagagatctctgctctaaattctgctctggtcgaccttcaattgttccgcagttctcagaatgatgaagggaataactctagagacagggacaaaagtactcactcagcaactgttgttgacgatctaaagtatcgtttgatggatactaccaaagagtttaaggatgttcttaccatgagaaccgagaatatgaaggtccatgaaagtagaaggcaactcttctcttcaaatgcttcaaaagaatcaacaaacccattcgttcgccagcgtcctttggctgctaaggctgctgctagtgaatctgttcctcttccatgggcaaatgggtcttcttcatcttcatctcagttagtcccatggaagccgggagagggagaatcttcaccattgttgcagcagagtcaacaacaacagcaacagcaacagcaacaaatggtcccattgcaagacacatatatgcagggtcgagcagaagctctacacaccgttgaatcaacaatccatgagctaagcagtatcttcacacaactagcaaccatggtttctcaacaaggggaaattgcaatcaggatcgatcaaaacatggaagatacattagcaaatgtggaaggcgcacagagccaactggccaggtatctcaacagtatatcatcaaaccgatggctaatgatgaagattttcttcgtactcattgcatttctcatgattttcctcttcttcgtggcataa

SEQ ID NO: 97007 - protein, 377 aa, Arabidopsis thaliana
  peptide (1)..(377): Ceres Seq. ID no. 12735702
MSARHGQSSYRDRSDEFFKIVETLRRSIAPAPAANNVPYGNNRNDGARREDLINKSEFNKRASHIGLAINQTSQKLSKLAKRIRMVLRSRTDLFSGVNFSSAYLSTRECVIVAKRTSVFDDPTQEIQELTVVIKQEISALNSALVDLQLFRSSQNDEGNNSRDRDKSTHSATVVDDLKYRLMDTTKEFKDVLTMRTENMKVHESRRQLFSSNASKESTNPFVRQRPLAAKAAASESVPLPWANGSSSSSSQLVPWKPGEGESSPLLQQSQQQQQQQQQQMVPLQDTYMQGRAEALHTVESTIHELSSIFTQLATMVSQQGEIAIRIDQNMEDTLANVEGAQSQLARYLNSISSNRWLMMKIFFVLIAFLMIFLFFVA

SEQ ID NO: 97008 - protein, 293 aa, Arabidopsis thaliana
  peptide (1)..(293): Ceres Seq. ID no. 12735703
MVLRSRTDLFSGVNFSSAYLSTRECVIVAKRTSVFDDPTQEIQELTVVIKQEISALNSALVDLQLFRSSQNDEGNNSRDRDKSTHSATVVDDLKYRLMDTTKEFKDVLTMRTENMKVHESRRQLFSSNASKESTNPFVRQRPLAAKAAASESVPLPWANGSSSSSSQLVPWKPGEGESSPLLQQSQQQQQQQQQQMVPLQDTYMQGRAEALHTVESTIHELSSIFTQLATMVSQQGEIAIRIDQNMEDTLANVEGAQSQLARYLNSISSNRWLMMKIFFVLIAFLMIFLFFVA

SEQ ID NO: 97009 - protein, 196 aa, Arabidopsis thaliana
  peptide (1)..(196): Ceres Seq. ID no. 12735704
MDTTKEFKDVLTMRTENMKVHESRRQLFSSNASKESTNPFVRQRPLAAKAAASESVPLPWANGSSSSSSQLVPWKPGEGESSPLLQQSQQQQQQQQQQMVPLQDTYMQGRAEALHTVESTIHELSSIFTQLATMVSQQGEIAIRIDQNMEDTLANVEGAQSQLARYLNSISSNRWLMMKIFFVLIAFLMIFLFFVA

SEQ ID NO: 97010 - DNA, 1485 bp, Arabidopsis thaliana
  misc_feature (1)..(1485): Ceres Seq. ID no. 12735713
  misc_feature (1)..(1485): Ortholog of  Ceres SEQ ID NO 15177969 as cited in SEQ ID NO 58823
  misc_feature (1)..(1485): Ortholog of  Ceres SEQ ID NO 15177963 as cited in SEQ ID NO 59105
  misc_feature (1)..(1485): Ortholog of  Ceres SEQ ID NO 14302746 as cited in SEQ ID NO 66646
atgaagaacaacaccactcaatctctccttctccttctcctcttcttcttcttcttctttgaaatctctcattctctctcaatctcatccaatgctcctctctccgacaccgaagtcagattcatccaacgccgtcaacttctctactaccgcgacgagttcggtgaccgtggtgagaatgtcacagtagatccatcactaatcttcgagaatccgcggcttcgtagtgcttacatagctcttcaagcttggaaacaagctattctctctgatcctaataatatcactgttaattggatcggatccaatgtctgtaactacaccggagttttctgttctaaagctcttgataaccggaagatccgtaccgtcgccggaatcgatctcaaccacgccgatatcgctgggtatttacctgaagagcttggtttgttaacagatctagctttgtttcatgttaattcgaatcgattctgtggtactgttcctcataagttcaagcagcttaagcttttgttcgagcttgatcttagtaacaatcggttcgccggaaagtttcccacggtggttcttcatttgccgtcgttgaagttcttagatctccggtttaatgagtttgaaggaaccgtaccgaaagagctttttagtaaaaatctagatgcgatttttataaaccataaccggttccggtttgagttaccggaaaatttcggtgattctccggtttcggttattgttcttgcgaataatcatttccatggttgtattccgacgagtttggtggagatgaagaatcttaatgagattattttcatgaacaatggtttgaattcttgtttaccggcggatatcggaaggttgaagaatgtgacggtgtttgatgttagttttaatgagcttgttggtccgttgccggagagtgttggtggtatggtggaggttgagcagttgaatgttgctcataatttgttatctgggaagattccggcgagtatttgtcagcttcctaagcttgagaatttcacttatagttataatttctttactggtgaagctcctgtgtgtttgaggttgtctgagtttgatgatcggagaaattgtttgcccggaagacctgctcagagatcttcacggcaatgttcagctttcttgtcacggccttcggtggattgtggatcttttggttgtggtcgttctgttgttaaaccgtctccacctattgtagcattaccgccgcctcctccgccatcgcctccgttacctccacctgtttactctcctccgccgtcacctcctgtcttctctcctccaccgtcaccccctgtatactctcctccaccgccaccatcaatccattacagttctcctcctccaccgccagtccatcacagttctcctccaccaccatcacctgaatttgaagggccattaccgccggtgatcggagtatcctatgcatctcccccaccaccacccttctattga

SEQ ID NO: 97011 - protein, 494 aa, Arabidopsis thaliana
  peptide (1)..(494): Ceres Seq. ID no. 12735714
MKNNTTQSLLLLLLFFFFFFEISHSLSISSNAPLSDTEVRFIQRRQLLYYRDEFGDRGENVTVDPSLIFENPRLRSAYIALQAWKQAILSDPNNITVNWIGSNVCNYTGVFCSKALDNRKIRTVAGIDLNHADIAGYLPEELGLLTDLALFHVNSNRFCGTVPHKFKQLKLLFELDLSNNRFAGKFPTVVLHLPSLKFLDLRFNEFEGTVPKELFSKNLDAIFINHNRFRFELPENFGDSPVSVIVLANNHFHGCIPTSLVEMKNLNEIIFMNNGLNSCLPADIGRLKNVTVFDVSFNELVGPLPESVGGMVEVEQLNVAHNLLSGKIPASICQLPKLENFTYSYNFFTGEAPVCLRLSEFDDRRNCLPGRPAQRSSRQCSAFLSRPSVDCGSFGCGRSVVKPSPPIVALPPPPPPSPPLPPPVYSPPPSPPVFSPPPSPPVYSPPPPPSIHYSSPPPPPVHHSSPPPPSPEFEGPLPPVIGVSYASPPPPPFY

SEQ ID NO: 97012 - DNA, 1389 bp, Arabidopsis thaliana
  misc_feature (1)..(1389): Ceres Seq. ID no. 12735729
  misc_feature (1)..(1389): Ortholog of  Ceres SEQ ID NO 15171606 as cited in SEQ ID NO 57214
  misc_feature (1)..(1389): Ortholog of  Ceres SEQ ID NO 13596921 as cited in SEQ ID NO 62368
  misc_feature (1)..(1389): Ortholog of  Ceres SEQ ID NO 13600673 as cited in SEQ ID NO 0
accaccaccaacaacaaacatataaaccataaggaaaacagagaaagagagagatggaggacgacaatagtaacaacaacaacaacaacaacgtgatcgcacctttcatcgtgaaaacatatcagatggtcaatgatccttccaccgattggctcatcacttggggacctgctcacaacagtttcatagtcgttgatccactcgacttctcgcaacgaatcttacctgcttatttcaaacacaacaatttcagcagttttgttcgtcaactcaacacctatgggtttaggaaagtggatccggaccggtgggagtttgcgaacgagcattttctaaggggacagaagcatttgttgaataacatagcgcgtaggaaacacgcgcgggggatgtacggtcaagatttggaggacggtgagattgtgagggagatcgaacggttaaaagaagagcagagggagctagaggcagagattcagaggatgaaccggaggatcgaagcgacggagaagagaccggagcagatgatggcgtttctttacaaagtcgttgaagatcctgatcttcttccaagaatgatgctcgagaaagaacggacaaagcaacaacaacaagtttccgacaagaagaagcgtcgtgtcacgatgtcgacggtgaagtcagaggaagaagaagtggaagaagatgaagggagggtctttagggttatgtcatcatcaacaccgtcgccgtcatcaacggagaatctttaccggaatcattcaccggatgggtggattgttcctatgacgcaaggacagtttggtagttacgagacgggtttggtggcgaagtcgatgctctcgaattcaacgtcgtcgacgtcatcatctttgacgtcgacgttttctttgccggagagtgttaacggaggaggaggaggaggatgtgggagtattcagggagaaagaaggtataaagaaacggcgacgtttggaggagtggtagagtcaaatccaccaacaacaccgccttatccattttctctgtttcgaggtggcttttagcgtttagcttcacatgatatatgatctttagactttattattgttatattattattattatttattttttgtgtgtttgttcttaattattttatgtataaccaaaagaaagaaagaaaataaggacagatccatagttgagtcagtagtcatcgtttgtagaaagttttgacagtatataatttctgattatatttgttaaaagttcatatgttgactttgttttccttttaaaagtactttcaggtgacttgtgtaatatattcacacttgtaataacaacaattttgatcttcttcactacttcagtgttttgatttttgaataaagtattattgtagcc

SEQ ID NO: 97013 - protein, 330 aa, Arabidopsis thaliana
  peptide (1)..(330): Ceres Seq. ID no. 12735730
MEDDNSNNNNNNNVIAPFIVKTYQMVNDPSTDWLITWGPAHNSFIVVDPLDFSQRILPAYFKHNNFSSFVRQLNTYGFRKVDPDRWEFANEHFLRGQKHLLNNIARRKHARGMYGQDLEDGEIVREIERLKEEQRELEAEIQRMNRRIEATEKRPEQMMAFLYKVVEDPDLLPRMMLEKERTKQQQQVSDKKKRRVTMSTVKSEEEEVEEDEGRVFRVMSSSTPSPSSTENLYRNHSPDGWIVPMTQGQFGSYETGLVAKSMLSNSTSSTSSSLTSTFSLPESVNGGGGGGCGSIQGERRYKETATFGGVVESNPPTTPPYPFSLFRGGF

SEQ ID NO: 97014 - protein, 306 aa, Arabidopsis thaliana
  peptide (1)..(306): Ceres Seq. ID no. 12735731
MVNDPSTDWLITWGPAHNSFIVVDPLDFSQRILPAYFKHNNFSSFVRQLNTYGFRKVDPDRWEFANEHFLRGQKHLLNNIARRKHARGMYGQDLEDGEIVREIERLKEEQRELEAEIQRMNRRIEATEKRPEQMMAFLYKVVEDPDLLPRMMLEKERTKQQQQVSDKKKRRVTMSTVKSEEEEVEEDEGRVFRVMSSSTPSPSSTENLYRNHSPDGWIVPMTQGQFGSYETGLVAKSMLSNSTSSTSSSLTSTFSLPESVNGGGGGGCGSIQGERRYKETATFGGVVESNPPTTPPYPFSLFRGGF

SEQ ID NO: 97015 - protein, 218 aa, Arabidopsis thaliana
  peptide (1)..(218): Ceres Seq. ID no. 12735732
MYGQDLEDGEIVREIERLKEEQRELEAEIQRMNRRIEATEKRPEQMMAFLYKVVEDPDLLPRMMLEKERTKQQQQVSDKKKRRVTMSTVKSEEEEVEEDEGRVFRVMSSSTPSPSSTENLYRNHSPDGWIVPMTQGQFGSYETGLVAKSMLSNSTSSTSSSLTSTFSLPESVNGGGGGGCGSIQGERRYKETATFGGVVESNPPTTPPYPFSLFRGGF

SEQ ID NO: 97016 - DNA, 2329 bp, Arabidopsis thaliana
  misc_feature (1)..(2329): Ceres Seq. ID no. 12735735
  misc_feature (1)..(2329): Ortholog of  Ceres SEQ ID NO 14307164 as cited in SEQ ID NO 54775
  misc_feature (1)..(2329): Ortholog of  Ceres SEQ ID NO 13654989 as cited in SEQ ID NO 63117
  misc_feature (1)..(2329): Ortholog of  Ceres SEQ ID NO 13655640 as cited in SEQ ID NO 63844
  misc_feature (1)..(2329): Ortholog of  Ceres SEQ ID NO 13584744 as cited in SEQ ID NO 69137
cagatcactcctcctctctcttctcctacctttttcacattctcttcttcttcttctcgtgagaaaaagaaagagagattctttattcattagatcgaagcaaaaatgtccacagcgccgtctccaggcactactccatcaccatctccaccgtctcctcccacaaactcgacaaccaccactcctcctccagcagcctcttctcctcctcccaccacaactccttcttctcctcctccgtcgccgtcaactaattcaacctctcctcctccttcttctcctttacctccttctcttcctcctccatctcctcctggatctttaactcctcctcttcctcaaccttccccctccgctcccatcactccttctccaccgtctcccaccacaccctcaaaccctcgaagccctccatctcctaaccaaggaccaccaaacactccctcaggatctactcctagaactccatcaaacactaaaccgtcgccgccgtctgattcttccgatggattgtctaccggagttgtggtaggaatcgccattggaggagtcgctattcttgttatactgactctgatttgtcttctctgtaagaagaaacgaagaagaagacacgacgatgaagctgcttactatgttcctcctcctcctccatctggtcccaaagctggaggaccttacggtggtcaacaacagtattggcaacaacaaaacgcgtcacggccgtcagataatcatgtagtgacgtcattgccaccacctaagcctccatctccaccacgaaaacctcctccgccacctccaccaccagcattcatgagtagcagtggtggttctgactattcggatcttccggttcttcctccaccatctccagggcttgtgttaggcttttctaaaagcactttcacttatgaggagttgtcgagagctactaatggcttctctgaggctaatttgttaggacaaggagggtttggttatgtgcataaaggtatattgcctagtgggaaagaagttgctgtgaaacagttgaaagctggtagtggtcagggagagagagagtttcaggctgaggttgagatcattagcagagttcatcacaggcatttggtttctcttattggttattgtatggccggtgttcaaagattacttgtctatgagtttgttccaaacaacaatcttgagtttcacctccatggtaagggacggcctacgatggaatggagtactagattgaagattgctcttggatctgctaaaggactttcatatcttcatgaagattgcaatccgaaaatcattcaccgtgatattaaggcgtcaaacatattgattgatttcaaatttgaagctaaggttgctgactttggtcttgccaagattgcttctgatacaaacactcatgtatctacacgcgtgatgggaacctttgggtatttggctccggaatatgctgcaagtggaaagctcacagaaaagtctgacgttttctcatttggcgttgtacttttggaacttattactgggaggcgccctgttgatgcgaacaatgtctatgtagatgacagcttagttgactgggcacgaccattgcttaaccgagcatctgaggaaggagattttgagggtttggctgattcaaagatgggtaatgagtatgacagagaggagatggctcgcatggttgcttgcgctgcggcttgtgttcgccattcagctcgccgcagacctcgcatgagccagatagtacgggcgttagaaggaaatgtatcgctgtctgatcttaacgaagggatgagaccgggtcacagcaacgtatacagctcatatggaggaagcacagactatgacacgagccaatacaacgacgacatgataaagtttaggaaaatggctcttggaactcaagaatacggcacaaccggcgagtacagtaatccaaccagtgactacggactgtacccgtctggttcaagcagtgaaggtcaagccacacgagaaatggagatgggaaagattaagaaaaccggtcaaggttatagtggaccctctctttaaaccataagagtggagaaattgcaggttttttttggattctttttcttattaactgtaaagatttgaggaaattgccttactctctaattgatttactacgatatatgatacgtttaaaattgttttgctttggtttcttctttagatgttgtgatgttgattgattctggtttgaatattattctttcattcttttttctatttttcttctgaagaatttgtttgttatgtcttttgagcttttggcctagtttggttaagttcc

SEQ ID NO: 97017 - protein, 652 aa, Arabidopsis thaliana; identical to SEQ ID NO: 30482
  peptide (1)..(652): Ceres Seq. ID no. 12735736

SEQ ID NO: 97018 - protein, 415 aa, Arabidopsis thaliana; identical to SEQ ID NO: 30483
  peptide (1)..(415): Ceres Seq. ID no. 12735737

SEQ ID NO: 97019 - DNA, 450 bp, Arabidopsis thaliana
  misc_feature (1)..(450): Ceres Seq. ID no. 12735757
  misc_feature (1)..(450): Ortholog of  Ceres SEQ ID NO 14303831 as cited in SEQ ID NO 52976
  misc_feature (1)..(450): Ortholog of  Ceres SEQ ID NO 12619453 as cited in SEQ ID NO 65952
atgtatcctacttttgatgttggagacagattagttgcagagaaggtgagttattatttcaggaagccttgtgcaaatgatattgtcatctttaaaagtccaccagttcttcaggaagttgggtatactgatgccgatgtatttattaaacggattgttgccaaagaaggtgaccttgtggaggtacataatgggaaactgatggttaatggtgttgctaggaatgaaaaattcatcttagagcctcctggttatgaaatgacaccaattagggtaccggaaaattcagtctttgtgatgggtgataaccggaataacagttatgattcgcacgtatggggtcctctgcctttgaagaatattattggacggtcggtttttcggtattggccaccaaacagagtaagcgggacagtgctagaaggtggctgtgctgtggataagcaatag

SEQ ID NO: 97020 - protein, 149 aa, Arabidopsis thaliana
  peptide (1)..(149): Ceres Seq. ID no. 12735758
MYPTFDVGDRLVAEKVSYYFRKPCANDIVIFKSPPVLQEVGYTDADVFIKRIVAKEGDLVEVHNGKLMVNGVARNEKFILEPPGYEMTPIRVPENSVFVMGDNRNNSYDSHVWGPLPLKNIIGRSVFRYWPPNRVSGTVLEGGCAVDKQ

SEQ ID NO: 97021 - protein, 82 aa, Arabidopsis thaliana
  peptide (1)..(82): Ceres Seq. ID no. 12735759
MVNGVARNEKFILEPPGYEMTPIRVPENSVFVMGDNRNNSYDSHVWGPLPLKNIIGRSVFRYWPPNRVSGTVLEGGCAVDKQ

SEQ ID NO: 97022 - DNA, 894 bp, Arabidopsis thaliana
  misc_feature (1)..(894): Ceres Seq. ID no. 12735784
  misc_feature (1)..(894): Ortholog of  Ceres SEQ ID NO 13593889 as cited in SEQ ID NO 53305
  misc_feature (1)..(894): Ortholog of  Ceres SEQ ID NO 13581959 as cited in SEQ ID NO 56156
atggaagccagtgtttatggcttgcagataataaagaacgctgatcttgaagacctgacagaactgggatccgggacatatggaactgtctatcatggaacatggcggggaacggatgttgctataaagagaatacggaacagttgctttgcagggagatcatctgaacaagaacgcttgacgaaagatttctggagggaagcacaaatactctcaaatcttcatcacccaaacgttgttgcattctacggtatagtgcctgatggaactggaggaaccttggcaactgttacagagttcatggtgaatgggtcactcaggcatgctcttctcaaaaaggacagattgcttgacactcggaaaaagataataattgcaatggatgctgcttttggcatggagtatttgcactcgaagaacatcgtccactttgatctcaaatgcgaaaacttacttgtcaatttaagggatccacaacggcctatatgcaaggtgggagatcttggcttatctagaatcaaacgtaacactttagtatctgggggagtgagaggaactcttccatggatggccccagaactcttgaacggaagcagcacccgagtttctgagaaagttgatgttttttcatatggaatctcgctgtgggagattctaaccggagaggaaccctatgcagatatgcattgtggagcaatcattggcgggatcgtgaagaacacacttcgacctcctataccaaaaagctgttctccggaatggaaaaagctgatggaacaatgctggtctgtcgacccggattctcgtcctccattcaccgaaataacatgccgacttcggtccatgtcaatggaagtcgtcactaaaagcaaaagaagagaaaataaaccctga

SEQ ID NO: 97023 - protein, 297 aa, Arabidopsis thaliana
  peptide (1)..(297): Ceres Seq. ID no. 12735785
MEASVYGLQIIKNADLEDLTELGSGTYGTVYHGTWRGTDVAIKRIRNSCFAGRSSEQERLTKDFWREAQILSNLHHPNVVAFYGIVPDGTGGTLATVTEFMVNGSLRHALLKKDRLLDTRKKIIIAMDAAFGMEYLHSKNIVHFDLKCENLLVNLRDPQRPICKVGDLGLSRIKRNTLVSGGVRGTLPWMAPELLNGSSTRVSEKVDVFSYGISLWEILTGEEPYADMHCGAIIGGIVKNTLRPPIPKSCSPEWKKLMEQCWSVDPDSRPPFTEITCRLRSMSMEVVTKSKRRENKP

SEQ ID NO: 97024 - protein, 197 aa, Arabidopsis thaliana
  peptide (1)..(197): Ceres Seq. ID no. 12735786
MVNGSLRHALLKKDRLLDTRKKIIIAMDAAFGMEYLHSKNIVHFDLKCENLLVNLRDPQRPICKVGDLGLSRIKRNTLVSGGVRGTLPWMAPELLNGSSTRVSEKVDVFSYGISLWEILTGEEPYADMHCGAIIGGIVKNTLRPPIPKSCSPEWKKLMEQCWSVDPDSRPPFTEITCRLRSMSMEVVTKSKRRENKP

SEQ ID NO: 97025 - protein, 171 aa, Arabidopsis thaliana
  peptide (1)..(171): Ceres Seq. ID no. 12735787
MDAAFGMEYLHSKNIVHFDLKCENLLVNLRDPQRPICKVGDLGLSRIKRNTLVSGGVRGTLPWMAPELLNGSSTRVSEKVDVFSYGISLWEILTGEEPYADMHCGAIIGGIVKNTLRPPIPKSCSPEWKKLMEQCWSVDPDSRPPFTEITCRLRSMSMEVVTKSKRRENKP

SEQ ID NO: 97026 - DNA, 1548 bp, Arabidopsis thaliana
  misc_feature (1)..(1548): Ceres Seq. ID no. 12735822
  misc_feature (1)..(1548): Ortholog of  Ceres SEQ ID NO 15227091 as cited in SEQ ID NO 60294
  misc_feature (1)..(1548): Ortholog of  Ceres SEQ ID NO 13502874 as cited in SEQ ID NO 66298
  misc_feature (1)..(1548): Ortholog of  Ceres SEQ ID NO 12614124 as cited in SEQ ID NO 68392
atgacttttctctttagtactctccagttgtctctcttctctttggcccttgtaatctttggttacattttcctcagaaaacaattgagtagatgtgaagttgatagctccacgattcctgagccattgggagctttgcctctattcggacacctccatcttttgcgtggcaaaaaactcctttgcaagaaattagctgccatgtcccaaaaacatggtcctatcttctccctcaagttagggttttataggctggttgtagccagcgacccaaaaacggtgaaagattgtttcaccaccaacgacttggctacagcaaccagacccaatatagcctttggtcggtacgtaggctacaacaatgcaagtctgactctggctccctatggagactattggcgtgagttacgtaagattgtcaccgtccatctattctcaaaccacagtatagagatgcttggtcacattcgttcttcagaagtaaacacgttgatcaaacacctatacaaagggaatggtggaacttctatagtgaagattgacatgttatttgagtttttgaccttcaatataatccttaggaagatggtggggaagaggattggtttcggtgaagtgaatagcgatgaatggcgttataaggaggccctgaagcattgcgagtacttggctgtgattcctatgataggcgacgttattccatggttgggatggttggattttgcaaaaaattctcaaatgaagagactatttaaggagcttgactcagtcaacaccaagtggctccacgaacatctcaagaagagatcaagaaatgagaaggatcaagaaagaacaatcatggatctactgctagacatcttaccagaggatattgtgataagtggacacgtacgcgatgtcattgtgaaggcaacaattttggctctcacattaacaggatcagacagcacatccatcactttgacatgggcggtatcgctgctactcaacaatccagctgctttagaagcagcacaagaagagattgataatagtgtcggcaaaggtagatggattgaagaatccgatatacaaaacctcaagtacctacaagctattgttaaggaaacgcaccgactttacccgccggctcctctaacaggaatccgcgaagcacgtgaagattgtttcgtgggaggataccgtgttgagaaaggcacacgcttgctcgtaaacatatggaaacttcatagggatcccaagatctggcctgaccccaaaacctttaagcctgagaggttcatggaggataaatcacaatgtgaaaagagcaactttgaatacattcctttcggttcgggaaggaggtcgtgtccgggagtcaatcttggtctaagagttgtacactttgtattggctagattgcttcaagggtttgagttacacaaagtgtctgatgaaccactggatatggctgaagggcctggtttagccttgccaaagattaacccggtcgaagtagttgtaatgcctcggctcgacccgaagttgtatagtttactctaa

SEQ ID NO: 97027 - protein, 515 aa, Arabidopsis thaliana
  peptide (1)..(515): Ceres Seq. ID no. 12735823
MTFLFSTLQLSLFSLALVIFGYIFLRKQLSRCEVDSSTIPEPLGALPLFGHLHLLRGKKLLCKKLAAMSQKHGPIFSLKLGFYRLVVASDPKTVKDCFTTNDLATATRPNIAFGRYVGYNNASLTLAPYGDYWRELRKIVTVHLFSNHSIEMLGHIRSSEVNTLIKHLYKGNGGTSIVKIDMLFEFLTFNIILRKMVGKRIGFGEVNSDEWRYKEALKHCEYLAVIPMIGDVIPWLGWLDFAKNSQMKRLFKELDSVNTKWLHEHLKKRSRNEKDQERTIMDLLLDILPEDIVISGHVRDVIVKATILALTLTGSDSTSITLTWAVSLLLNNPAALEAAQEEIDNSVGKGRWIEESDIQNLKYLQAIVKETHRLYPPAPLTGIREAREDCFVGGYRVEKGTRLLVNIWKLHRDPKIWPDPKTFKPERFMEDKSQCEKSNFEYIPFGSGRRSCPGVNLGLRVVHFVLARLLQGFELHKVSDEPLDMAEGPGLALPKINPVEVVVMPRLDPKLYSLL

SEQ ID NO: 97028 - protein, 448 aa, Arabidopsis thaliana
  peptide (1)..(448): Ceres Seq. ID no. 12735824
MSQKHGPIFSLKLGFYRLVVASDPKTVKDCFTTNDLATATRPNIAFGRYVGYNNASLTLAPYGDYWRELRKIVTVHLFSNHSIEMLGHIRSSEVNTLIKHLYKGNGGTSIVKIDMLFEFLTFNIILRKMVGKRIGFGEVNSDEWRYKEALKHCEYLAVIPMIGDVIPWLGWLDFAKNSQMKRLFKELDSVNTKWLHEHLKKRSRNEKDQERTIMDLLLDILPEDIVISGHVRDVIVKATILALTLTGSDSTSITLTWAVSLLLNNPAALEAAQEEIDNSVGKGRWIEESDIQNLKYLQAIVKETHRLYPPAPLTGIREAREDCFVGGYRVEKGTRLLVNIWKLHRDPKIWPDPKTFKPERFMEDKSQCEKSNFEYIPFGSGRRSCPGVNLGLRVVHFVLARLLQGFELHKVSDEPLDMAEGPGLALPKINPVEVVVMPRLDPKLYSLL

SEQ ID NO: 97029 - protein, 364 aa, Arabidopsis thaliana
  peptide (1)..(364): Ceres Seq. ID no. 12735825
MLGHIRSSEVNTLIKHLYKGNGGTSIVKIDMLFEFLTFNIILRKMVGKRIGFGEVNSDEWRYKEALKHCEYLAVIPMIGDVIPWLGWLDFAKNSQMKRLFKELDSVNTKWLHEHLKKRSRNEKDQERTIMDLLLDILPEDIVISGHVRDVIVKATILALTLTGSDSTSITLTWAVSLLLNNPAALEAAQEEIDNSVGKGRWIEESDIQNLKYLQAIVKETHRLYPPAPLTGIREAREDCFVGGYRVEKGTRLLVNIWKLHRDPKIWPDPKTFKPERFMEDKSQCEKSNFEYIPFGSGRRSCPGVNLGLRVVHFVLARLLQGFELHKVSDEPLDMAEGPGLALPKINPVEVVVMPRLDPKLYSLL

SEQ ID NO: 97030 - DNA, 846 bp, Arabidopsis thaliana
  misc_feature (1)..(846): Ceres Seq. ID no. 12735838
  misc_feature (1)..(846): Ortholog of  Ceres SEQ ID NO 14303047 as cited in SEQ ID NO 66871
atggcgattttctccagaaccaaacgtgtcactgatccacttgacgacgacgcgaaggctcggatcttgagcagccacagttacatcctagaccaagattctcctcgactctgcgagctcgtacacgggtttcttgaggatggtcctgaagagtcattctacgactctgaccccgacctgtctgagacttcttcagctgaacattctggtgaagctagtgtggagatcgtgagaatggcggtgagcttctccgattccgatccttaccggaatctattgctagctcacgttttgagagccgtggaggtatattccggttttaggtcaaggaacaaaactgttttccgggataaggtagcttcgtttctgcgagagcttggtcacgacgccgcggtttgtgtatcaaaatggacctcttcatccaaactcatcgctgggagttaccatttcattgacgtcgttcacaagccgtcagataatgatcagaaggccgtccgttacttggttgatctagactttgcttcggagttcgagatcgcaaggccaacgcgcgaatacacgcgtgggctgcagctgctgcctaacgttttcgtaggaaatgaagagaatctaaggacgatcgtgagagagtcatgcgacgcggcgaagcgatcaatgaagagccgtggcttgtctcttccaccgtggcggagaagctcttacttacagcataagtggtttggtccgtacaaaagaaaggtgggatctagtttgggagtgaagccgttgaatagtgacgccgttagttgccgatctttagggtttgatgacggcgccgtcaatactcgtttgttcatcagggcatga

SEQ ID NO: 97031 - protein, 281 aa, Arabidopsis thaliana
  peptide (1)..(281): Ceres Seq. ID no. 12735839
MAIFSRTKRVTDPLDDDAKARILSSHSYILDQDSPRLCELVHGFLEDGPEESFYDSDPDLSETSSAEHSGEASVEIVRMAVSFSDSDPYRNLLLAHVLRAVEVYSGFRSRNKTVFRDKVASFLRELGHDAAVCVSKWTSSSKLIAGSYHFIDVVHKPSDNDQKAVRYLVDLDFASEFEIARPTREYTRGLQLLPNVFVGNEENLRTIVRESCDAAKRSMKSRGLSLPPWRRSSYLQHKWFGPYKRKVGSSLGVKPLNSDAVSCRSLGFDDGAVNTRLFIRA

SEQ ID NO: 97032 - protein, 203 aa, Arabidopsis thaliana
  peptide (1)..(203): Ceres Seq. ID no. 12735840
MAVSFSDSDPYRNLLLAHVLRAVEVYSGFRSRNKTVFRDKVASFLRELGHDAAVCVSKWTSSSKLIAGSYHFIDVVHKPSDNDQKAVRYLVDLDFASEFEIARPTREYTRGLQLLPNVFVGNEENLRTIVRESCDAAKRSMKSRGLSLPPWRRSSYLQHKWFGPYKRKVGSSLGVKPLNSDAVSCRSLGFDDGAVNTRLFIRA

SEQ ID NO: 97033 - DNA, 1566 bp, Arabidopsis thaliana
  misc_feature (1)..(1566): Ceres Seq. ID no. 12735849
  misc_feature (1)..(1566): Ortholog of  Ceres SEQ ID NO 12613725 as cited in SEQ ID NO 68196
atggagaatgatatggaagagaagtttgaagattggaaaggtaaagaggcaatcccagggaaacatggtgggatcagagctgcatctattgtttgtgttgtggtgatgatggagaacatagtgttcatagctaatggattcaatttcgtgaaatatttcatgggatcaatgcattatacaccagccacagcagcaaacatggtcactaatttcatgggaacatcgtttttactcactctttttggtggttttatcgctgactctttcgtcactcatttcacaactttcatcgtcttctgttgcattgaactcatgggattgatcttgttgacgttccaagctcataaccctaagttactgcctgaaaaagataaaacaccttcaactcttcaatcagcgattcttttcacaggactctacgcaatggctattggtacgggcggtttaaaggcatcgttgcctagtcatggaggcgatcaaattgatagaagaaatccaagactgatctcaagattcttcgattggttatacttctctatatgctctggatgcctcttggccgtaaccgttgtgttgtggatcgaggaaaagaaagggtggatatggagcttcaatatatccgttggaattctagcgacggcgctgtgtatttttactgtagggctaccgttttatcggttcaagcgtcctaatggaagtccgttgaaaaagattgcaattgtgattatttctgccgcaagaaaccgaaataaatctgatttggatgaagagatgatgcgaggtcttatctctatctacaagaacaatagtcacaacaagttaaagtggatagataaagcaacgttgaacaaaaacatctcagaaacagaagttgaagaaacaagaacgtttttgggtcttctaccaatctttggtagcacaattgtcatgagctgctgcgtggcacaactctctaccttctccgcacaacaaggaatgctcatgaacaagaaactctttcactctttcgagatccccgtaccttctctcaccgccattcctctcatcttcatgctcttatctatacctttatacgaattctttggaaaaaagatctcatcaggcaacaacaatagatcatccagtttcaatttgaaacgcattggactcggcctagctctctcttcggtttcaatggcggtttctgccatcgtagaggccaagaggaaacatgaagtggttcataacaacttcagaatctctgttttgtggctagtgtttcagtatctgatgctaagtgtctctgatatgttgactttaggagggatgctagagttcttttatagagaagctccgtcgaacatgaagagcataagcacggctttgggatggtgttcaaccgcattaggtttctttcttagcacaactcttgtagaggttacaaatgccgtcacgggaaggcttggccatcaatggcttggtggggaagatctcaacaagacaaggcttgaacttttttatgtgctcttgtgtgttcttaatactcttaatcttctgaactatattttttgggcaaagagatattaa

SEQ ID NO: 97034 - protein, 521 aa, Arabidopsis thaliana
  peptide (1)..(521): Ceres Seq. ID no. 12735850
MENDMEEKFEDWKGKEAIPGKHGGIRAASIVCVVVMMENIVFIANGFNFVKYFMGSMHYTPATAANMVTNFMGTSFLLTLFGGFIADSFVTHFTTFIVFCCIELMGLILLTFQAHNPKLLPEKDKTPSTLQSAILFTGLYAMAIGTGGLKASLPSHGGDQIDRRNPRLISRFFDWLYFSICSGCLLAVTVVLWIEEKKGWIWSFNISVGILATALCIFTVGLPFYRFKRPNGSPLKKIAIVIISAARNRNKSDLDEEMMRGLISIYKNNSHNKLKWIDKATLNKNISETEVEETRTFLGLLPIFGSTIVMSCCVAQLSTFSAQQGMLMNKKLFHSFEIPVPSLTAIPLIFMLLSIPLYEFFGKKISSGNNNRSSSFNLKRIGLGLALSSVSMAVSAIVEAKRKHEVVHNNFRISVLWLVFQYLMLSVSDMLTLGGMLEFFYREAPSNMKSISTALGWCSTALGFFLSTTLVEVTNAVTGRLGHQWLGGEDLNKTRLELFYVLLCVLNTLNLLNYIFWAKRY

SEQ ID NO: 97035 - protein, 517 aa, Arabidopsis thaliana
  peptide (1)..(517): Ceres Seq. ID no. 12735851
MEEKFEDWKGKEAIPGKHGGIRAASIVCVVVMMENIVFIANGFNFVKYFMGSMHYTPATAANMVTNFMGTSFLLTLFGGFIADSFVTHFTTFIVFCCIELMGLILLTFQAHNPKLLPEKDKTPSTLQSAILFTGLYAMAIGTGGLKASLPSHGGDQIDRRNPRLISRFFDWLYFSICSGCLLAVTVVLWIEEKKGWIWSFNISVGILATALCIFTVGLPFYRFKRPNGSPLKKIAIVIISAARNRNKSDLDEEMMRGLISIYKNNSHNKLKWIDKATLNKNISETEVEETRTFLGLLPIFGSTIVMSCCVAQLSTFSAQQGMLMNKKLFHSFEIPVPSLTAIPLIFMLLSIPLYEFFGKKISSGNNNRSSSFNLKRIGLGLALSSVSMAVSAIVEAKRKHEVVHNNFRISVLWLVFQYLMLSVSDMLTLGGMLEFFYREAPSNMKSISTALGWCSTALGFFLSTTLVEVTNAVTGRLGHQWLGGEDLNKTRLELFYVLLCVLNTLNLLNYIFWAKRY

SEQ ID NO: 97036 - protein, 486 aa, Arabidopsis thaliana
  peptide (1)..(486): Ceres Seq. ID no. 12735852
MMENIVFIANGFNFVKYFMGSMHYTPATAANMVTNFMGTSFLLTLFGGFIADSFVTHFTTFIVFCCIELMGLILLTFQAHNPKLLPEKDKTPSTLQSAILFTGLYAMAIGTGGLKASLPSHGGDQIDRRNPRLISRFFDWLYFSICSGCLLAVTVVLWIEEKKGWIWSFNISVGILATALCIFTVGLPFYRFKRPNGSPLKKIAIVIISAARNRNKSDLDEEMMRGLISIYKNNSHNKLKWIDKATLNKNISETEVEETRTFLGLLPIFGSTIVMSCCVAQLSTFSAQQGMLMNKKLFHSFEIPVPSLTAIPLIFMLLSIPLYEFFGKKISSGNNNRSSSFNLKRIGLGLALSSVSMAVSAIVEAKRKHEVVHNNFRISVLWLVFQYLMLSVSDMLTLGGMLEFFYREAPSNMKSISTALGWCSTALGFFLSTTLVEVTNAVTGRLGHQWLGGEDLNKTRLELFYVLLCVLNTLNLLNYIFWAKRY

SEQ ID NO: 97037 - DNA, 2154 bp, Arabidopsis thaliana
  misc_feature (1)..(2154): Ceres Seq. ID no. 12735865
  misc_feature (1)..(2154): Ortholog of  Ceres SEQ ID NO 15179672 as cited in SEQ ID NO 0
atacaaaagaaataaacctcaaactctgcaccttagagattaatactctcaagaaaaacaagttttgattcggacaaagatgttgcaaggaagaagagaagcaaaaaagagttatgctttgttctcttcaactttcttcttcttctttatctgttttctttcttcttcttctgcagaactcacagacaaaggtgttaactttgaagttgttgccttaataggaatcaaaagctcactgactgatcctcatggagttctaatgaattgggatgacacagcagttgatccatgtagctggaacatgatcacttgttctgatggttttgtcataaggctagaagctccaagccaaaacttatcaggaactctttcatcaagtattggaaatttaacaaatcttcaaactgtgttattgcagaacaattacataacaggaaacatccctcatgagattgggaaattgatgaaactcaaaacacttgatctctctaccaataacttcactggtcaaatcccattcactctttcttactccaaaaatcttcagtacttgagggttaataataacagcctgacaggaacaattcctagctcattggcaaacatgacccaactcacttttttggatttgtcgtataataacttgagtggaccagttccaagatcacttgccaaaacattcaatgttatgggcaattctcagatttgtccaacaggaactgagaaagactgtaatgggactcagcctaagccaatgtcaatcaccttgaacagttctcaaaataaatcatctgatggaggaactaaaaaccggaaaatcgcggtagtcttcggtgtaagcttgacatgtgtttgcttgttgatcattggctttggttttcttctttggtggagaagaagacataacaaacaagtattattctttgacattaatgagcaaaacaaggaagaaatgtgtctagggaatctaaggaggtttaatttcaaagaacttcaatccgcaactagtaacttcagcagcaagaatctggtcggaaaaggagggtttggaaatgtgtataaaggttgtcttcatgatggaagtatcatcgcggtgaagagattaaaggatataaacaatggtggtggagaggttcagtttcagacagagcttgaaatgataagccttgccgtccaccggaatctcctccgcttatacggtttctgtactacttcctctgaacggcttctcgtttatccttacatgtccaatggcagtgtcgcttctcgtctcaaagctaaaccggtattggattggggcacaagaaagcgaatagcattaggagcaggaagagggttgctgtatttgcatgagcaatgtgatccaaagatcattcaccgtgatgtcaaagctgcgaacatacttcttgacgattactttgaagctgttgtcggagatttcgggttggctaagcttttggatcatgaggagtcgcatgtgacaaccgccgtgagaggaacagtgggtcacattgcacctgagtatctctcaacaggacaatcttctgagaagacagatgtgttcggtttcgggattcttcttctcgaattgattactggattgagagctcttgaattcggaaaagcagcaaaccaaagaggagcgatacttgattgggtaaagaaactacaacaagagaagaagctagaacagatagtagacaaggatttgaagagcaactacgatagaatagaagtggaagaaatggttcaagtggctttgctttgtacacagtatcttcccattcaccgtcctaagatgtctgaagttgtgagaatgcttgaaggcgatggtcttgttgagaaatgggaagcttcttctcagagagcagaaaccaatagaagttacagtaaacctaacgagttttcttcctctgaacgttattcggatcttacagatgattcctcggtgctggttcaagccatggagttatcaggtccaagatgacaagagaaactatatgaatggctttgggtttgtaaaaaacatatataagattgtgtattttgttgtatgctgtgatcttgtacaggttttggtatcagaaagacatattctcatgctttatcccatgattaggaggaggtggaatcaccgcctccatttcgtagaaa

SEQ ID NO: 97038 - protein, 635 aa, Arabidopsis thaliana
  peptide (1)..(635): Ceres Seq. ID no. 12735866
MLQGRREAKKSYALFSSTFFFFFICFLSSSSAELTDKGVNFEVVALIGIKSSLTDPHGVLMNWDDTAVDPCSWNMITCSDGFVIRLEAPSQNLSGTLSSSIGNLTNLQTVLLQNNYITGNIPHEIGKLMKLKTLDLSTNNFTGQIPFTLSYSKNLQYLRVNNNSLTGTIPSSLANMTQLTFLDLSYNNLSGPVPRSLAKTFNVMGNSQICPTGTEKDCNGTQPKPMSITLNSSQNKSSDGGTKNRKIAVVFGVSLTCVCLLIIGFGFLLWWRRRHNKQVLFFDINEQNKEEMCLGNLRRFNFKELQSATSNFSSKNLVGKGGFGNVYKGCLHDGSIIAVKRLKDINNGGGEVQFQTELEMISLAVHRNLLRLYGFCTTSSERLLVYPYMSNGSVASRLKAKPVLDWGTRKRIALGAGRGLLYLHEQCDPKIIHRDVKAANILLDDYFEAVVGDFGLAKLLDHEESHVTTAVRGTVGHIAPEYLSTGQSSEKTDVFGFGILLLELITGLRALEFGKAANQRGAILDWVKKLQQEKKLEQIVDKDLKSNYDRIEVEEMVQVALLCTQYLPIHRPKMSEVVRMLEGDGLVEKWEASSQRAETNRSYSKPNEFSSSERYSDLTDDSSVLVQAMELSGPR

SEQ ID NO: 97039 - protein, 575 aa, Arabidopsis thaliana
  peptide (1)..(575): Ceres Seq. ID no. 12735867
MNWDDTAVDPCSWNMITCSDGFVIRLEAPSQNLSGTLSSSIGNLTNLQTVLLQNNYITGNIPHEIGKLMKLKTLDLSTNNFTGQIPFTLSYSKNLQYLRVNNNSLTGTIPSSLANMTQLTFLDLSYNNLSGPVPRSLAKTFNVMGNSQICPTGTEKDCNGTQPKPMSITLNSSQNKSSDGGTKNRKIAVVFGVSLTCVCLLIIGFGFLLWWRRRHNKQVLFFDINEQNKEEMCLGNLRRFNFKELQSATSNFSSKNLVGKGGFGNVYKGCLHDGSIIAVKRLKDINNGGGEVQFQTELEMISLAVHRNLLRLYGFCTTSSERLLVYPYMSNGSVASRLKAKPVLDWGTRKRIALGAGRGLLYLHEQCDPKIIHRDVKAANILLDDYFEAVVGDFGLAKLLDHEESHVTTAVRGTVGHIAPEYLSTGQSSEKTDVFGFGILLLELITGLRALEFGKAANQRGAILDWVKKLQQEKKLEQIVDKDLKSNYDRIEVEEMVQVALLCTQYLPIHRPKMSEVVRMLEGDGLVEKWEASSQRAETNRSYSKPNEFSSSERYSDLTDDSSVLVQAMELSGPR

SEQ ID NO: 97040 - protein, 561 aa, Arabidopsis thaliana
  peptide (1)..(561): Ceres Seq. ID no. 12735868
MITCSDGFVIRLEAPSQNLSGTLSSSIGNLTNLQTVLLQNNYITGNIPHEIGKLMKLKTLDLSTNNFTGQIPFTLSYSKNLQYLRVNNNSLTGTIPSSLANMTQLTFLDLSYNNLSGPVPRSLAKTFNVMGNSQICPTGTEKDCNGTQPKPMSITLNSSQNKSSDGGTKNRKIAVVFGVSLTCVCLLIIGFGFLLWWRRRHNKQVLFFDINEQNKEEMCLGNLRRFNFKELQSATSNFSSKNLVGKGGFGNVYKGCLHDGSIIAVKRLKDINNGGGEVQFQTELEMISLAVHRNLLRLYGFCTTSSERLLVYPYMSNGSVASRLKAKPVLDWGTRKRIALGAGRGLLYLHEQCDPKIIHRDVKAANILLDDYFEAVVGDFGLAKLLDHEESHVTTAVRGTVGHIAPEYLSTGQSSEKTDVFGFGILLLELITGLRALEFGKAANQRGAILDWVKKLQQEKKLEQIVDKDLKSNYDRIEVEEMVQVALLCTQYLPIHRPKMSEVVRMLEGDGLVEKWEASSQRAETNRSYSKPNEFSSSERYSDLTDDSSVLVQAMELSGPR

SEQ ID NO: 97041 - DNA, 1050 bp, Arabidopsis thaliana
  misc_feature (1)..(1050): Ceres Seq. ID no. 12735869
  misc_feature (1)..(1050): Ortholog of  Ceres SEQ ID NO 15171626 as cited in SEQ ID NO 57201
atggcggtctctgctacaggtttcgaaggatttgagaaaaggctcgaaatctcattctttgagactactgactttcttgatccccaaggaaagagtcttcgttctcttaccaaatcccagttagatgagatcttgactccagcagagtgcacaattgtttcctctctcacaaactctttcgttgactcttacgtgctctctgaatctagtctctttgtttatccttacaagatcatcatcaaaacatgcgggactactaagcttctcttgtcgatcccgcatatccttaggctggctgattcactttgcctcactgtcaaatctgttcgctacactcgtggtagctttatttttccgggagctcaatcttaccctcaccgtagcttctcagaggaagttgctttacttgatgactattttggtaagctcaatgcaggaagcaaagcttttgtgatgggaggttcagataataaccctcagagatggcatgtttactctgcttcttctactgaagaatctgcggtttgcgataaacccgtgtacacattggagatgtgtatgactggtctagacaatataaaagcttcggtgttctttaaaaccaactctgtttcagcttctgagatgactattagctctgggatcagaaacatccttccaggctctgaaatctgtgattttaactttgaaccgtgcggttactcgatgaattcgattgaaggggatgcggtttctaccatccatgtgaccccggaagatggttttagctatgcaagctttgaaacagttggttatgatctaaaggctttgaactttaaggagttggtggatagggttctggtttgttttggaccggaagaattttctgtagcggtgcatgctaatcttggaaccgaggtattggcgtctgattgtgtagctgatgtgaacggatactttagccaagagagagaactagaggagcttggacttggaggttcggttctataccagagatttgtcaagactgttgaatgttgctcaccaaaatctactcttgggttctgttag

SEQ ID NO: 97042 - protein, 349 aa, Arabidopsis thaliana
  peptide (1)..(349): Ceres Seq. ID no. 12735870
MAVSATGFEGFEKRLEISFFETTDFLDPQGKSLRSLTKSQLDEILTPAECTIVSSLTNSFVDSYVLSESSLFVYPYKIIIKTCGTTKLLLSIPHILRLADSLCLTVKSVRYTRGSFIFPGAQSYPHRSFSEEVALLDDYFGKLNAGSKAFVMGGSDNNPQRWHVYSASSTEESAVCDKPVYTLEMCMTGLDNIKASVFFKTNSVSASEMTISSGIRNILPGSEICDFNFEPCGYSMNSIEGDAVSTIHVTPEDGFSYASFETVGYDLKALNFKELVDRVLVCFGPEEFSVAVHANLGTEVLASDCVADVNGYFSQERELEELGLGGSVLYQRFVKTVECCSPKSTLGFC

SEQ ID NO: 97043 - protein, 198 aa, Arabidopsis thaliana
  peptide (1)..(198): Ceres Seq. ID no. 12735871
MGGSDNNPQRWHVYSASSTEESAVCDKPVYTLEMCMTGLDNIKASVFFKTNSVSASEMTISSGIRNILPGSEICDFNFEPCGYSMNSIEGDAVSTIHVTPEDGFSYASFETVGYDLKALNFKELVDRVLVCFGPEEFSVAVHANLGTEVLASDCVADVNGYFSQERELEELGLGGSVLYQRFVKTVECCSPKSTLGFC

SEQ ID NO: 97044 - DNA, 1428 bp, Arabidopsis thaliana
  misc_feature (1)..(1428): Ceres Seq. ID no. 12735878
  misc_feature (1)..(1428): Ortholog of  Ceres SEQ ID NO 14313743 as cited in SEQ ID NO 59555
atgtcttggattcatttggttttattcctttgtctaactctcctgtgttgcgttactggagaattatcaccggaaggcactgatgatggagctccgatggagaaaacagaacaagaagctctttactcagctattcaagggtttgttggtgattcttggaatggttctgatctttatcctgatccttgtggttggactcctattcagggtgtttcttgtgatctttatggtgacttgtggtatgtcacggatctaaccctaggtcttgttcatgaaaactcactttcttgcgccacaagtttggagataaagccacagttattcaagctcaagcacttgaaatcactcacgttcttcaactgcttcacgtcgccgataagaatacctaaagaggattggataaacttggcaagtaacttagaatcactcgagtttagatccaatcctggtttgattggtgaacttcctgaaacaattggaagtctcacaaagctgaagtctttggtggttcttgaaaacgggtttaacgggaagttaccgacgagaatctgcaatttaactaggttaaagcggttggttctggcgggaaacttgttcactgggacgattccggattgtttcaacgggtttaaggatctactgatcttggatatgagtcggaactcattctcagggatattgcctttgtctgttggagagatggtttcattgcttaagcttgacctaagcaataaccaattagaagggaggttgcctcaagaaatcgggtttttgaagaatctgacacttttggatctaaggaacaacagaatctctggagggttgttcgaaaacatcgaaaagattccatctctaacggatcttgttttatcagggaacccaatgggcagtgatgacatgatgggaataaagtgggagaatatgggcaatttggtcattttggatctgtcaaagatgggtttaagaggtgaggttcctttaggtttaacaagtttgagaagattgaggtttcttggtctcaacgacaacaacttgaccggcactgtcccatcaaaagagctcgagacattgccttgtcttggtgctctatacatcaatggaaacaatctatcaggagagctaagattctcaagaaagttctatgagaagatgggaacaaggtttaaggcttcaaagaatccaaatctttgtcaggatgttgtgtcagaatctcggcaatatgttgttggattgaagtcttgcatgatggagaaggcagaggatagtttggtaattaaacaaacttggagcaaccttaagaaggaggatgagtcaagttcatcaatgggtgtgatggttactagacatgtgttgttgtcaaatgggttcatgtgggatttgcttttggagctttctcttatattattattgaatttgttagtttgttaa

SEQ ID NO: 97045 - protein, 475 aa, Arabidopsis thaliana
  peptide (1)..(475): Ceres Seq. ID no. 12735879
MSWIHLVLFLCLTLLCCVTGELSPEGTDDGAPMEKTEQEALYSAIQGFVGDSWNGSDLYPDPCGWTPIQGVSCDLYGDLWYVTDLTLGLVHENSLSCATSLEIKPQLFKLKHLKSLTFFNCFTSPIRIPKEDWINLASNLESLEFRSNPGLIGELPETIGSLTKLKSLVVLENGFNGKLPTRICNLTRLKRLVLAGNLFTGTIPDCFNGFKDLLILDMSRNSFSGILPLSVGEMVSLLKLDLSNNQLEGRLPQEIGFLKNLTLLDLRNNRISGGLFENIEKIPSLTDLVLSGNPMGSDDMMGIKWENMGNLVILDLSKMGLRGEVPLGLTSLRRLRFLGLNDNNLTGTVPSKELETLPCLGALYINGNNLSGELRFSRKFYEKMGTRFKASKNPNLCQDVVSESRQYVVGLKSCMMEKAEDSLVIKQTWSNLKKEDESSSSMGVMVTRHVLLSNGFMWDLLLELSLILLLNLLVC

SEQ ID NO: 97046 - protein, 443 aa, Arabidopsis thaliana
  peptide (1)..(443): Ceres Seq. ID no. 12735880
MEKTEQEALYSAIQGFVGDSWNGSDLYPDPCGWTPIQGVSCDLYGDLWYVTDLTLGLVHENSLSCATSLEIKPQLFKLKHLKSLTFFNCFTSPIRIPKEDWINLASNLESLEFRSNPGLIGELPETIGSLTKLKSLVVLENGFNGKLPTRICNLTRLKRLVLAGNLFTGTIPDCFNGFKDLLILDMSRNSFSGILPLSVGEMVSLLKLDLSNNQLEGRLPQEIGFLKNLTLLDLRNNRISGGLFENIEKIPSLTDLVLSGNPMGSDDMMGIKWENMGNLVILDLSKMGLRGEVPLGLTSLRRLRFLGLNDNNLTGTVPSKELETLPCLGALYINGNNLSGELRFSRKFYEKMGTRFKASKNPNLCQDVVSESRQYVVGLKSCMMEKAEDSLVIKQTWSNLKKEDESSSSMGVMVTRHVLLSNGFMWDLLLELSLILLLNLLVC

SEQ ID NO: 97047 - protein, 258 aa, Arabidopsis thaliana
  peptide (1)..(258): Ceres Seq. ID no. 12735881
MSRNSFSGILPLSVGEMVSLLKLDLSNNQLEGRLPQEIGFLKNLTLLDLRNNRISGGLFENIEKIPSLTDLVLSGNPMGSDDMMGIKWENMGNLVILDLSKMGLRGEVPLGLTSLRRLRFLGLNDNNLTGTVPSKELETLPCLGALYINGNNLSGELRFSRKFYEKMGTRFKASKNPNLCQDVVSESRQYVVGLKSCMMEKAEDSLVIKQTWSNLKKEDESSSSMGVMVTRHVLLSNGFMWDLLLELSLILLLNLLVC

SEQ ID NO: 97048 - DNA, 903 bp, Arabidopsis thaliana
  misc_feature (1)..(903): Ceres Seq. ID no. 12735888
  misc_feature (1)..(903): Ortholog of  Ceres SEQ ID NO 15179139 as cited in SEQ ID NO 1093
  misc_feature (1)..(903): Ortholog of  Ceres SEQ ID NO 15226793 as cited in SEQ ID NO 58689
atggcttcttctacaatctctctccaatctatctccatgacaactctcaacaatctctcatatagtaaacaatttcatcgaagctctcttcttggtttctctaaatccttccaaaattttggtatctcatctaacggtccaggttcctcctctccgacaagtttcacgcccaagaagaaactcactcctactcgagctctctctcagaacttgggaaataccgaaaaccccagaccaagcaaagttcaagaactgagcgtgtacgaaatcaatgatttagatcgacacagcccaaaaattcttaaaaacgcattcagctttaggtttggtctcggagatctcgtcccattcacaaacaaactctacaccggcgatctcaagaaacgcgtgggaatcacggctggtctctgcgttgtgatcgaacacgtccctgagaagaacggtgatagattcgaagctacgtacagcttctacttcggagactatggccacttgtccgtacaaggaccatacttgacttacgaggattcgttccttgccatcactggtggcgctggaatctttgaaggtgcctacggacaggttaagcttcaacagcttgtgtatccgacaaaactgttctacactttttatcttaaaggattggctaatgatttgccactggagctcataggaactccggtaccaccgtctaaggacgtggagccagcaccggaagctaaggcgcttaagcccagtggagttgtaagcaactttacaaattagtgaataaaattagtcttatctttctcgtgtcctgtatatataataatctttttcatagagaattttatattcttatacttgtaatcaaataatttgtatggatcttagtatccttgtgaatgcagtatgtttgagttg

SEQ ID NO: 97049 - protein, 254 aa, Arabidopsis thaliana
  peptide (1)..(254): Ceres Seq. ID no. 12735889
MASSTISLQSISMTTLNNLSYSKQFHRSSLLGFSKSFQNFGISSNGPGSSSPTSFTPKKKLTPTRALSQNLGNTENPRPSKVQELSVYEINDLDRHSPKILKNAFSFRFGLGDLVPFTNKLYTGDLKKRVGITAGLCVVIEHVPEKNGDRFEATYSFYFGDYGHLSVQGPYLTYEDSFLAITGGAGIFEGAYGQVKLQQLVYPTKLFYTFYLKGLANDLPLELIGTPVPPSKDVEPAPEAKALKPSGVVSNFTN

SEQ ID NO: 97050 - protein, 242 aa, Arabidopsis thaliana
  peptide (1)..(242): Ceres Seq. ID no. 12735890
MTTLNNLSYSKQFHRSSLLGFSKSFQNFGISSNGPGSSSPTSFTPKKKLTPTRALSQNLGNTENPRPSKVQELSVYEINDLDRHSPKILKNAFSFRFGLGDLVPFTNKLYTGDLKKRVGITAGLCVVIEHVPEKNGDRFEATYSFYFGDYGHLSVQGPYLTYEDSFLAITGGAGIFEGAYGQVKLQQLVYPTKLFYTFYLKGLANDLPLELIGTPVPPSKDVEPAPEAKALKPSGVVSNFTN

SEQ ID NO: 97051 - DNA, 973 bp, Arabidopsis thaliana
  misc_feature (1)..(973): Ceres Seq. ID no. 12735891
  misc_feature (1)..(973): Ortholog of  Ceres SEQ ID NO 15179139 as cited in SEQ ID NO 1093
  misc_feature (1)..(973): Ortholog of  Ceres SEQ ID NO 15226793 as cited in SEQ ID NO 58689
actcaccacataaagtaaaagtctcatctcttcataaaatagctttaaaccaatcaagtagagtttcttctcaagtctttttattttatttttatcaatggcttcttcagcagtgtctctccaatccatctctatgacaactctcaacaatctttcatgtaatcaacaatttcatcgaagctctcttcttggttcctctaaatccttccaaaatcttggtatctcatctaacggttcagatttctcctatccatcaagtttcactgccaagaagaacctcactgcttctcgagctctctcccaaaacgggaatatcgaaaaccctagaccaagcaaagttcaagaactgagtgtgtacgaaatcaacgaattagatcgacacagccccaagattcttaaaaacgcattcagcttaatgttcggtctcggagatctcgtaccattcacaaacaaactctacacaggcgatctcaagaaacgcgtgggcatcacggcaggtctctgcgtcgtcatcgaacacgtcccagagaagaaaggtgaaagattcgaagctacttatagcttctacttcggagactatggccacttgtccgttcaaggaccatacttgacttacgaggattcgttcctcgccatcactggtggtgctggaatctttgaaggtgcctacggacaggtcaagcttcaacagcttgtgtatccgacaaaactgttctacactttttaccttaaagggttggctaatgatttgccgttggagctcaccggaacaccggtaccgccgtctaaggacatagagccggcgccggaagctaaggcactggagcctagcggagttataagtaactataccaactaattcatgaaattaaaatgtttctcgtatcgctgtgtaatgatataaagatttgtagttttgtgctcttatctgtaataaaatcattgaggaataatatctcgagtatgttttaag

SEQ ID NO: 97052 - protein, 253 aa, Arabidopsis thaliana
  peptide (1)..(253): Ceres Seq. ID no. 12735892
MASSAVSLQSISMTTLNNLSCNQQFHRSSLLGSSKSFQNLGISSNGSDFSYPSSFTAKKNLTASRALSQNGNIENPRPSKVQELSVYEINELDRHSPKILKNAFSLMFGLGDLVPFTNKLYTGDLKKRVGITAGLCVVIEHVPEKKGERFEATYSFYFGDYGHLSVQGPYLTYEDSFLAITGGAGIFEGAYGQVKLQQLVYPTKLFYTFYLKGLANDLPLELTGTPVPPSKDIEPAPEAKALEPSGVISNYTN

SEQ ID NO: 97053 - protein, 241 aa, Arabidopsis thaliana
  peptide (1)..(241): Ceres Seq. ID no. 12735893
MTTLNNLSCNQQFHRSSLLGSSKSFQNLGISSNGSDFSYPSSFTAKKNLTASRALSQNGNIENPRPSKVQELSVYEINELDRHSPKILKNAFSLMFGLGDLVPFTNKLYTGDLKKRVGITAGLCVVIEHVPEKKGERFEATYSFYFGDYGHLSVQGPYLTYEDSFLAITGGAGIFEGAYGQVKLQQLVYPTKLFYTFYLKGLANDLPLELTGTPVPPSKDIEPAPEAKALEPSGVISNYTN

SEQ ID NO: 97054 - protein, 147 aa, Arabidopsis thaliana
  peptide (1)..(147): Ceres Seq. ID no. 12735894
MFGLGDLVPFTNKLYTGDLKKRVGITAGLCVVIEHVPEKKGERFEATYSFYFGDYGHLSVQGPYLTYEDSFLAITGGAGIFEGAYGQVKLQQLVYPTKLFYTFYLKGLANDLPLELTGTPVPPSKDIEPAPEAKALEPSGVISNYTN

SEQ ID NO: 97055 - DNA, 756 bp, Arabidopsis thaliana
  misc_feature (1)..(756): Ceres Seq. ID no. 12735911
  misc_feature (1)..(756): Ortholog of  Ceres SEQ ID NO 14301944 as cited in SEQ ID NO 0
atggaaacggcgtcgtttaatccttcgtcttttctggctactttcccgtcgtttctcctcctcttcctcgccgtatacaccatcggctatttcctagttttccgtacatggaaacaatcatcacatttaggcgctagctgcttaatgtcactcttccacggcactcccgccgttataatggcttcccacgcgctgctcacaactccacgcgccgacgtacactcattcgcttctcccaataccgccgtggaatcaaacgtactcgacttcagcatggcttatttcaccgttgatcttctccattacttaatcttcctccctaacgacttcatcttcatcctccaccacattgcgaccctatacgttttcgccacgtgtagattcgccgtcggtcacggagctcacgggcttctcctcctcttgatactcgcggaggcgacgagcgcgtgtcagaacgtctggacgatcaccgggtatagaaaaaacgacgtcgcgttagcgaggagagtgagagagcttttgtctccgccgttttatcttttttatactgtggttcgtggattggctggtccggtggttttgtatgatatggcgacgttttacggtagcggtgcggcggatggagtggttccacggtgggcttggttatcgtggcttgttgtgattgggtttgctattttggttagtattttgtgggttttacgtaattggcttgattggtttagggagaataactctagcaagaaatacaagtga

SEQ ID NO: 97056 - protein, 251 aa, Arabidopsis thaliana
  peptide (1)..(251): Ceres Seq. ID no. 12735912
METASFNPSSFLATFPSFLLLFLAVYTIGYFLVFRTWKQSSHLGASCLMSLFHGTPAVIMASHALLTTPRADVHSFASPNTAVESNVLDFSMAYFTVDLLHYLIFLPNDFIFILHHIATLYVFATCRFAVGHGAHGLLLLLILAEATSACQNVWTITGYRKNDVALARRVRELLSPPFYLFYTVVRGLAGPVVLYDMATFYGSGAADGVVPRWAWLSWLVVIGFAILVSILWVLRNWLDWFRENNSSKKYK

SEQ ID NO: 97057 - protein, 203 aa, Arabidopsis thaliana
  peptide (1)..(203): Ceres Seq. ID no. 12735913
MSLFHGTPAVIMASHALLTTPRADVHSFASPNTAVESNVLDFSMAYFTVDLLHYLIFLPNDFIFILHHIATLYVFATCRFAVGHGAHGLLLLLILAEATSACQNVWTITGYRKNDVALARRVRELLSPPFYLFYTVVRGLAGPVVLYDMATFYGSGAADGVVPRWAWLSWLVVIGFAILVSILWVLRNWLDWFRENNSSKKYK

SEQ ID NO: 97058 - protein, 192 aa, Arabidopsis thaliana
  peptide (1)..(192): Ceres Seq. ID no. 12735914
MASHALLTTPRADVHSFASPNTAVESNVLDFSMAYFTVDLLHYLIFLPNDFIFILHHIATLYVFATCRFAVGHGAHGLLLLLILAEATSACQNVWTITGYRKNDVALARRVRELLSPPFYLFYTVVRGLAGPVVLYDMATFYGSGAADGVVPRWAWLSWLVVIGFAILVSILWVLRNWLDWFRENNSSKKYK

SEQ ID NO: 97059 - DNA, 2224 bp, Arabidopsis thaliana
  misc_feature (1)..(2224): Ceres Seq. ID no. 12735926
  misc_feature (1)..(2224): Ortholog of  Ceres SEQ ID NO 13599322 as cited in SEQ ID NO 0
agaaagaaaaattcatacttccaaaggaaaggggaagaaaaacaaaaacaaaaaaatctcaagtcaacaaacaacaacgaaggtccgaagaactttgaatgttgttatcatcatcatcataatcagaatcatcaacatcatcgttgtattcttttctggaagaactggaatcgccgtaaagttcgaatttttttttgttagattgtacaaaagggtgttgtgattaaggaagaagaagaagaagaagataaaaaggttttttttttggctgttgttgtaatctgggaaagtttgggattttgtatcgatctcagatggtgaaaagacgaagaagtgtgattgttttggggatatgattaaagaacctgaattgttctggtgttgagaataagaaactatgtggaaacagattctaagtaagcttcccaacaaaaagtcttcaaagcacgaacatcgtggacgtgaacacggtggccattcttcttcatcttctcatacttcaggtgcctctacttccaaaagcactgataatggcgccgcgaaatcgcatgctaagaacgcttctccagccggcaaatccgctgcttctgactcgggttttaaagatgggaatctaaagagtagtgggaacaacaacaacaacaacaacaacggtgtctttactccttatgaagcattgccgagttttaaagatgttccaaacacggaaaagcaaaacttgttcattaaaaagttgaacttgtgccgtgtagtgtttgatttcacggatcctacaaagaacatcaaggaaaaagatattaagaggcagacattgctggagcttgtggattatgtgaattctcctaatggaaagtttagcgaagtcggtatccaagaagtcgttcggatggtctctgctaacatatttagaacgctaaatcctcaaccacgggaaaataaagttatcgatgccttagacctggaggaggaagaaccttccatggatcttgcgtggcctcacttgcagcttgtgtatgagcttttcttgaggtttgttgcttcgcctgaaactgacaccaagctggctaagagatatatagatcaatcttttgtcttgcggttactggatttatttgattccgaggatcctagagaaagagattgtctgaaaaccattctccatcggatctatggtaaatttatggtacaccgacctttcatcaggaaatccattaacaacatcttctataggtttgttttcgaaacagagaaacataatgggattgctgagtttctagaaatcttgggaagtatcatcaatggattcgctcttcccttgaaagacgagcacaaagtgtttcttgttcgagttttgatacctctccacaaaccaaaatgcttgcaaatgtatcatcaacaattgtcttattgtatcacacagtttgtggaaaaggattgcaaacttgctgatacggttataagaggattgttgaaatattggcccgtgacaaacagttccaaagaagtcatgtttctgaacgagttggaggaagtactcgaagcaactcagccaccagaatttcaacggtgcatggtaccactgtttcgccaaatagctcgatgtttgaacagtctgcattttcaggttgcagagagagctttattcttatggaacaacaatcacattgagaatctgataatgcaaaaccgtaaagtcattcttccaattatattcccagcgttggagagaaacgcacagaaacattggaaccaagctgttcatagcttgacactaaacgtgcgaaagatatttcatgaccttgaccctgagttatttaaagaatgcctcgcaaagttcaaggaagatgaatcaaaagcagctgaaaccgaagcaaaacgtgaagccacttggaaacgtttggaagaactcggagtgcgaaaggcttcataaagttagagttgtagagaagaaagagagagaaagagagcttctgtatcttctattgacatgttgttcttcagatacatacttgagaagagaaaagtttcatattggtctcttggtttgaaggaaaaaggaaactcaaagatgtaagattgttcctgttttgatttccattatttttatttcttgtttcctcttaaatcttcctgcttgttaaaatgggttatttttgctacattgtatgatcatcacttgttccactttcttgagacttgtcttattcattcatcaaaaaaaagc

SEQ ID NO: 97060 - protein, 510 aa, Arabidopsis thaliana
  peptide (1)..(510): Ceres Seq. ID no. 12735927
MWKQILSKLPNKKSSKHEHRGREHGGHSSSSSHTSGASTSKSTDNGAAKSHAKNASPAGKSAASDSGFKDGNLKSSGNNNNNNNNGVFTPYEALPSFKDVPNTEKQNLFIKKLNLCRVVFDFTDPTKNIKEKDIKRQTLLELVDYVNSPNGKFSEVGIQEVVRMVSANIFRTLNPQPRENKVIDALDLEEEEPSMDLAWPHLQLVYELFLRFVASPETDTKLAKRYIDQSFVLRLLDLFDSEDPRERDCLKTILHRIYGKFMVHRPFIRKSINNIFYRFVFETEKHNGIAEFLEILGSIINGFALPLKDEHKVFLVRVLIPLHKPKCLQMYHQQLSYCITQFVEKDCKLADTVIRGLLKYWPVTNSSKEVMFLNELEEVLEATQPPEFQRCMVPLFRQIARCLNSLHFQVAERALFLWNNNHIENLIMQNRKVILPIIFPALERNAQKHWNQAVHSLTLNVRKIFHDLDPELFKECLAKFKEDESKAAETEAKREATWKRLEELGVRKAS

SEQ ID NO: 97061 - protein, 347 aa, Arabidopsis thaliana
  peptide (1)..(347): Ceres Seq. ID no. 12735928
MVSANIFRTLNPQPRENKVIDALDLEEEEPSMDLAWPHLQLVYELFLRFVASPETDTKLAKRYIDQSFVLRLLDLFDSEDPRERDCLKTILHRIYGKFMVHRPFIRKSINNIFYRFVFETEKHNGIAEFLEILGSIINGFALPLKDEHKVFLVRVLIPLHKPKCLQMYHQQLSYCITQFVEKDCKLADTVIRGLLKYWPVTNSSKEVMFLNELEEVLEATQPPEFQRCMVPLFRQIARCLNSLHFQVAERALFLWNNNHIENLIMQNRKVILPIIFPALERNAQKHWNQAVHSLTLNVRKIFHDLDPELFKECLAKFKEDESKAAETEAKREATWKRLEELGVRKAS

SEQ ID NO: 97062 - protein, 316 aa, Arabidopsis thaliana
  peptide (1)..(316): Ceres Seq. ID no. 12735929
MDLAWPHLQLVYELFLRFVASPETDTKLAKRYIDQSFVLRLLDLFDSEDPRERDCLKTILHRIYGKFMVHRPFIRKSINNIFYRFVFETEKHNGIAEFLEILGSIINGFALPLKDEHKVFLVRVLIPLHKPKCLQMYHQQLSYCITQFVEKDCKLADTVIRGLLKYWPVTNSSKEVMFLNELEEVLEATQPPEFQRCMVPLFRQIARCLNSLHFQVAERALFLWNNNHIENLIMQNRKVILPIIFPALERNAQKHWNQAVHSLTLNVRKIFHDLDPELFKECLAKFKEDESKAAETEAKREATWKRLEELGVRKAS

SEQ ID NO: 97063 - DNA, 2925 bp, Arabidopsis thaliana
  misc_feature (1)..(2925): Ceres Seq. ID no. 12735953
  misc_feature (1)..(2925): Ortholog of  Ceres SEQ ID NO 14308747 as cited in SEQ ID NO 55372
atgtttgatcgaaaggtgctcagatacttcaggaaagacggtcacaattggaggaagaaaaaagatggaaagactgtgaaggaagctcatgagaggttgaaggcgggaagcgttgatgttctacattgttactatgcgcatggacaggacaatgaaaactttcaaagacgcagttactggttgcttcaggaagaactttcccacatagtttttgttcactacctcgaagttaagggtagtagagtttctacttcttttaaccggatgcaaaggactgaagacgcggctcggtctcctcaagaaactggggacgccttgaccagtgaacatgatggttatgcttcttgcagcttcaatcaaaatgatcatagcaatcattcacaaactactgactcagcaagtgtcaatggttttcactctccagaacttgaagatgctgaatcagcatacaatcagcatggaagttccacagcttactctcatcaagaacttcagcagcctgcaacaggaggaaaccttactggttttgatccttactatcaaatctctttgacgcccagggatagttatcaaaaagagcttcgcacaatccccgtaactgattcttcaattatggtagacaaaagcaaaactatcaacagtcctggagtaacaaatgggttaaaaaacagaaaatccattgattcccaaacctgggaagagattctgggaaattgtggttctggagttgaagccttacctttgcagcctaacagtgagcatgaagtgctggaccaaatactcgaaagctcttttacaatgcaagattttgctagtctacaagagtccatggtcaaaagccagaatcaggagttaaattcaggacttacatctgatcgtaccgtgtggttccaaggacaagatatggagctaaatgctataagcaatctagcttcgaatgaaaaagctccatatctatctacgatgaaacaacatctgttacacggtgcattgggcgaagaaggtctgaaaaagatggacagtttcaatcgctggatgagcaaagaacttggagatgttggtgttatagctgatgcaaacgagtcctttactcaatcaagttcaagaacctactgggaagaagttgagagtgaggatgggtccaatggtcacaactctaggagggacatggatggatatgttatgagtccttccctctcaaaggaacagctctttagcatcaatgacttctctccaagctgggcttatgtgggttgtgaagtggtggtttttgtcactggaaaattcttaaagactcgggaggagactgaaattggcgagtggtcttgcatgtttgggcaaacagaagttccagcagatgttatatctaatggtattctccaatgtgttgctcctatgcatgaggctggaagagttcccttttatgtaacatgttccaacagattggcatgcagtgaagtgcgtgaattcgagtataaggttgccgagtctcaagtttttgatagagaagcagatgatgagtctactattgacattcttgaggcaagatttgttaaactgttgtgctcgaaatctgaaaatacaagccctgtttctgggaatgacagtgatttgtcacaattgagcgagaagattagtttactacttttcgagaacgatgaccagttggatcagatgctcatgaatgaaatctcccaagaaaatatgaaaaacaaccttttgcaggaatttctgaaagaaagcttacactcatggcttttacaaaagatagcagaaggtggaaaaggtccaagtgttttggatgaaggtggccaaggtgtattacattttgcagcttctcttggttacaactgggccttagaaccaacaataatcgctggtgtaagcgttgattttcgcgatgtaaatggttggaccgcacttcattgggcagctttctttggcagggagaggataattggttcactcatagctcttggtgctgctcctggaactttaactgacccaaatccagatttcccatcaggaagcacaccttctgatctagcctatgctaatggtcacaaaggaattgctggttatctctcagaatatgccttaagagctcatgtttctttgctcagtctaaatgataaaaatgccgaaactgttgagatggctcctagcccatccagctcatcattgacagactcgttgacagctgtacgtaacgctactcaggcagcagctcggattcatcaggttttcagggctcagtctttccagaagaagcaactaaaagaatttggagataaaaagcttggaatgtcggaggagcgtgctctttcgatgcttgctcctaaaacacacaaatcaggaagggcacatagtgatgattccgtgcaagccgctgctattcggattcagaacaagttccgaggttacaagggaagaaaagactatttgattaccagacaaagaatcatcaaaatacaggctcatgtgagaggttatcagtttaggaaaaactacagaaagataatttggtcagtgggggtattagagaaggtgatattacgttggagacggaaaggagctggtttgcgcgggtttaagtcagaagcacttgttgagaagatgcaagacggaacagagaaagaagaagatgatgattttttcaaacaaggaagaaagcaaacagaggataggctacaaaaagctcttgcaagagtgaaatccatggttcaatatcctgaagctagagatcaataccgtagattgctaaatgttgtcaacgacatccaagaaagcaaggttgaaaaagctcttgaaaattcagaagcaacttgttttgatgatgatgatgatctgatagatattgaagcattgttggaagatgatgacacattgatgttgcctatgtcctcatctttgtggaccagttaa

SEQ ID NO: 97064 - protein, 974 aa, Arabidopsis thaliana; identical to SEQ ID NO: 24426
  peptide (1)..(974): Ceres Seq. ID no. 12735954

SEQ ID NO: 97065 - protein, 886 aa, Arabidopsis thaliana
  peptide (1)..(886): Ceres Seq. ID no. 12735955
MQRTEDAARSPQETGDALTSEHDGYASCSFNQNDHSNHSQTTDSASVNGFHSPELEDAESAYNQHGSSTAYSHQELQQPATGGNLTGFDPYYQISLTPRDSYQKELRTIPVTDSSIMVDKSKTINSPGVTNGLKNRKSIDSQTWEEILGNCGSGVEALPLQPNSEHEVLDQILESSFTMQDFASLQESMVKSQNQELNSGLTSDRTVWFQGQDMELNAISNLASNEKAPYLSTMKQHLLHGALGEEGLKKMDSFNRWMSKELGDVGVIADANESFTQSSSRTYWEEVESEDGSNGHNSRRDMDGYVMSPSLSKEQLFSINDFSPSWAYVGCEVVVFVTGKFLKTREETEIGEWSCMFGQTEVPADVISNGILQCVAPMHEAGRVPFYVTCSNRLACSEVREFEYKVAESQVFDREADDESTIDILEARFVKLLCSKSENTSPVSGNDSDLSQLSEKISLLLFENDDQLDQMLMNEISQENMKNNLLQEFLKESLHSWLLQKIAEGGKGPSVLDEGGQGVLHFAASLGYNWALEPTIIAGVSVDFRDVNGWTALHWAAFFGRERIIGSLIALGAAPGTLTDPNPDFPSGSTPSDLAYANGHKGIAGYLSEYALRAHVSLLSLNDKNAETVEMAPSPSSSSLTDSLTAVRNATQAAARIHQVFRAQSFQKKQLKEFGDKKLGMSEERALSMLAPKTHKSGRAHSDDSVQAAAIRIQNKFRGYKGRKDYLITRQRIIKIQAHVRGYQFRKNYRKIIWSVGVLEKVILRWRRKGAGLRGFKSEALVEKMQDGTEKEEDDDFFKQGRKQTEDRLQKALARVKSMVQYPEARDQYRRLLNVVNDIQESKVEKALENSEATCFDDDDDLIDIEALLEDDDTLMLPMSSSLWTS

SEQ ID NO: 97066 - protein, 770 aa, Arabidopsis thaliana
  peptide (1)..(770): Ceres Seq. ID no. 12735956
MVDKSKTINSPGVTNGLKNRKSIDSQTWEEILGNCGSGVEALPLQPNSEHEVLDQILESSFTMQDFASLQESMVKSQNQELNSGLTSDRTVWFQGQDMELNAISNLASNEKAPYLSTMKQHLLHGALGEEGLKKMDSFNRWMSKELGDVGVIADANESFTQSSSRTYWEEVESEDGSNGHNSRRDMDGYVMSPSLSKEQLFSINDFSPSWAYVGCEVVVFVTGKFLKTREETEIGEWSCMFGQTEVPADVISNGILQCVAPMHEAGRVPFYVTCSNRLACSEVREFEYKVAESQVFDREADDESTIDILEARFVKLLCSKSENTSPVSGNDSDLSQLSEKISLLLFENDDQLDQMLMNEISQENMKNNLLQEFLKESLHSWLLQKIAEGGKGPSVLDEGGQGVLHFAASLGYNWALEPTIIAGVSVDFRDVNGWTALHWAAFFGRERIIGSLIALGAAPGTLTDPNPDFPSGSTPSDLAYANGHKGIAGYLSEYALRAHVSLLSLNDKNAETVEMAPSPSSSSLTDSLTAVRNATQAAARIHQVFRAQSFQKKQLKEFGDKKLGMSEERALSMLAPKTHKSGRAHSDDSVQAAAIRIQNKFRGYKGRKDYLITRQRIIKIQAHVRGYQFRKNYRKIIWSVGVLEKVILRWRRKGAGLRGFKSEALVEKMQDGTEKEEDDDFFKQGRKQTEDRLQKALARVKSMVQYPEARDQYRRLLNVVNDIQESKVEKALENSEATCFDDDDDLIDIEALLEDDDTLMLPMSSSLWTS

SEQ ID NO: 97067 - DNA, 2213 bp, Arabidopsis thaliana
  misc_feature (1)..(2213): Ceres Seq. ID no. 12735961
  misc_feature (1)..(2213): Ortholog of  Ceres SEQ ID NO 12586556 as cited in SEQ ID NO 64667
  misc_feature (1)..(2213): Ortholog of  Ceres SEQ ID NO 13660894 as cited in SEQ ID NO 67475
gatgacgcgcaacggccgatgaacatatcgaaggccaagcttcttcttcttcctcctcctcttacaccaaaactgaatcgttctctgtattctcattctcagcgtcgtactcgatcacttcctcatcacagagacaaacccataaactggaactctactcacagtttcgttctacacaatcctctactttcattgctcgaaaaatgcaaacttttgttacatttgaagcaaattcaagctcagatgataataaatggtttgattctggacccatttgcttcaagccggttaattgctttctgtgcattatcggaatctcgatatctcgattactctgtgaagattcttaaaggtattgagaaccctaacatattctcttggaatgtaacgattagaggattctctgagagtgagaatcctaaagaatcgtttttgctctataagcagatgcttagacatggttgttgtgagtccagaccggatcatttcacttaccctgttttgtttaaggtttgtgctgatcttaggttgagtagtttaggtcatatgattcttgggcatgttcttaagctaagattggaattggttagtcatgtgcataatgcgtcgattcatatgtttgcttcttgtggtgatatggaaaatgcgaggaaggtgttcgatgaaagtcctgtgagggatttggtttcttggaattgtttgattaatgggtataagaagattggtgaggcggagaaggcgatatatgtatataagctaatggaatctgaaggagttaagccggatgatgtgacgatgattgggttggtttcttcgtgttcaatgttgggagatttgaatcgtgggaaagagttttatgaatacgtaaaagaaaatggactgagaatgacgattcctcttgtaaatgctttgatggatatgttctcgaaatgcggagatattcacgaggcacgaaggatatttgataacttggaaaagagaacaattgtgtcgtggactacaatgatttcaggatatgctagatgtggtttgcttgatgtttcaaggaagctttttgatgatatggaagaaaaagatgttgtactgtggaatgcaatgatcggtggatcagtccaagccaagcgtggtcaagacgctttggcattgttccaggagatgcaaacaagtaacactaagcctgacgaaatcaccatgatacattgcctatctgcttgttctcagcttggtgctcttgatgttggcatttggattcatcgttacatcgagaaatacagtcttagtctcaatgttgcgctaggaacttcattggttgacatgtacgccaaatgtggtaacatctcagaagctctcagtgtttttcacggaattcaaacaagaaactcgcttacatacacagcgataatcggaggtttagcccttcatggagatgcatccactgctatatcatacttcaacgaaatgattgatgcagggattgccccagacgagatcactttcataggactattatcagcatgttgccatggtggaatgatccaaacaggccgtgattatttctctcagatgaagtctagattcaacctaaaccctcaattgaaacattactctataatggtagatctgctagggagagccgggctattagaagaagcagacaggctcatggaaagtatgccaatggaggcagatgctgcggtttggggagcattattattcggttgcaggatgcacggtaatgttgagctgggagagaaagcggctaagaaacttctcgaacttgatcccagtgatagcgggatctatgtgttgttggatggcatgtatggagaggctaatatgtgggaagatgcaaagagagcgaggaggatgatgaacgagagaggtgtagagaagattcctggttgtagttccattgaggttaatggaattgtctgtgagttcatcgttagggataaatcgagaccggaatctgagaaaatttatgatcgcttacattgtcttggaaggcatatgaggagctcgttgagtgtactattttcggaatatgagattactaataactaatgggactgaatgaaactgctgagttttgtattaaggcatctttggtctaaactagtatagaaatgggtttgagggcaaaaaaaaactcaaatgacatctcctgtgtattaattggccagtttaataaaaacatagtaacattaagagtg

SEQ ID NO: 97068 - protein, 687 aa, Arabidopsis thaliana
  peptide (1)..(687): Ceres Seq. ID no. 12735962
DDAQRPMNISKAKLLLLPPPLTPKLNRSLYSHSQRRTRSLPHHRDKPINWNSTHSFVLHNPLLSLLEKCKLLLHLKQIQAQMIINGLILDPFASSRLIAFCALSESRYLDYSVKILKGIENPNIFSWNVTIRGFSESENPKESFLLYKQMLRHGCCESRPDHFTYPVLFKVCADLRLSSLGHMILGHVLKLRLELVSHVHNASIHMFASCGDMENARKVFDESPVRDLVSWNCLINGYKKIGEAEKAIYVYKLMESEGVKPDDVTMIGLVSSCSMLGDLNRGKEFYEYVKENGLRMTIPLVNALMDMFSKCGDIHEARRIFDNLEKRTIVSWTTMISGYARCGLLDVSRKLFDDMEEKDVVLWNAMIGGSVQAKRGQDALALFQEMQTSNTKPDEITMIHCLSACSQLGALDVGIWIHRYIEKYSLSLNVALGTSLVDMYAKCGNISEALSVFHGIQTRNSLTYTAIIGGLALHGDASTAISYFNEMIDAGIAPDEITFIGLLSACCHGGMIQTGRDYFSQMKSRFNLNPQLKHYSIMVDLLGRAGLLEEADRLMESMPMEADAAVWGALLFGCRMHGNVELGEKAAKKLLELDPSDSGIYVLLDGMYGEANMWEDAKRARRMMNERGVEKIPGCSSIEVNGIVCEFIVRDKSRPESEKIYDRLHCLGRHMRSSLSVLFSEYEITNN

SEQ ID NO: 97069 - protein, 681 aa, Arabidopsis thaliana
  peptide (1)..(681): Ceres Seq. ID no. 12735963
MNISKAKLLLLPPPLTPKLNRSLYSHSQRRTRSLPHHRDKPINWNSTHSFVLHNPLLSLLEKCKLLLHLKQIQAQMIINGLILDPFASSRLIAFCALSESRYLDYSVKILKGIENPNIFSWNVTIRGFSESENPKESFLLYKQMLRHGCCESRPDHFTYPVLFKVCADLRLSSLGHMILGHVLKLRLELVSHVHNASIHMFASCGDMENARKVFDESPVRDLVSWNCLINGYKKIGEAEKAIYVYKLMESEGVKPDDVTMIGLVSSCSMLGDLNRGKEFYEYVKENGLRMTIPLVNALMDMFSKCGDIHEARRIFDNLEKRTIVSWTTMISGYARCGLLDVSRKLFDDMEEKDVVLWNAMIGGSVQAKRGQDALALFQEMQTSNTKPDEITMIHCLSACSQLGALDVGIWIHRYIEKYSLSLNVALGTSLVDMYAKCGNISEALSVFHGIQTRNSLTYTAIIGGLALHGDASTAISYFNEMIDAGIAPDEITFIGLLSACCHGGMIQTGRDYFSQMKSRFNLNPQLKHYSIMVDLLGRAGLLEEADRLMESMPMEADAAVWGALLFGCRMHGNVELGEKAAKKLLELDPSDSGIYVLLDGMYGEANMWEDAKRARRMMNERGVEKIPGCSSIEVNGIVCEFIVRDKSRPESEKIYDRLHCLGRHMRSSLSVLFSEYEITNN

SEQ ID NO: 97070 - protein, 606 aa, Arabidopsis thaliana
  peptide (1)..(606): Ceres Seq. ID no. 12735964
MIINGLILDPFASSRLIAFCALSESRYLDYSVKILKGIENPNIFSWNVTIRGFSESENPKESFLLYKQMLRHGCCESRPDHFTYPVLFKVCADLRLSSLGHMILGHVLKLRLELVSHVHNASIHMFASCGDMENARKVFDESPVRDLVSWNCLINGYKKIGEAEKAIYVYKLMESEGVKPDDVTMIGLVSSCSMLGDLNRGKEFYEYVKENGLRMTIPLVNALMDMFSKCGDIHEARRIFDNLEKRTIVSWTTMISGYARCGLLDVSRKLFDDMEEKDVVLWNAMIGGSVQAKRGQDALALFQEMQTSNTKPDEITMIHCLSACSQLGALDVGIWIHRYIEKYSLSLNVALGTSLVDMYAKCGNISEALSVFHGIQTRNSLTYTAIIGGLALHGDASTAISYFNEMIDAGIAPDEITFIGLLSACCHGGMIQTGRDYFSQMKSRFNLNPQLKHYSIMVDLLGRAGLLEEADRLMESMPMEADAAVWGALLFGCRMHGNVELGEKAAKKLLELDPSDSGIYVLLDGMYGEANMWEDAKRARRMMNERGVEKIPGCSSIEVNGIVCEFIVRDKSRPESEKIYDRLHCLGRHMRSSLSVLFSEYEITNN

SEQ ID NO: 97071 - DNA, 825 bp, Arabidopsis thaliana
  misc_feature (1)..(825): Ceres Seq. ID no. 12735982
  misc_feature (1)..(825): Ortholog of  Ceres SEQ ID NO 13581804 as cited in SEQ ID NO 51424
  misc_feature (1)..(825): Ortholog of  Ceres SEQ ID NO 13663874 as cited in SEQ ID NO 67003
atggggagagggaagattgtgatccagaagatcgatgattccacgagtagacaagtcactttctccaaaagaagaaagggtctcatcaagaaagctaaagaacttgctattctctgcgacgccgaggtctgtctcatcattttctccaacactgacaagctctatgactttgccagctccagtgtgaaatctactattgaacgattcaatacggctaagatggaggagcaagaactaatgaaccctgcatcagaagttaagttttggcagagagaggctgaaactctaaggcaagaattgcactcattgcaagaaaattatcggcaactaacgggagtggaattaaatggtttgagcgttaaggagttacaaaacatagagagtcaacttgaaatgagtttacgtggaattcgtatgaaaagggaacaaattttgaccaatgaaattaaagagctaaccagaaagaggaatcttgttcatcatgaaaacctcgaattgtcgagaaaagtacaaaggattcatcaagaaaatgtcgaactatacaagaaggcttatggaacgtcgaacacaaatggattgggacatcatgagctagtagatgcagtttatgaatcccatgcacaggttaggctgcagctaagccagcctgagcagtcccattataagacatcttcaaacagctaagatcatataagagatatataacaaattgagtaagtgtgagtgtaatcatgtcggagagcaaaccaaaggtttgatttgtacgatatatacttatatatggtctcaagtgaaagcaatggaacagcttctcgattatattct

SEQ ID NO: 97072 - protein, 227 aa, Arabidopsis thaliana
  peptide (1)..(227): Ceres Seq. ID no. 12735983
MGRGKIVIQKIDDSTSRQVTFSKRRKGLIKKAKELAILCDAEVCLIIFSNTDKLYDFASSSVKSTIERFNTAKMEEQELMNPASEVKFWQREAETLRQELHSLQENYRQLTGVELNGLSVKELQNIESQLEMSLRGIRMKREQILTNEIKELTRKRNLVHHENLELSRKVQRIHQENVELYKKAYGTSNTNGLGHHELVDAVYESHAQVRLQLSQPEQSHYKTSSNS

SEQ ID NO: 97073 - protein, 154 aa, Arabidopsis thaliana
  peptide (1)..(154): Ceres Seq. ID no. 12735984
MEEQELMNPASEVKFWQREAETLRQELHSLQENYRQLTGVELNGLSVKELQNIESQLEMSLRGIRMKREQILTNEIKELTRKRNLVHHENLELSRKVQRIHQENVELYKKAYGTSNTNGLGHHELVDAVYESHAQVRLQLSQPEQSHYKTSSNS

SEQ ID NO: 97074 - protein, 148 aa, Arabidopsis thaliana
  peptide (1)..(148): Ceres Seq. ID no. 12735985
MNPASEVKFWQREAETLRQELHSLQENYRQLTGVELNGLSVKELQNIESQLEMSLRGIRMKREQILTNEIKELTRKRNLVHHENLELSRKVQRIHQENVELYKKAYGTSNTNGLGHHELVDAVYESHAQVRLQLSQPEQSHYKTSSNS

SEQ ID NO: 97075 - DNA, 1237 bp, Arabidopsis thaliana
  misc_feature (1)..(1237): Ceres Seq. ID no. 12735989
  misc_feature (1)..(1237): Ortholog of  Ceres SEQ ID NO 14304898 as cited in SEQ ID NO 53598
  misc_feature (1)..(1237): Ortholog of  Ceres SEQ ID NO 13596228 as cited in SEQ ID NO 68789
atggatgattcaagctttatggatttgatgatcgacactgacgagtatctgatcgatgactgggaatccgatttcccgatatgcggggaaactaacaccaaccccggttccgagtctggatctggaaccgggtttgagttgctagcagaaagaccaacgaagcaaatgaaaaccaacaacaacatgaattcaacatcttcttctccgtcgtcttcttcttcttctggttctcgcacgtcacaagtgatctcatttgggtctccagacacgaaaaccaacccggtcgagacatctttgaacttctccaaccaagtaagcatggatcagaaagtggggtcgaaaagaaaagattgtgttaacaatggaggaagaagagaaccacatctattgaaagaacatgttttggctgaacgaaaacgtcgacaaaagctcaacgagcgtttgattgctctctctgctcttcttcctggcctcaaaaagacggacaaggcaacagttcttgaagatgccatcaaacatttgaaacaacttcaagagcgggtaaagaagctggaggaggagcgagtggtgaccaagaaaatggatcaatcaattatattggtgaagagatctcaagtgtatttagatgatgattcttcatcttattcttctacttgctctgctgcgtctcctctgtcttcttcttcggacgaagtttcgatcttcaaacaaacaatgcctatgatcgaagcccgagtttcagacagagatttgttgattagagtccattgtgagaagaacaaagggtgtatgattaagatcttaagttccttggagaagtttcgtcttgaagtagtcaatagcttcactttaccatttggaaattcaactctcgttataaccattctcactaagatggacaacaaattttctcgaccagttgaagaagtggtgaagaacataagagttgcgttagctgaataatattttaaaaaacgtttatgtgaatttcgcagtggttaaacgtgttagatttggtctccaattttgaccagatcactcggtttagttgaataatgagtagttggataataaaaccagatatatgcacgaaatatgggattttgtcgtttgttgagtgcaaaagctggattggtgtgtgtacctaattatggctgtatcattggttttgatactttgatatatatttttccccaatatcattgggttggttcaataatgaagtacctaagtgttc

SEQ ID NO: 97076 - protein, 320 aa, Arabidopsis thaliana
  peptide (1)..(320): Ceres Seq. ID no. 12735990
MDDSSFMDLMIDTDEYLIDDWESDFPICGETNTNPGSESGSGTGFELLAERPTKQMKTNNNMNSTSSSPSSSSSSGSRTSQVISFGSPDTKTNPVETSLNFSNQVSMDQKVGSKRKDCVNNGGRREPHLLKEHVLAERKRRQKLNERLIALSALLPGLKKTDKATVLEDAIKHLKQLQERVKKLEEERVVTKKMDQSIILVKRSQVYLDDDSSSYSSTCSAASPLSSSSDEVSIFKQTMPMIEARVSDRDLLIRVHCEKNKGCMIKILSSLEKFRLEVVNSFTLPFGNSTLVITILTKMDNKFSRPVEEVVKNIRVALAE

SEQ ID NO: 97077 - protein, 314 aa, Arabidopsis thaliana
  peptide (1)..(314): Ceres Seq. ID no. 12735991
MDLMIDTDEYLIDDWESDFPICGETNTNPGSESGSGTGFELLAERPTKQMKTNNNMNSTSSSPSSSSSSGSRTSQVISFGSPDTKTNPVETSLNFSNQVSMDQKVGSKRKDCVNNGGRREPHLLKEHVLAERKRRQKLNERLIALSALLPGLKKTDKATVLEDAIKHLKQLQERVKKLEEERVVTKKMDQSIILVKRSQVYLDDDSSSYSSTCSAASPLSSSSDEVSIFKQTMPMIEARVSDRDLLIRVHCEKNKGCMIKILSSLEKFRLEVVNSFTLPFGNSTLVITILTKMDNKFSRPVEEVVKNIRVALAE

SEQ ID NO: 97078 - protein, 311 aa, Arabidopsis thaliana
  peptide (1)..(311): Ceres Seq. ID no. 12735992
MIDTDEYLIDDWESDFPICGETNTNPGSESGSGTGFELLAERPTKQMKTNNNMNSTSSSPSSSSSSGSRTSQVISFGSPDTKTNPVETSLNFSNQVSMDQKVGSKRKDCVNNGGRREPHLLKEHVLAERKRRQKLNERLIALSALLPGLKKTDKATVLEDAIKHLKQLQERVKKLEEERVVTKKMDQSIILVKRSQVYLDDDSSSYSSTCSAASPLSSSSDEVSIFKQTMPMIEARVSDRDLLIRVHCEKNKGCMIKILSSLEKFRLEVVNSFTLPFGNSTLVITILTKMDNKFSRPVEEVVKNIRVALAE

SEQ ID NO: 97079 - DNA, 1758 bp, Arabidopsis thaliana
  misc_feature (1)..(1758): Ceres Seq. ID no. 12736002
  misc_feature (1)..(1758): Ortholog of  Ceres SEQ ID NO 15179918 as cited in SEQ ID NO 57077
atgaaaccattcgtaatcaggaaccttccaagatttcaatcaactcttagatcttcgcttctctacacaaatcatcgcccctcttctcgattctctctctctactcgtcgattcaccaccggagccacctacattcgccgatggaaagcaacggcggcgcagacactcaaactctccgccgtgaactccacggtgatgatgaaaccggcgaagattgcgttggatcaatttatagcttctctatttacgtttctgcttctctacattttgcgtcggagtagtaataagaataagaagaatcgtggactcgtcgtttcccaaaacgataccgtatccaaaaatcttgaaacggaggttgattctggcactgatgtgatcatcgtcggagctggtgtcgccggttccgctcttgctcatactctcggcaaggaaggaagaagagtgcacgttatagaaagagatttttctgagcaagacagaatcgttggtgaattgcttcaacctggtggttatttgaagttaatagaacttggacttgaagattgtgtgaagaagattgatgctcaacgagttcttggttatgttctctttaaagatgggaagcatactaaacttgcttaccccttggaaacgtttgattcggatgtagccgggagaagtttccataatgggagatttgtacagagaatgcgagaaaaagcccttactctttcaaatgtacgattggaacaaggaacggttacgtcgttgcttgaagaacacgggacaattaaaggggttcgatacagaacaaaagagggcaatgagtttagatcatttgctcctctcacaattgtatgtgatggttgtttctccaacttgcgtcgctctctttgcaaacctaaggtggatgtgccatctacttttgtgggtcttgtcttggagaactgtgaacttccatttgcaaatcacgggcacgttgttctcggtgacccatcacccatcttaatgtatcccatcagcagttctgaagtccgttgcttagtagatgtaccgggtcaaaaacttcctcccattgcaaatggtgaaatggcaaagtatctgaaaacacgggttgcgcctcaagtaccaaccaaggtccgtgaagcattcatcaccgctgttgagaaaggtaatatcagaaccatgccaaaccgaagcatgccagctgatccgattcctactcctggagctcttcttcttggtgatgcattcaacatgagacatcctttaaccggtggtgggatgaccgttgcattggcggatatagttgtactccgtgatcttctaaggccaattcgcaaccttaatgacaaagaagctttgtctaagtatattgaatccttttacacactacgaaaacctgtagcttccaccattaatacattggcggatgcgttgtataaggtctttttagcatcttcagatgaagcaagaacggaaatgcgtgaagcttgcttcgactatcttagccttggaggtgttttctcatctggtccagttgcattgctctctggtttaaaccctcgtcctctgagtttagttctccacttctttgctgtggcgatctacgctgtttgtcgtttaatgctaccatttccttcgattgagagcttttggcttggagctaggataatctcgagtgcttcaagcatcatctttccaataattaaagcagagggagttagacaaatgttcttccctcgtacaatccctgccatataccgtgctcctccttaa

SEQ ID NO: 97080 - protein, 585 aa, Arabidopsis thaliana
  peptide (1)..(585): Ceres Seq. ID no. 12736003
MKPFVIRNLPRFQSTLRSSLLYTNHRPSSRFSLSTRRFTTGATYIRRWKATAAQTLKLSAVNSTVMMKPAKIALDQFIASLFTFLLLYILRRSSNKNKKNRGLVVSQNDTVSKNLETEVDSGTDVIIVGAGVAGSALAHTLGKEGRRVHVIERDFSEQDRIVGELLQPGGYLKLIELGLEDCVKKIDAQRVLGYVLFKDGKHTKLAYPLETFDSDVAGRSFHNGRFVQRMREKALTLSNVRLEQGTVTSLLEEHGTIKGVRYRTKEGNEFRSFAPLTIVCDGCFSNLRRSLCKPKVDVPSTFVGLVLENCELPFANHGHVVLGDPSPILMYPISSSEVRCLVDVPGQKLPPIANGEMAKYLKTRVAPQVPTKVREAFITAVEKGNIRTMPNRSMPADPIPTPGALLLGDAFNMRHPLTGGGMTVALADIVVLRDLLRPIRNLNDKEALSKYIESFYTLRKPVASTINTLADALYKVFLASSDEARTEMREACFDYLSLGGVFSSGPVALLSGLNPRPLSLVLHFFAVAIYAVCRLMLPFPSIESFWLGARIISSASSIIFPIIKAEGVRQMFFPRTIPAIYRAPP

SEQ ID NO: 97081 - protein, 520 aa, Arabidopsis thaliana
  peptide (1)..(520): Ceres Seq. ID no. 12736004
MMKPAKIALDQFIASLFTFLLLYILRRSSNKNKKNRGLVVSQNDTVSKNLETEVDSGTDVIIVGAGVAGSALAHTLGKEGRRVHVIERDFSEQDRIVGELLQPGGYLKLIELGLEDCVKKIDAQRVLGYVLFKDGKHTKLAYPLETFDSDVAGRSFHNGRFVQRMREKALTLSNVRLEQGTVTSLLEEHGTIKGVRYRTKEGNEFRSFAPLTIVCDGCFSNLRRSLCKPKVDVPSTFVGLVLENCELPFANHGHVVLGDPSPILMYPISSSEVRCLVDVPGQKLPPIANGEMAKYLKTRVAPQVPTKVREAFITAVEKGNIRTMPNRSMPADPIPTPGALLLGDAFNMRHPLTGGGMTVALADIVVLRDLLRPIRNLNDKEALSKYIESFYTLRKPVASTINTLADALYKVFLASSDEARTEMREACFDYLSLGGVFSSGPVALLSGLNPRPLSLVLHFFAVAIYAVCRLMLPFPSIESFWLGARIISSASSIIFPIIKAEGVRQMFFPRTIPAIYRAPP

SEQ ID NO: 97082 - protein, 519 aa, Arabidopsis thaliana
  peptide (1)..(519): Ceres Seq. ID no. 12736005
MKPAKIALDQFIASLFTFLLLYILRRSSNKNKKNRGLVVSQNDTVSKNLETEVDSGTDVIIVGAGVAGSALAHTLGKEGRRVHVIERDFSEQDRIVGELLQPGGYLKLIELGLEDCVKKIDAQRVLGYVLFKDGKHTKLAYPLETFDSDVAGRSFHNGRFVQRMREKALTLSNVRLEQGTVTSLLEEHGTIKGVRYRTKEGNEFRSFAPLTIVCDGCFSNLRRSLCKPKVDVPSTFVGLVLENCELPFANHGHVVLGDPSPILMYPISSSEVRCLVDVPGQKLPPIANGEMAKYLKTRVAPQVPTKVREAFITAVEKGNIRTMPNRSMPADPIPTPGALLLGDAFNMRHPLTGGGMTVALADIVVLRDLLRPIRNLNDKEALSKYIESFYTLRKPVASTINTLADALYKVFLASSDEARTEMREACFDYLSLGGVFSSGPVALLSGLNPRPLSLVLHFFAVAIYAVCRLMLPFPSIESFWLGARIISSASSIIFPIIKAEGVRQMFFPRTIPAIYRAPP

SEQ ID NO: 97083 - DNA, 1308 bp, Arabidopsis thaliana
  misc_feature (1)..(1308): Ceres Seq. ID no. 12736009
  misc_feature (1)..(1308): Ortholog of  Ceres SEQ ID NO 13663419 as cited in SEQ ID NO 66561
atgaaatcaacaccaaaattgctgcttttacttctgtttatcataaatcatcatgttgattcgggctctatcgtcaagtttcttcccggctttgaaggccctcttcctttcgaactcgaaaccgggtacattggtattggtgaggaagaggatgtgcaattgttctactactttataaagtctgagagaaatccaaaagaagaccctcttcttctctggttaagtggaggacctgggtgttcttctatcactggccttcttttcgagaatggacccttggctttgaagtccaaggtttacaatggaagtgtcccttctttggtctccactacatattcgtggacaaagacggcgaacataatattcttggatcagcctattggagctggcttctcctactcaagaatcccacttattgatacgcctagtgacacaggcgaagttaagaatatccatgagtttctccaaaagtggttaagcaagcatccacagttttcttccaatcctttctatgctagcggagattcttattccggtatgattgttccagccctcgttcaagaaatttcgaaaggaaattatatatgttgcaaacctcctataaatctacagggctatatactcgggaacccaataacatattttgaagtcgaccaaaactatcgcattccattttctcatggaatggcacttatttcagatgaactatacgagtcaattaggagagactgcaaaggaaattatttcaacgtggatccacgtaacacaaaatgtttgaaacttgttgaagaataccataagtgtaccgacgaactaaatgaattcaatatattatcaccagattgcgacacgacatctcctgattgctttttatatccatattatctccttggctactggatcaacgacgagagcgttcgcgatgctcttcatgttaataagagcagtattggaaaatgggagcgatgtacttatcaaaatagaatcccatacaacaaagacatcaataacagcataccataccatatgaataacagtattagtggctaccgatctctcatctacagtggtgatcatgatttggtggttcctttccttgcaactcaagcctggataaaatctctaaattactccatcattcatgaatggagaccttggatgattaaagatcaaatcgctggatacacgagaacttattccaataagatgacatttgctactgtcaaaggaagtgggcacacagcagagtataaaccaaacgagacttttatcatgtttcaaaggtggattagtggtcatgacctttaa

SEQ ID NO: 97084 - protein, 435 aa, Arabidopsis thaliana
  peptide (1)..(435): Ceres Seq. ID no. 12736010
MKSTPKLLLLLLFIINHHVDSGSIVKFLPGFEGPLPFELETGYIGIGEEEDVQLFYYFIKSERNPKEDPLLLWLSGGPGCSSITGLLFENGPLALKSKVYNGSVPSLVSTTYSWTKTANIIFLDQPIGAGFSYSRIPLIDTPSDTGEVKNIHEFLQKWLSKHPQFSSNPFYASGDSYSGMIVPALVQEISKGNYICCKPPINLQGYILGNPITYFEVDQNYRIPFSHGMALISDELYESIRRDCKGNYFNVDPRNTKCLKLVEEYHKCTDELNEFNILSPDCDTTSPDCFLYPYYLLGYWINDESVRDALHVNKSSIGKWERCTYQNRIPYNKDINNSIPYHMNNSISGYRSLIYSGDHDLVVPFLATQAWIKSLNYSIIHEWRPWMIKDQIAGYTRTYSNKMTFATVKGSGHTAEYKPNETFIMFQRWISGHDL

SEQ ID NO: 97085 - protein, 256 aa, Arabidopsis thaliana
  peptide (1)..(256): Ceres Seq. ID no. 12736011
MIVPALVQEISKGNYICCKPPINLQGYILGNPITYFEVDQNYRIPFSHGMALISDELYESIRRDCKGNYFNVDPRNTKCLKLVEEYHKCTDELNEFNILSPDCDTTSPDCFLYPYYLLGYWINDESVRDALHVNKSSIGKWERCTYQNRIPYNKDINNSIPYHMNNSISGYRSLIYSGDHDLVVPFLATQAWIKSLNYSIIHEWRPWMIKDQIAGYTRTYSNKMTFATVKGSGHTAEYKPNETFIMFQRWISGHDL

SEQ ID NO: 97086 - DNA, 1329 bp, Arabidopsis thaliana
  misc_feature (1)..(1329): Ceres Seq. ID no. 12736012
  misc_feature (1)..(1329): Ortholog of  Ceres SEQ ID NO 13582281 as cited in SEQ ID NO 51014
  misc_feature (1)..(1329): Ortholog of  Ceres SEQ ID NO 14315606 as cited in SEQ ID NO 53515
  misc_feature (1)..(1329): Ortholog of  Ceres SEQ ID NO 12617417 as cited in SEQ ID NO 65089
atggagccaacgttccatgcttttatgtttccctggtttgcttttggtcatatgattccttttctacatcttgcaaacaaactagctgagaaaggtcatcaaatcactttcttgctacctaagaaagcccaaaaacagttggaacatcacaatctgttcccagacagtattgtctttcaccctctcacaatccctcatgtcaatggcctccctgctggtgctgagacaacctcggatatctcaatctcgatggacaacttactgtcggaagccttggatctcactcgcgatcaggttgaagctgcggttcgtgctctgagaccggacttgatcttttttgattttgctcattggattccagaaattgccaaagagcatatgatcaagagtgtgagttacatgatagtatctgcaacaacaatagcttatacatttgcccctggtggtgtattaggtgttcccccaccaggttatccttcatcaaaggtgttgtaccgtgaaaacgatgctcatgccttagcaaccttatctatcttctacaagagactttatcatcagatcactacaggttttaagagctgtgacatcattgcattgaggacatgtaatgaaatcgaaggtaaattctgcgactatatatcaagtcaataccataagaaggttctcttgactggtccaatgctccctgagcaagacacaagtaaaccactagaagaacagttgagtcattttctgagcaggttcccaccgaggtcagtggtgttttgtgcacttggtagccagatcgttcttgaaaaggatcaattccaagaactctgcttagggatggagctgacaggtttaccgtttcttatagcggtaaagccaccgagaggatcatcgacggtcgaagaagggttaccagaagggttccaggagcgggtgaaagggcgtggtgtggtttggggaggatgggtgcaacaaccattgatattggatcatccgtcaataggctgctttgtgaaccattgtggtccgggaacaatatgggagtgtcttatgactgattgtcaaatggttttgcttccatttttaggtgatcaagttctcttcacaagattgatgaccgaggaattcaaggtgtctgtagaagtgtcgagagaaaaaacaggatggttttcaaaggagagcttgagcgatgcgatcaagtctgtgatggataaagatagcgacctcggaaagctagtgaggagtaaccacgccaaattgaaggagactcttggtagtcatggattattaactggttacgtggataaatttgtagaggaattgcaagagtatttgatttga

SEQ ID NO: 97087 - protein, 442 aa, Arabidopsis thaliana
  peptide (1)..(442): Ceres Seq. ID no. 12736013
MEPTFHAFMFPWFAFGHMIPFLHLANKLAEKGHQITFLLPKKAQKQLEHHNLFPDSIVFHPLTIPHVNGLPAGAETTSDISISMDNLLSEALDLTRDQVEAAVRALRPDLIFFDFAHWIPEIAKEHMIKSVSYMIVSATTIAYTFAPGGVLGVPPPGYPSSKVLYRENDAHALATLSIFYKRLYHQITTGFKSCDIIALRTCNEIEGKFCDYISSQYHKKVLLTGPMLPEQDTSKPLEEQLSHFLSRFPPRSVVFCALGSQIVLEKDQFQELCLGMELTGLPFLIAVKPPRGSSTVEEGLPEGFQERVKGRGVVWGGWVQQPLILDHPSIGCFVNHCGPGTIWECLMTDCQMVLLPFLGDQVLFTRLMTEEFKVSVEVSREKTGWFSKESLSDAIKSVMDKDSDLGKLVRSNHAKLKETLGSHGLLTGYVDKFVEELQEYLI

SEQ ID NO: 97088 - protein, 434 aa, Arabidopsis thaliana
  peptide (1)..(434): Ceres Seq. ID no. 12736014
MFPWFAFGHMIPFLHLANKLAEKGHQITFLLPKKAQKQLEHHNLFPDSIVFHPLTIPHVNGLPAGAETTSDISISMDNLLSEALDLTRDQVEAAVRALRPDLIFFDFAHWIPEIAKEHMIKSVSYMIVSATTIAYTFAPGGVLGVPPPGYPSSKVLYRENDAHALATLSIFYKRLYHQITTGFKSCDIIALRTCNEIEGKFCDYISSQYHKKVLLTGPMLPEQDTSKPLEEQLSHFLSRFPPRSVVFCALGSQIVLEKDQFQELCLGMELTGLPFLIAVKPPRGSSTVEEGLPEGFQERVKGRGVVWGGWVQQPLILDHPSIGCFVNHCGPGTIWECLMTDCQMVLLPFLGDQVLFTRLMTEEFKVSVEVSREKTGWFSKESLSDAIKSVMDKDSDLGKLVRSNHAKLKETLGSHGLLTGYVDKFVEELQEYLI

SEQ ID NO: 97089 - protein, 425 aa, Arabidopsis thaliana
  peptide (1)..(425): Ceres Seq. ID no. 12736015
MIPFLHLANKLAEKGHQITFLLPKKAQKQLEHHNLFPDSIVFHPLTIPHVNGLPAGAETTSDISISMDNLLSEALDLTRDQVEAAVRALRPDLIFFDFAHWIPEIAKEHMIKSVSYMIVSATTIAYTFAPGGVLGVPPPGYPSSKVLYRENDAHALATLSIFYKRLYHQITTGFKSCDIIALRTCNEIEGKFCDYISSQYHKKVLLTGPMLPEQDTSKPLEEQLSHFLSRFPPRSVVFCALGSQIVLEKDQFQELCLGMELTGLPFLIAVKPPRGSSTVEEGLPEGFQERVKGRGVVWGGWVQQPLILDHPSIGCFVNHCGPGTIWECLMTDCQMVLLPFLGDQVLFTRLMTEEFKVSVEVSREKTGWFSKESLSDAIKSVMDKDSDLGKLVRSNHAKLKETLGSHGLLTGYVDKFVEELQEYLI

SEQ ID NO: 97090 - DNA, 1314 bp, Arabidopsis thaliana
  misc_feature (1)..(1314): Ceres Seq. ID no. 12736023
  misc_feature (1)..(1314): Ortholog of  Ceres SEQ ID NO 13663419 as cited in SEQ ID NO 66561
atgagtttgatactaaagtttatgcttcttattctacttgtctcgagtcatcatgttcgttctggctccatcgtcaagtttcttcctggttttaaaggccctcttcctttcgaacttgaaaccgggtacattggtattggtgaggaagagaatgtacaatttttctactatttcatcaaatcagataagaacccacaagaagatcctcttattatatggttaaatggagggcctggatgttcttgtctcagtggtcttttctttgagaacggacctttggctttgaagaacaaggtttacaatggaagtgtcccttctttggtctctactacatattcatggacaaagacagcaaacataatattcttggatcagcctgtgggatctggcttctcttactcaaaaactccaattgaaagaactagtgacacaagtgaagttaagaagatccatgagtttcttcaaaagtggctaatcaagcatccacaatttttgtccaacccgttttacgttgttggagattcttattcgggcatgattgttcccgccctcgttcacgaaatctcaaaagggaattatatatgttgcaaccctcctataaatcttcagggttatgtgcttggaaacccgataacacatattgaatttgaacaaaactttcgtattccatatgctcatggaatgtcgttaatctctgatgaactctacgagtcattgaagagaatctgcaagggaaattatttcagtgtggatccaagtaacaaaaaatgtttgaagcttgttgaagaataccataagtgtactgacaacataaatagccatcatacattaatagcaaattgcgatgactcaaatacacaacacatatctcctgattgctattattatccatatcatctggttgaatgttgggccaacaacgagagtgttcgcgaagctcttcatgttgataaggggagtataggagaatggatacgagatcatcggggtattccatacaaaagcgacattagaagcagcataccttaccatatgaataacagcatcaatggctaccgatctcttatcttcagtggtgatcatgacatcacaatgcctttccaagcaactcaagcctggataaaatctctaaattactccatcattgatgactggaggccttggatgataaaaggtcaaatcgctggatacacgagaacttattccaataagatgacatttgctactgtcaaaggaggtggacacacggcagagtatctaccagaagagagttctatcatgttccaaaggtggataagtgggcagcctttgtaa

SEQ ID NO: 97091 - protein, 437 aa, Arabidopsis thaliana
  peptide (1)..(437): Ceres Seq. ID no. 12736024
MSLILKFMLLILLVSSHHVRSGSIVKFLPGFKGPLPFELETGYIGIGEEENVQFFYYFIKSDKNPQEDPLIIWLNGGPGCSCLSGLFFENGPLALKNKVYNGSVPSLVSTTYSWTKTANIIFLDQPVGSGFSYSKTPIERTSDTSEVKKIHEFLQKWLIKHPQFLSNPFYVVGDSYSGMIVPALVHEISKGNYICCNPPINLQGYVLGNPITHIEFEQNFRIPYAHGMSLISDELYESLKRICKGNYFSVDPSNKKCLKLVEEYHKCTDNINSHHTLIANCDDSNTQHISPDCYYYPYHLVECWANNESVREALHVDKGSIGEWIRDHRGIPYKSDIRSSIPYHMNNSINGYRSLIFSGDHDITMPFQATQAWIKSLNYSIIDDWRPWMIKGQIAGYTRTYSNKMTFATVKGGGHTAEYLPEESSIMFQRWISGQPL

SEQ ID NO: 97092 - protein, 430 aa, Arabidopsis thaliana
  peptide (1)..(430): Ceres Seq. ID no. 12736025
MLLILLVSSHHVRSGSIVKFLPGFKGPLPFELETGYIGIGEEENVQFFYYFIKSDKNPQEDPLIIWLNGGPGCSCLSGLFFENGPLALKNKVYNGSVPSLVSTTYSWTKTANIIFLDQPVGSGFSYSKTPIERTSDTSEVKKIHEFLQKWLIKHPQFLSNPFYVVGDSYSGMIVPALVHEISKGNYICCNPPINLQGYVLGNPITHIEFEQNFRIPYAHGMSLISDELYESLKRICKGNYFSVDPSNKKCLKLVEEYHKCTDNINSHHTLIANCDDSNTQHISPDCYYYPYHLVECWANNESVREALHVDKGSIGEWIRDHRGIPYKSDIRSSIPYHMNNSINGYRSLIFSGDHDITMPFQATQAWIKSLNYSIIDDWRPWMIKGQIAGYTRTYSNKMTFATVKGGGHTAEYLPEESSIMFQRWISGQPL

SEQ ID NO: 97093 - protein, 259 aa, Arabidopsis thaliana
  peptide (1)..(259): Ceres Seq. ID no. 12736026
MIVPALVHEISKGNYICCNPPINLQGYVLGNPITHIEFEQNFRIPYAHGMSLISDELYESLKRICKGNYFSVDPSNKKCLKLVEEYHKCTDNINSHHTLIANCDDSNTQHISPDCYYYPYHLVECWANNESVREALHVDKGSIGEWIRDHRGIPYKSDIRSSIPYHMNNSINGYRSLIFSGDHDITMPFQATQAWIKSLNYSIIDDWRPWMIKGQIAGYTRTYSNKMTFATVKGGGHTAEYLPEESSIMFQRWISGQPL

SEQ ID NO: 97094 - DNA, 1020 bp, Arabidopsis thaliana
  misc_feature (1)..(1020): Ceres Seq. ID no. 12736027
  misc_feature (1)..(1020): Ortholog of  Ceres SEQ ID NO 14314300 as cited in SEQ ID NO 57386
  misc_feature (1)..(1020): Ortholog of  Ceres SEQ ID NO 13596509 as cited in SEQ ID NO 62004
  misc_feature (1)..(1020): Ortholog of  Ceres SEQ ID NO 13659971 as cited in SEQ ID NO 67565
  misc_feature (1)..(1020): Ortholog of  Ceres SEQ ID NO 13500385 as cited in SEQ ID NO 67583
atggagaagtatgagatggtgaaggatttaggatttggtaatttcggattggctcggcttatgcgtaataagcaaacaaacgagcttgtggctgtcaaattcatcgatcgaggctacaagatagatgagaacgttgcaagagaaataatcaatcatagagctctcaaccatccgaatattgttcggtttaaagaggttgttttaactccgacacatcttggaatagtaatggagtatgcagctggaggagaactgttcgagcggatatctagcgtgggtcgatttagcgaagctgaggcaagatatttctttcaacaactcatttgtggagtccattacttacatgcattgcaaatatgccatagagatctgaaattagaaaacacattgcttgatggaagcccagcaccacgtttaaaaatttgtgattttggctactcaaagtcttctgttctgcactccaacccaaaatcaacggtgggaactccggcatatatagcaccggaagttttttgtcgatcggaatacgacggaaagtcagttgatgtgtggtcttgtggagtggccctctatgttatgttggtaggagcttatccattcgaagaccctaaagaccctcgcaatttccgaaaaactgttcagaaaataatggccgtaaactacaagattccaggatatgttcacatatccgaagactgcagaaagttactatctcgtatatttgttgccaatccgttacatagaagtacgcttaaagagattaagagtcatgcatggttcctaaagaatttgccaagagaattaaaggagccagcacaagcaatctattaccaaaggaatgttaatcttattaatttttctcctcaaagagtagaggagattatgaagatagttggtgaggcaagaaccattccaaacctttctcgcccggtcgaatcgcttggatcagataaaaaagatgatgatgaagaagaatatttggatgctaatgatgaagaatggtatgatgattacgcatag

SEQ ID NO: 97095 - protein, 339 aa, Arabidopsis thaliana
  peptide (1)..(339): Ceres Seq. ID no. 12736028
MEKYEMVKDLGFGNFGLARLMRNKQTNELVAVKFIDRGYKIDENVAREIINHRALNHPNIVRFKEVVLTPTHLGIVMEYAAGGELFERISSVGRFSEAEARYFFQQLICGVHYLHALQICHRDLKLENTLLDGSPAPRLKICDFGYSKSSVLHSNPKSTVGTPAYIAPEVFCRSEYDGKSVDVWSCGVALYVMLVGAYPFEDPKDPRNFRKTVQKIMAVNYKIPGYVHISEDCRKLLSRIFVANPLHRSTLKEIKSHAWFLKNLPRELKEPAQAIYYQRNVNLINFSPQRVEEIMKIVGEARTIPNLSRPVESLGSDKKDDDEEEYLDANDEEWYDDYA

SEQ ID NO: 97096 - protein, 334 aa, Arabidopsis thaliana
  peptide (1)..(334): Ceres Seq. ID no. 12736029
MVKDLGFGNFGLARLMRNKQTNELVAVKFIDRGYKIDENVAREIINHRALNHPNIVRFKEVVLTPTHLGIVMEYAAGGELFERISSVGRFSEAEARYFFQQLICGVHYLHALQICHRDLKLENTLLDGSPAPRLKICDFGYSKSSVLHSNPKSTVGTPAYIAPEVFCRSEYDGKSVDVWSCGVALYVMLVGAYPFEDPKDPRNFRKTVQKIMAVNYKIPGYVHISEDCRKLLSRIFVANPLHRSTLKEIKSHAWFLKNLPRELKEPAQAIYYQRNVNLINFSPQRVEEIMKIVGEARTIPNLSRPVESLGSDKKDDDEEEYLDANDEEWYDDYA

SEQ ID NO: 97097 - protein, 319 aa, Arabidopsis thaliana
  peptide (1)..(319): Ceres Seq. ID no. 12736030
MRNKQTNELVAVKFIDRGYKIDENVAREIINHRALNHPNIVRFKEVVLTPTHLGIVMEYAAGGELFERISSVGRFSEAEARYFFQQLICGVHYLHALQICHRDLKLENTLLDGSPAPRLKICDFGYSKSSVLHSNPKSTVGTPAYIAPEVFCRSEYDGKSVDVWSCGVALYVMLVGAYPFEDPKDPRNFRKTVQKIMAVNYKIPGYVHISEDCRKLLSRIFVANPLHRSTLKEIKSHAWFLKNLPRELKEPAQAIYYQRNVNLINFSPQRVEEIMKIVGEARTIPNLSRPVESLGSDKKDDDEEEYLDANDEEWYDDYA

SEQ ID NO: 97098 - DNA, 1632 bp, Arabidopsis thaliana
  misc_feature (1)..(1632): Ceres Seq. ID no. 12736047
  misc_feature (1)..(1632): Ortholog of  Ceres SEQ ID NO 13581273 as cited in SEQ ID NO 54551
  misc_feature (1)..(1632): Ortholog of  Ceres SEQ ID NO 13594209 as cited in SEQ ID NO 59089
  misc_feature (1)..(1632): Ortholog of  Ceres SEQ ID NO 14306857 as cited in SEQ ID NO 60035
  misc_feature (1)..(1632): Ortholog of  Ceres SEQ ID NO 13502874 as cited in SEQ ID NO 66298
  misc_feature (1)..(1632): Ortholog of  Ceres SEQ ID NO 12614124 as cited in SEQ ID NO 68392
atgataacaccaaaacttgaacttctttttttcatcatcatgttccacgtaaactctcgctttcgttataaattaagctataacttcgaactcccatgttcagttcaacacatttacaagttcttcgatctaatggaaacccatttcctaattttatctctcgccttcctctttttcatttctcttaaacttttgtttggtaaacggcatagcaagtttaacctaccaccaagtccggctaggccacttccgtttattggacaccttcacctcctaaaacagccgcttcaccgcacattcctctcattctctcaatcactaggtgatgccccgattttctccctccgcctcggaaaccatctcacggttgttgtctcttcctactccatcgctgaagaatgttttacaaaaaacgacattgttttggccaataggccaaagttcattctcgggaaacacattgagtacaacttcaccactatgaccagtgcgccttatggtgaccattggcgaaacctacgccgtatcggcaccctggagatcttttcgtcacacaagctcaacggctttttatctgtccgtaaagatgagatccgacacttgttattgcgcctctcaaaaaactcgcaacatggttttgcaaaggttgagatgagacaattgttttatgatttgactatcaacaacattcttcgaatggtggctgggaaacgattttatggagaggggacagaacaagatgaagttgcgcggcgagtgacacaactgattgacgagattgtgtacagggctggcgttgggaatgcagccgattatataccgattttgcgttggatcacagattttgagaaaggggtcaaggagttggcgagtcgggtcgatgagtttttgcagagtctggtggatgagagacgtgtgcataaacaaaagggtaacactatgatggatcacttgctttctctccaagaaactcagcctgattactatacagatgtcactcttaaaggaatcataattgttatgatacttgccgggactgaaacattagcagggactttagaatgggcgatgcttaatttgttgaaccatccagaagtattagagaaagcgaggaccgaaatcgataccgaagtcggttttgaccggttaatggatgaagctgatactaaaaatctgccttatctccaatggattgtgttggagaccttacgtctttacccggtagctccaacaaatattccacacatgacgtcagatgattgcatattggcaggatacgacgttccacgtgggtcgatgttattggtgaacgtatggtccatgcatagagacccgtctatatgggaagccccagaaatgttcaagccagagaggttcaaaaatgaaaagcttaatcagaagttgttgtcgtttgggtttggacgacgagcttgtcccggggttggcctagctcatcggttaatgagcttggctcttggatcgatggttcagtgtttcgaatggcagagaattggtgaagaatatgtagacactagagaagaacctatggccatgatgcgtcctgcgacaccgttgctagccatgtgtaaagctcgtcccattgtccataagtttctcgatgcttttgcttga

SEQ ID NO: 97099 - protein, 543 aa, Arabidopsis thaliana
  peptide (1)..(543): Ceres Seq. ID no. 12736048
MITPKLELLFFIIMFHVNSRFRYKLSYNFELPCSVQHIYKFFDLMETHFLILSLAFLFFISLKLLFGKRHSKFNLPPSPARPLPFIGHLHLLKQPLHRTFLSFSQSLGDAPIFSLRLGNHLTVVVSSYSIAEECFTKNDIVLANRPKFILGKHIEYNFTTMTSAPYGDHWRNLRRIGTLEIFSSHKLNGFLSVRKDEIRHLLLRLSKNSQHGFAKVEMRQLFYDLTINNILRMVAGKRFYGEGTEQDEVARRVTQLIDEIVYRAGVGNAADYIPILRWITDFEKGVKELASRVDEFLQSLVDERRVHKQKGNTMMDHLLSLQETQPDYYTDVTLKGIIIVMILAGTETLAGTLEWAMLNLLNHPEVLEKARTEIDTEVGFDRLMDEADTKNLPYLQWIVLETLRLYPVAPTNIPHMTSDDCILAGYDVPRGSMLLVNVWSMHRDPSIWEAPEMFKPERFKNEKLNQKLLSFGFGRRACPGVGLAHRLMSLALGSMVQCFEWQRIGEEYVDTREEPMAMMRPATPLLAMCKARPIVHKFLDAFA

SEQ ID NO: 97100 - protein, 530 aa, Arabidopsis thaliana
  peptide (1)..(530): Ceres Seq. ID no. 12736049
MFHVNSRFRYKLSYNFELPCSVQHIYKFFDLMETHFLILSLAFLFFISLKLLFGKRHSKFNLPPSPARPLPFIGHLHLLKQPLHRTFLSFSQSLGDAPIFSLRLGNHLTVVVSSYSIAEECFTKNDIVLANRPKFILGKHIEYNFTTMTSAPYGDHWRNLRRIGTLEIFSSHKLNGFLSVRKDEIRHLLLRLSKNSQHGFAKVEMRQLFYDLTINNILRMVAGKRFYGEGTEQDEVARRVTQLIDEIVYRAGVGNAADYIPILRWITDFEKGVKELASRVDEFLQSLVDERRVHKQKGNTMMDHLLSLQETQPDYYTDVTLKGIIIVMILAGTETLAGTLEWAMLNLLNHPEVLEKARTEIDTEVGFDRLMDEADTKNLPYLQWIVLETLRLYPVAPTNIPHMTSDDCILAGYDVPRGSMLLVNVWSMHRDPSIWEAPEMFKPERFKNEKLNQKLLSFGFGRRACPGVGLAHRLMSLALGSMVQCFEWQRIGEEYVDTREEPMAMMRPATPLLAMCKARPIVHKFLDAFA

SEQ ID NO: 97101 - protein, 499 aa, Arabidopsis thaliana
  peptide (1)..(499): Ceres Seq. ID no. 12736050
METHFLILSLAFLFFISLKLLFGKRHSKFNLPPSPARPLPFIGHLHLLKQPLHRTFLSFSQSLGDAPIFSLRLGNHLTVVVSSYSIAEECFTKNDIVLANRPKFILGKHIEYNFTTMTSAPYGDHWRNLRRIGTLEIFSSHKLNGFLSVRKDEIRHLLLRLSKNSQHGFAKVEMRQLFYDLTINNILRMVAGKRFYGEGTEQDEVARRVTQLIDEIVYRAGVGNAADYIPILRWITDFEKGVKELASRVDEFLQSLVDERRVHKQKGNTMMDHLLSLQETQPDYYTDVTLKGIIIVMILAGTETLAGTLEWAMLNLLNHPEVLEKARTEIDTEVGFDRLMDEADTKNLPYLQWIVLETLRLYPVAPTNIPHMTSDDCILAGYDVPRGSMLLVNVWSMHRDPSIWEAPEMFKPERFKNEKLNQKLLSFGFGRRACPGVGLAHRLMSLALGSMVQCFEWQRIGEEYVDTREEPMAMMRPATPLLAMCKARPIVHKFLDAFA

SEQ ID NO: 97102 - DNA, 2505 bp, Arabidopsis thaliana
  misc_feature (1)..(2505): Ceres Seq. ID no. 12736051
  misc_feature (1)..(2505): Ortholog of  Ceres SEQ ID NO 13584744 as cited in SEQ ID NO 69137
atggagaatttctgttttcaagactctgtttctctatttatcacgatcatggttcttgttcttctcccccgtctcagtctttctgatacttcgacgtacacccgtcctgagaatttttacgtcaactgtggatcggattctaatgtattttatggtggccagaccttcgtcggagataccaactcgagtactaactcagtttccttcaccaacaaaggaactgaagtcatcaacgaccaatcgtccgttgcgcctgaaatataccggacggttaggatatttagacacccttcttcttacaagttcaaacttgattctctgggtctgcactttgtgcgtctccatttctctgttgtgttttctcgggcagatcttttaactgctcggttcactgtctctgctacctctggttctaatcatcacttgaaaagtttctcgcctcagaatctcactaataccccacgagttgaagagtttctcctgatgatgaactcgctggagttcgaaattcgatttgtgcccgatcattcctctttagctctcatcaatgccatcgaagtgttctctgctcctgatgacctcgaaatcccatcagcttccgataagaatctgcatacgatttacagattaaacgtaggaggcgagaaaatcactccggataatgataccttgggacgaacttggctgcctgacgatgatgactttctctaccgaaaagattcagcgaggaacattaattcaacacaaacgcctaactacgtgggagggttaagttcagccacggactccactgctcctgatttcgtctacaagacagctaaagcaatgaaccgtagctcgaatgagcaggtggggatgttgatgaatgttacatggtcgttcaaggtcaaaagtaaccatagacacttcatcaggattcatttttctgatattttgagcaacttatcaaactccgactccgatttctatctctttgtaaatgggtattggcgagtagatgtaaagccttcagagcagcctaggttggcgagtccgttttttaaggatgtcgtgaatgtctctgatggttctggactcttgaatatcagtataggtaccaaggaggccaataaggatgctggttttctgaatggtctggagatgatggaggttttgagtaaatctggttctgattattcaaatagaagcagttcccgggttcacatcatcactggttgtgctgttgctgctgctgctgcatcagctttggtcttcagtttgctgtttatggtattcttgaagcggaggagatcgaagaagactaagccagaggttgagggcactgtatggtctcctttgccattgcacagaggtgggagttcagacaatagacctatctctcaataccacaactccccattacgcaacctacacttaggcttaacgattcccttcacagacattctaagcgctacaaacaacttcgacgagcagttgttgatcgggaaaggcgggtttggctacgtttacaaagctattcttcccgatggaaccaaagccgctatcaaacgaggcaaaaccggctcaggacaagggatcttagagtttcaaaccgagattcaagtcctctcaagaatccgacatagacacctcgtctcgctaacgggatactgcgaagaaaactccgaaatgatcctcgtctacgagtttatggagaaaggtacactcaaagaacatctatacggctcgaatctaccttcattaacatggaaacaaagactagagatatgcattggagcagctagaggtttagattatctccacagtagtggctcagaaggagcaatcattcacagagacgtcaaatcaacaaacatattactagacgagcacaatatagcaaaagtcgcagatttcggattatcgaaaattcataatcaagatgaaagcaatatcagcataaacatcaaaggaacattcggttacttggatccagaatatctccaaacacataaattaacagagaaatcagatgtttacgcattcggagtcgtcctcctcgaggtactgttcgcgagaccagctatagatccttatcttcctcacgaagaagtgaatctatcggaatgggtgatgttctgcaaatcaaaaggtacaatcgatgagatcttagatccgagtttgataggtcaaattgagacgaattcgttgaagaaattcatggaaattgctgagaaatgtttgaaagagtatggagatgagagaccgagtatgagggatgtgatttgggatcttgagtatgttcttcagctacagatgatgacgaatcgtcgagaggctcatgaagaagatagtacggcgattaattccggtggttcgttggttgctccgaggttgatggtgagtgattcgtttagtacgaactcgatatttcagaatggtgatgaatcgaagaacagatttggatttacagattcatcggagactcgagttttttcgcagttgaagatctctgatgcaagatga

SEQ ID NO: 97103 - protein, 834 aa, Arabidopsis thaliana
  peptide (1)..(834): Ceres Seq. ID no. 12736052
MENFCFQDSVSLFITIMVLVLLPRLSLSDTSTYTRPENFYVNCGSDSNVFYGGQTFVGDTNSSTNSVSFTNKGTEVINDQSSVAPEIYRTVRIFRHPSSYKFKLDSLGLHFVRLHFSVVFSRADLLTARFTVSATSGSNHHLKSFSPQNLTNTPRVEEFLLMMNSLEFEIRFVPDHSSLALINAIEVFSAPDDLEIPSASDKNLHTIYRLNVGGEKITPDNDTLGRTWLPDDDDFLYRKDSARNINSTQTPNYVGGLSSATDSTAPDFVYKTAKAMNRSSNEQVGMLMNVTWSFKVKSNHRHFIRIHFSDILSNLSNSDSDFYLFVNGYWRVDVKPSEQPRLASPFFKDVVNVSDGSGLLNISIGTKEANKDAGFLNGLEMMEVLSKSGSDYSNRSSSRVHIITGCAVAAAAASALVFSLLFMVFLKRRRSKKTKPEVEGTVWSPLPLHRGGSSDNRPISQYHNSPLRNLHLGLTIPFTDILSATNNFDEQLLIGKGGFGYVYKAILPDGTKAAIKRGKTGSGQGILEFQTEIQVLSRIRHRHLVSLTGYCEENSEMILVYEFMEKGTLKEHLYGSNLPSLTWKQRLEICIGAARGLDYLHSSGSEGAIIHRDVKSTNILLDEHNIAKVADFGLSKIHNQDESNISINIKGTFGYLDPEYLQTHKLTEKSDVYAFGVVLLEVLFARPAIDPYLPHEEVNLSEWVMFCKSKGTIDEILDPSLIGQIETNSLKKFMEIAEKCLKEYGDERPSMRDVIWDLEYVLQLQMMTNRREAHEEDSTAINSGGSLVAPRLMVSDSFSTNSIFQNGDESKNRFGFTDSSETRVFSQLKISDAR

SEQ ID NO: 97104 - protein, 818 aa, Arabidopsis thaliana
  peptide (1)..(818): Ceres Seq. ID no. 12736053
MVLVLLPRLSLSDTSTYTRPENFYVNCGSDSNVFYGGQTFVGDTNSSTNSVSFTNKGTEVINDQSSVAPEIYRTVRIFRHPSSYKFKLDSLGLHFVRLHFSVVFSRADLLTARFTVSATSGSNHHLKSFSPQNLTNTPRVEEFLLMMNSLEFEIRFVPDHSSLALINAIEVFSAPDDLEIPSASDKNLHTIYRLNVGGEKITPDNDTLGRTWLPDDDDFLYRKDSARNINSTQTPNYVGGLSSATDSTAPDFVYKTAKAMNRSSNEQVGMLMNVTWSFKVKSNHRHFIRIHFSDILSNLSNSDSDFYLFVNGYWRVDVKPSEQPRLASPFFKDVVNVSDGSGLLNISIGTKEANKDAGFLNGLEMMEVLSKSGSDYSNRSSSRVHIITGCAVAAAAASALVFSLLFMVFLKRRRSKKTKPEVEGTVWSPLPLHRGGSSDNRPISQYHNSPLRNLHLGLTIPFTDILSATNNFDEQLLIGKGGFGYVYKAILPDGTKAAIKRGKTGSGQGILEFQTEIQVLSRIRHRHLVSLTGYCEENSEMILVYEFMEKGTLKEHLYGSNLPSLTWKQRLEICIGAARGLDYLHSSGSEGAIIHRDVKSTNILLDEHNIAKVADFGLSKIHNQDESNISINIKGTFGYLDPEYLQTHKLTEKSDVYAFGVVLLEVLFARPAIDPYLPHEEVNLSEWVMFCKSKGTIDEILDPSLIGQIETNSLKKFMEIAEKCLKEYGDERPSMRDVIWDLEYVLQLQMMTNRREAHEEDSTAINSGGSLVAPRLMVSDSFSTNSIFQNGDESKNRFGFTDSSETRVFSQLKISDAR

SEQ ID NO: 97105 - protein, 673 aa, Arabidopsis thaliana
  peptide (1)..(673): Ceres Seq. ID no. 12736054
MMNSLEFEIRFVPDHSSLALINAIEVFSAPDDLEIPSASDKNLHTIYRLNVGGEKITPDNDTLGRTWLPDDDDFLYRKDSARNINSTQTPNYVGGLSSATDSTAPDFVYKTAKAMNRSSNEQVGMLMNVTWSFKVKSNHRHFIRIHFSDILSNLSNSDSDFYLFVNGYWRVDVKPSEQPRLASPFFKDVVNVSDGSGLLNISIGTKEANKDAGFLNGLEMMEVLSKSGSDYSNRSSSRVHIITGCAVAAAAASALVFSLLFMVFLKRRRSKKTKPEVEGTVWSPLPLHRGGSSDNRPISQYHNSPLRNLHLGLTIPFTDILSATNNFDEQLLIGKGGFGYVYKAILPDGTKAAIKRGKTGSGQGILEFQTEIQVLSRIRHRHLVSLTGYCEENSEMILVYEFMEKGTLKEHLYGSNLPSLTWKQRLEICIGAARGLDYLHSSGSEGAIIHRDVKSTNILLDEHNIAKVADFGLSKIHNQDESNISINIKGTFGYLDPEYLQTHKLTEKSDVYAFGVVLLEVLFARPAIDPYLPHEEVNLSEWVMFCKSKGTIDEILDPSLIGQIETNSLKKFMEIAEKCLKEYGDERPSMRDVIWDLEYVLQLQMMTNRREAHEEDSTAINSGGSLVAPRLMVSDSFSTNSIFQNGDESKNRFGFTDSSETRVFSQLKISDAR

SEQ ID NO: 97106 - DNA, 2322 bp, Arabidopsis thaliana
  misc_feature (1)..(2322): Ceres Seq. ID no. 12736079
  misc_feature (1)..(2322): Ortholog of  Ceres SEQ ID NO 15168900 as cited in SEQ ID NO 217
atgaaaacacaatcagcttcaccgttcttcttcgtctccttcttcttcttcttcttcttcttctcttctctgtttcttctctcctctgctttaaactctgatggagttctcttactgagtttcaaatactctgttcttcttgatcctctctctttattacaatcatggaactacgaccacgacaatccttgttcatggcgaggtgtgttgtgtaataacgattcaagagttgttactttatctctcccaaactctaacctcgttggttcgattccttccgatctgggtttcctccaaaacctccaaagtcttaatctttccaataattcactcaatgggtcattaccggttgagtttttcgccgccgataagctccggtttcttgatttatcaaataacttgatctccggcgagatccctgtatcaatcggaggtttacacaacctccagacgttaaatctctccgataacatcttcaccgggaaactaccagctaacttagcgtctcttggaagcttaacggaggtttctctgaagaacaactacttctccggcgagtttcccggcggcggatggagatcggttcagtatctagacatttcttcaaatctaatcaacggttcactcccacctgatttctccggcgacaatctccgatacctgaatgtctcgtataaccaaatctccggagagattcctccgaatgttggtgccggttttcctcaaaacgccaccgttgatttctccttcaacaatttaaccggttcaatcccagattctccggtttaccttaaccagaaatcaatttcgttttccggaaacccgggtttatgcggaggtccgacccgaaacccgtgtcccattccttcatctccggccaccgtctcgccaccaacctctacacctgcactcgcagctatacctaaatcaatcgggtctaatcgagaaaccgaaccgaacaacaactcaaatcctcgaaccgggttaagaccaggagttataatcggaatcatagtcggagatatcgccggaatcggaatcctcgctcttatcttcttctacgtttataaatacaaaaacaacaagacagtggagaagaagaacaatcatagcctagaagctcatgaagctaaagacacaacttcgttatcaccatcatcatcaacaactacatcttcttcatctccagaacaatcaagcagatttgcaaaatggtcatgtctccgtaagaatcaagaaaccgatgaaaccgaagaagaagacgaagaaaatcaacggtcaggagagattggagagaataagaaagggactttagtaaccattgatggaggagagaaagagcttgaagttgaaactttgcttaaggcttctgcttacattttaggagccactggttcgagtataatgtacaagactgttcttgaggacggtacggttctcgcggttcgtcggttaggtgagaatggtttgagtcaacaacgccggtttaaagactttgaggcacatattcgagctattggtaaattggttcacccgaatttggtacgtcttcgtggattctattggggcaccgacgagaaattggtcatttacgattttgttcctaacggcagtctcgtcaacgcccgttacaggaaaggagggtcttcgccgtgccatttaccgtgggagactcggctcaagatagtaaaaggtttggctcgtgggcttgcttacctccacgacaagaaacatgtgcacggtaacttgaagcctagtaacatactcttgggccaagatatggagcccaagatcggagatttcgggctcgaaaggcttctcgccggggatactagctataaccgagctagtggatcatctcggattttcagtagcaagcgattgacagcatcctcgcgtgaatttggtaccatcgggcccacaccgagcccaagtccaagctccgttgggcccatatctccctattgcgcacccgagtcgctccgcaatctcaaaccaaacccgaaatgggatgtgtttgggtttggagtgatcctcctcgagctgctcacgggaaaaatagtgtcgatagacgaggtgggggtaggaaatgggctgaccgtagaggacgggaaccgggcgctaataatggctgatgtagcgatccgctccgaattggaaggcaaagaggactttttacttggccttttcaaattgggatatagttgtgcatctcaaattccacaaaagagaccgaccatgaaagaggcgttagtagtgtttgaaagatatcctattagctcatcggctaagagtccatcgtaccattacggacactattaa

SEQ ID NO: 97107 - protein, 773 aa, Arabidopsis thaliana
  peptide (1)..(773): Ceres Seq. ID no. 12736080
MKTQSASPFFFVSFFFFFFFFSSLFLLSSALNSDGVLLLSFKYSVLLDPLSLLQSWNYDHDNPCSWRGVLCNNDSRVVTLSLPNSNLVGSIPSDLGFLQNLQSLNLSNNSLNGSLPVEFFAADKLRFLDLSNNLISGEIPVSIGGLHNLQTLNLSDNIFTGKLPANLASLGSLTEVSLKNNYFSGEFPGGGWRSVQYLDISSNLINGSLPPDFSGDNLRYLNVSYNQISGEIPPNVGAGFPQNATVDFSFNNLTGSIPDSPVYLNQKSISFSGNPGLCGGPTRNPCPIPSSPATVSPPTSTPALAAIPKSIGSNRETEPNNNSNPRTGLRPGVIIGIIVGDIAGIGILALIFFYVYKYKNNKTVEKKNNHSLEAHEAKDTTSLSPSSSTTTSSSSPEQSSRFAKWSCLRKNQETDETEEEDEENQRSGEIGENKKGTLVTIDGGEKELEVETLLKASAYILGATGSSIMYKTVLEDGTVLAVRRLGENGLSQQRRFKDFEAHIRAIGKLVHPNLVRLRGFYWGTDEKLVIYDFVPNGSLVNARYRKGGSSPCHLPWETRLKIVKGLARGLAYLHDKKHVHGNLKPSNILLGQDMEPKIGDFGLERLLAGDTSYNRASGSSRIFSSKRLTASSREFGTIGPTPSPSPSSVGPISPYCAPESLRNLKPNPKWDVFGFGVILLELLTGKIVSIDEVGVGNGLTVEDGNRALIMADVAIRSELEGKEDFLLGLFKLGYSCASQIPQKRPTMKEALVVFERYPISSSAKSPSYHYGHY

SEQ ID NO: 97108 - DNA, 1640 bp, Arabidopsis thaliana
  misc_feature (1)..(1640): Ceres Seq. ID no. 12736097
  misc_feature (1)..(1640): Ortholog of  Ceres SEQ ID NO 14307732 as cited in SEQ ID NO 53934
aaaccaaattcccatgaatcaaaaaaatcatcagcgaccactgtgactccacttgagcgccggagccgccgccgtcgccgtcgcgtcggaactccattttcacgttcctcttcaaacacaccgacgcgtaaccagtttcgtccatggccgttgtactttcctactgcaaaccttcgcctcctcttcgtcgattccatcgtcgctgcggaaatttgtggaagaaagaaaatgttaggagttcaagacgatcatcttcggttactgctatgttttggaagtccaataagcctgcggaagtaaaggaattcgatatatcacttagagattacactctaactgaatcaaacattgaggaagctttggaaaacaagccgaagcaaaaggtgatttcactatcagttgtttcttcaatatttgagataccacaagctgaatgggatgcatgtgcgttggattcttctcaacctgaaagctataatccatttctaagttatggatttctttccagtttagaagatactggttgtgccgttcgggaaacaggttggatgccattacacattgttgcaaaggatgaatgtgagagtattttgggtgttgttccactttatctcaaaagccattcttatggcgaatttgtttttgatcattcttgggctgatgcataccgaagttttggcggaagatattatcctaaacttcagtgttgtgttcctttcaccccagttactggtcctaggattcttatccgtgataatccttgcaaagagcaagtttttgatgctattgtttctgccatgacggaattggcatcaaagttacaagtttcatctttgcacattacatttccgtctggagctgagtgggacaaattgaaagagaaaggcttctcacaaaggattggaatgcagtaccactggaaaaatcgtgattataaaaattttgacgagttcttgatggacatgaagcaaagcaaaaggaaaaatatccgacaggaacgcaaaaagattggtacccagaatttgaaaatgagacggctacaaggagatgatataaaggctaggcactgggattccttctatgatttctacaggaacacaactgataacaaatggggcacaccttatctcacaagggatttctttcacgacatggcatcgaagttgggagacaaggtattgcttgttttagctgaagaaaacgaggaacctgttgcaggagcattgaatctcattggaggagatactctatttgggagactatggggatgtcgtcccgactcctattatcctagtctccattttgaagcatgctattaccaggcaattgaagcagcgatagagcttaatctgaaaacggtagaagctggagcgcagggtgagcataagattcagcgaggctaccttcccgttaaaacatatagttgccattacatattcgatgaaggtttcaggcaagccatagacgagtttttagtgcgcgaatcaaatcagatggattatgtcatcagactgatgcatgaagatggacccttcaaagagaaaatagaatagatgcatttatatcttggttatcgcaaacattcttgtatatcttaattcttaggtttatgcgtcaatgtacattttaatttggctgct

SEQ ID NO: 97109 - protein, 469 aa, Arabidopsis thaliana
  peptide (1)..(469): Ceres Seq. ID no. 12736098
MAVVLSYCKPSPPLRRFHRRCGNLWKKENVRSSRRSSSVTAMFWKSNKPAEVKEFDISLRDYTLTESNIEEALENKPKQKVISLSVVSSIFEIPQAEWDACALDSSQPESYNPFLSYGFLSSLEDTGCAVRETGWMPLHIVAKDECESILGVVPLYLKSHSYGEFVFDHSWADAYRSFGGRYYPKLQCCVPFTPVTGPRILIRDNPCKEQVFDAIVSAMTELASKLQVSSLHITFPSGAEWDKLKEKGFSQRIGMQYHWKNRDYKNFDEFLMDMKQSKRKNIRQERKKIGTQNLKMRRLQGDDIKARHWDSFYDFYRNTTDNKWGTPYLTRDFFHDMASKLGDKVLLVLAEENEEPVAGALNLIGGDTLFGRLWGCRPDSYYPSLHFEACYYQAIEAAIELNLKTVEAGAQGEHKIQRGYLPVKTYSCHYIFDEGFRQAIDEFLVRESNQMDYVIRLMHEDGPFKEKIE

SEQ ID NO: 97110 - protein, 428 aa, Arabidopsis thaliana
  peptide (1)..(428): Ceres Seq. ID no. 12736099
MFWKSNKPAEVKEFDISLRDYTLTESNIEEALENKPKQKVISLSVVSSIFEIPQAEWDACALDSSQPESYNPFLSYGFLSSLEDTGCAVRETGWMPLHIVAKDECESILGVVPLYLKSHSYGEFVFDHSWADAYRSFGGRYYPKLQCCVPFTPVTGPRILIRDNPCKEQVFDAIVSAMTELASKLQVSSLHITFPSGAEWDKLKEKGFSQRIGMQYHWKNRDYKNFDEFLMDMKQSKRKNIRQERKKIGTQNLKMRRLQGDDIKARHWDSFYDFYRNTTDNKWGTPYLTRDFFHDMASKLGDKVLLVLAEENEEPVAGALNLIGGDTLFGRLWGCRPDSYYPSLHFEACYYQAIEAAIELNLKTVEAGAQGEHKIQRGYLPVKTYSCHYIFDEGFRQAIDEFLVRESNQMDYVIRLMHEDGPFKEKIE

SEQ ID NO: 97111 - protein, 334 aa, Arabidopsis thaliana
  peptide (1)..(334): Ceres Seq. ID no. 12736100
MPLHIVAKDECESILGVVPLYLKSHSYGEFVFDHSWADAYRSFGGRYYPKLQCCVPFTPVTGPRILIRDNPCKEQVFDAIVSAMTELASKLQVSSLHITFPSGAEWDKLKEKGFSQRIGMQYHWKNRDYKNFDEFLMDMKQSKRKNIRQERKKIGTQNLKMRRLQGDDIKARHWDSFYDFYRNTTDNKWGTPYLTRDFFHDMASKLGDKVLLVLAEENEEPVAGALNLIGGDTLFGRLWGCRPDSYYPSLHFEACYYQAIEAAIELNLKTVEAGAQGEHKIQRGYLPVKTYSCHYIFDEGFRQAIDEFLVRESNQMDYVIRLMHEDGPFKEKIE

SEQ ID NO: 97112 - DNA, 1031 bp, Arabidopsis thaliana
  misc_feature (1)..(1031): Ceres Seq. ID no. 12736105
  misc_feature (1)..(1031): Ortholog of  Ceres SEQ ID NO 15180793 as cited in SEQ ID NO 0
ggcaaagccaaattaagttgtcacaacaatgttgtctcttctttcttctgattcttctctattatcactcctctttctctttctcatcccttgtctctttatcacaagctatataggcttccctgtgttcttgctaaaactcatcggactcatcaaaatcaaagctgctcgagacaacgagaaacgtgatgagggaacttatgttgtccgcgaggatgggttacaaagagaactaatgccgagacacgtggcattcatactggatgggaaccggagatgggccaaacgggccggattgacgacgtcacaaggccacgaggcgggagctaaacggcttatagatatcgccgagctctgcttcgagttgggggttcatacagtctcagcttttgctttctccacagagaattggggaagagacaagattgagattgataacttgatgtctttgatccaacactaccgcaataagtccaacatcaaattcttccacagatcggaagttcgcgtttctgttatcgggaataaaacgaagatccctgaatctctcctcaaagaaatccatgagatagaggaagctaccaaaggctacaagaataaacatctcatcatggcagtagattacagcgggaaatttgatatcatgcatgcttgcaagagtcttgtgaagaaatcagaaaaagggttgatccgagaggaagatgtagacgaggcattgatcgagagagagcttttgacaaattgtagtgacttcccaagtcctgatttaatgattaggacaagtggagaacagaggattagtaacttcttcttgtggcaacttgcttattccgagcttttcttctcgccggtattttggcctgatttcgataaggataagcttctagaggctcttgcttcgtatcagcgtagggaaagacgatttggttgtcgggtttgatccacctttcatcctctctattatgttttgttcatctgtaatttctaccaaacttcttgcgtatcattgtaatttgtgtcggtaaaaatcg

SEQ ID NO: 97113 - protein, 303 aa, Arabidopsis thaliana
  peptide (1)..(303): Ceres Seq. ID no. 12736106
MLSLLSSDSSLLSLLFLFLIPCLFITSYIGFPVFLLKLIGLIKIKAARDNEKRDEGTYVVREDGLQRELMPRHVAFILDGNRRWAKRAGLTTSQGHEAGAKRLIDIAELCFELGVHTVSAFAFSTENWGRDKIEIDNLMSLIQHYRNKSNIKFFHRSEVRVSVIGNKTKIPESLLKEIHEIEEATKGYKNKHLIMAVDYSGKFDIMHACKSLVKKSEKGLIREEDVDEALIERELLTNCSDFPSPDLMIRTSGEQRISNFFLWQLAYSELFFSPVFWPDFDKDKLLEALASYQRRERRFGCRV

SEQ ID NO: 97114 - protein, 234 aa, Arabidopsis thaliana
  peptide (1)..(234): Ceres Seq. ID no. 12736107
MPRHVAFILDGNRRWAKRAGLTTSQGHEAGAKRLIDIAELCFELGVHTVSAFAFSTENWGRDKIEIDNLMSLIQHYRNKSNIKFFHRSEVRVSVIGNKTKIPESLLKEIHEIEEATKGYKNKHLIMAVDYSGKFDIMHACKSLVKKSEKGLIREEDVDEALIERELLTNCSDFPSPDLMIRTSGEQRISNFFLWQLAYSELFFSPVFWPDFDKDKLLEALASYQRRERRFGCRV

SEQ ID NO: 97115 - protein, 165 aa, Arabidopsis thaliana
  peptide (1)..(165): Ceres Seq. ID no. 12736108
MSLIQHYRNKSNIKFFHRSEVRVSVIGNKTKIPESLLKEIHEIEEATKGYKNKHLIMAVDYSGKFDIMHACKSLVKKSEKGLIREEDVDEALIERELLTNCSDFPSPDLMIRTSGEQRISNFFLWQLAYSELFFSPVFWPDFDKDKLLEALASYQRRERRFGCRV

SEQ ID NO: 97116 - DNA, 2466 bp, Arabidopsis thaliana
  misc_feature (1)..(2466): Ceres Seq. ID no. 12736111
  misc_feature (1)..(2466): Ortholog of  Ceres SEQ ID NO 13654989 as cited in SEQ ID NO 63117
  misc_feature (1)..(2466): Ortholog of  Ceres SEQ ID NO 13584744 as cited in SEQ ID NO 69137
aattcaaacgggagatttcgttttccgatcatcaccgatcaacttcttcgccggagaacaaataagtttcaaagcttcttttgacgattaaagtagaataaacagaaattgaatccatgaagaagataaagagaaacctcagagaagaagaagaaggaaggtgatgaatgttgagatcgatttttgatttcaatcaacgttcaacgaagatggtgatgatttctcataagttggatttgattttggttttcataatcgtaatcggaggatctattttccgacgagtttctgctaatttcaccgtaccttgtaacggaagatgcggtggattgactctgccttatcctttcgggttttcaaacggttgttcgatccgattcgattgctctgcggcggagaaaccgatgatcggagacttttccgttcaaaacgtgacggaaaacagtatatttgtcggtctctctcacaattgtactcggaagattgaagatatgaatccgcttttcggcgagaatttcgcaccaacgtcggagaacagtttcttgatggagaattgtaaccgtaccaccgatggttgctctatcaagcagaagtttctggagaatgtgctgaaactcaaaagttgtgatgctactggaaacataagttgtttttctttagatagtaattcgagttcgaagaactcagctaagtttttcagtatgaagacattaaggaacagctcgtgtagtttgttgttctcgtcgatagctttcgagtctgtaggtgtgaatgcgggtatagcgttagagtttgagcgagttcggttaggttggtggcttaagggaggttgcgagagcggaacttgcgcggctaacaccgattgtacagacgttgaaactcctcatggatatgcaggacaccggtgctcatgtcttgacggtttccacggtgacggatacaccaacccttgccagagagcactaccggagtgccgtggttccaagctcgtctggagacattgtagatctaatcttattactattgtaggaggaactgttggtggagcgtttttactagctgccttggcttttttcttcttttgtaagcggagacggtctactcctttgagaagtcatttaagcgcaaagcgtcttttgtctgaagctgcagggaactcgagtgtcgcctttttcccttacaaggaaatcgagaaagcgacagatggtttctctgaaaagcagaagttaggaataggtgcatatggtacggtctatagaggaaagctccaaaatgatgaatgggttgctatcaaaagacttagacatagagattcagaaagtcttgaccaagtcatgaatgagatcaagcttctttcctctgtgagtcacccgaatcttgtccgtctcttaggatgttgtatagaacaaggcgatccagttctcgtttatgagtacatgccgaatggaactctatctgaacatctacaaagagatagagggagtggtcttccatggaccttgcgtctcactgttgctactcaaacagctaaagcaatcgcgtatctccactcttcaatgaacccaccgatctatcaccgtgacatcaaatctaccaatatccttcttgattatgatttcaactccaaagttgcggatttcggactctctagactgggaatgacggaatcttctcacatatcaacggctcctcaagggactcctggttatcttgacccgcagtaccatcaatgctttcatctctctgataagagcgacgtctacagctttggagtcgtccttgccgagattataacgggattgaaagtcgttgatttcacacgtccacataccgaaatcaacctagcggctcttgctgttgacaaaatcgggtcaggttgtatcgatgagataatagacccgattcttgacttggatctcgacgcatggactctctcatccatacacacggtggctgagcttgcatttcgatgcttagccttccacagtgacatgagaccgacaatgaccgaagtagcggacgagcttgaacagataagactcagtggttggattccaagcatgagcttggattcaccagccggttctctccgttcatctgatcgaggaagcgaaagatcagttaaacaatcatcaataggaagcagaagagtcgttatccctcagaaacaacctgattgcctcgcatccgtcgaagagattagcgatagctcacccatctcagttcaagatccttggttaagtgcacaaagctcaccgtctacaaatacattgctcggtaacattccaagatgatagtatgatctcaaaacacgattaccactttcttgtttatataagtccctcttttgtgtagctttcacaatcattcagtgtttataatgctaagtagagagattaacaatggtgaaaacaggtttatacatgagttataatgtaaacgatcttgaaacaagatctttcaacc

SEQ ID NO: 97117 - protein, 708 aa, Arabidopsis thaliana; identical to SEQ ID NO: 74444
  peptide (1)..(708): Ceres Seq. ID no. 12736112

SEQ ID NO: 97118 - protein, 694 aa, Arabidopsis thaliana; identical to SEQ ID NO: 74445
  peptide (1)..(694): Ceres Seq. ID no. 12736113

SEQ ID NO: 97119 - protein, 692 aa, Arabidopsis thaliana; identical to SEQ ID NO: 74446
  peptide (1)..(692): Ceres Seq. ID no. 12736114

SEQ ID NO: 97120 - DNA, 540 bp, Arabidopsis thaliana
  misc_feature (1)..(540): Ceres Seq. ID no. 12736123
  misc_feature (1)..(540): Ortholog of  Ceres SEQ ID NO 13599613 as cited in SEQ ID NO 0
atgggaggaatacccgctgcgcttgctgctgacatattctcttgtaagatttctgctgttgtcttcttggcagctttcatgcctgacacaagaaacccacctgcttatgttttcgaaaagctgatcagaagtattccacgagaagaatggttggacaccgcgttcggaaggtacgggaatccagattgtcctcttgagtcagctcttttgggaccaaagttcatggccaagaaagtgtatcaacggtctccaatagaagatcttgaactggcgaaaatgttggtaagggtaaacccgttggttacgaataatctggcaggggcaagaagctttactggggaaggatatggatcggttacacgtatttatatcataagtggagaggataatatattacctgaggactaccagcgttggatgatccgcaacttcccggtgaaagaagtaatggagatcaaagatgcagatcatatggcaatgttctccaagcctaaggaactatgtgctcttctcttggagattgcagataaatacgcctaa

SEQ ID NO: 97121 - protein, 179 aa, Arabidopsis thaliana
  peptide (1)..(179): Ceres Seq. ID no. 12736124
MGGIPAALAADIFSCKISAVVFLAAFMPDTRNPPAYVFEKLIRSIPREEWLDTAFGRYGNPDCPLESALLGPKFMAKKVYQRSPIEDLELAKMLVRVNPLVTNNLAGARSFTGEGYGSVTRIYIISGEDNILPEDYQRWMIRNFPVKEVMEIKDADHMAMFSKPKELCALLLEIADKYA

SEQ ID NO: 97122 - protein, 153 aa, Arabidopsis thaliana
  peptide (1)..(153): Ceres Seq. ID no. 12736125
MPDTRNPPAYVFEKLIRSIPREEWLDTAFGRYGNPDCPLESALLGPKFMAKKVYQRSPIEDLELAKMLVRVNPLVTNNLAGARSFTGEGYGSVTRIYIISGEDNILPEDYQRWMIRNFPVKEVMEIKDADHMAMFSKPKELCALLLEIADKYA

SEQ ID NO: 97123 - protein, 105 aa, Arabidopsis thaliana
  peptide (1)..(105): Ceres Seq. ID no. 12736126
MAKKVYQRSPIEDLELAKMLVRVNPLVTNNLAGARSFTGEGYGSVTRIYIISGEDNILPEDYQRWMIRNFPVKEVMEIKDADHMAMFSKPKELCALLLEIADKYA

SEQ ID NO: 97124 - DNA, 819 bp, Arabidopsis thaliana
  misc_feature (1)..(819): Ceres Seq. ID no. 12736127
  misc_feature (1)..(819): Ortholog of  Ceres SEQ ID NO 13638849 as cited in SEQ ID NO 52046
  misc_feature (1)..(819): Ortholog of  Ceres SEQ ID NO 13599613 as cited in SEQ ID NO 0
atgtatgaaaacgggataagctttataatctctttacttatatgtggatgtgtgaagagtgaggagatgatgaagcaacatttcgtgctagtacatggttcgtgcctcggcgcgtggtgctggtacaaggtgaagccgctgctcgaggcttcgggccatcgtgtaaccgccttagacctagctgcttgtggtatagacacaaggtcgatcactgacatttccacatgcgaacaatattctgagccgttgattcagctaatgacttcattgccgaatgatgagaaggttgtgctcgtgggtcatagctatggaggtttgactttagccatagccatggataagtttcccgacaaaatctctgtctctgtcttcgtaacttctttcatgcccgacaccaaaaactcaccatcgttcgtcctggaaaagtttgcaagcaccatgacaccagaagattggatgggctctgagctcgagccgtatgtggtcttcagcgctgagttcacgaagcaccgtatcctccaactttctcctattgaagatcttgagcttagattgcttctaaagaggcctggttcattatttcttaatgatttatcgaggatgaagaacttttctgaaaaagggtatggatctgttcctcgagcttacattgtgagcaaagatgaccacaccatctcggaagaatatcaacgatggatgatcgataactatccgccgaatttagtgatagagatggaagggacggatcatttgccattgttttgcaaacctcaactactaagtgaccatctattggcaatcgccgacaaattctcttaa

SEQ ID NO: 97125 - protein, 272 aa, Arabidopsis thaliana
  peptide (1)..(272): Ceres Seq. ID no. 12736128
MYENGISFIISLLICGCVKSEEMMKQHFVLVHGSCLGAWCWYKVKPLLEASGHRVTALDLAACGIDTRSITDISTCEQYSEPLIQLMTSLPNDEKVVLVGHSYGGLTLAIAMDKFPDKISVSVFVTSFMPDTKNSPSFVLEKFASTMTPEDWMGSELEPYVVFSAEFTKHRILQLSPIEDLELRLLLKRPGSLFLNDLSRMKNFSEKGYGSVPRAYIVSKDDHTISEEYQRWMIDNYPPNLVIEMEGTDHLPLFCKPQLLSDHLLAIADKFS

SEQ ID NO: 97126 - protein, 250 aa, Arabidopsis thaliana
  peptide (1)..(250): Ceres Seq. ID no. 12736129
MMKQHFVLVHGSCLGAWCWYKVKPLLEASGHRVTALDLAACGIDTRSITDISTCEQYSEPLIQLMTSLPNDEKVVLVGHSYGGLTLAIAMDKFPDKISVSVFVTSFMPDTKNSPSFVLEKFASTMTPEDWMGSELEPYVVFSAEFTKHRILQLSPIEDLELRLLLKRPGSLFLNDLSRMKNFSEKGYGSVPRAYIVSKDDHTISEEYQRWMIDNYPPNLVIEMEGTDHLPLFCKPQLLSDHLLAIADKFS

SEQ ID NO: 97127 - protein, 249 aa, Arabidopsis thaliana
  peptide (1)..(249): Ceres Seq. ID no. 12736130
MKQHFVLVHGSCLGAWCWYKVKPLLEASGHRVTALDLAACGIDTRSITDISTCEQYSEPLIQLMTSLPNDEKVVLVGHSYGGLTLAIAMDKFPDKISVSVFVTSFMPDTKNSPSFVLEKFASTMTPEDWMGSELEPYVVFSAEFTKHRILQLSPIEDLELRLLLKRPGSLFLNDLSRMKNFSEKGYGSVPRAYIVSKDDHTISEEYQRWMIDNYPPNLVIEMEGTDHLPLFCKPQLLSDHLLAIADKFS

SEQ ID NO: 97128 - DNA, 1626 bp, Arabidopsis thaliana
  misc_feature (1)..(1626): Ceres Seq. ID no. 12736131
  misc_feature (1)..(1626): Ortholog of  Ceres SEQ ID NO 14313167 as cited in SEQ ID NO 54354
atgaagcagaaacatctactgcttctaggattcttattagcttattgcttcagctctgtttttgtgataaacgcagaggacccctaccttttcttcacttggactgttacttatggaaccagatcgcctttaggtgttcctcaacaggttattcttattaatggccagttccctggtcctccaattgaaggtgtaacaaacaataatatcgttgttaatgtcattaacaagcttgacgaacctttcctcatcacctggaacggaattaaacagaggaagatgtcgtggcaagacggtgttttgggaacaaactgtccgatccaaccaaaatcgagttggacttaccattttcaacttaaggaccaaatcggtacttatgcatactttgcttcaacgtcgatgcatagagcaagtggtgcttttggtgcacttaacgttaaccagaggtcagtcatcttcgttccttaccctaaaccagacgctgacttcactctcctcgtcagtgattggtacaagatgggacataaggaactgcaaaggaggctcgactcaagtcgtgctcttcctcctccggatggtcttctcatcaacggtgcttctaaaggtttagtctttaccggtcaacatggcaagatatataggtttcggatatcgaatgttgggatatcgacatcgattaactttaggatacaaggacacatgatgactctcgtcgaagtagaaggttctcacactctgcaagaggtctatgaatcgcttgacatacacgttggccagtctgtgaccgtgttggtcacattgaaggctccagtgaaggactacttcatcgtggcttcaactcggtttaccaaacctatactaaccaccacaggaatcctcagctaccaaggttccaaaatcagaccatcacatccccttcccattggtcctacttaccatatccattggtccatgaaacaagcaagaaccatcaggctaaatttgacggcgaatgcagcaaggccaaatccacaaggatcctttcactacggtactataccgataaatcgaacttttgttttagccaacggaagagccatgatcaatgggaaacttcggtacacagtgaaccgtgtgtcctacgttaacccagcaactccattgaaattagccgactggttcaacattcccggggtgttcaatttcaaaaccattatgaacattcccacaccaggaccctccattctcggaacttcggtctttgatgtggctctccatgagtacgtcgaattcgtgttccagaacaacgagggatctatacaatcttggcaccttgacggcactagtgcatatgttgttggatacgggtcgggcacatggaacatggctaagaggagaggttataatttggttgatgctgtttcaaggcacacttttcaggtttatccaatgtcgtggacgagcatattggtatcattagacaataagggaatgtggaatttgaggtcacaaatatggtcaaggagatacttaggacaagaactctatgttcgtgtatggaacaacgagaagtctctttacactgaatccgagcctcctgttaatgttctcttttgcggcaaggccaaacatccccgcttgatttag

SEQ ID NO: 97129 - protein, 541 aa, Arabidopsis thaliana
  peptide (1)..(541): Ceres Seq. ID no. 12736132
MKQKHLLLLGFLLAYCFSSVFVINAEDPYLFFTWTVTYGTRSPLGVPQQVILINGQFPGPPIEGVTNNNIVVNVINKLDEPFLITWNGIKQRKMSWQDGVLGTNCPIQPKSSWTYHFQLKDQIGTYAYFASTSMHRASGAFGALNVNQRSVIFVPYPKPDADFTLLVSDWYKMGHKELQRRLDSSRALPPPDGLLINGASKGLVFTGQHGKIYRFRISNVGISTSINFRIQGHMMTLVEVEGSHTLQEVYESLDIHVGQSVTVLVTLKAPVKDYFIVASTRFTKPILTTTGILSYQGSKIRPSHPLPIGPTYHIHWSMKQARTIRLNLTANAARPNPQGSFHYGTIPINRTFVLANGRAMINGKLRYTVNRVSYVNPATPLKLADWFNIPGVFNFKTIMNIPTPGPSILGTSVFDVALHEYVEFVFQNNEGSIQSWHLDGTSAYVVGYGSGTWNMAKRRGYNLVDAVSRHTFQVYPMSWTSILVSLDNKGMWNLRSQIWSRRYLGQELYVRVWNNEKSLYTESEPPVNVLFCGKAKHPRLI

SEQ ID NO: 97130 - protein, 448 aa, Arabidopsis thaliana
  peptide (1)..(448): Ceres Seq. ID no. 12736133
MSWQDGVLGTNCPIQPKSSWTYHFQLKDQIGTYAYFASTSMHRASGAFGALNVNQRSVIFVPYPKPDADFTLLVSDWYKMGHKELQRRLDSSRALPPPDGLLINGASKGLVFTGQHGKIYRFRISNVGISTSINFRIQGHMMTLVEVEGSHTLQEVYESLDIHVGQSVTVLVTLKAPVKDYFIVASTRFTKPILTTTGILSYQGSKIRPSHPLPIGPTYHIHWSMKQARTIRLNLTANAARPNPQGSFHYGTIPINRTFVLANGRAMINGKLRYTVNRVSYVNPATPLKLADWFNIPGVFNFKTIMNIPTPGPSILGTSVFDVALHEYVEFVFQNNEGSIQSWHLDGTSAYVVGYGSGTWNMAKRRGYNLVDAVSRHTFQVYPMSWTSILVSLDNKGMWNLRSQIWSRRYLGQELYVRVWNNEKSLYTESEPPVNVLFCGKAKHPRLI

SEQ ID NO: 97131 - protein, 408 aa, Arabidopsis thaliana
  peptide (1)..(408): Ceres Seq. ID no. 12736134
MHRASGAFGALNVNQRSVIFVPYPKPDADFTLLVSDWYKMGHKELQRRLDSSRALPPPDGLLINGASKGLVFTGQHGKIYRFRISNVGISTSINFRIQGHMMTLVEVEGSHTLQEVYESLDIHVGQSVTVLVTLKAPVKDYFIVASTRFTKPILTTTGILSYQGSKIRPSHPLPIGPTYHIHWSMKQARTIRLNLTANAARPNPQGSFHYGTIPINRTFVLANGRAMINGKLRYTVNRVSYVNPATPLKLADWFNIPGVFNFKTIMNIPTPGPSILGTSVFDVALHEYVEFVFQNNEGSIQSWHLDGTSAYVVGYGSGTWNMAKRRGYNLVDAVSRHTFQVYPMSWTSILVSLDNKGMWNLRSQIWSRRYLGQELYVRVWNNEKSLYTESEPPVNVLFCGKAKHPRLI

SEQ ID NO: 97132 - DNA, 1839 bp, Arabidopsis thaliana
  misc_feature (1)..(1839): Ceres Seq. ID no. 12736149
  misc_feature (1)..(1839): Ortholog of  Ceres SEQ ID NO 15169474 as cited in SEQ ID NO 66139
atgatctcgttttcatttcatctcctcgtcttcatcctcctaagtctctcttccttcgcaacagcacaacagccttatgtcggaatatcaacaactgattgctctgtttccgacaacacaacctctgttttcggctactcttgtaatggtctcaacaaaacttgccaagcttacgtcattttccgatctactccttctttctccaccgtcacctcaatctcttccctcttctctgtcgacccatctctcgtctcctccctcaatgacgcttcaccttcaacttctttcccttctggtcaacaagtcattatccctttaacttgttcttgcaccggtgacgattcacaatccaatattacatacacaatccaaccaaacgattcgtatttcgccattgctaacgacactcttcaggggctttcgacatgtcaagctttggcaaaacagaacaatgtttcttctcaatctttgtttcctggtatgaggatcgttgttccgatccgttgtgcgtgtcccacggctaaacagatcaacgaagatggcgtgaagtatctgatgagttatactgtggtttttgaagacactatcgcgatcatcagcgatagattcggggttgagacgagcaagactttaaaagctaacgaaatgtcttttgagaattctgaagttttccctttcacaacaatcctgatccctttggtgaatcctcctgcaaatactaactctctcattcctcctcctcctcctcctcctccacaatcggtttctcctcctccattgtcgccggatggtaggaaatcgaagaagaaaacatgggtctatgctcttgccggagtactaggaggagcattggttttgagtgtgatcggtgcagccatattttgcctgtctaagaagaaaacgaaaacgcaaacgcaagaggaaacgggaaacctcgatagcttcatgggcaagaaaccaccgatgtctgatcaagaattcgatccgctagatggtttgtcaggtatggtggtagaatccttaaaagtttacaaatttcacgagctgcaatcagctacaagcgatttcacatcgtctagctcgattggaggatcagggtacatcggaaaaatcaacggcgatggcgcaatgatcaagaaaatcgaaggaaacgcatcggaggaagtcaacttattgtctaaactaaaccatcttaacatcatccgtctctctggattctgtttccatgaaggagattggtacttagtctacgaacacgcttcaaacggaagcttaagtgaatggatccacacgacgaaatcgttactaagcttgacacaaaaactacaaatcgctttggatatagcaacagggctaaactatctacacaacttcgctgatcctccatacgttcacagagatttgaacagcaacaatgtgttcctcgacctcgagtttcgagcaaagattggtagtttaggttcagcaagatcaacgactgaagatttcgtgttgaccaagcacgtggaaggaacaagagggtacttagctccggagtatttggaacatggtttagtttcaactaagcttgatgtctatgcttttggagttgtcttgttggagattgttactggtaaagaagcttctgaattgaagaaagagatcgatgaaggtaaagctattgatgagattttgattcatggaagattgttacctgaaggattaacaagttttgttgagagattagtggtggattgtttaaagaaagatcatttgaatcgtccatcgatggatgaaaatgttatgtctttgtctaagatcttggcggctacgcagaactgggaagaatcgtcgtactaa

SEQ ID NO: 97133 - protein, 612 aa, Arabidopsis thaliana
  peptide (1)..(612): Ceres Seq. ID no. 12736150
MISFSFHLLVFILLSLSSFATAQQPYVGISTTDCSVSDNTTSVFGYSCNGLNKTCQAYVIFRSTPSFSTVTSISSLFSVDPSLVSSLNDASPSTSFPSGQQVIIPLTCSCTGDDSQSNITYTIQPNDSYFAIANDTLQGLSTCQALAKQNNVSSQSLFPGMRIVVPIRCACPTAKQINEDGVKYLMSYTVVFEDTIAIISDRFGVETSKTLKANEMSFENSEVFPFTTILIPLVNPPANTNSLIPPPPPPPPQSVSPPPLSPDGRKSKKKTWVYALAGVLGGALVLSVIGAAIFCLSKKKTKTQTQEETGNLDSFMGKKPPMSDQEFDPLDGLSGMVVESLKVYKFHELQSATSDFTSSSSIGGSGYIGKINGDGAMIKKIEGNASEEVNLLSKLNHLNIIRLSGFCFHEGDWYLVYEHASNGSLSEWIHTTKSLLSLTQKLQIALDIATGLNYLHNFADPPYVHRDLNSNNVFLDLEFRAKIGSLGSARSTTEDFVLTKHVEGTRGYLAPEYLEHGLVSTKLDVYAFGVVLLEIVTGKEASELKKEIDEGKAIDEILIHGRLLPEGLTSFVERLVVDCLKKDHLNRPSMDENVMSLSKILAATQNWEESSY

SEQ ID NO: 97134 - protein, 452 aa, Arabidopsis thaliana
  peptide (1)..(452): Ceres Seq. ID no. 12736151
MRIVVPIRCACPTAKQINEDGVKYLMSYTVVFEDTIAIISDRFGVETSKTLKANEMSFENSEVFPFTTILIPLVNPPANTNSLIPPPPPPPPQSVSPPPLSPDGRKSKKKTWVYALAGVLGGALVLSVIGAAIFCLSKKKTKTQTQEETGNLDSFMGKKPPMSDQEFDPLDGLSGMVVESLKVYKFHELQSATSDFTSSSSIGGSGYIGKINGDGAMIKKIEGNASEEVNLLSKLNHLNIIRLSGFCFHEGDWYLVYEHASNGSLSEWIHTTKSLLSLTQKLQIALDIATGLNYLHNFADPPYVHRDLNSNNVFLDLEFRAKIGSLGSARSTTEDFVLTKHVEGTRGYLAPEYLEHGLVSTKLDVYAFGVVLLEIVTGKEASELKKEIDEGKAIDEILIHGRLLPEGLTSFVERLVVDCLKKDHLNRPSMDENVMSLSKILAATQNWEESSY

SEQ ID NO: 97135 - protein, 427 aa, Arabidopsis thaliana
  peptide (1)..(427): Ceres Seq. ID no. 12736152
MSYTVVFEDTIAIISDRFGVETSKTLKANEMSFENSEVFPFTTILIPLVNPPANTNSLIPPPPPPPPQSVSPPPLSPDGRKSKKKTWVYALAGVLGGALVLSVIGAAIFCLSKKKTKTQTQEETGNLDSFMGKKPPMSDQEFDPLDGLSGMVVESLKVYKFHELQSATSDFTSSSSIGGSGYIGKINGDGAMIKKIEGNASEEVNLLSKLNHLNIIRLSGFCFHEGDWYLVYEHASNGSLSEWIHTTKSLLSLTQKLQIALDIATGLNYLHNFADPPYVHRDLNSNNVFLDLEFRAKIGSLGSARSTTEDFVLTKHVEGTRGYLAPEYLEHGLVSTKLDVYAFGVVLLEIVTGKEASELKKEIDEGKAIDEILIHGRLLPEGLTSFVERLVVDCLKKDHLNRPSMDENVMSLSKILAATQNWEESSY

SEQ ID NO: 97136 - DNA, 588 bp, Arabidopsis thaliana
  misc_feature (1)..(588): Ceres Seq. ID no. 12736153
  misc_feature (1)..(588): Ortholog of  Ceres SEQ ID NO 15177991 as cited in SEQ ID NO 53915
  misc_feature (1)..(588): Ortholog of  Ceres SEQ ID NO 15174347 as cited in SEQ ID NO 58577
  misc_feature (1)..(588): Ortholog of  Ceres SEQ ID NO 13596609 as cited in SEQ ID NO 63070
  misc_feature (1)..(588): Ortholog of  Ceres SEQ ID NO 12616895 as cited in SEQ ID NO 63909
  misc_feature (1)..(588): Ortholog of  Ceres SEQ ID NO 13598574 as cited in SEQ ID NO 69083
atgttccttttgattctccttgtgttctgtataacagtttttgcctttgttgttactaacaaaggagctggtgaagctattgaaggaaaaggttataaagagtataaacttggtgattactctacttggttacagaaacgtgttgagaatggtaaaaattggaataagattaggagttgtcttgtggagagcaaagtttgttctaagcttgaagccaagtttgttaatgttcctgtcaatagtttctacaaggaacatcttactgctcttcagtctggttgctgcaaaccttcagatgaatgtggtttcgagtacgtaaacccaacaacctggaccaagaacacaacgggaacacacactaatccagactgccaaacctgggacaacgcaaaagaaaagctctgcttcgattgtcaatcttgtaaagcgggtctactcgacaacgtcaaaagcgcttggaagaaagttgcaatcgttaacatcgtcttccttgtcttcctcatcattgtctactctgttggttgctgtgctttcaggaacaacaagagggatgacagttattcccgtacctacggatataagccttga

SEQ ID NO: 97137 - protein, 195 aa, Arabidopsis thaliana; identical to SEQ ID NO: 22951
  peptide (1)..(195): Ceres Seq. ID no. 12736154

SEQ ID NO: 97138 - DNA, 1401 bp, Arabidopsis thaliana
  misc_feature (1)..(1401): Ceres Seq. ID no. 12736163
  misc_feature (1)..(1401): Ortholog of  Ceres SEQ ID NO 14311870 as cited in SEQ ID NO 51574
  misc_feature (1)..(1401): Ortholog of  Ceres SEQ ID NO 15174583 as cited in SEQ ID NO 53693
  misc_feature (1)..(1401): Ortholog of  Ceres SEQ ID NO 13581563 as cited in SEQ ID NO 58942
  misc_feature (1)..(1401): Ortholog of  Ceres SEQ ID NO 13658707 as cited in SEQ ID NO 66286
  misc_feature (1)..(1401): Ortholog of  Ceres SEQ ID NO 13654528 as cited in SEQ ID NO 68080
atgattcggacaagtttttgtatattagtagttttggcaattagtagtttttcgatgatggaagctcgggatctagctagcaaaggaaagacaaatattgaatatatggcgttgaattgtcgaaaacataccgcagttttgacagaatttggagcagttggtgatggaaagacctcgaacacaaaagcgttcaaagaagccataaccaagcttgctccaaaggcagccgacggtggagtgcaactcattgttccaccaggaaaatggctaaccggaagtttcaacctcaccagccattttactttgttcatccaaaaaggtgcaactattcttgcttctcaggatgaatctgaatatccagtggttgcacctttgccatcatacggacaaggaagagatgcagcaggaccaacatttgctagtctaatctctggcacaaacctaactgatgttgttatcaccggtaacaacggaacgatcaacgggcaaggaaagtactggtgggtgaagtatcgcagtggtggatttaaggggatcacaagaccttacacaatcgagatcatcttctctcaaaacgttcagatctcgaacatcacaatcatcgattcgcctgcatggaatattcatcctgtatattgcaacaatgtcatcgtcaaaggcgttaccattcttgctcctatcgattctcctaataccgatggaatcaaccctgattcatgcaccaacacattgatagaagactgttacgtagtctcgggagacgattgcatcgccgtgaagagcggttgggatcagtttggtatcaaagtcggcatgccaactcaacaattgtctatccgacggctcacatgcatctctcccgacagcgctggaatagcactcggaagtgaaatgtccggtggaatcaaagacgttagaatcgaagacattacattacttcagacacaatccgctatccgaatcaaaaccgcggttggtcgtggtggttatgttaaggatattttcgccaggaggttcacaatgaaaacaatgaaatacgttttctggatgagcggtgcttataaccaacaccccgcttccggttttgatcccaaggctatgcccgtgattacgaatatcaactaccgtgacatgaccgcggataatgtcacgcaacctgcgaggctcgatgggttcaagaacgatcctttcacaaagatatgtatgtcgaatataaagattgatttggctgctgagccgaagaagttgttgtggaattgtacaagcatctctggagtttcgagcaaggttacacctaaaccgtgtagtttgttgccggagaaaggagcaccggtggactgtgcttttccggttgataagattcctattgaatctgttgtcctgaacaaatgctctgcttag

SEQ ID NO: 97139 - protein, 466 aa, Arabidopsis thaliana
  peptide (1)..(466): Ceres Seq. ID no. 12736164
MIRTSFCILVVLAISSFSMMEARDLASKGKTNIEYMALNCRKHTAVLTEFGAVGDGKTSNTKAFKEAITKLAPKAADGGVQLIVPPGKWLTGSFNLTSHFTLFIQKGATILASQDESEYPVVAPLPSYGQGRDAAGPTFASLISGTNLTDVVITGNNGTINGQGKYWWVKYRSGGFKGITRPYTIEIIFSQNVQISNITIIDSPAWNIHPVYCNNVIVKGVTILAPIDSPNTDGINPDSCTNTLIEDCYVVSGDDCIAVKSGWDQFGIKVGMPTQQLSIRRLTCISPDSAGIALGSEMSGGIKDVRIEDITLLQTQSAIRIKTAVGRGGYVKDIFARRFTMKTMKYVFWMSGAYNQHPASGFDPKAMPVITNINYRDMTADNVTQPARLDGFKNDPFTKICMSNIKIDLAAEPKKLLWNCTSISGVSSKVTPKPCSLLPEKGAPVDCAFPVDKIPIESVVLNKCSA

SEQ ID NO: 97140 - protein, 448 aa, Arabidopsis thaliana
  peptide (1)..(448): Ceres Seq. ID no. 12736165
MMEARDLASKGKTNIEYMALNCRKHTAVLTEFGAVGDGKTSNTKAFKEAITKLAPKAADGGVQLIVPPGKWLTGSFNLTSHFTLFIQKGATILASQDESEYPVVAPLPSYGQGRDAAGPTFASLISGTNLTDVVITGNNGTINGQGKYWWVKYRSGGFKGITRPYTIEIIFSQNVQISNITIIDSPAWNIHPVYCNNVIVKGVTILAPIDSPNTDGINPDSCTNTLIEDCYVVSGDDCIAVKSGWDQFGIKVGMPTQQLSIRRLTCISPDSAGIALGSEMSGGIKDVRIEDITLLQTQSAIRIKTAVGRGGYVKDIFARRFTMKTMKYVFWMSGAYNQHPASGFDPKAMPVITNINYRDMTADNVTQPARLDGFKNDPFTKICMSNIKIDLAAEPKKLLWNCTSISGVSSKVTPKPCSLLPEKGAPVDCAFPVDKIPIESVVLNKCSA

SEQ ID NO: 97141 - protein, 447 aa, Arabidopsis thaliana
  peptide (1)..(447): Ceres Seq. ID no. 12736166
MEARDLASKGKTNIEYMALNCRKHTAVLTEFGAVGDGKTSNTKAFKEAITKLAPKAADGGVQLIVPPGKWLTGSFNLTSHFTLFIQKGATILASQDESEYPVVAPLPSYGQGRDAAGPTFASLISGTNLTDVVITGNNGTINGQGKYWWVKYRSGGFKGITRPYTIEIIFSQNVQISNITIIDSPAWNIHPVYCNNVIVKGVTILAPIDSPNTDGINPDSCTNTLIEDCYVVSGDDCIAVKSGWDQFGIKVGMPTQQLSIRRLTCISPDSAGIALGSEMSGGIKDVRIEDITLLQTQSAIRIKTAVGRGGYVKDIFARRFTMKTMKYVFWMSGAYNQHPASGFDPKAMPVITNINYRDMTADNVTQPARLDGFKNDPFTKICMSNIKIDLAAEPKKLLWNCTSISGVSSKVTPKPCSLLPEKGAPVDCAFPVDKIPIESVVLNKCSA

SEQ ID NO: 97142 - DNA, 756 bp, Arabidopsis thaliana
  misc_feature (1)..(756): Ceres Seq. ID no. 12736171
  misc_feature (1)..(756): Ortholog of  Ceres SEQ ID NO 14313959 as cited in SEQ ID NO 57842
atggttaatgagcaaaagagatttgctttgtttcttgctacgagcgattcaacgttcgtgaagaaagcgtatggaggctatttcaacgtgtttgtttcgacttttggtgaagatggtgagcaatgggatctgtttcgagtgatcgacggcgagtttcctgacgataaggatctggataagtacgatggttttgttattagtggaagccttaacgatgcttttggtgatgatgattggatcgttaagctttgttctctttgccaaaagcttgacgacatgaagaagaaggttcttggtatctgctttggccaccagatactaagtagaatcaaaggagggaaagtcggaagggcgagtagaggtttggatatgggactaagaagcataacaatggttacagacgcggtgaagccaggtggttactttggaagccagattccgaaatcactagccattataaaatgccatcaagatgaagttcttgaactccctgaatcagccacattgcttgcttattcagacaaatacaacgttgagatgtgttcgtatggaaaccacttgctaggcatccaaggccatcctgagtacaacaaagagattcttttcgagatcattgatcgtgtcgtcaatttgaagttgatggagcaagattttgcggataaggcgaaggcaacgatggaaaacgcggaaccagatcggaagcaatggcagactctctgcaaaaactttctcaaaggaagatccgagcaagtttaa

SEQ ID NO: 97143 - protein, 251 aa, Arabidopsis thaliana
  peptide (1)..(251): Ceres Seq. ID no. 12736172
MVNEQKRFALFLATSDSTFVKKAYGGYFNVFVSTFGEDGEQWDLFRVIDGEFPDDKDLDKYDGFVISGSLNDAFGDDDWIVKLCSLCQKLDDMKKKVLGICFGHQILSRIKGGKVGRASRGLDMGLRSITMVTDAVKPGGYFGSQIPKSLAIIKCHQDEVLELPESATLLAYSDKYNVEMCSYGNHLLGIQGHPEYNKEILFEIIDRVVNLKLMEQDFADKAKATMENAEPDRKQWQTLCKNFLKGRSEQV

SEQ ID NO: 97144 - protein, 159 aa, Arabidopsis thaliana
  peptide (1)..(159): Ceres Seq. ID no. 12736173
MKKKVLGICFGHQILSRIKGGKVGRASRGLDMGLRSITMVTDAVKPGGYFGSQIPKSLAIIKCHQDEVLELPESATLLAYSDKYNVEMCSYGNHLLGIQGHPEYNKEILFEIIDRVVNLKLMEQDFADKAKATMENAEPDRKQWQTLCKNFLKGRSEQV

SEQ ID NO: 97145 - protein, 128 aa, Arabidopsis thaliana
  peptide (1)..(128): Ceres Seq. ID no. 12736174
MGLRSITMVTDAVKPGGYFGSQIPKSLAIIKCHQDEVLELPESATLLAYSDKYNVEMCSYGNHLLGIQGHPEYNKEILFEIIDRVVNLKLMEQDFADKAKATMENAEPDRKQWQTLCKNFLKGRSEQV

SEQ ID NO: 97146 - DNA, 2943 bp, Arabidopsis thaliana
  misc_feature (1)..(2943): Ceres Seq. ID no. 12736184
  misc_feature (1)..(2943): Ortholog of  Ceres SEQ ID NO 13656662 as cited in SEQ ID NO 65594
atggattattgttctttgttggttgtctcgttcttgatcactgttatgaccgttcttgcttctaaagagaacgatcatgagctaataaaaaatcctcaaaactctctaagcagttggatttcttcttcttcttcttcgtcttctatgctcgttgatgtttgtaattggtctggtgtgaagtgtaacaaagagagcactcaagtaatcgagcttgatatcagtggtagagatctcggcggcgaaatctcaccgtcgatcgctaatctaaccggtttaacggttcttgatctttcgagaaacttcttcgttggaaaaatcccacctgagataggttcattgcatgaaacattgaagcagctaagtctctctgagaatcttttacatggaaacattccacaagagcttggtttgcttaaccgtcttgtttatctcgatcttggaagcaaccggttaaacggttcaatcccggttcagctcttttgcaacggctcttcttcatctctacaatacatagacctttccaacaactctttaaccggagagatccctttaaattaccattgtcacctcaaagaacttcggtttcttcttctctggtccaacaagctcaccggtactgtcccgtcttctctctcaaactctacgaatctcaagtggatggatttggagtcaaatatgttaagtggagagttaccttctcaagtcataagcaagatgccacaacttcagtttctttacctttcttataaccatttcgttagccacaacaataacacaaacctcgaaccttttttcgcctctctcgccaattcctctgacctacaagagcttgagttagccggaaacagcctcggaggagagattacttcttccgtaaggcacctctctgtaaatcttgtgcagattcatcttgatcaaaaccgtatccatggctctatacctccagagatatcaaaccttttgaacctaactcttctaaacttgtcgagtaacctcttgtccggtcctatcccgcgtgagctctgtaagctaagcaagctcgaaagggtttatctctcgaataatcacctaaccggcgaaatccctatggaactcggggatattcctcgccttggtcttcttgatgtttctagaaacaatctttctggttcaatccctgatagtttcggaaacctttctcagctgagaagacttcttctgtacggaaaccatctctctggtactgtccctcaaagcctcggcaaatgtatcaatcttgagattcttgatctctctcacaacaacctcacagggaccatacctgttgaagttgtctccaatctcagaaacctgaagctgtatctcaacctctctagcaaccacttaagcggtccaatacctttggagctaagcaaaatggatatggttctctccgttgatctgtcttccaacgaactctcagggaagattccgcctcagctcggaagctgcattgcattagagcatctgaatctttcaagaaacggtttctccagtacgcttccttcatcattaggccaacttccatatctgaaagagctagatgtgtcttttaacagattaaccggagctataccgccttcttttcaacagtcttcgactctcaagcacttgaatttctccttcaacttgctctctggtaatgtatctgacaaaggatcattctctaagctgactattgagtcttttcttggagattctctcttgtgtggctctataaaaggcatgcaagcctgcaagaagaaacacaagtacccttctgttcttctaccggttctgttatcgttgatcgcaactcctgttctgtgtgtgttcgggtaccctttggtccaaagatcaagatttggaaagaatctaacagtgtatgccaaagaagaggtggaagacgaggaaaaacagaaccaaaatgacccgaagtacccgagaatatcgtatcagcagctcatagcagctactggaggtttcaatgcttctagcttgattggttcagggagatttggtcatgtttataagggagttctcagaaacaacacgaaggtcgcggtaaaagtacttgatccaaagaccgcactggagttctcggggagtttcaaaagagaatgtcagatcttgaagagaacaagacacaggaacttgatcaggatcatcactacgtgcagcaaacctggtttcaacgctcttgttctgccactgatgccaaatggaagcttggagaggcacttatacccgggagagtactcgagcaagaacttagatttgattcagttggtgaatatatgcagcgatgttgctgaaggaatagcttacttgcatcactattcacctgtaaaagttgttcactgtgatctcaaaccgagcaatatccttcttgatgatgaaatgaccgctctggttacggattttgggatttcaagattggttcaaggtgttgaagaaacagtttctacagatgattcagtgtcatttggctcaacagatggattgttatgtggatcagtcggttacattgcaccagaatacgggatggggaaacgcgcatcgacacatggagatgtgtacagttttggtgttctcctgctagagattgtaagcggaaggagaccaacagatgttcttgtcaatgaaggttcaagcttacatgagtttatgaagtcgcattaccccgattctctagagggaatcatcgaacaagcgttgagtagatggaaaccgcaagggaaaccagaaaaatgtgagaagctatggagagaagtcatattggaaatgattgagttaggattggtatgtactcaatacaatccttcaactaggcctgacatgcttgatgtcgcacacgaaatgggacggcttaaagaatatttatttgcttgtccttctctattgcatttttcatctcaagaaacacaaggagaagctagttcataa

SEQ ID NO: 97147 - protein, 980 aa, Arabidopsis thaliana
  peptide (1)..(980): Ceres Seq. ID no. 12736185
MDYCSLLVVSFLITVMTVLASKENDHELIKNPQNSLSSWISSSSSSSSMLVDVCNWSGVKCNKESTQVIELDISGRDLGGEISPSIANLTGLTVLDLSRNFFVGKIPPEIGSLHETLKQLSLSENLLHGNIPQELGLLNRLVYLDLGSNRLNGSIPVQLFCNGSSSSLQYIDLSNNSLTGEIPLNYHCHLKELRFLLLWSNKLTGTVPSSLSNSTNLKWMDLESNMLSGELPSQVISKMPQLQFLYLSYNHFVSHNNNTNLEPFFASLANSSDLQELELAGNSLGGEITSSVRHLSVNLVQIHLDQNRIHGSIPPEISNLLNLTLLNLSSNLLSGPIPRELCKLSKLERVYLSNNHLTGEIPMELGDIPRLGLLDVSRNNLSGSIPDSFGNLSQLRRLLLYGNHLSGTVPQSLGKCINLEILDLSHNNLTGTIPVEVVSNLRNLKLYLNLSSNHLSGPIPLELSKMDMVLSVDLSSNELSGKIPPQLGSCIALEHLNLSRNGFSSTLPSSLGQLPYLKELDVSFNRLTGAIPPSFQQSSTLKHLNFSFNLLSGNVSDKGSFSKLTIESFLGDSLLCGSIKGMQACKKKHKYPSVLLPVLLSLIATPVLCVFGYPLVQRSRFGKNLTVYAKEEVEDEEKQNQNDPKYPRISYQQLIAATGGFNASSLIGSGRFGHVYKGVLRNNTKVAVKVLDPKTALEFSGSFKRECQILKRTRHRNLIRIITTCSKPGFNALVLPLMPNGSLERHLYPGEYSSKNLDLIQLVNICSDVAEGIAYLHHYSPVKVVHCDLKPSNILLDDEMTALVTDFGISRLVQGVEETVSTDDSVSFGSTDGLLCGSVGYIAPEYGMGKRASTHGDVYSFGVLLLEIVSGRRPTDVLVNEGSSLHEFMKSHYPDSLEGIIEQALSRWKPQGKPEKCEKLWREVILEMIELGLVCTQYNPSTRPDMLDVAHEMGRLKEYLFACPSLLHFSSQETQGEASS

SEQ ID NO: 97148 - protein, 965 aa, Arabidopsis thaliana
  peptide (1)..(965): Ceres Seq. ID no. 12736186
MTVLASKENDHELIKNPQNSLSSWISSSSSSSSMLVDVCNWSGVKCNKESTQVIELDISGRDLGGEISPSIANLTGLTVLDLSRNFFVGKIPPEIGSLHETLKQLSLSENLLHGNIPQELGLLNRLVYLDLGSNRLNGSIPVQLFCNGSSSSLQYIDLSNNSLTGEIPLNYHCHLKELRFLLLWSNKLTGTVPSSLSNSTNLKWMDLESNMLSGELPSQVISKMPQLQFLYLSYNHFVSHNNNTNLEPFFASLANSSDLQELELAGNSLGGEITSSVRHLSVNLVQIHLDQNRIHGSIPPEISNLLNLTLLNLSSNLLSGPIPRELCKLSKLERVYLSNNHLTGEIPMELGDIPRLGLLDVSRNNLSGSIPDSFGNLSQLRRLLLYGNHLSGTVPQSLGKCINLEILDLSHNNLTGTIPVEVVSNLRNLKLYLNLSSNHLSGPIPLELSKMDMVLSVDLSSNELSGKIPPQLGSCIALEHLNLSRNGFSSTLPSSLGQLPYLKELDVSFNRLTGAIPPSFQQSSTLKHLNFSFNLLSGNVSDKGSFSKLTIESFLGDSLLCGSIKGMQACKKKHKYPSVLLPVLLSLIATPVLCVFGYPLVQRSRFGKNLTVYAKEEVEDEEKQNQNDPKYPRISYQQLIAATGGFNASSLIGSGRFGHVYKGVLRNNTKVAVKVLDPKTALEFSGSFKRECQILKRTRHRNLIRIITTCSKPGFNALVLPLMPNGSLERHLYPGEYSSKNLDLIQLVNICSDVAEGIAYLHHYSPVKVVHCDLKPSNILLDDEMTALVTDFGISRLVQGVEETVSTDDSVSFGSTDGLLCGSVGYIAPEYGMGKRASTHGDVYSFGVLLLEIVSGRRPTDVLVNEGSSLHEFMKSHYPDSLEGIIEQALSRWKPQGKPEKCEKLWREVILEMIELGLVCTQYNPSTRPDMLDVAHEMGRLKEYLFACPSLLHFSSQETQGEASS

SEQ ID NO: 97149 - protein, 932 aa, Arabidopsis thaliana; identical to SEQ ID NO: 87907
  peptide (1)..(932): Ceres Seq. ID no. 12736187

SEQ ID NO: 97150 - DNA, 1664 bp, Arabidopsis thaliana
  misc_feature (1)..(1664): Ceres Seq. ID no. 12736192
  misc_feature (1)..(1664): Ortholog of  Ceres SEQ ID NO 13594209 as cited in SEQ ID NO 59089
  misc_feature (1)..(1664): Ortholog of  Ceres SEQ ID NO 13502874 as cited in SEQ ID NO 66298
  misc_feature (1)..(1664): Ortholog of  Ceres SEQ ID NO 12614124 as cited in SEQ ID NO 68392
aagacgataacaacaaaatgtctcttttctccttccccatctccactgagttgcttccatggcttctcctacttttgattcctccacttcttatcttctttcttcttcgttcccctaaaaatcttccaccaggtccaccaagattacctatcttaggaaacatccaccagctcggatccctccctcaccgcagtctcagagatctctctctcaaatatggcccagtcatcaccgtctatctcggcagcgtccgtaccgtggttgttcactctccggagacggcggaggaagttctaaaacttcacgactccgagtgttgtactcgtccaaagctatctatcaccaaaagctttttctatgatggacttggtctagggtttactaaatggggtgattactacagagatgtgcggaaactctgtgttcttgaacttttctccgttaaacgagccaactcgttccggaacataagagaggaggagctgagtcgactcgttaactcgttttctgactcggcgtcatctggatcttccgttgaccttaccgcaaatttggctaagttcgtcgcgagctttacgtgtcgaatggcgtttggattgagttttcaaggaagtggaatggataacgagacgtttctggagctgttcacggaggcgaacagagtgatcggaaaattcgcggcggcggatatattccccgggtttggctggatcttggatcggatcagtggtcttgattctagccggaggaagagttttcaagatcttgatacgttttaccagaaagctattgttgaccatcgggagaagaagaaaactgaagaccgtgaagatctcattgacgtcttgctcaagttacagagtcaagaaaccaaacttggttcttcaagaatcaccgatacacatatcagagctattattatggatttgtttgtagcaggagtagacacatctgttatcactttggattggacaatggcagagctttcaagacatccaagagtaatgaagaaagtacaagccgagattcgtgaacacgtaggagacaaaggtatagtgacatacgatgatctcgaggctctagtctacatgaaaatggtgatcaaggagacttggaggttacacgcaccgagtcctattctgattccaagagaagcaatgactaacttcaagatcaagggttatgatatttaccctggaacgcgtattcatgtcaatgcttgggctattggacgtaaccctgatgtatggaaggatcctgatgagtttataccagagagatttgttgatagcaatgtggaaactaaagggacaagttttgagctgttgccgtttgggagtggacgcagaggttgtcccgcaatgtacgtgggattaagtacggtggagtacacattggcgaatcttttgtatcattttgattggaaagcgactgaggaagtgagtgttgaagaagcacctggtctcactagccacaggaagcatcctcttcaccttgttcctgttaatgtcatcaaccgcaagctttagagtgcggaaagcacaaacatttagttttcgacgaataaggcttaataatgtttctgtttattgaatagtcgatactttctgtttagctttcaaacaataattctcattacatgaataaaactttggcttatctat

SEQ ID NO: 97151 - protein, 508 aa, Arabidopsis thaliana
  peptide (1)..(508): Ceres Seq. ID no. 12736193
DDNNKMSLFSFPISTELLPWLLLLLIPPLLIFFLLRSPKNLPPGPPRLPILGNIHQLGSLPHRSLRDLSLKYGPVITVYLGSVRTVVVHSPETAEEVLKLHDSECCTRPKLSITKSFFYDGLGLGFTKWGDYYRDVRKLCVLELFSVKRANSFRNIREEELSRLVNSFSDSASSGSSVDLTANLAKFVASFTCRMAFGLSFQGSGMDNETFLELFTEANRVIGKFAAADIFPGFGWILDRISGLDSSRRKSFQDLDTFYQKAIVDHREKKKTEDREDLIDVLLKLQSQETKLGSSRITDTHIRAIIMDLFVAGVDTSVITLDWTMAELSRHPRVMKKVQAEIREHVGDKGIVTYDDLEALVYMKMVIKETWRLHAPSPILIPREAMTNFKIKGYDIYPGTRIHVNAWAIGRNPDVWKDPDEFIPERFVDSNVETKGTSFELLPFGSGRRGCPAMYVGLSTVEYTLANLLYHFDWKATEEVSVEEAPGLTSHRKHPLHLVPVNVINRKL

SEQ ID NO: 97152 - protein, 503 aa, Arabidopsis thaliana
  peptide (1)..(503): Ceres Seq. ID no. 12736194
MSLFSFPISTELLPWLLLLLIPPLLIFFLLRSPKNLPPGPPRLPILGNIHQLGSLPHRSLRDLSLKYGPVITVYLGSVRTVVVHSPETAEEVLKLHDSECCTRPKLSITKSFFYDGLGLGFTKWGDYYRDVRKLCVLELFSVKRANSFRNIREEELSRLVNSFSDSASSGSSVDLTANLAKFVASFTCRMAFGLSFQGSGMDNETFLELFTEANRVIGKFAAADIFPGFGWILDRISGLDSSRRKSFQDLDTFYQKAIVDHREKKKTEDREDLIDVLLKLQSQETKLGSSRITDTHIRAIIMDLFVAGVDTSVITLDWTMAELSRHPRVMKKVQAEIREHVGDKGIVTYDDLEALVYMKMVIKETWRLHAPSPILIPREAMTNFKIKGYDIYPGTRIHVNAWAIGRNPDVWKDPDEFIPERFVDSNVETKGTSFELLPFGSGRRGCPAMYVGLSTVEYTLANLLYHFDWKATEEVSVEEAPGLTSHRKHPLHLVPVNVINRKL

SEQ ID NO: 97153 - protein, 314 aa, Arabidopsis thaliana
  peptide (1)..(314): Ceres Seq. ID no. 12736195
MAFGLSFQGSGMDNETFLELFTEANRVIGKFAAADIFPGFGWILDRISGLDSSRRKSFQDLDTFYQKAIVDHREKKKTEDREDLIDVLLKLQSQETKLGSSRITDTHIRAIIMDLFVAGVDTSVITLDWTMAELSRHPRVMKKVQAEIREHVGDKGIVTYDDLEALVYMKMVIKETWRLHAPSPILIPREAMTNFKIKGYDIYPGTRIHVNAWAIGRNPDVWKDPDEFIPERFVDSNVETKGTSFELLPFGSGRRGCPAMYVGLSTVEYTLANLLYHFDWKATEEVSVEEAPGLTSHRKHPLHLVPVNVINRKL

SEQ ID NO: 97154 - DNA, 1470 bp, Arabidopsis thaliana
  misc_feature (1)..(1470): Ceres Seq. ID no. 12736233
  misc_feature (1)..(1470): Ortholog of  Ceres SEQ ID NO 12563809 as cited in SEQ ID NO 53287
aaagccatccctaatcctcgaattcttcctctctgagtttttattctgagatagagaaagatgtcaggtttagcttgtaattcgtgtaacaaagacttcgaagacgacgctgagcagaagtttcactacaaatccgaatggcaccgttacaatctcaagcgcaagatagctggtgttcctggagtaacagaggcactatttgaagctagacaagctgctatagctcaagagaaggttaaagctgttgaagcaccgatgctttatagttgtggaatctgtaacaaaggttacaggagttccaaggctcatgagcagcatcttaagtcgaagagtcatgttttgaaggcttcgacgagtactggagaggaggataaagcgatcatcaagcagcttccgcctcgtcgtgttgagaagaataacactgctcaattgaagggttcgattgaggaggaagagagtgaagatgaatggattgaggttgattcggatgaggatttggatgcggaaatgaatgaggatggtgaagaagaagatatggatgaagatggtattgaatttgagttggatccggcttgttgtttgatgtgtgataagaagcataagactatagagaaatgtatggttcatatgcataagtttcatgggttcttcattcctgatattgagtacttgaaggatcctaaagggtttctgacctacctcggtctaaaggtcaagagagacttcgtgtgtctgtactgcaatgaattgtgccatccatttagtagtttggaagctgttcgtaagcatatggacgccaaaggtcattgcaaagtgcattatggtgatggtggtgatgaagaagatgcagaacttgaagagttctatgactacagcagcagctatgtcaatggagacgaaaatcagatggttgtgtccggtgagtcagtgaacactgtagagctttttggtgggtctgagcttgtgatcaccaagagaaccgataacaaagtaacgtctaggactcttgggtctcgagaattcatgcgctactacaaacagaagccagcaccgtcttctcagaagcatattgtcaactctctaacctccaggtacaagatgatgggtctagcaacagtgcagtcaaaggaggccatagtgaggatgaaggtgatgagagagatgaacaaaagaggagcgaaaagcagtgtcaggctcggaatgaagagcaacgtcatcaggaatctgcccaacaatgtcacctattagtcttgctcctcgattttcaggtctctcctctttgtttgattttgtgaccagagttttggtgagtaaatctatctaagtttttcactagtactcaagtatcttaggcccatttgggtctctgttttgtctgatttagtcttttgaaaatgttacgttttggctgagtttgtatctcttgcccagtgctttgtacactctacattaatctatatttcatttggt

SEQ ID NO: 97155 - protein, 395 aa, Arabidopsis thaliana
  peptide (1)..(395): Ceres Seq. ID no. 12736234
MSGLACNSCNKDFEDDAEQKFHYKSEWHRYNLKRKIAGVPGVTEALFEARQAAIAQEKVKAVEAPMLYSCGICNKGYRSSKAHEQHLKSKSHVLKASTSTGEEDKAIIKQLPPRRVEKNNTAQLKGSIEEEESEDEWIEVDSDEDLDAEMNEDGEEEDMDEDGIEFELDPACCLMCDKKHKTIEKCMVHMHKFHGFFIPDIEYLKDPKGFLTYLGLKVKRDFVCLYCNELCHPFSSLEAVRKHMDAKGHCKVHYGDGGDEEDAELEEFYDYSSSYVNGDENQMVVSGESVNTVELFGGSELVITKRTDNKVTSRTLGSREFMRYYKQKPAPSSQKHIVNSLTSRYKMMGLATVQSKEAIVRMKVMREMNKRGAKSSVRLGMKSNVIRNLPNNVTY

SEQ ID NO: 97156 - protein, 330 aa, Arabidopsis thaliana
  peptide (1)..(330): Ceres Seq. ID no. 12736235
MLYSCGICNKGYRSSKAHEQHLKSKSHVLKASTSTGEEDKAIIKQLPPRRVEKNNTAQLKGSIEEEESEDEWIEVDSDEDLDAEMNEDGEEEDMDEDGIEFELDPACCLMCDKKHKTIEKCMVHMHKFHGFFIPDIEYLKDPKGFLTYLGLKVKRDFVCLYCNELCHPFSSLEAVRKHMDAKGHCKVHYGDGGDEEDAELEEFYDYSSSYVNGDENQMVVSGESVNTVELFGGSELVITKRTDNKVTSRTLGSREFMRYYKQKPAPSSQKHIVNSLTSRYKMMGLATVQSKEAIVRMKVMREMNKRGAKSSVRLGMKSNVIRNLPNNVTY

SEQ ID NO: 97157 - protein, 246 aa, Arabidopsis thaliana
  peptide (1)..(246): Ceres Seq. ID no. 12736236
MNEDGEEEDMDEDGIEFELDPACCLMCDKKHKTIEKCMVHMHKFHGFFIPDIEYLKDPKGFLTYLGLKVKRDFVCLYCNELCHPFSSLEAVRKHMDAKGHCKVHYGDGGDEEDAELEEFYDYSSSYVNGDENQMVVSGESVNTVELFGGSELVITKRTDNKVTSRTLGSREFMRYYKQKPAPSSQKHIVNSLTSRYKMMGLATVQSKEAIVRMKVMREMNKRGAKSSVRLGMKSNVIRNLPNNVTY

SEQ ID NO: 97158 - DNA, 2073 bp, Arabidopsis thaliana
  misc_feature (1)..(2073): Ceres Seq. ID no. 12736241
  misc_feature (1)..(2073): Ortholog of  Ceres SEQ ID NO 15177561 as cited in SEQ ID NO 53065
  misc_feature (1)..(2073): Ortholog of  Ceres SEQ ID NO 13595521 as cited in SEQ ID NO 59840
atggctccaaggtttgatttttcagatttatgggccaaggaaacaaggagaggtacaccagtagtggtgaaaatggagaatccaaattactcaatagttgaagtagaggaaccagactctgcatttcaaccaatggagaagagtagaggcaagaacgctaagcaagtgacttgggttttgcttcttaaagctcacaaagctgttggatgtctcacttgggtcgctacagtgttctggtctcttcttggttcagtcaagagacggctcagtttcactcatccactaggctctgagagacttggtagagacggatggcttttctcagctattaagctcttcttagttgcttcattagctattcttgcgtttgagttagttgcttattacagaggatggcattactttaaaaaccctaatttacacattcctacaagcaaacttgagatccagagcttgcttcatctgttctatgtcggttggttgagtttaagagctgattatattgctcctccaatcaaagctctctcaaagttttgtattgtactgttccttgtacagtctgtagatcgtttgattctttgcttaggctgtctttggatcaagtttaagaagattaagccgagaatcgatgaagagcattttcgaaatgatgattttgaaggatcagggtctgagtatccaatggttcttgttcagataccaatgtgcaatgagagagaggtatatgagcaatctatatctgctgtgtgtcagcttgactggccaaaagatcgactgctagttcaggttctagacgattcagatgatgaaagcatccaggagttaattagagatgaggttactaaatggagccaaaagggtgtcaacattatttaccggcatcgtttggttagaactggttacaaagctggtaacctcaaatctgcaatgagctgtgattatgtggaagcttacgagtttgttgcaattttcgatgcggatttccaacctaactcggatttccttaaactaaccgtgccacatttcaaggagaagcctgagttaggtctggttcaggctaggtgggcgtttgtgaacaaagacgagaacttgttgacccgtcttcaaaacatcaatctgtgttttcatttcgaggttgagcagcaggttaatggggtgttcttgaatttctttggtttcaatggaactgctggagtatggagaattaaagcccttgaggaatctggaggttggcttgaaaggacaaccgtcgaggatatggatatagctgttcgggctcatcttcatggatggaaattcatatatcttaacgatgtcaaggttctttgtgaagttcctgagtcatatgaagcatacaagaagcagcaacatcgatggcactcgggaccaatgcagctatttcgcttgtgtctgcgatcaatcttgacctctaagattgcaatgtggaagaaagcaaatctgatactactattcttccttctaaggaaactcatacttcctttctactccttcacattgttctgtgtaatccttccaatcaccatgttcgttccagaagccgagcttcctatttgggtcatctgctatgtaccgatattcatgtcactactcaacattcttcctgctccaaagtctttccctttcattgtcccttacctattgtttgagaacactatgtcggtcaccaagttcaacgcgatggtatctggattattccaactcggtagctcttacgaatggattgtaacaaagaaagcaggaagatcatcagagtctgatcttttagctctcactgataaagaatccgagaagatgccaaaccaaatcctaagaggagtttcagacagtgagctcttggagataagccaagttgaggaacagaaaaaacaaccggtttccgtgaagaaaaccaataagatattccacaaagagctcgcgctagcttttcttttgctcactgcagcagttaggagtcttttggcctcacaaggagtacatttctacttcctattgttccaaggtctcacctttcttcttgtgggtctcgatctcataggggagcagatgagttaa

SEQ ID NO: 97159 - protein, 690 aa, Arabidopsis thaliana
  peptide (1)..(690): Ceres Seq. ID no. 12736242
MAPRFDFSDLWAKETRRGTPVVVKMENPNYSIVEVEEPDSAFQPMEKSRGKNAKQVTWVLLLKAHKAVGCLTWVATVFWSLLGSVKRRLSFTHPLGSERLGRDGWLFSAIKLFLVASLAILAFELVAYYRGWHYFKNPNLHIPTSKLEIQSLLHLFYVGWLSLRADYIAPPIKALSKFCIVLFLVQSVDRLILCLGCLWIKFKKIKPRIDEEHFRNDDFEGSGSEYPMVLVQIPMCNEREVYEQSISAVCQLDWPKDRLLVQVLDDSDDESIQELIRDEVTKWSQKGVNIIYRHRLVRTGYKAGNLKSAMSCDYVEAYEFVAIFDADFQPNSDFLKLTVPHFKEKPELGLVQARWAFVNKDENLLTRLQNINLCFHFEVEQQVNGVFLNFFGFNGTAGVWRIKALEESGGWLERTTVEDMDIAVRAHLHGWKFIYLNDVKVLCEVPESYEAYKKQQHRWHSGPMQLFRLCLRSILTSKIAMWKKANLILLFFLLRKLILPFYSFTLFCVILPITMFVPEAELPIWVICYVPIFMSLLNILPAPKSFPFIVPYLLFENTMSVTKFNAMVSGLFQLGSSYEWIVTKKAGRSSESDLLALTDKESEKMPNQILRGVSDSELLEISQVEEQKKQPVSVKKTNKIFHKELALAFLLLTAAVRSLLASQGVHFYFLLFQGLTFLLVGLDLIGEQMS

SEQ ID NO: 97160 - protein, 666 aa, Arabidopsis thaliana
  peptide (1)..(666): Ceres Seq. ID no. 12736243
MENPNYSIVEVEEPDSAFQPMEKSRGKNAKQVTWVLLLKAHKAVGCLTWVATVFWSLLGSVKRRLSFTHPLGSERLGRDGWLFSAIKLFLVASLAILAFELVAYYRGWHYFKNPNLHIPTSKLEIQSLLHLFYVGWLSLRADYIAPPIKALSKFCIVLFLVQSVDRLILCLGCLWIKFKKIKPRIDEEHFRNDDFEGSGSEYPMVLVQIPMCNEREVYEQSISAVCQLDWPKDRLLVQVLDDSDDESIQELIRDEVTKWSQKGVNIIYRHRLVRTGYKAGNLKSAMSCDYVEAYEFVAIFDADFQPNSDFLKLTVPHFKEKPELGLVQARWAFVNKDENLLTRLQNINLCFHFEVEQQVNGVFLNFFGFNGTAGVWRIKALEESGGWLERTTVEDMDIAVRAHLHGWKFIYLNDVKVLCEVPESYEAYKKQQHRWHSGPMQLFRLCLRSILTSKIAMWKKANLILLFFLLRKLILPFYSFTLFCVILPITMFVPEAELPIWVICYVPIFMSLLNILPAPKSFPFIVPYLLFENTMSVTKFNAMVSGLFQLGSSYEWIVTKKAGRSSESDLLALTDKESEKMPNQILRGVSDSELLEISQVEEQKKQPVSVKKTNKIFHKELALAFLLLTAAVRSLLASQGVHFYFLLFQGLTFLLVGLDLIGEQMS

SEQ ID NO: 97161 - protein, 646 aa, Arabidopsis thaliana
  peptide (1)..(646): Ceres Seq. ID no. 12736244
MEKSRGKNAKQVTWVLLLKAHKAVGCLTWVATVFWSLLGSVKRRLSFTHPLGSERLGRDGWLFSAIKLFLVASLAILAFELVAYYRGWHYFKNPNLHIPTSKLEIQSLLHLFYVGWLSLRADYIAPPIKALSKFCIVLFLVQSVDRLILCLGCLWIKFKKIKPRIDEEHFRNDDFEGSGSEYPMVLVQIPMCNEREVYEQSISAVCQLDWPKDRLLVQVLDDSDDESIQELIRDEVTKWSQKGVNIIYRHRLVRTGYKAGNLKSAMSCDYVEAYEFVAIFDADFQPNSDFLKLTVPHFKEKPELGLVQARWAFVNKDENLLTRLQNINLCFHFEVEQQVNGVFLNFFGFNGTAGVWRIKALEESGGWLERTTVEDMDIAVRAHLHGWKFIYLNDVKVLCEVPESYEAYKKQQHRWHSGPMQLFRLCLRSILTSKIAMWKKANLILLFFLLRKLILPFYSFTLFCVILPITMFVPEAELPIWVICYVPIFMSLLNILPAPKSFPFIVPYLLFENTMSVTKFNAMVSGLFQLGSSYEWIVTKKAGRSSESDLLALTDKESEKMPNQILRGVSDSELLEISQVEEQKKQPVSVKKTNKIFHKELALAFLLLTAAVRSLLASQGVHFYFLLFQGLTFLLVGLDLIGEQMS

SEQ ID NO: 97162 - DNA, 589 bp, Arabidopsis thaliana
  misc_feature (1)..(589): Ceres Seq. ID no. 12736288
  misc_feature (1)..(589): Ortholog of  Ceres SEQ ID NO 15173990 as cited in SEQ ID NO 1070
  misc_feature (1)..(589): Ortholog of  Ceres SEQ ID NO 13594900 as cited in SEQ ID NO 52042
acaatttcctccttctcccgttataaactaaagactcgattttgtgttgattgttcgattcacgtaattaaggagatttttggatcaaaagatgggtagggtttttatggttgatctggaagggaacatctacatctgcaaactctgtaagacccatctttctacagaccaagacatcatgtccaagtcttttcaatgcaagaacggaagagcttatcttttcaacaacgttgtaaacgtatctgttggagagaaagaagacagaatgatgataactggactacacaacgtagttgacattttctgtgttggttgtggatcaaacgttggctggaaatacgagtttgcacatgaaaagagccagaagtataaggaaggaaaatctgttcttgaattatacaagatttcgggtcctcatgatagcaacgacttggttagtgatggagatgatgcttgattgaggctttttccttgtctagttatctctctctcagatttcttttaaatttgtacattcttgggcctagattttaattcgtttcaatatgcgtagtggaagaccggtttaataattaggggttttattttc

SEQ ID NO: 97163 - protein, 121 aa, Arabidopsis thaliana
  peptide (1)..(121): Ceres Seq. ID no. 12736289
MGRVFMVDLEGNIYICKLCKTHLSTDQDIMSKSFQCKNGRAYLFNNVVNVSVGEKEDRMMITGLHNVVDIFCVGCGSNVGWKYEFAHEKSQKYKEGKSVLELYKISGPHDSNDLVSDGDDA

SEQ ID NO: 97164 - protein, 116 aa, Arabidopsis thaliana
  peptide (1)..(116): Ceres Seq. ID no. 12736290
MVDLEGNIYICKLCKTHLSTDQDIMSKSFQCKNGRAYLFNNVVNVSVGEKEDRMMITGLHNVVDIFCVGCGSNVGWKYEFAHEKSQKYKEGKSVLELYKISGPHDSNDLVSDGDDA

SEQ ID NO: 97165 - protein, 92 aa, Arabidopsis thaliana
  peptide (1)..(92): Ceres Seq. ID no. 12736291
MSKSFQCKNGRAYLFNNVVNVSVGEKEDRMMITGLHNVVDIFCVGCGSNVGWKYEFAHEKSQKYKEGKSVLELYKISGPHDSNDLVSDGDDA

SEQ ID NO: 97166 - DNA, 2445 bp, Arabidopsis thaliana
  misc_feature (1)..(2445): Ceres Seq. ID no. 12736308
  misc_feature (1)..(2445): Ortholog of  Ceres SEQ ID NO 13654989 as cited in SEQ ID NO 63117
  misc_feature (1)..(2445): Ortholog of  Ceres SEQ ID NO 13584744 as cited in SEQ ID NO 69137
atgaagaggtttatcaactcaaccgtgacgttttccgtcaccgtcaccatcgccgttatcatcttcttcctcttgtctcccgtcacctccttaggttcaggctcaacttacgcagtcgtatacggctccgacaccgtctgcgcattgatctccggtcaacccacacaacgtatcctctgttacgacacgcgtcttaatatcaacgtcactctaaaccccggcgtctcattctcctcaatagccgccggagataatttcctctgcggtatacgctccggtggttacagccttctctgttgggataacatcggaagctactctccaaaccggaaacgaatctaccaaaacgacaacgttttactcgagactctctccgtcggggataaacaaatctgcgcaaccgttaacggtacaaattccttaaaatgctggagaggttccgtttccgatcaatcaaaacctccgaacgagagattccgatcaatttcatccggcgttggtttctcctgcggcgtttcgattcgaaataaccgaatcctttgctggggaaccgatccggttaaatcgaatcagatccaaaccggattcggaaacacgccgatggtgaccatctccgcaggtaaatcacacgcttgtggattaaacactactgggaatttgatttgcatcggaaacaacgattctggtcagctcaatgttattgctccagatcaacctaacctttactcatcatctctctctctcggatcaaatttcacctgcgcgatgcgaatctcgaataattctgtggtttgttggggcggaggagcagagagattcaacaatgtcacggattcgatctctttcgaatcgatttcctcgggtccgggtctaatttgcgggttgatttcaagtaatctctcaatcatgtgttggaatcctacaaatttctccagaatcttcctccctttcccagaagttttaccaggtccttgcgttgaatcatcatcatcctctctttgctcttgtggtgtttatccacaatctgataagctctgttctggtactggctcgatttgtaaatcatgtccgattcaatttccagcgagtcctccgagtcaatttcctcttccaccaccaccaccaccaccaccgccatcaccgtcaacttcatctccaccgtcgaaagctttaacaagaggattattagcgtttgcgatcgttggatcagttggagcatttgcagggatctgtagtgtggtttactgtttatggactggagtttgcttggggaagaagaaagttcataactcggttcaaccgacgataactcgcggtggttctaatagccggtctaacagttcgaatagccggtcgttatctataagacgtcaaggatcgagaatgctatcaatgaggaggcagagaagtggaacatcgtcgatgaagcacgccgataaagcggaagagttttcgttctccgagcttgcttcggctaccggaaacttctctctagagaacaaaatcggttcggggagctttggtgttgtttacagaggtaaactcaatgacgggagagaagtagcgatcaaacgcggggaagtaaacgcgaagatgaagaagtttcaagagaaagaaaccgcgtttgattcggaaatcgcgtttttatcgaggcttcatcataagcatttggtgagactagttggttactgcgaagaaagagaagagaagcttctcgtttacgattacatgaagaatggtgcgctttacgatcatctacacgacaagaacaacgtcgaaaaacatagtagcttgatcaattcttggaaaatgcggatcaaaatcgcgttagatgcggctagaggaatcgagtatctacataactacgcagtgccaccgattattcatagagatattaagtcgtctaacatcttgcttgactctaattgggtcgctagagtttcggatttcgggttatcattaatgggtccggtgctagggaaagatcataatccttatcaacgtccaacgaaagctgcggggacggtcggatatattgatccagagtattatagtcttaatgttttaacggataagagcgatgtgtatggactaggagtggtgttgttagaattgttgaccgggaaaagagcgatatttaggaacaatggtgatgtggaggaggaggaagggtgtgttccggtgcatttggtggattactcggttccggcgataacggctgatgagttgagtacaattttggatccgagagttggatcaccggagctaggtgaaggagatgcggtggagctggtggcttatacggctatgcattgtgtgaatgcggaagggagaaacaggccgacaatgacggatatagtagggaatttggagagagcattggatttgtgtggggatagtcatgggagtatctctagtggcatttgttctattgtctctgattga

SEQ ID NO: 97167 - protein, 814 aa, Arabidopsis thaliana
  peptide (1)..(814): Ceres Seq. ID no. 12736309
MKRFINSTVTFSVTVTIAVIIFFLLSPVTSLGSGSTYAVVYGSDTVCALISGQPTQRILCYDTRLNINVTLNPGVSFSSIAAGDNFLCGIRSGGYSLLCWDNIGSYSPNRKRIYQNDNVLLETLSVGDKQICATVNGTNSLKCWRGSVSDQSKPPNERFRSISSGVGFSCGVSIRNNRILCWGTDPVKSNQIQTGFGNTPMVTISAGKSHACGLNTTGNLICIGNNDSGQLNVIAPDQPNLYSSSLSLGSNFTCAMRISNNSVVCWGGGAERFNNVTDSISFESISSGPGLICGLISSNLSIMCWNPTNFSRIFLPFPEVLPGPCVESSSSSLCSCGVYPQSDKLCSGTGSICKSCPIQFPASPPSQFPLPPPPPPPPPSPSTSSPPSKALTRGLLAFAIVGSVGAFAGICSVVYCLWTGVCLGKKKVHNSVQPTITRGGSNSRSNSSNSRSLSIRRQGSRMLSMRRQRSGTSSMKHADKAEEFSFSELASATGNFSLENKIGSGSFGVVYRGKLNDGREVAIKRGEVNAKMKKFQEKETAFDSEIAFLSRLHHKHLVRLVGYCEEREEKLLVYDYMKNGALYDHLHDKNNVEKHSSLINSWKMRIKIALDAARGIEYLHNYAVPPIIHRDIKSSNILLDSNWVARVSDFGLSLMGPVLGKDHNPYQRPTKAAGTVGYIDPEYYSLNVLTDKSDVYGLGVVLLELLTGKRAIFRNNGDVEEEEGCVPVHLVDYSVPAITADELSTILDPRVGSPELGEGDAVELVAYTAMHCVNAEGRNRPTMTDIVGNLERALDLCGDSHGSISSGICSIVSD

SEQ ID NO: 97168 - protein, 614 aa, Arabidopsis thaliana
  peptide (1)..(614): Ceres Seq. ID no. 12736310
MVTISAGKSHACGLNTTGNLICIGNNDSGQLNVIAPDQPNLYSSSLSLGSNFTCAMRISNNSVVCWGGGAERFNNVTDSISFESISSGPGLICGLISSNLSIMCWNPTNFSRIFLPFPEVLPGPCVESSSSSLCSCGVYPQSDKLCSGTGSICKSCPIQFPASPPSQFPLPPPPPPPPPSPSTSSPPSKALTRGLLAFAIVGSVGAFAGICSVVYCLWTGVCLGKKKVHNSVQPTITRGGSNSRSNSSNSRSLSIRRQGSRMLSMRRQRSGTSSMKHADKAEEFSFSELASATGNFSLENKIGSGSFGVVYRGKLNDGREVAIKRGEVNAKMKKFQEKETAFDSEIAFLSRLHHKHLVRLVGYCEEREEKLLVYDYMKNGALYDHLHDKNNVEKHSSLINSWKMRIKIALDAARGIEYLHNYAVPPIIHRDIKSSNILLDSNWVARVSDFGLSLMGPVLGKDHNPYQRPTKAAGTVGYIDPEYYSLNVLTDKSDVYGLGVVLLELLTGKRAIFRNNGDVEEEEGCVPVHLVDYSVPAITADELSTILDPRVGSPELGEGDAVELVAYTAMHCVNAEGRNRPTMTDIVGNLERALDLCGDSHGSISSGICSIVSD

SEQ ID NO: 97169 - protein, 559 aa, Arabidopsis thaliana
  peptide (1)..(559): Ceres Seq. ID no. 12736311
MRISNNSVVCWGGGAERFNNVTDSISFESISSGPGLICGLISSNLSIMCWNPTNFSRIFLPFPEVLPGPCVESSSSSLCSCGVYPQSDKLCSGTGSICKSCPIQFPASPPSQFPLPPPPPPPPPSPSTSSPPSKALTRGLLAFAIVGSVGAFAGICSVVYCLWTGVCLGKKKVHNSVQPTITRGGSNSRSNSSNSRSLSIRRQGSRMLSMRRQRSGTSSMKHADKAEEFSFSELASATGNFSLENKIGSGSFGVVYRGKLNDGREVAIKRGEVNAKMKKFQEKETAFDSEIAFLSRLHHKHLVRLVGYCEEREEKLLVYDYMKNGALYDHLHDKNNVEKHSSLINSWKMRIKIALDAARGIEYLHNYAVPPIIHRDIKSSNILLDSNWVARVSDFGLSLMGPVLGKDHNPYQRPTKAAGTVGYIDPEYYSLNVLTDKSDVYGLGVVLLELLTGKRAIFRNNGDVEEEEGCVPVHLVDYSVPAITADELSTILDPRVGSPELGEGDAVELVAYTAMHCVNAEGRNRPTMTDIVGNLERALDLCGDSHGSISSGICSIVSD

SEQ ID NO: 97170 - DNA, 1470 bp, Arabidopsis thaliana
  misc_feature (1)..(1470): Ceres Seq. ID no. 12736345
  misc_feature (1)..(1470): Ortholog of  Ceres SEQ ID NO 14303282 as cited in SEQ ID NO 0
atgtcggagatggaggtggagaaaccggatttgacattgtacaacacaatgactcaactgaaggaagtttataagccgatgaatcccggcaaaatcggaatctatgtatgcggtatcaccgcttacgattatagccacattggccacgctcgtgccgccgtgtccttcgacctcctttacagatacttaaggcacttgggttatcaagttacttatgtcagaaattttacagatgttgatgacaaggctaaaaactgtggagagaagccgttagatttgagtaatcgcttttgcgaggagtatcttttagatatggctgctcttcagtgcctccttcccacccaccagcctcgtgtcagtgatcatatggaacagatcattaagatgatagaaaagatcattgagaatggatgtgggtatgctgtgggtggtgatgtgttcttctcagtggacaaatcaccgagttatggtcagttatctggtcaacggctggatcatactcaagctggtaagcgtgttgctgttgactcaaggaagcgtaatcctgctgactttgcattacggaaggctgcaaaatctggtgaaccaagttgggagagcccttggggtcatggaagaccaggatggcacatcgagtttgacattcatggtggtggcgcagatctcaaattcccgcaccatgaaaatgagatcgcccagacatgtgctgcttgtgaagatagtggtgtgaactactggttgcataacgggcatgtcaccaacaacaatgtgaagatgggaaaatcattgaacaacttttttacgattagacaaatcgcggctaactatcatccactggctttgagacatttcttgatgagtgcacagtaccgttctcctctcaactattcggtttcgcagcttgagagttcatcggatgctttatactctctatcgccatatcgagaagaaatgagtggagatgttggaaagactcaacagtctgcagaagccaaagagatgataaagaaggtgaaaaacgcattgaaattcatcaacgtttcaatctccaagctcaagaaaatgcagaagaagcagcggatgtcgctggtagtgtcactggtcgaggttgagaaggcagtgagggaagttcttgatgtgcttggtttgctcacgactctaagctacggtgagcttttgaaagacatgaaacaaaaggcattaacaagagcaggaatgggagaagaagaggtcttgcagaggattgaagaaaggaatatggcccggaagagcaaagatttcaggagaagcgatcggattcgagagctgttggcatttaaaggaatcttcctcgaggatgttcctggagacactgtgtggagaccttccaccccattgaccaagcctaaatctggtttaggtttaggcatgacagccatcgtttttgctatcgtttttactttcttaggcttcttcttctatagccgttga

SEQ ID NO: 97171 - protein, 489 aa, Arabidopsis thaliana
  peptide (1)..(489): Ceres Seq. ID no. 12736346
MSEMEVEKPDLTLYNTMTQLKEVYKPMNPGKIGIYVCGITAYDYSHIGHARAAVSFDLLYRYLRHLGYQVTYVRNFTDVDDKAKNCGEKPLDLSNRFCEEYLLDMAALQCLLPTHQPRVSDHMEQIIKMIEKIIENGCGYAVGGDVFFSVDKSPSYGQLSGQRLDHTQAGKRVAVDSRKRNPADFALRKAAKSGEPSWESPWGHGRPGWHIEFDIHGGGADLKFPHHENEIAQTCAACEDSGVNYWLHNGHVTNNNVKMGKSLNNFFTIRQIAANYHPLALRHFLMSAQYRSPLNYSVSQLESSSDALYSLSPYREEMSGDVGKTQQSAEAKEMIKKVKNALKFINVSISKLKKMQKKQRMSLVVSLVEVEKAVREVLDVLGLLTTLSYGELLKDMKQKALTRAGMGEEEVLQRIEERNMARKSKDFRRSDRIRELLAFKGIFLEDVPGDTVWRPSTPLTKPKSGLGLGMTAIVFAIVFTFLGFFFYSR

SEQ ID NO: 97172 - protein, 486 aa, Arabidopsis thaliana
  peptide (1)..(486): Ceres Seq. ID no. 12736347
MEVEKPDLTLYNTMTQLKEVYKPMNPGKIGIYVCGITAYDYSHIGHARAAVSFDLLYRYLRHLGYQVTYVRNFTDVDDKAKNCGEKPLDLSNRFCEEYLLDMAALQCLLPTHQPRVSDHMEQIIKMIEKIIENGCGYAVGGDVFFSVDKSPSYGQLSGQRLDHTQAGKRVAVDSRKRNPADFALRKAAKSGEPSWESPWGHGRPGWHIEFDIHGGGADLKFPHHENEIAQTCAACEDSGVNYWLHNGHVTNNNVKMGKSLNNFFTIRQIAANYHPLALRHFLMSAQYRSPLNYSVSQLESSSDALYSLSPYREEMSGDVGKTQQSAEAKEMIKKVKNALKFINVSISKLKKMQKKQRMSLVVSLVEVEKAVREVLDVLGLLTTLSYGELLKDMKQKALTRAGMGEEEVLQRIEERNMARKSKDFRRSDRIRELLAFKGIFLEDVPGDTVWRPSTPLTKPKSGLGLGMTAIVFAIVFTFLGFFFYSR

SEQ ID NO: 97173 - protein, 473 aa, Arabidopsis thaliana
  peptide (1)..(473): Ceres Seq. ID no. 12736348
MTQLKEVYKPMNPGKIGIYVCGITAYDYSHIGHARAAVSFDLLYRYLRHLGYQVTYVRNFTDVDDKAKNCGEKPLDLSNRFCEEYLLDMAALQCLLPTHQPRVSDHMEQIIKMIEKIIENGCGYAVGGDVFFSVDKSPSYGQLSGQRLDHTQAGKRVAVDSRKRNPADFALRKAAKSGEPSWESPWGHGRPGWHIEFDIHGGGADLKFPHHENEIAQTCAACEDSGVNYWLHNGHVTNNNVKMGKSLNNFFTIRQIAANYHPLALRHFLMSAQYRSPLNYSVSQLESSSDALYSLSPYREEMSGDVGKTQQSAEAKEMIKKVKNALKFINVSISKLKKMQKKQRMSLVVSLVEVEKAVREVLDVLGLLTTLSYGELLKDMKQKALTRAGMGEEEVLQRIEERNMARKSKDFRRSDRIRELLAFKGIFLEDVPGDTVWRPSTPLTKPKSGLGLGMTAIVFAIVFTFLGFFFYSR

SEQ ID NO: 97174 - DNA, 1305 bp, Arabidopsis thaliana
  misc_feature (1)..(1305): Ceres Seq. ID no. 12736365
  misc_feature (1)..(1305): Ortholog of  Ceres SEQ ID NO 14316215 as cited in SEQ ID NO 53085
atggtgaaaccttccgatttcaaagcagttcacaaacttattcaattgcattacagtcgagtcaacctgttcacaacgacgggatggtcaaaactctcagctttgtcttctccggctcttccttcaaatggggtttctcagcttcagcctaagtctggtttccacaccttctcgtcgagacccacttcgaaaaactttggcttatcccagattcttccctctaatggggtttctcagcttcaacctaagaccagtttccacagctttttgtcgagacccacttcgaaaaatgtgggattatcccagattttacccagtcctaagctcgtacctggtttgcagaattgtggtgtagccttggttaagccccgtgttaatatgaactttgtatcggcgtttagattgttttcgagctctggatttcgaaaagttgatgggaatttcgctagaaaggttgttgacaagccaatcaaagctgttagttcgacttttgctagataccgaatggctttagggttgcacgttgatgcattttggaagaagaataaccttttggtgtttggagcaggagctgtttttgtttgtattttcttgtggagggtcatgtttggaatcgctagtacattcgttggcctctctgagggaatggccaagtatggcttccttgctctctcatctgccattgttgcatttgctggtttataccttcgcgcaaggttcacgatcaatcccgataaagtttacaggatcactatgaggaagctcaatacagcggctgatgttcttgaagttatgggtgctcctctagcaggatcagatttgcgtgcttatgtgatgtcaggtggtggaataacattcaaaaaattcaagccaacaattaggaacaagcgttgcttcctcctattcccggttcaaggttctgagcgaaagggacttgttagtgtcgaagtcaagaagaagaaaggccagtatgatatgaaactactggcggtggatattccgatggcgtctggtcctgatcaacgcttattccttattggtgatgaagaagagtacagagtcggtggtggtttgatctctgagttaagagatcctgtggtaaaagcaatggcagcaaccaaagagtttgataatcttgacagaattgaagaggaagaagacgccgaaagagaacttcaagaagccgaaaggaaggaacgtgaagagattgaacttcaagaagccgaaaggaaggaacgtgaagaattcgaacttcaagaagcagaaagaaagcagcgtgaagaaatcgagaagcttgaaaaatag

SEQ ID NO: 97175 - protein, 434 aa, Arabidopsis thaliana
  peptide (1)..(434): Ceres Seq. ID no. 12736366
MVKPSDFKAVHKLIQLHYSRVNLFTTTGWSKLSALSSPALPSNGVSQLQPKSGFHTFSSRPTSKNFGLSQILPSNGVSQLQPKTSFHSFLSRPTSKNVGLSQILPSPKLVPGLQNCGVALVKPRVNMNFVSAFRLFSSSGFRKVDGNFARKVVDKPIKAVSSTFARYRMALGLHVDAFWKKNNLLVFGAGAVFVCIFLWRVMFGIASTFVGLSEGMAKYGFLALSSAIVAFAGLYLRARFTINPDKVYRITMRKLNTAADVLEVMGAPLAGSDLRAYVMSGGGITFKKFKPTIRNKRCFLLFPVQGSERKGLVSVEVKKKKGQYDMKLLAVDIPMASGPDQRLFLIGDEEEYRVGGGLISELRDPVVKAMAATKEFDNLDRIEEEEDAERELQEAERKEREEIELQEAERKEREEFELQEAERKQREEIEKLEK

SEQ ID NO: 97176 - protein, 308 aa, Arabidopsis thaliana
  peptide (1)..(308): Ceres Seq. ID no. 12736367
MNFVSAFRLFSSSGFRKVDGNFARKVVDKPIKAVSSTFARYRMALGLHVDAFWKKNNLLVFGAGAVFVCIFLWRVMFGIASTFVGLSEGMAKYGFLALSSAIVAFAGLYLRARFTINPDKVYRITMRKLNTAADVLEVMGAPLAGSDLRAYVMSGGGITFKKFKPTIRNKRCFLLFPVQGSERKGLVSVEVKKKKGQYDMKLLAVDIPMASGPDQRLFLIGDEEEYRVGGGLISELRDPVVKAMAATKEFDNLDRIEEEEDAERELQEAERKEREEIELQEAERKEREEFELQEAERKQREEIEKLEK

SEQ ID NO: 97177 - protein, 266 aa, Arabidopsis thaliana
  peptide (1)..(266): Ceres Seq. ID no. 12736368
MALGLHVDAFWKKNNLLVFGAGAVFVCIFLWRVMFGIASTFVGLSEGMAKYGFLALSSAIVAFAGLYLRARFTINPDKVYRITMRKLNTAADVLEVMGAPLAGSDLRAYVMSGGGITFKKFKPTIRNKRCFLLFPVQGSERKGLVSVEVKKKKGQYDMKLLAVDIPMASGPDQRLFLIGDEEEYRVGGGLISELRDPVVKAMAATKEFDNLDRIEEEEDAERELQEAERKEREEIELQEAERKEREEFELQEAERKQREEIEKLEK

SEQ ID NO: 97178 - DNA, 1746 bp, Arabidopsis thaliana
  misc_feature (1)..(1746): Ceres Seq. ID no. 12736374
  misc_feature (1)..(1746): Ortholog of  Ceres SEQ ID NO 12586556 as cited in SEQ ID NO 64667
  misc_feature (1)..(1746): Ortholog of  Ceres SEQ ID NO 13660894 as cited in SEQ ID NO 67475
atgtgcgaaaaagcgagagtgatagtgagaatgctacaaggatgcaacagtatgaagaagctccgtaagatccattctcatgtcatcatcaatggtctccaacatcatccttccatcttcaaccacctcctccgcttctgcgccgtctccgtcactggttctttatctcacgctcaacttctcttcgaccatttcgattccgatccatcaacatcggattggaactaccttattcgtggcttctccaattcttcttctcctctaaattcgattctcttctataaccgaatgcttctctcctctgtttcacgtcctgatctcttcactttcaatttcgctctcaaatcatgtgagaggattaaatcgattccgaaatgtttggagattcacggttcggttattcgatctgggtttcttgatgacgctattgttgccactagtctcgttcgttgttactctgcgaatggaagtgttgagattgcatctaaagtgttcgacgaaatgcctgttagagacttggtttcttggaacgttatgatctgttgcttttctcatgttggtttacataatcaagcgttgagtatgtacaagcgaatgggaaatgaaggtgtgtgtggtgactcttacacgctcgttgctttgttatcttcttgtgctcacgttagtgctttgaatatgggagttatgctacacaggatagcctgtgatattcgatgtgagagttgtgtctttgtgagtaatgctcttattgatatgtatgcaaaatgtggtagccttgaaaatgctattggtgtgtttaacgggatgcgaaaaagagatgtgttgacctggaactcaatgattattgggtatggagttcacgggcatggcgtagaggccatctcgttcttcagaaagatggtggcttccggggttagacccaatgccatcacattccttggattgttgttaggttgtagtcatcaaggtctagttaaagaaggagttgagcattttgaaatcatgagttcacagttccatttgactccgaacgtcaaacactatggatgcatggtggatctctatggacgagcaggtcagctagaaaactccctcgagatgatatatgcgtcttcctgccatgaggatcccgtcttgtggagaaccctgcttggctcttgcaaaatccacaggaatttggaattaggagaagtagccatgaagaaattggtgcagcttgaggctttcaatgcaggggactatgtgcttatgacttcgatatattctgcagcgaatgatgcgcaagcttttgctagtatgagaaaactaataagaagccatgatttacagacagttccaggatggagttggattgagattggtgatcaagttcacaaatttgtcgttgatgacaaaatgcatccggagtctgcagttatttactcagaactcggggaagtaatcaaccgtgccattctagctggatacaagccagaggactcaaacagaactgctcctactctctctgatcggtgtttaggatctgcagatacatctcatagtgaaaaattggctattgcatatggattaatgcgaactactgcaggaacaactctccgaatcacaaagaatctgagagtttgcagagattgtcattcgtttacaaaatatgtatcaaaagcattcaatcgggaaattattgtaagggatagagttcgatttcatcactttgcagatggtatttgttcttgcaacgactactggtga

SEQ ID NO: 97179 - protein, 581 aa, Arabidopsis thaliana
  peptide (1)..(581): Ceres Seq. ID no. 12736375
MCEKARVIVRMLQGCNSMKKLRKIHSHVIINGLQHHPSIFNHLLRFCAVSVTGSLSHAQLLFDHFDSDPSTSDWNYLIRGFSNSSSPLNSILFYNRMLLSSVSRPDLFTFNFALKSCERIKSIPKCLEIHGSVIRSGFLDDAIVATSLVRCYSANGSVEIASKVFDEMPVRDLVSWNVMICCFSHVGLHNQALSMYKRMGNEGVCGDSYTLVALLSSCAHVSALNMGVMLHRIACDIRCESCVFVSNALIDMYAKCGSLENAIGVFNGMRKRDVLTWNSMIIGYGVHGHGVEAISFFRKMVASGVRPNAITFLGLLLGCSHQGLVKEGVEHFEIMSSQFHLTPNVKHYGCMVDLYGRAGQLENSLEMIYASSCHEDPVLWRTLLGSCKIHRNLELGEVAMKKLVQLEAFNAGDYVLMTSIYSAANDAQAFASMRKLIRSHDLQTVPGWSWIEIGDQVHKFVVDDKMHPESAVIYSELGEVINRAILAGYKPEDSNRTAPTLSDRCLGSADTSHSEKLAIAYGLMRTTAGTTLRITKNLRVCRDCHSFTKYVSKAFNREIIVRDRVRFHHFADGICSCNDYW

SEQ ID NO: 97180 - protein, 571 aa, Arabidopsis thaliana
  peptide (1)..(571): Ceres Seq. ID no. 12736376
MLQGCNSMKKLRKIHSHVIINGLQHHPSIFNHLLRFCAVSVTGSLSHAQLLFDHFDSDPSTSDWNYLIRGFSNSSSPLNSILFYNRMLLSSVSRPDLFTFNFALKSCERIKSIPKCLEIHGSVIRSGFLDDAIVATSLVRCYSANGSVEIASKVFDEMPVRDLVSWNVMICCFSHVGLHNQALSMYKRMGNEGVCGDSYTLVALLSSCAHVSALNMGVMLHRIACDIRCESCVFVSNALIDMYAKCGSLENAIGVFNGMRKRDVLTWNSMIIGYGVHGHGVEAISFFRKMVASGVRPNAITFLGLLLGCSHQGLVKEGVEHFEIMSSQFHLTPNVKHYGCMVDLYGRAGQLENSLEMIYASSCHEDPVLWRTLLGSCKIHRNLELGEVAMKKLVQLEAFNAGDYVLMTSIYSAANDAQAFASMRKLIRSHDLQTVPGWSWIEIGDQVHKFVVDDKMHPESAVIYSELGEVINRAILAGYKPEDSNRTAPTLSDRCLGSADTSHSEKLAIAYGLMRTTAGTTLRITKNLRVCRDCHSFTKYVSKAFNREIIVRDRVRFHHFADGICSCNDYW

SEQ ID NO: 97181 - protein, 564 aa, Arabidopsis thaliana
  peptide (1)..(564): Ceres Seq. ID no. 12736377
MKKLRKIHSHVIINGLQHHPSIFNHLLRFCAVSVTGSLSHAQLLFDHFDSDPSTSDWNYLIRGFSNSSSPLNSILFYNRMLLSSVSRPDLFTFNFALKSCERIKSIPKCLEIHGSVIRSGFLDDAIVATSLVRCYSANGSVEIASKVFDEMPVRDLVSWNVMICCFSHVGLHNQALSMYKRMGNEGVCGDSYTLVALLSSCAHVSALNMGVMLHRIACDIRCESCVFVSNALIDMYAKCGSLENAIGVFNGMRKRDVLTWNSMIIGYGVHGHGVEAISFFRKMVASGVRPNAITFLGLLLGCSHQGLVKEGVEHFEIMSSQFHLTPNVKHYGCMVDLYGRAGQLENSLEMIYASSCHEDPVLWRTLLGSCKIHRNLELGEVAMKKLVQLEAFNAGDYVLMTSIYSAANDAQAFASMRKLIRSHDLQTVPGWSWIEIGDQVHKFVVDDKMHPESAVIYSELGEVINRAILAGYKPEDSNRTAPTLSDRCLGSADTSHSEKLAIAYGLMRTTAGTTLRITKNLRVCRDCHSFTKYVSKAFNREIIVRDRVRFHHFADGICSCNDYW

SEQ ID NO: 97182 - DNA, 1492 bp, Arabidopsis thaliana
  misc_feature (1)..(1492): Ceres Seq. ID no. 12736378
  misc_feature (1)..(1492): Ortholog of  Ceres SEQ ID NO 14303866 as cited in SEQ ID NO 53689
  misc_feature (1)..(1492): Ortholog of  Ceres SEQ ID NO 15171755 as cited in SEQ ID NO 57047
  misc_feature (1)..(1492): Ortholog of  Ceres SEQ ID NO 13655958 as cited in SEQ ID NO 65456
  misc_feature (1)..(1492): Ortholog of  Ceres SEQ ID NO 14303664 as cited in SEQ ID NO 65892
  misc_feature (1)..(1492): Ortholog of  Ceres SEQ ID NO 14309641 as cited in SEQ ID NO 0
cttctaccagagttgctctcttttggttcgttttcttcctccaaaatccaatcttaccacagtttctttagggtttcttcttcgtcttcctttggatctatgtgaacagtatgaactaagctctgaggtaagcttgggaagtagggatatggccaaaatctctttggtttaccaacttagcaaaaaagttagcaggagttggtgatcagttctcctaccggcttttgcaggctaataactaatacctgactgtaaaatcttccaaggtttcaaccacacagggaccttgtttctcttgttattgtaaaggatgtcaagtattcggaatactcattggtgtcacagatgtcaacgtgctgtttggcttcgagctcgagatgctgtctgttcatattgtggaggagggtttgttgaggaaatcgatataggaccgagtagagctcacagggatgttgagcgtgatccaacctttgatctcatggaagctttctcagcctttatgagaagccgtttagctgaaagaagctatgaccgagaaatcagcggaagacttggctctgcgggttctgaaagcttttcaaacttggctcctctattgatctttggtggccaagctccctttcgattggctggtggtgataatagttcagttgaagcctttgtcaatggcgcagcacctggaattggtatcgcacgtggcaccaatgccggagactatttttttggacccggtcttgaagaactgattgaacagctttcctcaggcactcatcaccgaggcccaccaccagcaccgaaatcatcaattgatgcattgccaaccatcaagatcacacagaagcatctcaagtcatcagactctcactgcccggtttgcaaagacgagttcgaactgaaatcagaagcaaaacagatgccgtgtcaccatatctatcattctgactgcattgtcccgtggctggttcagcataactcatgcccagtctgtcgtaaagagttgccatccagaggatcttcttcaagcacacagagtagtcagaacagaagcaccaatggaagagaaaacagcagaagaaggaacattttctctaacctctggccattccgctcgtctagctcaagctcgactcaaaaccgcagagacacaaacaacacagcaactgcagaagaaggccactatcatcatcaccagcagcaacagcaacaacatcaacatcaacatcaacaacaacaatcccatatgggttacagtggatggccttttgactattaaaggttaatctaactcttgactctttttaagccttctgtttcactttggttctgtgtattttgtttgtgttttgtcatgtctctctttcccttactttgttcattgtttattgtagatcttctgtttctctggtttatcaactttatgtttttattttgaattgtgtatctcacacatgttagcttgttattgaatttgcattgaataaattattgtttt

SEQ ID NO: 97183 - protein, 320 aa, Arabidopsis thaliana
  peptide (1)..(320): Ceres Seq. ID no. 12736379
MSSIRNTHWCHRCQRAVWLRARDAVCSYCGGGFVEEIDIGPSRAHRDVERDPTFDLMEAFSAFMRSRLAERSYDREISGRLGSAGSESFSNLAPLLIFGGQAPFRLAGGDNSSVEAFVNGAAPGIGIARGTNAGDYFFGPGLEELIEQLSSGTHHRGPPPAPKSSIDALPTIKITQKHLKSSDSHCPVCKDEFELKSEAKQMPCHHIYHSDCIVPWLVQHNSCPVCRKELPSRGSSSSTQSSQNRSTNGRENSRRRNIFSNLWPFRSSSSSSTQNRRDTNNTATAEEGHYHHHQQQQQQHQHQHQQQQSHMGYSGWPFDY

SEQ ID NO: 97184 - protein, 264 aa, Arabidopsis thaliana
  peptide (1)..(264): Ceres Seq. ID no. 12736380
MEAFSAFMRSRLAERSYDREISGRLGSAGSESFSNLAPLLIFGGQAPFRLAGGDNSSVEAFVNGAAPGIGIARGTNAGDYFFGPGLEELIEQLSSGTHHRGPPPAPKSSIDALPTIKITQKHLKSSDSHCPVCKDEFELKSEAKQMPCHHIYHSDCIVPWLVQHNSCPVCRKELPSRGSSSSTQSSQNRSTNGRENSRRRNIFSNLWPFRSSSSSSTQNRRDTNNTATAEEGHYHHHQQQQQQHQHQHQQQQSHMGYSGWPFDY

SEQ ID NO: 97185 - protein, 257 aa, Arabidopsis thaliana
  peptide (1)..(257): Ceres Seq. ID no. 12736381
MRSRLAERSYDREISGRLGSAGSESFSNLAPLLIFGGQAPFRLAGGDNSSVEAFVNGAAPGIGIARGTNAGDYFFGPGLEELIEQLSSGTHHRGPPPAPKSSIDALPTIKITQKHLKSSDSHCPVCKDEFELKSEAKQMPCHHIYHSDCIVPWLVQHNSCPVCRKELPSRGSSSSTQSSQNRSTNGRENSRRRNIFSNLWPFRSSSSSSTQNRRDTNNTATAEEGHYHHHQQQQQQHQHQHQQQQSHMGYSGWPFDY

SEQ ID NO: 97186 - DNA, 1500 bp, Arabidopsis thaliana
  misc_feature (1)..(1500): Ceres Seq. ID no. 12736394
  misc_feature (1)..(1500): Ortholog of  Ceres SEQ ID NO 15169603 as cited in SEQ ID NO 65772
  misc_feature (1)..(1500): Ortholog of  Ceres SEQ ID NO 14308003 as cited in SEQ ID NO 65919
  misc_feature (1)..(1500): Ortholog of  Ceres SEQ ID NO 14303087 as cited in SEQ ID NO 66569
atggagcatttcatcctcatctccctcctctgtttccctatcgtcatcttcttcatcttcttccccaagaattcttcttcagaatttggtttcaagtcgtatccgatcgttggaagcttacctggtctagtgaataaccgtcaccgattcctcgactggacggtggaaactctgtctcgatgcccaacccaaacggcgatttttcggcgaccagggaagctgcagttcgtcatgacggcgaatccagctaacgtcgagtatatgctcaagacgaaattcgaaagtttccctaaaggcgaacggttcatctcgattctcgaggattttctcggccgcgggatttttaactccgacggtgagatgtggtggaaacagaggaagacggccagttatgaattcagtactaaatctctccgtgacttcgttatgagcaacgtcaccgtcgaaatcaacactaggcttgttccagtgttagcagaagctgcaaccaacggaaaattgatagatcttcaagacatattggagcggttcgcgttcgataacatctgtaaattagctttcaacgttgattcagcttgtctcggcgacgacggagcagccggtgtaaacttcatgcaggcctttgaaacggcggcgacgatcatctcgcaacggtttcagtctgtgatttcgtattcatggaagattaaaaagaaactcaacattggatcagagagagttctgagagaatcaatcatgatcgtccataaattcgcagacgagatcgtgcgtaacaggattgaacaaggaaaggtaagtgatcacaaggaagatttgctttctcggtttatcagcaaggaggagatgaattctccggagatacttcgtgatattgtcataagtttcatacttgcaggacgagacactacttcctctgctttgagctggttcttttggttgctctctatgcatccagaagtgaaagataagattctacaagagctaaactcgattcgagaacgaacagggaagcgaatcggggaagtttacgggtttgaagatcttaaactgatgaattatcttcacgcagcgataactgaatctctacgattgtatccgccagtgccagtggatacaatgagttgtgctgaggacaatgtgttgcctgatgggacatttatagggaaagattgggggataagctataacgcgtatgcgatggggaggatggagagtatttgggggaaagattgcgatcggtttgatcctgagaggtggattgatgaaacaaatggtggttttagaggtgagaatccttataagtttcctgcgtttcatgcgggaccaaggatgtgtttagggaaggagatggcttatattcagatgaaatcgatagtcgctgcggttttagagaggtttgtggttgaggttccagggaagaaggagcgtcctgagattctaatgtcggtgacacttagaatcagaggaggtttgaatgtgagagtacaagaaagatcttga

SEQ ID NO: 97187 - protein, 499 aa, Arabidopsis thaliana
  peptide (1)..(499): Ceres Seq. ID no. 12736395
MEHFILISLLCFPIVIFFIFFPKNSSSEFGFKSYPIVGSLPGLVNNRHRFLDWTVETLSRCPTQTAIFRRPGKLQFVMTANPANVEYMLKTKFESFPKGERFISILEDFLGRGIFNSDGEMWWKQRKTASYEFSTKSLRDFVMSNVTVEINTRLVPVLAEAATNGKLIDLQDILERFAFDNICKLAFNVDSACLGDDGAAGVNFMQAFETAATIISQRFQSVISYSWKIKKKLNIGSERVLRESIMIVHKFADEIVRNRIEQGKVSDHKEDLLSRFISKEEMNSPEILRDIVISFILAGRDTTSSALSWFFWLLSMHPEVKDKILQELNSIRERTGKRIGEVYGFEDLKLMNYLHAAITESLRLYPPVPVDTMSCAEDNVLPDGTFIGKDWGISYNAYAMGRMESIWGKDCDRFDPERWIDETNGGFRGENPYKFPAFHAGPRMCLGKEMAYIQMKSIVAAVLERFVVEVPGKKERPEILMSVTLRIRGGLNVRVQERS

SEQ ID NO: 97188 - protein, 422 aa, Arabidopsis thaliana
  peptide (1)..(422): Ceres Seq. ID no. 12736396
MTANPANVEYMLKTKFESFPKGERFISILEDFLGRGIFNSDGEMWWKQRKTASYEFSTKSLRDFVMSNVTVEINTRLVPVLAEAATNGKLIDLQDILERFAFDNICKLAFNVDSACLGDDGAAGVNFMQAFETAATIISQRFQSVISYSWKIKKKLNIGSERVLRESIMIVHKFADEIVRNRIEQGKVSDHKEDLLSRFISKEEMNSPEILRDIVISFILAGRDTTSSALSWFFWLLSMHPEVKDKILQELNSIRERTGKRIGEVYGFEDLKLMNYLHAAITESLRLYPPVPVDTMSCAEDNVLPDGTFIGKDWGISYNAYAMGRMESIWGKDCDRFDPERWIDETNGGFRGENPYKFPAFHAGPRMCLGKEMAYIQMKSIVAAVLERFVVEVPGKKERPEILMSVTLRIRGGLNVRVQERS

SEQ ID NO: 97189 - protein, 412 aa, Arabidopsis thaliana
  peptide (1)..(412): Ceres Seq. ID no. 12736397
MLKTKFESFPKGERFISILEDFLGRGIFNSDGEMWWKQRKTASYEFSTKSLRDFVMSNVTVEINTRLVPVLAEAATNGKLIDLQDILERFAFDNICKLAFNVDSACLGDDGAAGVNFMQAFETAATIISQRFQSVISYSWKIKKKLNIGSERVLRESIMIVHKFADEIVRNRIEQGKVSDHKEDLLSRFISKEEMNSPEILRDIVISFILAGRDTTSSALSWFFWLLSMHPEVKDKILQELNSIRERTGKRIGEVYGFEDLKLMNYLHAAITESLRLYPPVPVDTMSCAEDNVLPDGTFIGKDWGISYNAYAMGRMESIWGKDCDRFDPERWIDETNGGFRGENPYKFPAFHAGPRMCLGKEMAYIQMKSIVAAVLERFVVEVPGKKERPEILMSVTLRIRGGLNVRVQERS

SEQ ID NO: 97190 - DNA, 2370 bp, Arabidopsis thaliana
  misc_feature (1)..(2370): Ceres Seq. ID no. 12736398
  misc_feature (1)..(2370): Ortholog of  Ceres SEQ ID NO 15225907 as cited in SEQ ID NO 0
atggaggccaaaccaaaaaggaggattgttacagagaatggagatacaggtgaagatttagttcttgcaacattgattggaaacggtgatgatgtaggtcctctcgttaggcatgctttcgaaatggggaggcctgagcctctcgttcatcagctcaaaaatgtggcgaggaagaaggaagctgaaattgaggatctatgcaagactcactatgaagaatttattgttgcagttgatgagcttcgtggtgtgttagttgacgctgaagagcttaagagtgatcttgcaagtgacaatttccgtttgcaagaggttggtagtgccttattggttaaactggaagagcttctcgagtcttatgcagtcaagaagaatgtaaccgaagctattaaaatgtcgaagatctgcgttcaagcactggagttgtgtgttaaatgtaatagttacatatctgaaggacagttttaccatgccctgaaaaccatggatttgattgagaagagttacctgaagcttatcccacttaaggttctaaagttggttatagagagaagaattccagtgatcaagactcacattgagaaaaaagtgtgtagccaatttaatgaatggcttgttcacattaggagttcctctaaaaatattggacagactgctattggcctcaccgcttcagctcgccagagggaagaagaaatgctggaacgtcagaggagagcagaggaacagaatacaggtggtttgggagaattggcatacactttagatgttgaagactcggaacaagactctgtattgaagtttgatctgacacctctgtatcgagcttatcacatccacactattcttggagtcccagaacggttccgtgactattactatgagaataggctactacagctccaatcagatctgcagatcacttatacacagccatttgtggaatcataccaaacatttctagcccaggttgcaggatatttcattgtggaggatcgggtgattaggacagctggagatttcttgttggctgatcaagttgagacaatgtgggaaacagccatttccaaaattgtagccatattggagaaccaatttgccagaatggattcgcctactcatctgcttttggtgaaagattatgtaactctccttggcacaacccttagacagtacggttatgaagtgggtccagttcttgatgcccttgacaagagccgagataaataccacgagcttcttcttgaagagtgtcgaaagcaaattgtgactgctattacagaggacacttatcagcagatggtaatcaagaaggaagctgactatgaaaacaatgtcttgtcgtttaatcttcagacctcagacattatgccggctttcacttacattgcgcccttctcttctatggtgccagatgtttgccgcatcatcaggtcatacataaaaggatctgttgattacttgtcctatggagtgaacactaattttttcagtgttctgaggaagtacctcgacaaaatcttgattgatgtattgaacgaagttatcctcgagacgattagcaacaattcaattggtgtatctcaagctatgcagattgcagcaaacatatctttcctcgaaaaggccagtgattattttctccgacatgcagctcaactttgtggcatcccaagccgatcagttgagaggcctcaagctagtttagctgcaaaggttgtcctcaaaacatcaagagacgcagcctatcttgctttgttgaatgtggttaacaccaagttggacgagttcatgaagctcacagaaaatgttaactggactacagaggaaatgccacaagggccgcacgagtacataaacgaggttgttatatacctcgagactgttatgtcaacggcacaacagatcctcccaatggatgccttatacaaagttggagttggggctatcgaacatatctcaaactccatcgtctctacattcctcagcgatagcatcaagagattcaatgctaatgcagtctcggccattaaccacgatctgagagtgatagaaaactttgctgatgagagatatcactcaagcgggttaaatgagatctacaaagaaggaagctttagaagctatctggttgaagctaggcagttgataaacctgttgtcgagtagccaacccgagaacttcatgaacccggtgattagagagaggaactacaacactttggattacaagaaagtggctacgatctgcgagaagtttaaggattctgcagacgggatattcggaagcctggctaatagaaacacaaagctgacagccaagaagaaatcgatggacatgctcaagaagagactcaaggaatttaactga

SEQ ID NO: 97191 - protein, 789 aa, Arabidopsis thaliana
  peptide (1)..(789): Ceres Seq. ID no. 12736399
MEAKPKRRIVTENGDTGEDLVLATLIGNGDDVGPLVRHAFEMGRPEPLVHQLKNVARKKEAEIEDLCKTHYEEFIVAVDELRGVLVDAEELKSDLASDNFRLQEVGSALLVKLEELLESYAVKKNVTEAIKMSKICVQALELCVKCNSYISEGQFYHALKTMDLIEKSYLKLIPLKVLKLVIERRIPVIKTHIEKKVCSQFNEWLVHIRSSSKNIGQTAIGLTASARQREEEMLERQRRAEEQNTGGLGELAYTLDVEDSEQDSVLKFDLTPLYRAYHIHTILGVPERFRDYYYENRLLQLQSDLQITYTQPFVESYQTFLAQVAGYFIVEDRVIRTAGDFLLADQVETMWETAISKIVAILENQFARMDSPTHLLLVKDYVTLLGTTLRQYGYEVGPVLDALDKSRDKYHELLLEECRKQIVTAITEDTYQQMVIKKEADYENNVLSFNLQTSDIMPAFTYIAPFSSMVPDVCRIIRSYIKGSVDYLSYGVNTNFFSVLRKYLDKILIDVLNEVILETISNNSIGVSQAMQIAANISFLEKASDYFLRHAAQLCGIPSRSVERPQASLAAKVVLKTSRDAAYLALLNVVNTKLDEFMKLTENVNWTTEEMPQGPHEYINEVVIYLETVMSTAQQILPMDALYKVGVGAIEHISNSIVSTFLSDSIKRFNANAVSAINHDLRVIENFADERYHSSGLNEIYKEGSFRSYLVEARQLINLLSSSQPENFMNPVIRERNYNTLDYKKVATICEKFKDSADGIFGSLANRNTKLTAKKKSMDMLKKRLKEFN

SEQ ID NO: 97192 - protein, 748 aa, Arabidopsis thaliana
  peptide (1)..(748): Ceres Seq. ID no. 12736400
MGRPEPLVHQLKNVARKKEAEIEDLCKTHYEEFIVAVDELRGVLVDAEELKSDLASDNFRLQEVGSALLVKLEELLESYAVKKNVTEAIKMSKICVQALELCVKCNSYISEGQFYHALKTMDLIEKSYLKLIPLKVLKLVIERRIPVIKTHIEKKVCSQFNEWLVHIRSSSKNIGQTAIGLTASARQREEEMLERQRRAEEQNTGGLGELAYTLDVEDSEQDSVLKFDLTPLYRAYHIHTILGVPERFRDYYYENRLLQLQSDLQITYTQPFVESYQTFLAQVAGYFIVEDRVIRTAGDFLLADQVETMWETAISKIVAILENQFARMDSPTHLLLVKDYVTLLGTTLRQYGYEVGPVLDALDKSRDKYHELLLEECRKQIVTAITEDTYQQMVIKKEADYENNVLSFNLQTSDIMPAFTYIAPFSSMVPDVCRIIRSYIKGSVDYLSYGVNTNFFSVLRKYLDKILIDVLNEVILETISNNSIGVSQAMQIAANISFLEKASDYFLRHAAQLCGIPSRSVERPQASLAAKVVLKTSRDAAYLALLNVVNTKLDEFMKLTENVNWTTEEMPQGPHEYINEVVIYLETVMSTAQQILPMDALYKVGVGAIEHISNSIVSTFLSDSIKRFNANAVSAINHDLRVIENFADERYHSSGLNEIYKEGSFRSYLVEARQLINLLSSSQPENFMNPVIRERNYNTLDYKKVATICEKFKDSADGIFGSLANRNTKLTAKKKSMDMLKKRLKEFN

SEQ ID NO: 97193 - protein, 658 aa, Arabidopsis thaliana
  peptide (1)..(658): Ceres Seq. ID no. 12736401
MSKICVQALELCVKCNSYISEGQFYHALKTMDLIEKSYLKLIPLKVLKLVIERRIPVIKTHIEKKVCSQFNEWLVHIRSSSKNIGQTAIGLTASARQREEEMLERQRRAEEQNTGGLGELAYTLDVEDSEQDSVLKFDLTPLYRAYHIHTILGVPERFRDYYYENRLLQLQSDLQITYTQPFVESYQTFLAQVAGYFIVEDRVIRTAGDFLLADQVETMWETAISKIVAILENQFARMDSPTHLLLVKDYVTLLGTTLRQYGYEVGPVLDALDKSRDKYHELLLEECRKQIVTAITEDTYQQMVIKKEADYENNVLSFNLQTSDIMPAFTYIAPFSSMVPDVCRIIRSYIKGSVDYLSYGVNTNFFSVLRKYLDKILIDVLNEVILETISNNSIGVSQAMQIAANISFLEKASDYFLRHAAQLCGIPSRSVERPQASLAAKVVLKTSRDAAYLALLNVVNTKLDEFMKLTENVNWTTEEMPQGPHEYINEVVIYLETVMSTAQQILPMDALYKVGVGAIEHISNSIVSTFLSDSIKRFNANAVSAINHDLRVIENFADERYHSSGLNEIYKEGSFRSYLVEARQLINLLSSSQPENFMNPVIRERNYNTLDYKKVATICEKFKDSADGIFGSLANRNTKLTAKKKSMDMLKKRLKEFN

SEQ ID NO: 97194 - DNA, 3405 bp, Arabidopsis thaliana
  misc_feature (1)..(3405): Ceres Seq. ID no. 12736406
  misc_feature (1)..(3405): Ortholog of  Ceres SEQ ID NO 13595870 as cited in SEQ ID NO 62101
  misc_feature (1)..(3405): Ortholog of  Ceres SEQ ID NO 13590241 as cited in SEQ ID NO 63878
  misc_feature (1)..(3405): Ortholog of  Ceres SEQ ID NO 13657939 as cited in SEQ ID NO 66349
  misc_feature (1)..(3405): Ortholog of  Ceres SEQ ID NO 13660597 as cited in SEQ ID NO 67655
atttctcaaacccaattaaaccctaagagaaattgaagatttttcatttcggctctttatctccggcgaggatcgccggcgttctgtaacttatttatactcactggggtctgggaacaagggttgctttttactccggagtgtagattaacaaaaagctaaagatgccttcgaagaagaagcagtcgaggacgccatcacggctatccaattcggaaccgcctgcatctccaagaactccggcgtcttcaacaactagtcgagatacagattctatcaacgaagaagagcttaggcgcagtattgaagaagcgtctgctgcgtttccttgtcttctcggaaaatctgcaatcatcgcaagagtagccgatgttgcatcagaatctatcagaggctctaagatttggctatcggaaacttctatggtcgctgcttctctcagccctggctccactgtatcggtatcactagcttctccggagagtagattttcgagaagcttcccactcagctcgattaaagctgaatatggagatgacagtgagagtatcattgctgatgaaccaggaaactattttgtgcttaccaccgttttctcttcttcaaaggttttcaaagatgctgttcgaatttcattgaatctttgctatgggcttggttgtcctgtttcaggcaggactgtttttgtttatcctgttagcggaccttctttaagtgatcaattcaacgggaatggtagatctcgctatgatgatgttaaccatctatcgctgcttgcctgcaaagagttgtgtttagagttgactcccttcaggaatatgttacaagctaagaatgcttttgaaagttcttacgagcagaacggaaatgggaattcaactcctaagacaccagcaaacttgcaaaagtttagttctcctcgccccaaatctccggtttcaccaatcatagaggactctgttttcagttgcaagcagcggttttcatctgaaagctcgattgatctacgagaggtgttgagcaatgaaagttcgaaaaaacttttgcagatttgtgcaagttcgtggctttacccttgtagcctgctatatgggaattttgtgtctgtgccaattctctcagaaatctgtatattctgcgtcaaaagagctgataaaaggccatctgacacatccaacagaaatcatgcttttatgatcaatcaggaaactaaagtctacctccatcatacattagacttagcatctgaaattcaagggagaacatttgtacaaggtctgcaatttgatgaaggagaaaatgtgggatgtgaaatctcaaagttaggtggtctctctaaagaatatgcaattttaagggacatcattgattcttcgtccataaagaattccttatcaagtcttggtttgcgacctaccaagggagtgcttattcatggacctccaggcacaggaaaaacatctttggctcgaacctttgcccgccattctggtgtcaactttttctctgtgaatggaccagagattataagccagtatttgggtgaaagcgagaaagctctagatgaggttttcagatctgctagcaatgctacaccagctgtggtgttcattgatgacttggatgccattgctcctgctcggaaagaaggaggcgaagaattgtctcagaggatggtagctacattactgaatttaatggatggaataagtaggacggatggcgttgttgtaattgctgcaaccaataggcctgatagcattgagcccgcccttagacggccaggaagacttgacagggaaattgaaattggtgtaccatcttctacacaacggtccgatatacttcacataattctccgtgggatgcggcattcactttcaaacatccaggttgaacagcttgctatggcaacccatggttttgttggtgcagatctgtctgcactgtgttgtgaggcagcctttgtctgcttaaggcggcatcttgatcagagttcctcttctagcaatttgccccttgaagaagcacctattgctgagtcctcgtcaaatatgtcagacatatcatctgatagttcggattctgcatcgtcatgtatcacaatttcagccacaacttcaggggctcagcgttcatttagtttggatgagacagtttccctagtagcggatgatattcaaaacaatggcaactcttgttctgaacagatgcttagaaaacaaggagaacataccttaagtgttggatttgaagattttgaaaatgctaagaccaaaatcagacctagtgccatgcgagaggtgatattagaggttcctaaagttaactgggaagatgttggtggccaaaatgaggtgaaaaatcagctaatggaagcagtagaatggcctcaaaaacatcaggacgcattcaagagaataggtacaaggccaccaagtgggatactgatgtttggtcctcctggatgtagcaagacccttatggcacgtgcagtagcttctgaagccaagctgaattttcttgctgtcaaaggtccagaactattcagcaaatgggttggtgaatccgaaaaggctgttaggtccctattcgcaaaggcaagagcaaatgccccctccattatctttttcgatgagatagatagtcttgcctccattagggggaaagaaaatgatggggtgtcagtttcagacagagttatgagccaacttcttgtggagctcgatggtttgcatcaaagagttggtgttaccgtcattgctgctacaaaccggccagacaagatcgattctgccctactaagacctgggcgctttgatcgcttgctatatgtcggacctcctaatgaaactgatcgcgaagcaatactcaaaatccatttgcgtaaaatcccatgcagctctgatatttgtttaaaggaattggcttccattaccaaaggctatacaggagctgacatatcattgatatgcagagaagcagctattgctgcacttgaggagagtcttgaaatggaggaaataagcatgcgacatttaaaagctgcgattagccaaatcgaaccaacagagattctgtcttacaaagcactgtctgaaaaattccaaagacttgtccatacagacccacaaagagaagaggaggttacacaaccaggaaacaaaagccgatctctatggacaccattgagatcagttgccatgtttcttcgccgccacattgcttcgtaaacaaatgttgaaaccagcaaactttggaaattctccatcactaacgtacgtattgtgtttgtttaaactagatattgtttttttgttgcgtctcacagacttgtacgaatcaacggaacaaataacatgaatgtaaagatttggaaggctgattatttatcttgtgtaatgc

SEQ ID NO: 97195 - protein, 1022 aa, Arabidopsis thaliana
  peptide (1)..(1022): Ceres Seq. ID no. 12736407
MPSKKKQSRTPSRLSNSEPPASPRTPASSTTSRDTDSINEEELRRSIEEASAAFPCLLGKSAIIARVADVASESIRGSKIWLSETSMVAASLSPGSTVSVSLASPESRFSRSFPLSSIKAEYGDDSESIIADEPGNYFVLTTVFSSSKVFKDAVRISLNLCYGLGCPVSGRTVFVYPVSGPSLSDQFNGNGRSRYDDVNHLSLLACKELCLELTPFRNMLQAKNAFESSYEQNGNGNSTPKTPANLQKFSSPRPKSPVSPIIEDSVFSCKQRFSSESSIDLREVLSNESSKKLLQICASSWLYPCSLLYGNFVSVPILSEICIFCVKRADKRPSDTSNRNHAFMINQETKVYLHHTLDLASEIQGRTFVQGLQFDEGENVGCEISKLGGLSKEYAILRDIIDSSSIKNSLSSLGLRPTKGVLIHGPPGTGKTSLARTFARHSGVNFFSVNGPEIISQYLGESEKALDEVFRSASNATPAVVFIDDLDAIAPARKEGGEELSQRMVATLLNLMDGISRTDGVVVIAATNRPDSIEPALRRPGRLDREIEIGVPSSTQRSDILHIILRGMRHSLSNIQVEQLAMATHGFVGADLSALCCEAAFVCLRRHLDQSSSSSNLPLEEAPIAESSSNMSDISSDSSDSASSCITISATTSGAQRSFSLDETVSLVADDIQNNGNSCSEQMLRKQGEHTLSVGFEDFENAKTKIRPSAMREVILEVPKVNWEDVGGQNEVKNQLMEAVEWPQKHQDAFKRIGTRPPSGILMFGPPGCSKTLMARAVASEAKLNFLAVKGPELFSKWVGESEKAVRSLFAKARANAPSIIFFDEIDSLASIRGKENDGVSVSDRVMSQLLVELDGLHQRVGVTVIAATNRPDKIDSALLRPGRFDRLLYVGPPNETDREAILKIHLRKIPCSSDICLKELASITKGYTGADISLICREAAIAALEESLEMEEISMRHLKAAISQIEPTEILSYKALSEKFQRLVHTDPQREEEVTQPGNKSRSLWTPLRSVAMFLRRHIAS

SEQ ID NO: 97196 - protein, 936 aa, Arabidopsis thaliana
  peptide (1)..(936): Ceres Seq. ID no. 12736408
MVAASLSPGSTVSVSLASPESRFSRSFPLSSIKAEYGDDSESIIADEPGNYFVLTTVFSSSKVFKDAVRISLNLCYGLGCPVSGRTVFVYPVSGPSLSDQFNGNGRSRYDDVNHLSLLACKELCLELTPFRNMLQAKNAFESSYEQNGNGNSTPKTPANLQKFSSPRPKSPVSPIIEDSVFSCKQRFSSESSIDLREVLSNESSKKLLQICASSWLYPCSLLYGNFVSVPILSEICIFCVKRADKRPSDTSNRNHAFMINQETKVYLHHTLDLASEIQGRTFVQGLQFDEGENVGCEISKLGGLSKEYAILRDIIDSSSIKNSLSSLGLRPTKGVLIHGPPGTGKTSLARTFARHSGVNFFSVNGPEIISQYLGESEKALDEVFRSASNATPAVVFIDDLDAIAPARKEGGEELSQRMVATLLNLMDGISRTDGVVVIAATNRPDSIEPALRRPGRLDREIEIGVPSSTQRSDILHIILRGMRHSLSNIQVEQLAMATHGFVGADLSALCCEAAFVCLRRHLDQSSSSSNLPLEEAPIAESSSNMSDISSDSSDSASSCITISATTSGAQRSFSLDETVSLVADDIQNNGNSCSEQMLRKQGEHTLSVGFEDFENAKTKIRPSAMREVILEVPKVNWEDVGGQNEVKNQLMEAVEWPQKHQDAFKRIGTRPPSGILMFGPPGCSKTLMARAVASEAKLNFLAVKGPELFSKWVGESEKAVRSLFAKARANAPSIIFFDEIDSLASIRGKENDGVSVSDRVMSQLLVELDGLHQRVGVTVIAATNRPDKIDSALLRPGRFDRLLYVGPPNETDREAILKIHLRKIPCSSDICLKELASITKGYTGADISLICREAAIAALEESLEMEEISMRHLKAAISQIEPTEILSYKALSEKFQRLVHTDPQREEEVTQPGNKSRSLWTPLRSVAMFLRRHIAS

SEQ ID NO: 97197 - protein, 804 aa, Arabidopsis thaliana
  peptide (1)..(804): Ceres Seq. ID no. 12736409
MLQAKNAFESSYEQNGNGNSTPKTPANLQKFSSPRPKSPVSPIIEDSVFSCKQRFSSESSIDLREVLSNESSKKLLQICASSWLYPCSLLYGNFVSVPILSEICIFCVKRADKRPSDTSNRNHAFMINQETKVYLHHTLDLASEIQGRTFVQGLQFDEGENVGCEISKLGGLSKEYAILRDIIDSSSIKNSLSSLGLRPTKGVLIHGPPGTGKTSLARTFARHSGVNFFSVNGPEIISQYLGESEKALDEVFRSASNATPAVVFIDDLDAIAPARKEGGEELSQRMVATLLNLMDGISRTDGVVVIAATNRPDSIEPALRRPGRLDREIEIGVPSSTQRSDILHIILRGMRHSLSNIQVEQLAMATHGFVGADLSALCCEAAFVCLRRHLDQSSSSSNLPLEEAPIAESSSNMSDISSDSSDSASSCITISATTSGAQRSFSLDETVSLVADDIQNNGNSCSEQMLRKQGEHTLSVGFEDFENAKTKIRPSAMREVILEVPKVNWEDVGGQNEVKNQLMEAVEWPQKHQDAFKRIGTRPPSGILMFGPPGCSKTLMARAVASEAKLNFLAVKGPELFSKWVGESEKAVRSLFAKARANAPSIIFFDEIDSLASIRGKENDGVSVSDRVMSQLLVELDGLHQRVGVTVIAATNRPDKIDSALLRPGRFDRLLYVGPPNETDREAILKIHLRKIPCSSDICLKELASITKGYTGADISLICREAAIAALEESLEMEEISMRHLKAAISQIEPTEILSYKALSEKFQRLVHTDPQREEEVTQPGNKSRSLWTPLRSVAMFLRRHIAS

SEQ ID NO: 97198 - DNA, 1734 bp, Arabidopsis thaliana
  misc_feature (1)..(1734): Ceres Seq. ID no. 12736413
  misc_feature (1)..(1734): Ortholog of  Ceres SEQ ID NO 13659971 as cited in SEQ ID NO 67565
  misc_feature (1)..(1734): Ortholog of  Ceres SEQ ID NO 13500385 as cited in SEQ ID NO 67583
atggggctgtgtcatgggaaacctatcgaacaacaatcgaagaatctcccaatctccaatgaaatcgaagagacacctaagaattcatctcagaaggcgaaatcttcaggctttccgttttatagtccaagccctttacctagtctcttcaaaacctcacctgctgtgtcatcctccagcgtgagctccacgccacttcgtatctttaagcgacctttcccacctccatcaccagctaagcatatacgagctctcctcgcgcgtcgtcacggttctgttaagcccaatgaagcttcgatccctgaaggtagtgaatgtgaggttggcttggacaagaaatttggtttctctaagcagtttgcttcacactacgagattgacggtgaggtgggtcgagggcattttggttatacttgctctgctaaggggaaaaaaggtagcttgaaaggtcaagatgtggctgtcaaagttattcccaaatccaagatgactacggcaattgcaattgaggatgttagaagagaagtgaagatattgcgggctttaactggtcacaagaacctagtccagttctatgacgccttcgaagatgatgaaaatgtttacattgtcatggagttatgccaaggcggtgaactcttggacaaaatacttcaaaggggaggcaaatactcagaagtagatgctaaaaaagtaatgattcagattcttagtgtagtagcctactgtcatcttcaaggcgtggttcaccgtgacctcaaacctgagaattttctcttcaccacaaaggatgagtcttcccctttgaaagccattgattttggtctctccgactatgtcaggccagatgagaggttgaatgacattgtaggaagtgcttattacgtggcccctgaagttttacaccgtacatatggaactgaggcagatatgtggagtattggagtgattgcttatatactactctgtggtagccggcccttttgggcccgttctgaatctggaatctttagagctgttcttaaagcagaacccaatttcgaagaagctccttggccatctctttcacctgacgctgtagattttgtgaaacgtttgttaaataaagattaccgtaagagactaactgctgcacaggctttatgccatccgtggctggttggctcacatgaattaaagataccatctgatatgatcatttacaagctcgtaaaagtatacataatgtcgtcttctttgagaaaatcggctttagcggctcttgccaaaactttaacagtaccgcagctgacttatttgcaagagcagtttaatctgttaggaccaagcaaaaacggatatatctcgatgcagaattataaaacagcaatcttgaagagctccacagaagctacaaaggattcacgagtcttggattttgtacacatgattagttgtcttcagtataagaaactagactttgaagagttttgcgcttcagctttaagtgtatatcagctagaagcaatggagacttgggagcaacatgcacgccgtgcatatgagttgtatgagaaggatgggaacagagtcatcatgatcgaagaacttgccacggaactcggactaggtccatcggtgcctgttcatgttgttcttcaagattggataagacattctgatgggaagctaagtttcttgggttttgtcagactcttacacggcgtctcctctcgtacattgcagaaagcgtag

SEQ ID NO: 97199 - protein, 577 aa, Arabidopsis thaliana
  peptide (1)..(577): Ceres Seq. ID no. 12736414
MGLCHGKPIEQQSKNLPISNEIEETPKNSSQKAKSSGFPFYSPSPLPSLFKTSPAVSSSSVSSTPLRIFKRPFPPPSPAKHIRALLARRHGSVKPNEASIPEGSECEVGLDKKFGFSKQFASHYEIDGEVGRGHFGYTCSAKGKKGSLKGQDVAVKVIPKSKMTTAIAIEDVRREVKILRALTGHKNLVQFYDAFEDDENVYIVMELCQGGELLDKILQRGGKYSEVDAKKVMIQILSVVAYCHLQGVVHRDLKPENFLFTTKDESSPLKAIDFGLSDYVRPDERLNDIVGSAYYVAPEVLHRTYGTEADMWSIGVIAYILLCGSRPFWARSESGIFRAVLKAEPNFEEAPWPSLSPDAVDFVKRLLNKDYRKRLTAAQALCHPWLVGSHELKIPSDMIIYKLVKVYIMSSSLRKSALAALAKTLTVPQLTYLQEQFNLLGPSKNGYISMQNYKTAILKSSTEATKDSRVLDFVHMISCLQYKKLDFEEFCASALSVYQLEAMETWEQHARRAYELYEKDGNRVIMIEELATELGLGPSVPVHVVLQDWIRHSDGKLSFLGFVRLLHGVSSRTLQKA

SEQ ID NO: 97200 - protein, 415 aa, Arabidopsis thaliana
  peptide (1)..(415): Ceres Seq. ID no. 12736415
MTTAIAIEDVRREVKILRALTGHKNLVQFYDAFEDDENVYIVMELCQGGELLDKILQRGGKYSEVDAKKVMIQILSVVAYCHLQGVVHRDLKPENFLFTTKDESSPLKAIDFGLSDYVRPDERLNDIVGSAYYVAPEVLHRTYGTEADMWSIGVIAYILLCGSRPFWARSESGIFRAVLKAEPNFEEAPWPSLSPDAVDFVKRLLNKDYRKRLTAAQALCHPWLVGSHELKIPSDMIIYKLVKVYIMSSSLRKSALAALAKTLTVPQLTYLQEQFNLLGPSKNGYISMQNYKTAILKSSTEATKDSRVLDFVHMISCLQYKKLDFEEFCASALSVYQLEAMETWEQHARRAYELYEKDGNRVIMIEELATELGLGPSVPVHVVLQDWIRHSDGKLSFLGFVRLLHGVSSRTLQKA

SEQ ID NO: 97201 - protein, 373 aa, Arabidopsis thaliana
  peptide (1)..(373): Ceres Seq. ID no. 12736416
MELCQGGELLDKILQRGGKYSEVDAKKVMIQILSVVAYCHLQGVVHRDLKPENFLFTTKDESSPLKAIDFGLSDYVRPDERLNDIVGSAYYVAPEVLHRTYGTEADMWSIGVIAYILLCGSRPFWARSESGIFRAVLKAEPNFEEAPWPSLSPDAVDFVKRLLNKDYRKRLTAAQALCHPWLVGSHELKIPSDMIIYKLVKVYIMSSSLRKSALAALAKTLTVPQLTYLQEQFNLLGPSKNGYISMQNYKTAILKSSTEATKDSRVLDFVHMISCLQYKKLDFEEFCASALSVYQLEAMETWEQHARRAYELYEKDGNRVIMIEELATELGLGPSVPVHVVLQDWIRHSDGKLSFLGFVRLLHGVSSRTLQKA

SEQ ID NO: 97202 - DNA, 693 bp, Arabidopsis thaliana
  misc_feature (1)..(693): Ceres Seq. ID no. 12736417
  misc_feature (1)..(693): Ortholog of  Ceres SEQ ID NO 14303596 as cited in SEQ ID NO 65356
atgcagccagaggtttcagatcaaatattttatgccttcctcaccggaggattatgtgcctcgtctacttccaccaccgtgacgtcgtcgtctgacccttttgccacggtttatgaagacaaagctcttgcttctctgaggaaccataaagaggctgagcgaaagagaagagcaagaatcaattcccatctcaacaagctccgcaagttactctcttgtaactccaagacagacaaatccacactactagcaaaagtggttcaacgagtcaaagaactaaaacaacaaaccctagaaatcaccgacgaaacaataccgtcggagactgacgaaatcagtgtactcaacattgaggactgttccagaggcgacgatcgacggataatctttaaggtatcgttttgctgcgaggaccggccagagctcttgaaagatctcatggagacactcaaatctcttcagatggaaactctctttgccgacatgacaacagtcggtggtcgaacaagaaacgttctcgttgtggccgctgacaaagagcatcacggcgtccagtcggtgaattttctacagaacgcactcaagtctttactcgaacggtcaagcaagtcggtgatggtgggacatggtggtggtggtggggaagaaaggttaaaacgacgtcgtgcgctggatcacatcataatggtctga

SEQ ID NO: 97203 - protein, 230 aa, Arabidopsis thaliana
  peptide (1)..(230): Ceres Seq. ID no. 12736418
MQPEVSDQIFYAFLTGGLCASSTSTTVTSSSDPFATVYEDKALASLRNHKEAERKRRARINSHLNKLRKLLSCNSKTDKSTLLAKVVQRVKELKQQTLEITDETIPSETDEISVLNIEDCSRGDDRRIIFKVSFCCEDRPELLKDLMETLKSLQMETLFADMTTVGGRTRNVLVVAADKEHHGVQSVNFLQNALKSLLERSSKSVMVGHGGGGGEERLKRRRALDHIIMV

SEQ ID NO: 97204 - DNA, 1389 bp, Arabidopsis thaliana
  misc_feature (1)..(1389): Ceres Seq. ID no. 12736435
  misc_feature (1)..(1389): Ortholog of  Ceres SEQ ID NO 13664220 as cited in SEQ ID NO 61151
  misc_feature (1)..(1389): Ortholog of  Ceres SEQ ID NO 13597477 as cited in SEQ ID NO 65160
attgattcactcacaaagaaaagatcattgattcacacacattttccttttttgttgttaaatattcacacacactttttcttccaaagaaagaaagatgccgattagccggagagttctgacgccgatcaccgccgctccggttatcttagccgtcctttgcttcttcttttggtcatcaatcatcgggccggacaatttaaagggcacgaaacacgtccttcaagatgctaagaccattcctcttcccgtcgatggaccagagagcctagagttcgatccacaaggtgaaggcccttacgttggcgtcaccgacggtcgcattctcaaatggcgcggtgaagaactcggctgggtcgatttcgcctacacttctcctcacagagataactgttcgagtcatgaggtagtaccaagttgtgggagaccattgggacttagcttcgagaggaaaacaggagatttgtacatatgtgatggttactttggggtcatgaaggtcggaccagagggaggcctggccgagttagttgttgatgaagccgaaggtcgtaaagttatgtttgccaaccaaggggatatagacgaagaggaagatattttctacttcaatgatagcagcgatacataccatttcagggacgtattttacgtgtctttgtccgggacaaaggttggaagagtaattagatacgatatgaagaagaaagaggccaaagttattatggacaaacttcgtttaccaaatggtctagctctaagcaaaaacggttcgtttgtagtcacatgcgagagtagtacgaacatttgccatagaatatgggtcaaaggtcccaaatccggaaccaacgaggttttcgcaacgctccctggttccccggacaatatccggcgtacgccaacaggcgatttctgggtcgcattacattgcaaaaagaatttgttcacacgtgcagttttgattcacacttgggtcggaaggtttttcatgaacacgatgaagatggagactgtaattcatttcatgaacggaggaaaacctcatggaattgtcgtgaaactctctggagagacaggagagattcttgagatacttgaggacagtgaagggaagacggtgaaatatgttagtgaggcttatgagacaaaagatggaaagttatggatcggatctgtgtattggccggccgtttgggttcttgatacatcggtttatgattccatatgagttagccaaaagaccaaacgccaaaatgaaataaattatcacttagttgtgtaatttgtttattagcgggaatgcatcttgtttttgtatcttcttgtttgttgcgtgagtgaattatatatgatgtaaacttggattctacaaaattttgtttgaagttg

SEQ ID NO: 97205 - protein, 376 aa, Arabidopsis thaliana
  peptide (1)..(376): Ceres Seq. ID no. 12736436
MPISRRVLTPITAAPVILAVLCFFFWSSIIGPDNLKGTKHVLQDAKTIPLPVDGPESLEFDPQGEGPYVGVTDGRILKWRGEELGWVDFAYTSPHRDNCSSHEVVPSCGRPLGLSFERKTGDLYICDGYFGVMKVGPEGGLAELVVDEAEGRKVMFANQGDIDEEEDIFYFNDSSDTYHFRDVFYVSLSGTKVGRVIRYDMKKKEAKVIMDKLRLPNGLALSKNGSFVVTCESSTNICHRIWVKGPKSGTNEVFATLPGSPDNIRRTPTGDFWVALHCKKNLFTRAVLIHTWVGRFFMNTMKMETVIHFMNGGKPHGIVVKLSGETGEILEILEDSEGKTVKYVSEAYETKDGKLWIGSVYWPAVWVLDTSVYDSI

SEQ ID NO: 97206 - protein, 244 aa, Arabidopsis thaliana
  peptide (1)..(244): Ceres Seq. ID no. 12736437
MKVGPEGGLAELVVDEAEGRKVMFANQGDIDEEEDIFYFNDSSDTYHFRDVFYVSLSGTKVGRVIRYDMKKKEAKVIMDKLRLPNGLALSKNGSFVVTCESSTNICHRIWVKGPKSGTNEVFATLPGSPDNIRRTPTGDFWVALHCKKNLFTRAVLIHTWVGRFFMNTMKMETVIHFMNGGKPHGIVVKLSGETGEILEILEDSEGKTVKYVSEAYETKDGKLWIGSVYWPAVWVLDTSVYDSI

SEQ ID NO: 97207 - protein, 222 aa, Arabidopsis thaliana
  peptide (1)..(222): Ceres Seq. ID no. 12736438
MFANQGDIDEEEDIFYFNDSSDTYHFRDVFYVSLSGTKVGRVIRYDMKKKEAKVIMDKLRLPNGLALSKNGSFVVTCESSTNICHRIWVKGPKSGTNEVFATLPGSPDNIRRTPTGDFWVALHCKKNLFTRAVLIHTWVGRFFMNTMKMETVIHFMNGGKPHGIVVKLSGETGEILEILEDSEGKTVKYVSEAYETKDGKLWIGSVYWPAVWVLDTSVYDSI

SEQ ID NO: 97208 - DNA, 1119 bp, Arabidopsis thaliana
  misc_feature (1)..(1119): Ceres Seq. ID no. 12736439
  misc_feature (1)..(1119): Ortholog of  Ceres SEQ ID NO 13664220 as cited in SEQ ID NO 61151
  misc_feature (1)..(1119): Ortholog of  Ceres SEQ ID NO 13597477 as cited in SEQ ID NO 65160
atgatgatcattacagtgttcttaacagtgattgcagcggttctcgcaatccttgtcaagaattctcaaaccggttctggcatcttcgcaccgcctgaaatctccggttcgcgtgatgttttcccgtcggcgaaagtggttaacttaaccggagcctctggtcctgagagtatagctttcgatccagcaggtgaaggtccgtacgttggtgtctcagatggtcgtatcttgaaatggcgcggtgaaccgcttggatggtcagatttcgctcacacatcgtctaacaggcaggagtgtgctcgcccatttgcaccagagttggagcatgtgtgtggaaggccattagggttgcggttcgataagaaaaccggagatctctacatagcggatgcctactttggccttcttgttgttggtcctgctggtggtttagccaaacctctggttacagaagctgaggggcagccgtttcgtttcactaatgatttggatattgatgagcaggaagatgtgatttactttacagatactagtgccagattccagagaaggcaattcttagctgctgttttgaacgtcgataagactggaaggtttatcaagtatgatagatcaagcaagaaagcgacagtcttattacaaggccttgcatttgcaaacggcgttgcactaagcaaagaccggtcttttgtattggtagtcgaaacaactacttgcaagattctaagactttggctctctggtccaaacgcaggaacacaccaagtgtttgctgagcttccgggtttccctgacaacatcagaagaaactcgaatggagaattctgggtcgctttacactcaaagaaaggtcttttcgcgaaactatcacttactcaaacttggttcagggatttggtgcttagacttccgatcagtccccaacgcctgcactcgctgttcactggaggaatacctcatgctacagccataaagctgagtgaatcaggtaaggttttggaggtacttgaggataaggaaggaaagacattgaggtttataagtgaagtggaagagaaagacggcaagctttggattggttctgttctcgtgccttttcttggtgtctatgatttgtag

SEQ ID NO: 97209 - protein, 372 aa, Arabidopsis thaliana
  peptide (1)..(372): Ceres Seq. ID no. 12736440
MMIITVFLTVIAAVLAILVKNSQTGSGIFAPPEISGSRDVFPSAKVVNLTGASGPESIAFDPAGEGPYVGVSDGRILKWRGEPLGWSDFAHTSSNRQECARPFAPELEHVCGRPLGLRFDKKTGDLYIADAYFGLLVVGPAGGLAKPLVTEAEGQPFRFTNDLDIDEQEDVIYFTDTSARFQRRQFLAAVLNVDKTGRFIKYDRSSKKATVLLQGLAFANGVALSKDRSFVLVVETTTCKILRLWLSGPNAGTHQVFAELPGFPDNIRRNSNGEFWVALHSKKGLFAKLSLTQTWFRDLVLRLPISPQRLHSLFTGGIPHATAIKLSESGKVLEVLEDKEGKTLRFISEVEEKDGKLWIGSVLVPFLGVYDL

SEQ ID NO: 97210 - protein, 371 aa, Arabidopsis thaliana
  peptide (1)..(371): Ceres Seq. ID no. 12736441
MIITVFLTVIAAVLAILVKNSQTGSGIFAPPEISGSRDVFPSAKVVNLTGASGPESIAFDPAGEGPYVGVSDGRILKWRGEPLGWSDFAHTSSNRQECARPFAPELEHVCGRPLGLRFDKKTGDLYIADAYFGLLVVGPAGGLAKPLVTEAEGQPFRFTNDLDIDEQEDVIYFTDTSARFQRRQFLAAVLNVDKTGRFIKYDRSSKKATVLLQGLAFANGVALSKDRSFVLVVETTTCKILRLWLSGPNAGTHQVFAELPGFPDNIRRNSNGEFWVALHSKKGLFAKLSLTQTWFRDLVLRLPISPQRLHSLFTGGIPHATAIKLSESGKVLEVLEDKEGKTLRFISEVEEKDGKLWIGSVLVPFLGVYDL

SEQ ID NO: 97211 - DNA, 1302 bp, Arabidopsis thaliana
  misc_feature (1)..(1302): Ceres Seq. ID no. 12736538
  misc_feature (1)..(1302): Ortholog of  Ceres SEQ ID NO 13597574 as cited in SEQ ID NO 64677
  misc_feature (1)..(1302): Ortholog of  Ceres SEQ ID NO 12617417 as cited in SEQ ID NO 65089
  misc_feature (1)..(1302): Ortholog of  Ceres SEQ ID NO 13597678 as cited in SEQ ID NO 65375
  misc_feature (1)..(1302): Ortholog of  Ceres SEQ ID NO 12779098 as cited in SEQ ID NO 67698
  misc_feature (1)..(1302): Ortholog of  Ceres SEQ ID NO 13591190 as cited in SEQ ID NO 68044
atgaacagagcaatgccgcagccgcgaccggaaactatacgtggcagtttaaaacctcacatcatggtgtttccatatccagcacaaggccacttgcttcctcttctcgacttaacccatcaactctgtcttcgtggcctcacagtctccatcatcgtcactcctaaaaaccttccttacctctctcctcttctctccgctcatccatccgctgtttccgtcgtcactttacctttccctcaccatcctttaatcccttccggggttgaaaacgttaaagatctaggtggttacggaaatcccttgatcatggcttctcttcgtcagcttcgagagcctatcgtcaactggttaagttctcatccaaatccaccggtcgctctcatttctgatttcttccttggatggaccaaagatcttggtattcctcgctttgctttcttcagttctggagcattcttagcttcgattctccattttgtctctgacaagcctcatctctttgaatcaactgagcctgtctgtttatcggatcttcctcgctcccctgttttcaaaacagagcatctcccgtctttaatccctcagtctccattatcgcaagatcttgaaagtgttaaagacagtaccatgaatttttcgagttatggttgtattttcaatacttgtgagtgtctggaagaggattacatggagtatgtgaagcagaaagtgagtgagaaccgcgttttcggtgttggtccgctttcttcagtcgggttaagtaaggaagattccgtatccaatgtagacgcaaaggcattgttgagttggctagatggatgtccagatgattcagtgctctacatctgcttcggaagtcaaaaggtgttaaccaaagagcagtgtgatgatctggctcttggtctcgagaagagtatgacccgattcgtatgggtggttaagaaagacccgataccggatgggtttgaggatcgggtcgcaggtcgaggaatgattgtgagagggtgggctcctcaagtggctatgttgagtcatgtggcggttggcgggttcttaatccattgtggatggaactcggtgctggaagcgatggctagcggaacaatgatcttggcatggccaatggaagcagaccagtttgtagatgcgaggttggtagtggagcatatgggtgtggcggttagtgtatgtgaagggggtaagactgtgcctgacccgtatgagatgggtcggattatcgctgacacaatgggtgagagtggaggcgaggcgcgtgctcgggctaaggagatgggatag

SEQ ID NO: 97212 - protein, 433 aa, Arabidopsis thaliana
  peptide (1)..(433): Ceres Seq. ID no. 12736539
MNRAMPQPRPETIRGSLKPHIMVFPYPAQGHLLPLLDLTHQLCLRGLTVSIIVTPKNLPYLSPLLSAHPSAVSVVTLPFPHHPLIPSGVENVKDLGGYGNPLIMASLRQLREPIVNWLSSHPNPPVALISDFFLGWTKDLGIPRFAFFSSGAFLASILHFVSDKPHLFESTEPVCLSDLPRSPVFKTEHLPSLIPQSPLSQDLESVKDSTMNFSSYGCIFNTCECLEEDYMEYVKQKVSENRVFGVGPLSSVGLSKEDSVSNVDAKALLSWLDGCPDDSVLYICFGSQKVLTKEQCDDLALGLEKSMTRFVWVVKKDPIPDGFEDRVAGRGMIVRGWAPQVAMLSHVAVGGFLIHCGWNSVLEAMASGTMILAWPMEADQFVDARLVVEHMGVAVSVCEGGKTVPDPYEMGRIIADTMGESGGEARARAKEMG

SEQ ID NO: 97213 - protein, 429 aa, Arabidopsis thaliana; identical to SEQ ID NO: 72048
  peptide (1)..(429): Ceres Seq. ID no. 12736540

SEQ ID NO: 97214 - protein, 412 aa, Arabidopsis thaliana; identical to SEQ ID NO: 72049
  peptide (1)..(412): Ceres Seq. ID no. 12736541

SEQ ID NO: 97215 - DNA, 1452 bp, Arabidopsis thaliana
  misc_feature (1)..(1452): Ceres Seq. ID no. 12736574
  misc_feature (1)..(1452): Ortholog of  Ceres SEQ ID NO 13656177 as cited in SEQ ID NO 64997
tctcccgacactttcctcttcaaatcccaaacggctatctgactttggaagaaagagagattcagagtggagaatattatggaaggaactttagatgaagagaatctagtcttcgaaaccaccaaaggtatcaaaccaatcaagagtttcgatgacatggggatgaatgataaagttcttcgcggcgtttatgactacggttacaagaaaccatctgagattcagcagagagctttggttccgattctcaaaggacgagacgtcatagctcaggctcagtccggtactggtaaaacctctatgattgctatctccgtttgccaaatcgtcaacatatcctccagaaaggttcaagtcttggtgttgtctccatcaagagagctggcttcacaaacagagaagactatacaggctattggggcacataccaatattcaggcgcatgcttgcattggtggtaagagcatcggtgaagatatcaagaagctagagcgtggtgtccacgctgtgtctgggacacctggtcgagtttacgatatgataaagagaggaagcttacaaactaaagctgttaaacttttggttctggatgaatcagatgaaatgctgagtaaaggtttgaaagaccagatttatgacgtttacagagctcttccacacgatattcaggtttgcttgatttctgctactcttcctcaagagattttggagatgacagaaaagtttatgacagatcctgtgaggattcttgtgaagcctgatgaattgactcttgaaggaatcaaacaatactatgttgatgttgataaagaagagtggaaattcgatactctttgcgatctttatggaagacttactattaaccaagctattatcttctgcaacacaagacaaaaggttgattggcttactgagaagatgaggagtagcaatttcatagtctcatcaatgcatggagacaaacgtcaaaaggagagagatgatatcatgaaccagtttcggtcatttaaaagccgtgttttaatcgcctcagatgtatgggcacgagggatcgacgttcaaactgtttctcatgtcatcaattatgatatacccaacaacccggagctatacattcatcgtataggacgagctggtcgttttggtcgtgaaggtgttgccattaactttgtaaaatcttcggatatgaaagatcttaaggatattgagcgacattacggtactaaaatccgcgagatgccagctgatcttgtctaaagatgttgtttccttgaagctgaagttatagaatcggttttgaaagaagttttgttcttcaactatccattggtttagacttaggcacaagctctttgaaaatgtatacctcacttcagtcatttcttttgtaccaaccaaaataatattattgtagctattttattttctgaaaatcaacaaattgtgtttggc

SEQ ID NO: 97216 - protein, 392 aa, Arabidopsis thaliana
  peptide (1)..(392): Ceres Seq. ID no. 12736575
MEGTLDEENLVFETTKGIKPIKSFDDMGMNDKVLRGVYDYGYKKPSEIQQRALVPILKGRDVIAQAQSGTGKTSMIAISVCQIVNISSRKVQVLVLSPSRELASQTEKTIQAIGAHTNIQAHACIGGKSIGEDIKKLERGVHAVSGTPGRVYDMIKRGSLQTKAVKLLVLDESDEMLSKGLKDQIYDVYRALPHDIQVCLISATLPQEILEMTEKFMTDPVRILVKPDELTLEGIKQYYVDVDKEEWKFDTLCDLYGRLTINQAIIFCNTRQKVDWLTEKMRSSNFIVSSMHGDKRQKERDDIMNQFRSFKSRVLIASDVWARGIDVQTVSHVINYDIPNNPELYIHRIGRAGRFGREGVAINFVKSSDMKDLKDIERHYGTKIREMPADLV

SEQ ID NO: 97217 - protein, 366 aa, Arabidopsis thaliana
  peptide (1)..(366): Ceres Seq. ID no. 12736576
MGMNDKVLRGVYDYGYKKPSEIQQRALVPILKGRDVIAQAQSGTGKTSMIAISVCQIVNISSRKVQVLVLSPSRELASQTEKTIQAIGAHTNIQAHACIGGKSIGEDIKKLERGVHAVSGTPGRVYDMIKRGSLQTKAVKLLVLDESDEMLSKGLKDQIYDVYRALPHDIQVCLISATLPQEILEMTEKFMTDPVRILVKPDELTLEGIKQYYVDVDKEEWKFDTLCDLYGRLTINQAIIFCNTRQKVDWLTEKMRSSNFIVSSMHGDKRQKERDDIMNQFRSFKSRVLIASDVWARGIDVQTVSHVINYDIPNNPELYIHRIGRAGRFGREGVAINFVKSSDMKDLKDIERHYGTKIREMPADLV

SEQ ID NO: 97218 - protein, 364 aa, Arabidopsis thaliana
  peptide (1)..(364): Ceres Seq. ID no. 12736577
MNDKVLRGVYDYGYKKPSEIQQRALVPILKGRDVIAQAQSGTGKTSMIAISVCQIVNISSRKVQVLVLSPSRELASQTEKTIQAIGAHTNIQAHACIGGKSIGEDIKKLERGVHAVSGTPGRVYDMIKRGSLQTKAVKLLVLDESDEMLSKGLKDQIYDVYRALPHDIQVCLISATLPQEILEMTEKFMTDPVRILVKPDELTLEGIKQYYVDVDKEEWKFDTLCDLYGRLTINQAIIFCNTRQKVDWLTEKMRSSNFIVSSMHGDKRQKERDDIMNQFRSFKSRVLIASDVWARGIDVQTVSHVINYDIPNNPELYIHRIGRAGRFGREGVAINFVKSSDMKDLKDIERHYGTKIREMPADLV

SEQ ID NO: 97219 - DNA, 1701 bp, Arabidopsis thaliana
  misc_feature (1)..(1701): Ceres Seq. ID no. 12736582
  misc_feature (1)..(1701): Ortholog of  Ceres SEQ ID NO 13598368 as cited in SEQ ID NO 62140
acacaaaaaaaaaaaacaaaaaaaaaaatataactctcaaacaacccaatctaaatggcttctctatctttaccaataactctcaagaacccaagattcttctcttcttctcctcaaaacatctttaaaacccaaccccaaaccctagttttgacaacaaagttcaagacttgttccatcatttgctcatcttcatgcacaagcataagctcttcaacgactcaacagaagcagtcaaataaacaaacccatgtgtcagacaacaaacgagaagaaaaagcggaagaagaagaagaagagaaagaagttagtcttcgagaaatttggagagaagtacaaggttgcaataattgggaaggacaactagatccaatgaacaatcatcttcgaagagagatcatacgttatggcgaatttgctcaagcttgctatgactcattcgacttcgatcctcactctaaatactgtggctcttgcaaataccatccttctgatttcttcttaaaccttgacctacatctccacaaaggctacaccataacacgttacctctacgctacatccaacataaacctcccaaacttcttccagaaatcaaaactcagctcgatttggagccaacacgcgaactggatgggttttgttgctgtagctacggacgaagaagaggtgagtcggctcgggagacgtgacatagtcattgcttggagaggcacagtcacttatctcgaatggatctatgacttaaaagacattctttgttcagctaacttcggtgacgacccatctatcaagattgaattagggtttcatgacttatacaccaagaaagaagattcttgcaaattctcttccttctcggctcgggaacaggttttggctgaagtcaaacggcttattgagtactacggtaccgaagaagaaggtcacaagacaagcatcaccgtgacagggcacagcctcggcgcctctctggctttggtcagtgcttatgatatcgcagagctaaacttgaatcacgtaccggagaacaactataaaattccaattactgttttctccttctcgggacctcgagtaggtaacttgaggttcaaggaacgatgtgacgaactaggggttaaagttctgagagtcgttaatgtacacgacaaggtaccttctgttccagggatattcacaaacgagaagtttcagtttcagaagtatgtggaagaaaaaacatcattcccgtggagctacgcgcacgtcggcgtggagcttgccttggaccacaagaaaagcccatttctgaaaccgactaaggatttgggttgtgcacataacctagaagctttgcttcatttggtggatggttatcatggaaaagacgaagaagcagagaagagattttgtttggtgacaaagcgagacatagctttagtgaataagagttgtgatttcttgagaggtgagtaccatgtgccgccttgttggagacaagatgagaacaaaggtatggtcaagaacggcgatggacagtgggttcttccggaccgaccactgcttgaacctcacggaccggaggatatcgctcatcatcttcaacaagttcttgggaaggttaacgatgataattttaaacccacaacgacttaagtcgaaaattaaatataaatagttataaaaatattttcgtaattaatgtgtggatcacgtttg

SEQ ID NO: 97220 - protein, 527 aa, Arabidopsis thaliana
  peptide (1)..(527): Ceres Seq. ID no. 12736583
MASLSLPITLKNPRFFSSSPQNIFKTQPQTLVLTTKFKTCSIICSSSCTSISSSTTQQKQSNKQTHVSDNKREEKAEEEEEEKEVSLREIWREVQGCNNWEGQLDPMNNHLRREIIRYGEFAQACYDSFDFDPHSKYCGSCKYHPSDFFLNLDLHLHKGYTITRYLYATSNINLPNFFQKSKLSSIWSQHANWMGFVAVATDEEEVSRLGRRDIVIAWRGTVTYLEWIYDLKDILCSANFGDDPSIKIELGFHDLYTKKEDSCKFSSFSAREQVLAEVKRLIEYYGTEEEGHKTSITVTGHSLGASLALVSAYDIAELNLNHVPENNYKIPITVFSFSGPRVGNLRFKERCDELGVKVLRVVNVHDKVPSVPGIFTNEKFQFQKYVEEKTSFPWSYAHVGVELALDHKKSPFLKPTKDLGCAHNLEALLHLVDGYHGKDEEAEKRFCLVTKRDIALVNKSCDFLRGEYHVPPCWRQDENKGMVKNGDGQWVLPDRPLLEPHGPEDIAHHLQQVLGKVNDDNFKPTTT

SEQ ID NO: 97221 - protein, 421 aa, Arabidopsis thaliana
  peptide (1)..(421): Ceres Seq. ID no. 12736584
MNNHLRREIIRYGEFAQACYDSFDFDPHSKYCGSCKYHPSDFFLNLDLHLHKGYTITRYLYATSNINLPNFFQKSKLSSIWSQHANWMGFVAVATDEEEVSRLGRRDIVIAWRGTVTYLEWIYDLKDILCSANFGDDPSIKIELGFHDLYTKKEDSCKFSSFSAREQVLAEVKRLIEYYGTEEEGHKTSITVTGHSLGASLALVSAYDIAELNLNHVPENNYKIPITVFSFSGPRVGNLRFKERCDELGVKVLRVVNVHDKVPSVPGIFTNEKFQFQKYVEEKTSFPWSYAHVGVELALDHKKSPFLKPTKDLGCAHNLEALLHLVDGYHGKDEEAEKRFCLVTKRDIALVNKSCDFLRGEYHVPPCWRQDENKGMVKNGDGQWVLPDRPLLEPHGPEDIAHHLQQVLGKVNDDNFKPTTT

SEQ ID NO: 97222 - protein, 334 aa, Arabidopsis thaliana
  peptide (1)..(334): Ceres Seq. ID no. 12736585
MGFVAVATDEEEVSRLGRRDIVIAWRGTVTYLEWIYDLKDILCSANFGDDPSIKIELGFHDLYTKKEDSCKFSSFSAREQVLAEVKRLIEYYGTEEEGHKTSITVTGHSLGASLALVSAYDIAELNLNHVPENNYKIPITVFSFSGPRVGNLRFKERCDELGVKVLRVVNVHDKVPSVPGIFTNEKFQFQKYVEEKTSFPWSYAHVGVELALDHKKSPFLKPTKDLGCAHNLEALLHLVDGYHGKDEEAEKRFCLVTKRDIALVNKSCDFLRGEYHVPPCWRQDENKGMVKNGDGQWVLPDRPLLEPHGPEDIAHHLQQVLGKVNDDNFKPTTT

SEQ ID NO: 97223 - DNA, 1533 bp, Arabidopsis thaliana
  misc_feature (1)..(1533): Ceres Seq. ID no. 12736586
  misc_feature (1)..(1533): Ortholog of  Ceres SEQ ID NO 13600220 as cited in SEQ ID NO 0
atggcaattccaaaagctcactactctttagcagttcttgtccttctctttgtcgtcgtttcgagtagccaaaaagtctgcaatccagaatgcaaggccaaagaacccttccactgcgataatactcatgcattcaaccgtagtggatttcccaaaaatttcacttttggtgcagctacttcggcttatcaaattgaaggtgcagcacatagagcacttaatggatgggactatttcacgcatagatatccagaaaaagtaccggatcgtagttcagcagatcttgcttgtgattcgtatgatctttataaggatgatgtcaaactgctaaaaagaatgaatgttcaagcataccgtctctcgatagcatggtcaagggtcttaccaaagggaagactgactgggggagtggacgagaatgggataacatactacaacaatctcattaacgagttgaaagcaaatggcatagaaccatatgttactatatttcattgggatgttccccagactttagaagacgaatatggaggcttcttaagcacacgtatagtggaggactacacaaactacgctgagcttctattccaaagattcggagacagggtcaaattttggatcactttaaatcagcctctctctcttgcactcaaaggctatggaaatggatcttatccaccaggacggtgcaccggctgtgaacttggaggagattctggagttgaaccttatacagttgcacataaccaacttctagctcatgcaaaaactgtctctttatacagaaaaagatatcagaaatttcaaggtggtaagataggaacaaccttgatcgggagatggttcgtcccgctaaatgaatttagtgaactcgacaaggctgctgcaaaacgagcattcgacttttttgttggatggttcttggatccattggtgtacggaaaatatccaacaataatgagagagatggtaggagatagattgccagaattcacacctgaggaatcagctttagttaaaggatcacttgattttctagggttgaactattacgtttcacaatatgcaactgacgcacctcctccgacacaacctaatgcaataacggatgcacgagttactcttggattttaccgcaatggaagtcctattggtgttgcttctagcttcgtctactatcctccaggattccgtcagattctaaactacatcaaagacaactacaaaaatccacttacctacatcaccgaaaacggagttgctgatcttgatcttggaaacgtaacgcttgcaactgctcttgccgataatggacggattcaaaaccattgcagccatctctcttgtctcaaatgcgccatgaaggatggatgcaacgtagcaggatattttgcatggtcattgatggacaattacgaattcggaaatggttacaccctccggtttggtatgaattgggtcaacttcactaatcctgctgatcgtaaagagaaagcttctggaaaatggttctctaagttcctcgcaaaataa

SEQ ID NO: 97224 - protein, 510 aa, Arabidopsis thaliana
  peptide (1)..(510): Ceres Seq. ID no. 12736587
MAIPKAHYSLAVLVLLFVVVSSSQKVCNPECKAKEPFHCDNTHAFNRSGFPKNFTFGAATSAYQIEGAAHRALNGWDYFTHRYPEKVPDRSSADLACDSYDLYKDDVKLLKRMNVQAYRLSIAWSRVLPKGRLTGGVDENGITYYNNLINELKANGIEPYVTIFHWDVPQTLEDEYGGFLSTRIVEDYTNYAELLFQRFGDRVKFWITLNQPLSLALKGYGNGSYPPGRCTGCELGGDSGVEPYTVAHNQLLAHAKTVSLYRKRYQKFQGGKIGTTLIGRWFVPLNEFSELDKAAAKRAFDFFVGWFLDPLVYGKYPTIMREMVGDRLPEFTPEESALVKGSLDFLGLNYYVSQYATDAPPPTQPNAITDARVTLGFYRNGSPIGVASSFVYYPPGFRQILNYIKDNYKNPLTYITENGVADLDLGNVTLATALADNGRIQNHCSHLSCLKCAMKDGCNVAGYFAWSLMDNYEFGNGYTLRFGMNWVNFTNPADRKEKASGKWFSKFLAK

SEQ ID NO: 97225 - protein, 398 aa, Arabidopsis thaliana
  peptide (1)..(398): Ceres Seq. ID no. 12736588
MNVQAYRLSIAWSRVLPKGRLTGGVDENGITYYNNLINELKANGIEPYVTIFHWDVPQTLEDEYGGFLSTRIVEDYTNYAELLFQRFGDRVKFWITLNQPLSLALKGYGNGSYPPGRCTGCELGGDSGVEPYTVAHNQLLAHAKTVSLYRKRYQKFQGGKIGTTLIGRWFVPLNEFSELDKAAAKRAFDFFVGWFLDPLVYGKYPTIMREMVGDRLPEFTPEESALVKGSLDFLGLNYYVSQYATDAPPPTQPNAITDARVTLGFYRNGSPIGVASSFVYYPPGFRQILNYIKDNYKNPLTYITENGVADLDLGNVTLATALADNGRIQNHCSHLSCLKCAMKDGCNVAGYFAWSLMDNYEFGNGYTLRFGMNWVNFTNPADRKEKASGKWFSKFLAK

SEQ ID NO: 97226 - DNA, 1266 bp, Arabidopsis thaliana
  misc_feature (1)..(1266): Ceres Seq. ID no. 12736589
  misc_feature (1)..(1266): Ortholog of  Ceres SEQ ID NO 13600220 as cited in SEQ ID NO 0
atggcaattccaaaagctcactactctttagccatcattgtcgttctttttgccgtttcgaggagccaaaaagttgaaggtgcagcacatagagcacttaatggatgggactatttcactcatagatatccagaaagagtttcagatcgcagtataggagaccttgcttgtaattcgtatgatctttataaggatgatgttaaactactaaaaagaatgaacgttcaagcataccgattctcaatagcatggtcaagggtcttaccaaagggcagactaattggaggagtcgacgagaatgggatcacatactacaacaatctcattaacgagttgaaagcaaatggcatagaaccatttgtgactatatttcattgggatgttcctcaagactttagaagacgaatatggaggcttcttaagcccacgtatagtgacttcaaaaattacgctgagcttctattccaaagattcggagacagagttaaattttggatcacattaaatcagccgtactctctcgctgtcaaaggttatggagatggacagtatccaccgggaaggtgcactgactgtgaatttggaggagattctggaactgaaccttatatagttggacatcacgaacttctggctcatatggaagctgtatctttataccgaaaaagatatcagaaatttcaaggtggtaagataggaacgacattgatcggtagatggttcatcccactaaatgaaactaacgatctcgacaaggctgctgcaaaacgagaattcgatttttccgttcttggatccactggtgtacggacaatatccaaagataatgagagactaggagatagattgccaaaattcacgcccaagcaatcagctttacttaaaggatcacttgattttctagggttgaactattacgttacaagatatgcaacctacagacctcctccaatgccgacacaacatagtgtcttaaccgattcaggagttacaattggatttgagcgaaatggagtttctattggtgttaaggctagtatcaactttggattccgtcagattctaaatcacatcaaaaacaagtacaagaatccattaacctacatcaccgaaaacggatattttgcatggtcattgatggacaattatgaattcggaaatggttacactctccggtttgatatgaattgggtcaacttcactaatcctgctgatcgaagagaaaaagcttctggaaaatggttctctaggttcattgcaaaataa

SEQ ID NO: 97227 - protein, 421 aa, Arabidopsis thaliana
  peptide (1)..(421): Ceres Seq. ID no. 12736590
MAIPKAHYSLAIIVVLFAVSRSQKVEGAAHRALNGWDYFTHRYPERVSDRSIGDLACNSYDLYKDDVKLLKRMNVQAYRFSIAWSRVLPKGRLIGGVDENGITYYNNLINELKANGIEPFVTIFHWDVPQDFRRRIWRLLKPTYSDFKNYAELLFQRFGDRVKFWITLNQPYSLAVKGYGDGQYPPGRCTDCEFGGDSGTEPYIVGHHELLAHMEAVSLYRKRYQKFQGGKIGTTLIGRWFIPLNETNDLDKAAAKREFDFSVLGSTGVRTISKDNERLGDRLPKFTPKQSALLKGSLDFLGLNYYVTRYATYRPPPMPTQHSVLTDSGVTIGFERNGVSIGVKASINFGFRQILNHIKNKYKNPLTYITENGYFAWSLMDNYEFGNGYTLRFDMNWVNFTNPADRREKASGKWFSRFIAK

SEQ ID NO: 97228 - protein, 349 aa, Arabidopsis thaliana
  peptide (1)..(349): Ceres Seq. ID no. 12736591
MNVQAYRFSIAWSRVLPKGRLIGGVDENGITYYNNLINELKANGIEPFVTIFHWDVPQDFRRRIWRLLKPTYSDFKNYAELLFQRFGDRVKFWITLNQPYSLAVKGYGDGQYPPGRCTDCEFGGDSGTEPYIVGHHELLAHMEAVSLYRKRYQKFQGGKIGTTLIGRWFIPLNETNDLDKAAAKREFDFSVLGSTGVRTISKDNERLGDRLPKFTPKQSALLKGSLDFLGLNYYVTRYATYRPPPMPTQHSVLTDSGVTIGFERNGVSIGVKASINFGFRQILNHIKNKYKNPLTYITENGYFAWSLMDNYEFGNGYTLRFDMNWVNFTNPADRREKASGKWFSRFIAK

SEQ ID NO: 97229 - DNA, 1011 bp, Arabidopsis thaliana
  misc_feature (1)..(1011): Ceres Seq. ID no. 12736608
  misc_feature (1)..(1011): Ortholog of  Ceres SEQ ID NO 13584744 as cited in SEQ ID NO 69137
atgacagaagcgacaggcctgaggcgtttcttttctaagttcatttgctgtgatgcagacgattcgactattgaatatgaaccatatgtgtacattccagcgaatagttactcgtatgccgaggttacgaaaattacaaacaagtttaatagagttcatggcaaaggagggtttggtgtagtttatcgtggagttttaaacaagcaacaagtagcagtaaagatgctaaaccgagcttccatctacaatattgtacagtttaccaaagaggttcacgactttgtaaaagttcgtcacaaaaacttggtgagcctcattggatattgcgatgatggtgagcacttggccctaatctacgaattcgtggcaaatggtgacttgaatgatcaactatctgggaagtttggtaatgtcccgagctgggaaaccaggttgaaaatcatcataggagtagcacaaggtctggagtatttgcatagcgagttgcgaatccttcaccgatatgttaagccgacaaatatcctactaggcgaaaactttgaagcgaaactggctgatttcgggctgtctagatcctctccaaccaaccctgacatacaagcgtcaaataagatttatgtcaagcctggaagagatccatatctgcatcaccaatacttcaactcgaaccggttaaaccaaacgagcgacatttatagctttggcattgttatgttggagatgataaccaaccagcctgtagttgacaacaagcgtgagagtcctcacatttcaaagtgggtcgatttaaaggtcgcgaaaggcgatactctagagattgttgatctcaggctaaacaatgactttgagcgcgactcggtcaggaaagctatggatatagcatgcagttgtgcagctcgtgctcataataggccaagcatgagccaggttgttatagagctcaatgagtgtctagccttagagatggctcgaagtaatggaagaactggggagacaactcagactcagtga

SEQ ID NO: 97230 - protein, 336 aa, Arabidopsis thaliana
  peptide (1)..(336): Ceres Seq. ID no. 12736609
MTEATGLRRFFSKFICCDADDSTIEYEPYVYIPANSYSYAEVTKITNKFNRVHGKGGFGVVYRGVLNKQQVAVKMLNRASIYNIVQFTKEVHDFVKVRHKNLVSLIGYCDDGEHLALIYEFVANGDLNDQLSGKFGNVPSWETRLKIIIGVAQGLEYLHSELRILHRYVKPTNILLGENFEAKLADFGLSRSSPTNPDIQASNKIYVKPGRDPYLHHQYFNSNRLNQTSDIYSFGIVMLEMITNQPVVDNKRESPHISKWVDLKVAKGDTLEIVDLRLNNDFERDSVRKAMDIACSCAARAHNRPSMSQVVIELNECLALEMARSNGRTGETTQTQ

SEQ ID NO: 97231 - protein, 262 aa, Arabidopsis thaliana
  peptide (1)..(262): Ceres Seq. ID no. 12736610
MLNRASIYNIVQFTKEVHDFVKVRHKNLVSLIGYCDDGEHLALIYEFVANGDLNDQLSGKFGNVPSWETRLKIIIGVAQGLEYLHSELRILHRYVKPTNILLGENFEAKLADFGLSRSSPTNPDIQASNKIYVKPGRDPYLHHQYFNSNRLNQTSDIYSFGIVMLEMITNQPVVDNKRESPHISKWVDLKVAKGDTLEIVDLRLNNDFERDSVRKAMDIACSCAARAHNRPSMSQVVIELNECLALEMARSNGRTGETTQTQ

SEQ ID NO: 97232 - DNA, 2029 bp, Arabidopsis thaliana
  misc_feature (1)..(2029): Ceres Seq. ID no. 12736617
  misc_feature (1)..(2029): Ortholog of  Ceres SEQ ID NO 14310907 as cited in SEQ ID NO 54338
aggccaaagcctaaaattcacacaaccaaaaaaaccaaccttttttttccacctaaatctttgaatatcacaatatttactatttacaatggcgccacaagaacaagcagtttctcaggtgatggagaaacagagcaacaacaacaacagtgacgtcattttccgatcaaagttaccggatatttacatcccgaaccacctatctctccacgactacatcttccaaaacatctccgaattcgccactaagccttgcctaatcaacggaccaaccggccacgtgtacacttactccgacgtccacgtcatctcccgccaaatcgccgccaattttcacaaactcggcgttaaccaaaacgacgtcgtcatgctcctcctcccaaactgtcccgaattcgtcctctctttcctcgccgcctccttccgcggcgcaaccgccaccgccgcaaaccctttcttcactccggcggagatagctaaacaagccaaagcctccaacaccaaactcataatcaccgaagctcgttacgtcgacaaaatcaaaccacttcaaaacgacgacggagtagtcatcgtctgcatcgacgacaacgaatccgtgccaatccctgaaggctgcctccgcttcaccgagttgactcagtcgacaaccgaggcatcagaagtcatcgactcggtggagatttcaccggacgacgtggtggcactaccttactcctctggcacgacgggattaccaaaaggagtgatgctgactcacaagggactagtcacgagcgttgctcagcaagtcgacggcgagaacccgaatctttatttccacagcgatgacgtcatactctgtgttttgcccatgtttcatatctacgctttgaactcgatcatgttgtgtggtcttagagttggtgcggcgattctgataatgccgaagtttgagatcaatctgctattggagctgatccagaggtgtaaagtgacggtggctccgatggttccgccgattgtgttggccattgcgaagtcttcggagacggagaagtatgatttgagctcgataagagtggtgaaatctggtgctgctcctcttggtaaagaacttgaagatgccgttaatgccaagtttcctaatgccaaactcggtcagggatacggaatgacggaagcaggtccagtgctagcaatgtcgttaggttttgcaaaggaaccttttccggttaagtcaggagcttgtggtactgttgtaagaaatgctgagatgaaaatagttgatccagacaccggagattctctttcgaggaatcaacccggtgagatttgtattcgtggtcaccagatcatgaaaggttacctcaacaatccggcagctacagcagagaccattgataaagacggttggcttcatactggagatattggattgatcgatgacgatgacgagcttttcatcgttgatcgattgaaagaacttatcaagtataaaggttttcaggtagctccggctgagctagaggctttgctcatcggtcatcctgacattactgatgttgctgttgtcgcaatgaaagaagaagcagctggtgaagttcctgttgcatttgtggtgaaatcgaaggattcggagttatcagaagatgatgtgaagcaattcgtgtcgaaacaggttgtgttttacaagagaatcaacaaagtgttcttcactgaatccattcctaaagctccatcagggaagatattgaggaaagatctgagggcaaaactagcaaatggattgtgatggatgatttcaaccaaaaagcaaaagatgatttcaatgtgtatatacatacaactgtttgacccaaccaaggaaacaaactcatacgaaccattgtcttttgttgttgttgttgttgttgttgttgctgttcttgcttgattcatgtaatgagcctttgtgatgaaggtggtttcttttttggtttcctatcatgtaacttgtgctggagaaaacagcacacctttttcatataataataaatttactcggatt

SEQ ID NO: 97233 - protein, 561 aa, Arabidopsis thaliana
  peptide (1)..(561): Ceres Seq. ID no. 12736618
MAPQEQAVSQVMEKQSNNNNSDVIFRSKLPDIYIPNHLSLHDYIFQNISEFATKPCLINGPTGHVYTYSDVHVISRQIAANFHKLGVNQNDVVMLLLPNCPEFVLSFLAASFRGATATAANPFFTPAEIAKQAKASNTKLIITEARYVDKIKPLQNDDGVVIVCIDDNESVPIPEGCLRFTELTQSTTEASEVIDSVEISPDDVVALPYSSGTTGLPKGVMLTHKGLVTSVAQQVDGENPNLYFHSDDVILCVLPMFHIYALNSIMLCGLRVGAAILIMPKFEINLLLELIQRCKVTVAPMVPPIVLAIAKSSETEKYDLSSIRVVKSGAAPLGKELEDAVNAKFPNAKLGQGYGMTEAGPVLAMSLGFAKEPFPVKSGACGTVVRNAEMKIVDPDTGDSLSRNQPGEICIRGHQIMKGYLNNPAATAETIDKDGWLHTGDIGLIDDDDELFIVDRLKELIKYKGFQVAPAELEALLIGHPDITDVAVVAMKEEAAGEVPVAFVVKSKDSELSEDDVKQFVSKQVVFYKRINKVFFTESIPKAPSGKILRKDLRAKLANGL

SEQ ID NO: 97234 - protein, 550 aa, Arabidopsis thaliana
  peptide (1)..(550): Ceres Seq. ID no. 12736619
MEKQSNNNNSDVIFRSKLPDIYIPNHLSLHDYIFQNISEFATKPCLINGPTGHVYTYSDVHVISRQIAANFHKLGVNQNDVVMLLLPNCPEFVLSFLAASFRGATATAANPFFTPAEIAKQAKASNTKLIITEARYVDKIKPLQNDDGVVIVCIDDNESVPIPEGCLRFTELTQSTTEASEVIDSVEISPDDVVALPYSSGTTGLPKGVMLTHKGLVTSVAQQVDGENPNLYFHSDDVILCVLPMFHIYALNSIMLCGLRVGAAILIMPKFEINLLLELIQRCKVTVAPMVPPIVLAIAKSSETEKYDLSSIRVVKSGAAPLGKELEDAVNAKFPNAKLGQGYGMTEAGPVLAMSLGFAKEPFPVKSGACGTVVRNAEMKIVDPDTGDSLSRNQPGEICIRGHQIMKGYLNNPAATAETIDKDGWLHTGDIGLIDDDDELFIVDRLKELIKYKGFQVAPAELEALLIGHPDITDVAVVAMKEEAAGEVPVAFVVKSKDSELSEDDVKQFVSKQVVFYKRINKVFFTESIPKAPSGKILRKDLRAKLANGL

SEQ ID NO: 97235 - protein, 468 aa, Arabidopsis thaliana
  peptide (1)..(468): Ceres Seq. ID no. 12736620
MLLLPNCPEFVLSFLAASFRGATATAANPFFTPAEIAKQAKASNTKLIITEARYVDKIKPLQNDDGVVIVCIDDNESVPIPEGCLRFTELTQSTTEASEVIDSVEISPDDVVALPYSSGTTGLPKGVMLTHKGLVTSVAQQVDGENPNLYFHSDDVILCVLPMFHIYALNSIMLCGLRVGAAILIMPKFEINLLLELIQRCKVTVAPMVPPIVLAIAKSSETEKYDLSSIRVVKSGAAPLGKELEDAVNAKFPNAKLGQGYGMTEAGPVLAMSLGFAKEPFPVKSGACGTVVRNAEMKIVDPDTGDSLSRNQPGEICIRGHQIMKGYLNNPAATAETIDKDGWLHTGDIGLIDDDDELFIVDRLKELIKYKGFQVAPAELEALLIGHPDITDVAVVAMKEEAAGEVPVAFVVKSKDSELSEDDVKQFVSKQVVFYKRINKVFFTESIPKAPSGKILRKDLRAKLANGL

SEQ ID NO: 97236 - DNA, 1992 bp, Arabidopsis thaliana
  misc_feature (1)..(1992): Ceres Seq. ID no. 12736624
  misc_feature (1)..(1992): Ortholog of  Ceres SEQ ID NO 14302419 as cited in SEQ ID NO 66752
atggacgtaggagagagcaatgagagggtaaaagacgattctgcccttcaagcttcaccgaggagtcctctgagttctatagatcttgcaattgatggagctatgaatgcttctattgagcagttgtatcataacgtttgtgaaatggagagttctgatgatcagtctccgtccagggcgagttttatttcgtatggagctgaatctaggattgatttggagttgaggcatttggttggagatgtaggagaagaaggagagagcaagaaagagattatcttggagaagaaggaagaaagtaatggagaaggtagcttgagtcagaagaaacctctttcgaatggtaagaaggttgcgaaaacgagtcctaataatccgaagatgccgggttcgaggatctcttcgaggaaatcaccggatttggggaaggtttctgttgatgaggagagtcctgagcttggtgtggtgttgttgaagcaagccagagagttggtttcttcaggtgagaatttaaacaaggctcttgatttagcgttgagagcggtgaaagtgtttgagaaatgtggggaaggagagaaacaacttgggttgaatttggtgatgtctttgcatatcttggcagcgatatatgcagggttagggagatacaatgacgctgtgcctgttcttgaacgttctatcgagataccgatgattgaagatggtgaggatcacgcgttggcgaaatttgcagggtgtatgcagcttggtgacatgtatggtttgatgggtcaagttgaaaattcgattatgctatacaccgcgggtttggagattcaaagacaagttcttggagaatcggatgcacgagttggcgaaacttgtaggtacttagcggaagctcatgttcaagcaatgcagtttgaagaagcctcaaggctttgtcaaatggcattggacattcacaaagaaaacggtgctgccgctacagcttctattgaagaagctgcggatagaaaactgatgggacttatctgcgatgcgaaaggtgattatgaagttgcgcttgagcattatgttttagcgagcatggcaatgtcatctcagaaccatagagaagatgttgctgctgtagattgcagtattggtgatgcttacatgtcgctagctaggtttgatgaagcgatattcgcataccagaaggctttagctgtgtttaagcaaggaaaaggtgagactcattcctctgttgctttggtttacgttaggcttgctgacttgtacaacaagattgggaaaacacgcgattccaaatcgtactgcgaaaacgctctcaagatttacctaaaaccgactccaggaactcctatggaagaggttgcgactggttttatagagatttctgcgatatatcagtcaatgaatgaacttgatcaagctcttaagttgttgagacgggcgttgaagatatatgcaaacgctccaggtcaacagaacacgattgcaggtattgaagctcaaatgggtgtggttacttatatgatgggaaattactccgagtcctacgacatattcaagagcgcgatatcaaagttccgcaatagcggagagaaaaaaaccgctcttttcgggattgctttgaatcagatgggactagcttgcgttcagcgttacgcgatcaatgaagctgcagatttgtttgaagaagcgaaaactattcttgagaaagagtgtggaccgtaccatcccgatacattagcggtttacagtaaccttgctggaacgtacgacgcaatgggaaggttagatgatgctatagagatattggagtatgttgttgggacaagagaagagaagctcgggacggcaaatcccgaggttgaggacgagaagcagaggcttgctgcgttgttgaaagaagctggaagaggaaggagtaaaagaaacagagcacttcttacccttttggacaacaaccctgaaattgcaaatggacagagaccggtttattga

SEQ ID NO: 97237 - protein, 663 aa, Arabidopsis thaliana
  peptide (1)..(663): Ceres Seq. ID no. 12736625
MDVGESNERVKDDSALQASPRSPLSSIDLAIDGAMNASIEQLYHNVCEMESSDDQSPSRASFISYGAESRIDLELRHLVGDVGEEGESKKEIILEKKEESNGEGSLSQKKPLSNGKKVAKTSPNNPKMPGSRISSRKSPDLGKVSVDEESPELGVVLLKQARELVSSGENLNKALDLALRAVKVFEKCGEGEKQLGLNLVMSLHILAAIYAGLGRYNDAVPVLERSIEIPMIEDGEDHALAKFAGCMQLGDMYGLMGQVENSIMLYTAGLEIQRQVLGESDARVGETCRYLAEAHVQAMQFEEASRLCQMALDIHKENGAAATASIEEAADRKLMGLICDAKGDYEVALEHYVLASMAMSSQNHREDVAAVDCSIGDAYMSLARFDEAIFAYQKALAVFKQGKGETHSSVALVYVRLADLYNKIGKTRDSKSYCENALKIYLKPTPGTPMEEVATGFIEISAIYQSMNELDQALKLLRRALKIYANAPGQQNTIAGIEAQMGVVTYMMGNYSESYDIFKSAISKFRNSGEKKTALFGIALNQMGLACVQRYAINEAADLFEEAKTILEKECGPYHPDTLAVYSNLAGTYDAMGRLDDAIEILEYVVGTREEKLGTANPEVEDEKQRLAALLKEAGRGRSKRNRALLTLLDNNPEIANGQRPVY

SEQ ID NO: 97238 - protein, 629 aa, Arabidopsis thaliana
  peptide (1)..(629): Ceres Seq. ID no. 12736626
MNASIEQLYHNVCEMESSDDQSPSRASFISYGAESRIDLELRHLVGDVGEEGESKKEIILEKKEESNGEGSLSQKKPLSNGKKVAKTSPNNPKMPGSRISSRKSPDLGKVSVDEESPELGVVLLKQARELVSSGENLNKALDLALRAVKVFEKCGEGEKQLGLNLVMSLHILAAIYAGLGRYNDAVPVLERSIEIPMIEDGEDHALAKFAGCMQLGDMYGLMGQVENSIMLYTAGLEIQRQVLGESDARVGETCRYLAEAHVQAMQFEEASRLCQMALDIHKENGAAATASIEEAADRKLMGLICDAKGDYEVALEHYVLASMAMSSQNHREDVAAVDCSIGDAYMSLARFDEAIFAYQKALAVFKQGKGETHSSVALVYVRLADLYNKIGKTRDSKSYCENALKIYLKPTPGTPMEEVATGFIEISAIYQSMNELDQALKLLRRALKIYANAPGQQNTIAGIEAQMGVVTYMMGNYSESYDIFKSAISKFRNSGEKKTALFGIALNQMGLACVQRYAINEAADLFEEAKTILEKECGPYHPDTLAVYSNLAGTYDAMGRLDDAIEILEYVVGTREEKLGTANPEVEDEKQRLAALLKEAGRGRSKRNRALLTLLDNNPEIANGQRPVY

SEQ ID NO: 97239 - protein, 615 aa, Arabidopsis thaliana
  peptide (1)..(615): Ceres Seq. ID no. 12736627
MESSDDQSPSRASFISYGAESRIDLELRHLVGDVGEEGESKKEIILEKKEESNGEGSLSQKKPLSNGKKVAKTSPNNPKMPGSRISSRKSPDLGKVSVDEESPELGVVLLKQARELVSSGENLNKALDLALRAVKVFEKCGEGEKQLGLNLVMSLHILAAIYAGLGRYNDAVPVLERSIEIPMIEDGEDHALAKFAGCMQLGDMYGLMGQVENSIMLYTAGLEIQRQVLGESDARVGETCRYLAEAHVQAMQFEEASRLCQMALDIHKENGAAATASIEEAADRKLMGLICDAKGDYEVALEHYVLASMAMSSQNHREDVAAVDCSIGDAYMSLARFDEAIFAYQKALAVFKQGKGETHSSVALVYVRLADLYNKIGKTRDSKSYCENALKIYLKPTPGTPMEEVATGFIEISAIYQSMNELDQALKLLRRALKIYANAPGQQNTIAGIEAQMGVVTYMMGNYSESYDIFKSAISKFRNSGEKKTALFGIALNQMGLACVQRYAINEAADLFEEAKTILEKECGPYHPDTLAVYSNLAGTYDAMGRLDDAIEILEYVVGTREEKLGTANPEVEDEKQRLAALLKEAGRGRSKRNRALLTLLDNNPEIANGQRPVY

SEQ ID NO: 97240 - DNA, 1297 bp, Arabidopsis thaliana
  misc_feature (1)..(1297): Ceres Seq. ID no. 12736645
  misc_feature (1)..(1297): Ortholog of  Ceres SEQ ID NO 13655724 as cited in SEQ ID NO 68973
ggatgatcgacatgcaacgatgaaatcatcgtcatcgatttttcgtgaaacttcagagaaaaaatcagagagatggatgatgatgaacattggaagattttctccatttttcttgtcttccttttgtataactcttttcttcaccggtttctttgtttatcagaatccttttaaatccatcgctgatcaaaatgttctttctttccaacctcaaatcgatcctgagtgtgatttgttcaagggacattgggttccagacaaaagaggatctttatacacaaactcgagctgtgctacgattcccgactcgaagaactgcataaaacaagggagacccgacaaagatttcttgttctggagatggaaacccgatggttgcgatcttccgaggtttaatccaaaggcgtttctcagtatggttcgagggaagaagatgaattttattggtgattctgtggctaggaaccatatggaatctcttctttgcttgttgtcaatggaagaaactcctaaggacatctacaaggatggagaagatagaaacaggatttggtactttccgaagcacgattttactctctcgacctcgtggactaagtttcttgtggaggaacgagagagaagagatagtaacaatacaggtactggattgtttgatctagatatcggcaagatcgatgaagggtggtttaatggtctaccgaatacagacattgctattgtctcggctgctcattggttcttcagacctatatttatacatagaggagatgagacactgggttgcatttactgtaacttaccaaacatgactcagattagcccggaagaagggtttaagcttgtttactcagctgtccttaggcaaatcaatgagtgtgagatgtgtaagaaagatttagtgacggtactgaggactatttcacctgcgcatttcgagaatgggacttgggacaccggaggaacttgcagcaggacgagtcctttcggagaaaacaaaattgacctgcagagcaatgagatgaagatcaggaaatctcagattgaacagcttgaaggtataacaaaacgaggcaacaaagcaaagaagtttgcggtattggatgtgacaagggttatgcagatgagacctgatgggcatcccaatggttactggggaaataaatggatgaaaggttataatgattgcgtgcattggtgtttgcccgggccaatcgatgcgtggaacgactttttaatggcgataattagacagttaagatgatatgatttgtggatataaacattcttttacctt

SEQ ID NO: 97241 - protein, 420 aa, Arabidopsis thaliana
  peptide (1)..(420): Ceres Seq. ID no. 12736646
DDRHATMKSSSSIFRETSEKKSERWMMMNIGRFSPFFLSSFCITLFFTGFFVYQNPFKSIADQNVLSFQPQIDPECDLFKGHWVPDKRGSLYTNSSCATIPDSKNCIKQGRPDKDFLFWRWKPDGCDLPRFNPKAFLSMVRGKKMNFIGDSVARNHMESLLCLLSMEETPKDIYKDGEDRNRIWYFPKHDFTLSTSWTKFLVEERERRDSNNTGTGLFDLDIGKIDEGWFNGLPNTDIAIVSAAHWFFRPIFIHRGDETLGCIYCNLPNMTQISPEEGFKLVYSAVLRQINECEMCKKDLVTVLRTISPAHFENGTWDTGGTCSRTSPFGENKIDLQSNEMKIRKSQIEQLEGITKRGNKAKKFAVLDVTRVMQMRPDGHPNGYWGNKWMKGYNDCVHWCLPGPIDAWNDFLMAIIRQLR

SEQ ID NO: 97242 - protein, 414 aa, Arabidopsis thaliana
  peptide (1)..(414): Ceres Seq. ID no. 12736647
MKSSSSIFRETSEKKSERWMMMNIGRFSPFFLSSFCITLFFTGFFVYQNPFKSIADQNVLSFQPQIDPECDLFKGHWVPDKRGSLYTNSSCATIPDSKNCIKQGRPDKDFLFWRWKPDGCDLPRFNPKAFLSMVRGKKMNFIGDSVARNHMESLLCLLSMEETPKDIYKDGEDRNRIWYFPKHDFTLSTSWTKFLVEERERRDSNNTGTGLFDLDIGKIDEGWFNGLPNTDIAIVSAAHWFFRPIFIHRGDETLGCIYCNLPNMTQISPEEGFKLVYSAVLRQINECEMCKKDLVTVLRTISPAHFENGTWDTGGTCSRTSPFGENKIDLQSNEMKIRKSQIEQLEGITKRGNKAKKFAVLDVTRVMQMRPDGHPNGYWGNKWMKGYNDCVHWCLPGPIDAWNDFLMAIIRQLR

SEQ ID NO: 97243 - protein, 395 aa, Arabidopsis thaliana
  peptide (1)..(395): Ceres Seq. ID no. 12736648
MMMNIGRFSPFFLSSFCITLFFTGFFVYQNPFKSIADQNVLSFQPQIDPECDLFKGHWVPDKRGSLYTNSSCATIPDSKNCIKQGRPDKDFLFWRWKPDGCDLPRFNPKAFLSMVRGKKMNFIGDSVARNHMESLLCLLSMEETPKDIYKDGEDRNRIWYFPKHDFTLSTSWTKFLVEERERRDSNNTGTGLFDLDIGKIDEGWFNGLPNTDIAIVSAAHWFFRPIFIHRGDETLGCIYCNLPNMTQISPEEGFKLVYSAVLRQINECEMCKKDLVTVLRTISPAHFENGTWDTGGTCSRTSPFGENKIDLQSNEMKIRKSQIEQLEGITKRGNKAKKFAVLDVTRVMQMRPDGHPNGYWGNKWMKGYNDCVHWCLPGPIDAWNDFLMAIIRQLR

SEQ ID NO: 97244 - DNA, 1809 bp, Arabidopsis thaliana
  misc_feature (1)..(1809): Ceres Seq. ID no. 12736691
  misc_feature (1)..(1809): Ortholog of  Ceres SEQ ID NO 12612314 as cited in SEQ ID NO 51420
caaatcacagatcacacttaccagatcacaagacaaacacaaactaatagtttcgtgtgacacaagtaaagagtttcgtgagatagaagcaacaccaaaagatgcttgaaactggagccatatggggaataaccggcacgacggtgacgagctttatgttcttctgggcgatttacaaacaatacgtccctgcccatttccgagcctatgtggagagatacttccacaagatgattggatggatctcttactacgttgacatcaaattcaccgagtacacagatgaaggtctgaagagaagccaagcctacgactccatacgcaactacttagcgtcgaaatcaacggctcttgctaaaagactaaaggccaacgaaacgaaaaacagcaaatctttggtgtttagtatggatgatcatgaggaaattgaagatgagttcgaaggtgtgaaggtgaagtggtattcgaatgtgaaagtgattcagcctcagtctaattatggtcaacgcagctcagaggagagaaggcactttactcttagtttccataggcgacaccgaggtatgatcattgagacttatcttgatcatgttttgagagaagggaaagctattggattgatgaacagagagaggaagctttacactaataactcaagtcaagaatggtatccttggaggtcaggaaagtggagcaacgttccttttcaccatccggcgacgtttgagactttggctatggatccagagaagaaagaagggattaagaaggatttgataaagtttagcaaagggaaagattattacaagaaggttgggaagccatggaagcgcggttatctcttgtttggcccgcccgggacagggaaatcgacgatgatagctgcaatagcgaatttcttggactatgatgtgtatgatcttgagctaacgacggtgaaggataactcagagctgaagaagttgttgttggatacaactagtaagtctatcattgtgattgaagatattgattgctcgcttgatcttacggggcagcgaaagaagaaaaaagaggaagatgaagaggaggatggagaggagaagaaggaaggtgagaagaagcccaaggtagatgataagcagagcaaggttactttgtcaggtttattaaactccattgatgggttatggtcagcttgtagtggtgagaagatcatagtgttcacaactaattttgtggataagcttgatccagcattgatacgtagaggaagaatggacaaccacattgagatgtcttattgcaagtttgaagcattcaaggttttggctaagaactacttggagattgaaacacacgacttgtatggagaaatcgaaagaaagctcgaagaaaccgatatgtcccccgcggatgttgcggagactttgatgccgaaatctgacgaagaagatgcagatatttgcatcaagcgtttggtcaagactttggaggaagagaaggagaaagcaaggaagttggctgaggaagaagagaagaagaaagcagagaaggaagcaaagaagatgaagaaagcagaggaagcagaggagaagaagaagaagacagaggaagatgagaagaaggagaaagtgaaggccaaggaggaaaacggcaacgtttctcaacaaaatggcaactcaattgatttgaacaagaaaagtgactcatgatgaattttagtttattgtataaggatgtaatttggcaattattcttctctcctcttatcatatgcttttaaagaatttgtatttactatctatagatttcatcattgtgttccat

SEQ ID NO: 97245 - protein, 530 aa, Arabidopsis thaliana
  peptide (1)..(530): Ceres Seq. ID no. 12736692
MLETGAIWGITGTTVTSFMFFWAIYKQYVPAHFRAYVERYFHKMIGWISYYVDIKFTEYTDEGLKRSQAYDSIRNYLASKSTALAKRLKANETKNSKSLVFSMDDHEEIEDEFEGVKVKWYSNVKVIQPQSNYGQRSSEERRHFTLSFHRRHRGMIIETYLDHVLREGKAIGLMNRERKLYTNNSSQEWYPWRSGKWSNVPFHHPATFETLAMDPEKKEGIKKDLIKFSKGKDYYKKVGKPWKRGYLLFGPPGTGKSTMIAAIANFLDYDVYDLELTTVKDNSELKKLLLDTTSKSIIVIEDIDCSLDLTGQRKKKKEEDEEEDGEEKKEGEKKPKVDDKQSKVTLSGLLNSIDGLWSACSGEKIIVFTTNFVDKLDPALIRRGRMDNHIEMSYCKFEAFKVLAKNYLEIETHDLYGEIERKLEETDMSPADVAETLMPKSDEEDADICIKRLVKTLEEEKEKARKLAEEEEKKKAEKEAKKMKKAEEAEEKKKKTEEDEKKEKVKAKEENGNVSQQNGNSIDLNKKSDS

SEQ ID NO: 97246 - protein, 512 aa, Arabidopsis thaliana
  peptide (1)..(512): Ceres Seq. ID no. 12736693
MFFWAIYKQYVPAHFRAYVERYFHKMIGWISYYVDIKFTEYTDEGLKRSQAYDSIRNYLASKSTALAKRLKANETKNSKSLVFSMDDHEEIEDEFEGVKVKWYSNVKVIQPQSNYGQRSSEERRHFTLSFHRRHRGMIIETYLDHVLREGKAIGLMNRERKLYTNNSSQEWYPWRSGKWSNVPFHHPATFETLAMDPEKKEGIKKDLIKFSKGKDYYKKVGKPWKRGYLLFGPPGTGKSTMIAAIANFLDYDVYDLELTTVKDNSELKKLLLDTTSKSIIVIEDIDCSLDLTGQRKKKKEEDEEEDGEEKKEGEKKPKVDDKQSKVTLSGLLNSIDGLWSACSGEKIIVFTTNFVDKLDPALIRRGRMDNHIEMSYCKFEAFKVLAKNYLEIETHDLYGEIERKLEETDMSPADVAETLMPKSDEEDADICIKRLVKTLEEEKEKARKLAEEEEKKKAEKEAKKMKKAEEAEEKKKKTEEDEKKEKVKAKEENGNVSQQNGNSIDLNKKSDS

SEQ ID NO: 97247 - protein, 487 aa, Arabidopsis thaliana
  peptide (1)..(487): Ceres Seq. ID no. 12736694
MIGWISYYVDIKFTEYTDEGLKRSQAYDSIRNYLASKSTALAKRLKANETKNSKSLVFSMDDHEEIEDEFEGVKVKWYSNVKVIQPQSNYGQRSSEERRHFTLSFHRRHRGMIIETYLDHVLREGKAIGLMNRERKLYTNNSSQEWYPWRSGKWSNVPFHHPATFETLAMDPEKKEGIKKDLIKFSKGKDYYKKVGKPWKRGYLLFGPPGTGKSTMIAAIANFLDYDVYDLELTTVKDNSELKKLLLDTTSKSIIVIEDIDCSLDLTGQRKKKKEEDEEEDGEEKKEGEKKPKVDDKQSKVTLSGLLNSIDGLWSACSGEKIIVFTTNFVDKLDPALIRRGRMDNHIEMSYCKFEAFKVLAKNYLEIETHDLYGEIERKLEETDMSPADVAETLMPKSDEEDADICIKRLVKTLEEEKEKARKLAEEEEKKKAEKEAKKMKKAEEAEEKKKKTEEDEKKEKVKAKEENGNVSQQNGNSIDLNKKSDS

SEQ ID NO: 97248 - DNA, 1533 bp, Arabidopsis thaliana
  misc_feature (1)..(1533): Ceres Seq. ID no. 12736699
  misc_feature (1)..(1533): Ortholog of  Ceres SEQ ID NO 12612314 as cited in SEQ ID NO 51420
atgtttgaagccggaggattatttggtttcaccggcacgaccatggcaagtcttatgttcttctggtcagtgtacagacagtttgtgccataccaaatcagagactacttggagaagtgtttttacaagatgttcggtttggtctcaaattctgttcacatcaaattcactgaatacacagaagataaaggtctcaagaaaagccaagcctatgatttgatacgcaactacttatcctcgaaatcaacggctcgtgctcagaggttaaaggccaacgaatcaaaaaacagcaaatcgttggtgcttagtttggacaatcacgaagcagttgaagatgtgttccaaggtgtgaaggtggtgtggtctttgagcgtgtggaagagtaatgatcaggctgattctagcgagaaaaggtacttgactttgagtttccataatcggtatagggagatgatcacaacgacttatcttgatcatgttttgagagaagggaaagagattggtttgaagaacagagagaggaagctttacactaataactcgagtcaagattattcggcttggagagaaggaaggtggagcaacgttccttttgatcatcccgcaacgtttgagactttggctatggatcttgagaagaaagaagggatgaaaaaggatttgattaagtttactaaagggaaagattattataggaaggttgggaagccgtggaagagaggttatctgttgtttggaccgccggggacagggaaatcgacgatgatatcggctatggcgaacttcttggagtatgatgtgtatgatcttgagttgactactgtgaaggataactcggagttgaagaagctaatgttggatacaaaagggaagtctattgttgtgattgaagatatcgattgttcgcttgatcttacgggacagagaaagaagaagaaggaggaagatgaggatgaagaggaagaagaaaagaagaaagaagctgagaagttgttgaagagagaaagaggtgaaagagagagtaaggttactttgtcggggctattaaacgccattgatgggttgtggtcagcttgtagtggagagaagattattgtgtttactacgaattatttggataagcttgatccagctttgatacgtagaggaagaatggacaaccatattgagatgtcttattgtaggtttgaagcgtttaaggttttggctaagaactacttggagattgagtcacatgacttgtttggagaaatcaagcgattggtggaggaaactgacatgtctccagctgatgttgctgagaacttgatgccgaaatctgatgaagacgatgccgatatttgccttacgcggttggttaagtctttggaggaagagaaggagaaagcaaagaagttggctgaggaagaaaagatgaagaaagcagcgagggatgcaaggaggatcaagaagaaagcagaggaagaacacaaaaagaagaataaagtagaggaaaacggcgacgtatctcacgataatggtaaccatatttga

SEQ ID NO: 97249 - protein, 510 aa, Arabidopsis thaliana
  peptide (1)..(510): Ceres Seq. ID no. 12736700
MFEAGGLFGFTGTTMASLMFFWSVYRQFVPYQIRDYLEKCFYKMFGLVSNSVHIKFTEYTEDKGLKKSQAYDLIRNYLSSKSTARAQRLKANESKNSKSLVLSLDNHEAVEDVFQGVKVVWSLSVWKSNDQADSSEKRYLTLSFHNRYREMITTTYLDHVLREGKEIGLKNRERKLYTNNSSQDYSAWREGRWSNVPFDHPATFETLAMDLEKKEGMKKDLIKFTKGKDYYRKVGKPWKRGYLLFGPPGTGKSTMISAMANFLEYDVYDLELTTVKDNSELKKLMLDTKGKSIVVIEDIDCSLDLTGQRKKKKEEDEDEEEEEKKKEAEKLLKRERGERESKVTLSGLLNAIDGLWSACSGEKIIVFTTNYLDKLDPALIRRGRMDNHIEMSYCRFEAFKVLAKNYLEIESHDLFGEIKRLVEETDMSPADVAENLMPKSDEDDADICLTRLVKSLEEEKEKAKKLAEEEKMKKAARDARRIKKKAEEEHKKKNKVEENGDVSHDNGNHI

SEQ ID NO: 97250 - protein, 496 aa, Arabidopsis thaliana
  peptide (1)..(496): Ceres Seq. ID no. 12736701
MASLMFFWSVYRQFVPYQIRDYLEKCFYKMFGLVSNSVHIKFTEYTEDKGLKKSQAYDLIRNYLSSKSTARAQRLKANESKNSKSLVLSLDNHEAVEDVFQGVKVVWSLSVWKSNDQADSSEKRYLTLSFHNRYREMITTTYLDHVLREGKEIGLKNRERKLYTNNSSQDYSAWREGRWSNVPFDHPATFETLAMDLEKKEGMKKDLIKFTKGKDYYRKVGKPWKRGYLLFGPPGTGKSTMISAMANFLEYDVYDLELTTVKDNSELKKLMLDTKGKSIVVIEDIDCSLDLTGQRKKKKEEDEDEEEEEKKKEAEKLLKRERGERESKVTLSGLLNAIDGLWSACSGEKIIVFTTNYLDKLDPALIRRGRMDNHIEMSYCRFEAFKVLAKNYLEIESHDLFGEIKRLVEETDMSPADVAENLMPKSDEDDADICLTRLVKSLEEEKEKAKKLAEEEKMKKAARDARRIKKKAEEEHKKKNKVEENGDVSHDNGNHI

SEQ ID NO: 97251 - protein, 492 aa, Arabidopsis thaliana
  peptide (1)..(492): Ceres Seq. ID no. 12736702
MFFWSVYRQFVPYQIRDYLEKCFYKMFGLVSNSVHIKFTEYTEDKGLKKSQAYDLIRNYLSSKSTARAQRLKANESKNSKSLVLSLDNHEAVEDVFQGVKVVWSLSVWKSNDQADSSEKRYLTLSFHNRYREMITTTYLDHVLREGKEIGLKNRERKLYTNNSSQDYSAWREGRWSNVPFDHPATFETLAMDLEKKEGMKKDLIKFTKGKDYYRKVGKPWKRGYLLFGPPGTGKSTMISAMANFLEYDVYDLELTTVKDNSELKKLMLDTKGKSIVVIEDIDCSLDLTGQRKKKKEEDEDEEEEEKKKEAEKLLKRERGERESKVTLSGLLNAIDGLWSACSGEKIIVFTTNYLDKLDPALIRRGRMDNHIEMSYCRFEAFKVLAKNYLEIESHDLFGEIKRLVEETDMSPADVAENLMPKSDEDDADICLTRLVKSLEEEKEKAKKLAEEEKMKKAARDARRIKKKAEEEHKKKNKVEENGDVSHDNGNHI

SEQ ID NO: 97252 - DNA, 1356 bp, Arabidopsis thaliana
  misc_feature (1)..(1356): Ceres Seq. ID no. 12736707
  misc_feature (1)..(1356): Ortholog of  Ceres SEQ ID NO 12612314 as cited in SEQ ID NO 51420
atgtttgcagaaaacctaacgaggattggatcaaacgtggcgggtctgttcttcgtctggtcaactctcaagagatacttccctcgacagattcagcaacttctcttcaatgcaatccaacgaataccaattttcaagaggctctcagacaagatcctcgaattcttctcaccttacgcttacatcagattccgtgaaatcgaagggtatagatacaactacgcttttgcagctgtgaagacctaccttggtgcaaaagttaactctgaagtgaagaatctcaaagggaatcaggttaaagagaacatgtctttggatttgaaacgagacgatgttaagatagaagaggagtatgaaggtgtgaagatgtggtgggagatctttagatgtgttaaagggaagaaaatctgtaggcttacttttcatagaagtaattgggatgttgtgactggttcttacttacgctacgttgttgaagaagggaaatcgattaaggcgaggaagaagaaagtgatggtgttgatgaataatccgagtttgaattggaaaacaagtatgaaaggtctttggacttgcactgagttcgagcatcccgcaacgtttgatacattggctatggatattgacaagaaagatgagattttcagagatcttgtggcgtttagagatggtaaagagtattacgataggattgggaaagcttggaagaggggttacttgttgtatggacctccagggacgggtaagtctacgatgatcgcggctatggcgaatcttatgaagtataatatctatgatcttgagttaacttcgatagggaacaactgggagttgaagaagctgttgatagctacgactaataagtctatcattgtgattgaggatattgattgttccttggatctcacgggagagagggaggttaaagacctaaaaggcgataaagaagggaagaagagtaatgcagttacactctcagggttattgaactttatagatgggatatggtcagcttgtggacaagagaggattcttgtgtttacaacgaatcatgtagggaaacttgaccaagctttgattagaagaggtcgtatggatatgcatattgagctatcttattgtacgtttggtgcgttcaagattcttgctaagaactatctgaatattgattcgcatcacttgtttggagagattgagtctttgcttaaagaaacgaagattacaccggctgatgttgcggagcatatgatggcgaaagaagttgatggttcacttaagggtttgattcgagctttggagaggattaagtggagtcaaaacgttaaagtcgaagaacaattacaacaaggagattaa

SEQ ID NO: 97253 - protein, 451 aa, Arabidopsis thaliana
  peptide (1)..(451): Ceres Seq. ID no. 12736708
MFAENLTRIGSNVAGLFFVWSTLKRYFPRQIQQLLFNAIQRIPIFKRLSDKILEFFSPYAYIRFREIEGYRYNYAFAAVKTYLGAKVNSEVKNLKGNQVKENMSLDLKRDDVKIEEEYEGVKMWWEIFRCVKGKKICRLTFHRSNWDVVTGSYLRYVVEEGKSIKARKKKVMVLMNNPSLNWKTSMKGLWTCTEFEHPATFDTLAMDIDKKDEIFRDLVAFRDGKEYYDRIGKAWKRGYLLYGPPGTGKSTMIAAMANLMKYNIYDLELTSIGNNWELKKLLIATTNKSIIVIEDIDCSLDLTGEREVKDLKGDKEGKKSNAVTLSGLLNFIDGIWSACGQERILVFTTNHVGKLDQALIRRGRMDMHIELSYCTFGAFKILAKNYLNIDSHHLFGEIESLLKETKITPADVAEHMMAKEVDGSLKGLIRALERIKWSQNVKVEEQLQQGD

SEQ ID NO: 97254 - protein, 349 aa, Arabidopsis thaliana
  peptide (1)..(349): Ceres Seq. ID no. 12736709
MSLDLKRDDVKIEEEYEGVKMWWEIFRCVKGKKICRLTFHRSNWDVVTGSYLRYVVEEGKSIKARKKKVMVLMNNPSLNWKTSMKGLWTCTEFEHPATFDTLAMDIDKKDEIFRDLVAFRDGKEYYDRIGKAWKRGYLLYGPPGTGKSTMIAAMANLMKYNIYDLELTSIGNNWELKKLLIATTNKSIIVIEDIDCSLDLTGEREVKDLKGDKEGKKSNAVTLSGLLNFIDGIWSACGQERILVFTTNHVGKLDQALIRRGRMDMHIELSYCTFGAFKILAKNYLNIDSHHLFGEIESLLKETKITPADVAEHMMAKEVDGSLKGLIRALERIKWSQNVKVEEQLQQGD

SEQ ID NO: 97255 - protein, 329 aa, Arabidopsis thaliana
  peptide (1)..(329): Ceres Seq. ID no. 12736710
MWWEIFRCVKGKKICRLTFHRSNWDVVTGSYLRYVVEEGKSIKARKKKVMVLMNNPSLNWKTSMKGLWTCTEFEHPATFDTLAMDIDKKDEIFRDLVAFRDGKEYYDRIGKAWKRGYLLYGPPGTGKSTMIAAMANLMKYNIYDLELTSIGNNWELKKLLIATTNKSIIVIEDIDCSLDLTGEREVKDLKGDKEGKKSNAVTLSGLLNFIDGIWSACGQERILVFTTNHVGKLDQALIRRGRMDMHIELSYCTFGAFKILAKNYLNIDSHHLFGEIESLLKETKITPADVAEHMMAKEVDGSLKGLIRALERIKWSQNVKVEEQLQQGD

SEQ ID NO: 97256 - DNA, 1595 bp, Arabidopsis thaliana
  misc_feature (1)..(1595): Ceres Seq. ID no. 12736732
  misc_feature (1)..(1595): Ortholog of  Ceres SEQ ID NO 13581273 as cited in SEQ ID NO 54551
  misc_feature (1)..(1595): Ortholog of  Ceres SEQ ID NO 14306857 as cited in SEQ ID NO 60035
  misc_feature (1)..(1595): Ortholog of  Ceres SEQ ID NO 14307960 as cited in SEQ ID NO 66187
  misc_feature (1)..(1595): Ortholog of  Ceres SEQ ID NO 13502874 as cited in SEQ ID NO 66298
  misc_feature (1)..(1595): Ortholog of  Ceres SEQ ID NO 12614124 as cited in SEQ ID NO 68392
aatgtcatcaacaaagacaataatggaaactatatacctaattctctctctcttcttcttcttcatcttcctatctctcaaactcttgttcggaccacggccgcgtaaactaaacctaccgccgagtccgagtcgaccatttccgatcatcggacacctccaccttctaaagctaccactccaccgtagatttctctctctctcagaatctttaaacaacgccaagattttctctctcagcctcggctctcgtctagtttttgttgtttcttctcacgccgtcgcggaagaatgtttcactaagaacgacgtcgtgttagctaaccggccggagtttctcgtcgggaaacatatagggtacaactctacgaccatggttggtgcggcttatggagatagttggaggaatcttcgacgtattggcaccattgagatcttctcgtctcttaggcttaatagcttcgtatctatccgtcaagatgagatccgacggctcataatttgtctagcgaaaaactctcaacatgggtttgtgaaagtggagatgaaaccattgtttatgtgtttaactatcaacaacatcattagaatggtggccggaaaaagattctacggtgatggaacagagaacgacaacgaggctaaacacgtgagacagctaattgccgaggtagttgttagcggcggcgcagggaacgcagcagactacttccctatccttcgttacgtaacgaactatgagaaacatgttaagaagttagcaggtcgtgttgatgagtttttgcaaagtctagttaacgagaaacgtgtggagaaagtaaaaggtaacacaatgatcgatcatttactttctctacaagaaactcagcctgattactacacggatgtgatcatcaaaggaatcatacttgttatgatacttgccgggactgatacatcagctggaacgttagaatgggcgatgtcgaatttgttgaaccatccagaagtattacgaaaggcaaagaccgaaatcgacgaccaaatcggtgtagaccggttagtagaggaacaagacattgtgaaacttccttaccttcagcacattgtgtcagagactttacggctttatccggtggctccaatgcttttaccccacttagcatcagaagattgtatagttgatggctatgacgttccacgcggcacaatcatcttggtgaatgcatgggccatccatagagatccaaagttatgggaagagccagaaaaatttaagccggagaggtttgagaaaaaaggagaggataaaaagttgatgccatttgggattggacgacgatcttgccctggttcagggctagctcaacggctagtgactttggctcttggatcattggtccaatgttttgagtgggagagggttgaagaaaagtatctagacatgagagaaagtgaaaaaggaaccacaatgcgaaaagctacatcgttgcaagctatgtgtaaagctcgtcccattgtccataaggttttagatgcttcttgtccataactttcatcatacagaacctcttgtataacaatttcgatagaaacacgatctgttttgttgcttc

SEQ ID NO: 97257 - protein, 509 aa, Arabidopsis thaliana
  peptide (1)..(509): Ceres Seq. ID no. 12736733
MSSTKTIMETIYLILSLFFFFIFLSLKLLFGPRPRKLNLPPSPSRPFPIIGHLHLLKLPLHRRFLSLSESLNNAKIFSLSLGSRLVFVVSSHAVAEECFTKNDVVLANRPEFLVGKHIGYNSTTMVGAAYGDSWRNLRRIGTIEIFSSLRLNSFVSIRQDEIRRLIICLAKNSQHGFVKVEMKPLFMCLTINNIIRMVAGKRFYGDGTENDNEAKHVRQLIAEVVVSGGAGNAADYFPILRYVTNYEKHVKKLAGRVDEFLQSLVNEKRVEKVKGNTMIDHLLSLQETQPDYYTDVIIKGIILVMILAGTDTSAGTLEWAMSNLLNHPEVLRKAKTEIDDQIGVDRLVEEQDIVKLPYLQHIVSETLRLYPVAPMLLPHLASEDCIVDGYDVPRGTIILVNAWAIHRDPKLWEEPEKFKPERFEKKGEDKKLMPFGIGRRSCPGSGLAQRLVTLALGSLVQCFEWERVEEKYLDMRESEKGTTMRKATSLQAMCKARPIVHKVLDASCP

SEQ ID NO: 97258 - protein, 502 aa, Arabidopsis thaliana
  peptide (1)..(502): Ceres Seq. ID no. 12736734
METIYLILSLFFFFIFLSLKLLFGPRPRKLNLPPSPSRPFPIIGHLHLLKLPLHRRFLSLSESLNNAKIFSLSLGSRLVFVVSSHAVAEECFTKNDVVLANRPEFLVGKHIGYNSTTMVGAAYGDSWRNLRRIGTIEIFSSLRLNSFVSIRQDEIRRLIICLAKNSQHGFVKVEMKPLFMCLTINNIIRMVAGKRFYGDGTENDNEAKHVRQLIAEVVVSGGAGNAADYFPILRYVTNYEKHVKKLAGRVDEFLQSLVNEKRVEKVKGNTMIDHLLSLQETQPDYYTDVIIKGIILVMILAGTDTSAGTLEWAMSNLLNHPEVLRKAKTEIDDQIGVDRLVEEQDIVKLPYLQHIVSETLRLYPVAPMLLPHLASEDCIVDGYDVPRGTIILVNAWAIHRDPKLWEEPEKFKPERFEKKGEDKKLMPFGIGRRSCPGSGLAQRLVTLALGSLVQCFEWERVEEKYLDMRESEKGTTMRKATSLQAMCKARPIVHKVLDASCP

SEQ ID NO: 97259 - protein, 385 aa, Arabidopsis thaliana
  peptide (1)..(385): Ceres Seq. ID no. 12736735
MVGAAYGDSWRNLRRIGTIEIFSSLRLNSFVSIRQDEIRRLIICLAKNSQHGFVKVEMKPLFMCLTINNIIRMVAGKRFYGDGTENDNEAKHVRQLIAEVVVSGGAGNAADYFPILRYVTNYEKHVKKLAGRVDEFLQSLVNEKRVEKVKGNTMIDHLLSLQETQPDYYTDVIIKGIILVMILAGTDTSAGTLEWAMSNLLNHPEVLRKAKTEIDDQIGVDRLVEEQDIVKLPYLQHIVSETLRLYPVAPMLLPHLASEDCIVDGYDVPRGTIILVNAWAIHRDPKLWEEPEKFKPERFEKKGEDKKLMPFGIGRRSCPGSGLAQRLVTLALGSLVQCFEWERVEEKYLDMRESEKGTTMRKATSLQAMCKARPIVHKVLDASCP

SEQ ID NO: 97260 - DNA, 1287 bp, Arabidopsis thaliana
  misc_feature (1)..(1287): Ceres Seq. ID no. 12736756
  misc_feature (1)..(1287): Ortholog of  Ceres SEQ ID NO 14306565 as cited in SEQ ID NO 53000
atgggttgtgcgagttcgaagcatcgtaagcgttgtctccattgccggagaggatattctcctccggtggatgtacagagaagtcactcagtgcatcacgcatcgcaaaactctgaagatagttgtcacatggtggctctaagttcctcaagccttggatctctcaagctatgtgattcttcttttgggcataatcacaaacacttggcggactttagcgagaagcttgtttctggcgaatctgtgaaaactggaaatgggtttggtccgaatgttgtcagagagaagtcagataaagagaaatcgaatttggaattgcaagctaagcttatggaagcaaaggtatggtcaagtatgatgaatgagaagataccgaagattgtaccgaaaactcccattgttacgcctcctggtgagccagaaacgattaatacttgggaaatgatggatggtcttgaagatgttttgagtcctttacgatcacctaatcatgttaagagtttctcgtttgatgttggtcctaatggaggtaagtctaatggtagtgttaagccggtatggcttcaaatggaggaggaagaagaagggtttgaagattttgatcctgagatcatttcttcgtttaggaaatcgcttcaagaacttccttctgatcatccgtttcacatttcgaaccacgatttcgaattgaaaccgcggttcaatttctctgatgaggaaaaggaggaggaggaacaaagtgttggtaaagagagagtgatactttactttacaagtcttagaggtataaggaagacttatgaagaaagctgtgatgttcgggttatactaaaaagcctcgggattagagtggatgagcgagatgtgtcgatgcattcgggtttcaaagacgagttgaaggagctactaggggaaaagtttaacaaaggtgttgggattactttacctagagttttcttgggaaggaagtatattgggggagcagaggagattcggaagttaaacgaagatgggaagcttgagaagcttcttggagggtgtgagagggtggaagaaaaccaaaatggtaatggtctagaatgtgaagcttgtggagatgtaaggtttgtgccgtgtgagacatgttcagggagctgcaaagtgtactatgaatatgaagatgatgatgatgatgatgatgaaggtgatgatgatgaaagtgttaaggaagaaagagagtatgggtttcaaacatgtcctgattgtaatgagaatggtctcattagatgtcctgtttgttgtgattag

SEQ ID NO: 97261 - protein, 428 aa, Arabidopsis thaliana
  peptide (1)..(428): Ceres Seq. ID no. 12736757
MGCASSKHRKRCLHCRRGYSPPVDVQRSHSVHHASQNSEDSCHMVALSSSSLGSLKLCDSSFGHNHKHLADFSEKLVSGESVKTGNGFGPNVVREKSDKEKSNLELQAKLMEAKVWSSMMNEKIPKIVPKTPIVTPPGEPETINTWEMMDGLEDVLSPLRSPNHVKSFSFDVGPNGGKSNGSVKPVWLQMEEEEEGFEDFDPEIISSFRKSLQELPSDHPFHISNHDFELKPRFNFSDEEKEEEEQSVGKERVILYFTSLRGIRKTYEESCDVRVILKSLGIRVDERDVSMHSGFKDELKELLGEKFNKGVGITLPRVFLGRKYIGGAEEIRKLNEDGKLEKLLGGCERVEENQNGNGLECEACGDVRFVPCETCSGSCKVYYEYEDDDDDDDEGDDDESVKEEREYGFQTCPDCNENGLIRCPVCCD

SEQ ID NO: 97262 - protein, 385 aa, Arabidopsis thaliana
  peptide (1)..(385): Ceres Seq. ID no. 12736758
MVALSSSSLGSLKLCDSSFGHNHKHLADFSEKLVSGESVKTGNGFGPNVVREKSDKEKSNLELQAKLMEAKVWSSMMNEKIPKIVPKTPIVTPPGEPETINTWEMMDGLEDVLSPLRSPNHVKSFSFDVGPNGGKSNGSVKPVWLQMEEEEEGFEDFDPEIISSFRKSLQELPSDHPFHISNHDFELKPRFNFSDEEKEEEEQSVGKERVILYFTSLRGIRKTYEESCDVRVILKSLGIRVDERDVSMHSGFKDELKELLGEKFNKGVGITLPRVFLGRKYIGGAEEIRKLNEDGKLEKLLGGCERVEENQNGNGLECEACGDVRFVPCETCSGSCKVYYEYEDDDDDDDEGDDDESVKEEREYGFQTCPDCNENGLIRCPVCCD

SEQ ID NO: 97263 - protein, 318 aa, Arabidopsis thaliana
  peptide (1)..(318): Ceres Seq. ID no. 12736759
MEAKVWSSMMNEKIPKIVPKTPIVTPPGEPETINTWEMMDGLEDVLSPLRSPNHVKSFSFDVGPNGGKSNGSVKPVWLQMEEEEEGFEDFDPEIISSFRKSLQELPSDHPFHISNHDFELKPRFNFSDEEKEEEEQSVGKERVILYFTSLRGIRKTYEESCDVRVILKSLGIRVDERDVSMHSGFKDELKELLGEKFNKGVGITLPRVFLGRKYIGGAEEIRKLNEDGKLEKLLGGCERVEENQNGNGLECEACGDVRFVPCETCSGSCKVYYEYEDDDDDDDEGDDDESVKEEREYGFQTCPDCNENGLIRCPVCCD

SEQ ID NO: 97264 - DNA, 666 bp, Arabidopsis thaliana
  misc_feature (1)..(666): Ceres Seq. ID no. 12736793
  misc_feature (1)..(666): Ortholog of  Ceres SEQ ID NO 13596163 as cited in SEQ ID NO 60864
  misc_feature (1)..(666): Ortholog of  Ceres SEQ ID NO 15226347 as cited in SEQ ID NO 61639
atgagtcaaggtttcgaaagatatgagagacaatactgtgagatttctgcaaatctctcaaagaaatgtacttcagctattgctcttgatggagaacaaaagaagcagaatctatctgaaataaaatctggggttgaggaagcagaagctttggttaagaaaatggacctcgaggcaagaaaccttccacccaatgttaaatccagtctccttgtcaaattaagggaatacaaatctgatcttaacaatttcaagacggaagtgaagagaatcacatctggaaacttaaacgctactgctcgagatgagttactagaagctggtatggctgacacattgacggcttcagctgatcaaagatcaagattgatgatgtcaacagaccatttaggccgaaccacagacagaatcaaggacagtaggagaacgatactggagacagaagagcttggtgtttcaatccttcaggatttgcacgggcagagacagtctctcttacgggcccatgaaacgcttcatggagtcgatgataacgtcggaaagagcaagaaaatattgacaacaatgactaggagaatgaatagaaacaaatggaccatcggtgcgataatcacagtccttgtcctcgccattatctttatcttgtacttcaaactcaccaggtga

SEQ ID NO: 97265 - protein, 221 aa, Arabidopsis thaliana
  peptide (1)..(221): Ceres Seq. ID no. 12736794
MSQGFERYERQYCEISANLSKKCTSAIALDGEQKKQNLSEIKSGVEEAEALVKKMDLEARNLPPNVKSSLLVKLREYKSDLNNFKTEVKRITSGNLNATARDELLEAGMADTLTASADQRSRLMMSTDHLGRTTDRIKDSRRTILETEELGVSILQDLHGQRQSLLRAHETLHGVDDNVGKSKKILTTMTRRMNRNKWTIGAIITVLVLAIIFILYFKLTR

SEQ ID NO: 97266 - protein, 167 aa, Arabidopsis thaliana; identical to SEQ ID NO: 89257
  peptide (1)..(167): Ceres Seq. ID no. 12736795

SEQ ID NO: 97267 - protein, 113 aa, Arabidopsis thaliana; identical to SEQ ID NO: 89258
  peptide (1)..(113): Ceres Seq. ID no. 12736796

SEQ ID NO: 97268 - DNA, 780 bp, Arabidopsis thaliana
  misc_feature (1)..(780): Ceres Seq. ID no. 12736804
  misc_feature (1)..(780): Ortholog of  Ceres SEQ ID NO 13594163 as cited in SEQ ID NO 60426
atgtcgggacaaagattggatggcaagatcgtaattataacaggcggggctagtgggatcggagctgaagcagcgaggttgttcacggaccatggagctaaagttgtcatcgttgacttacaagaggagcttggtcaaaacgtcgccgtttcgatcgggctagacaaagcaagtttttaccgttgcgatataacggatgagacggaagttgagaacgccgttaagttcaccgttgaaaaacacggaaagcttgacgttctgtttagtaacgccggggtcatggaaccgcatggaagcattcttgatttggatcttgaggcgtttgatcgaacgatggccgtcaacgttcgcggtgcggctgcgtttataaaacatgcagcgcgttcgatggtggctagtggaactcgtggctccattgtttgtacaacgagtgtgacggctgagattggtggtccgggacctcacagttacacagcgtcgaaacacgcgcttctcgggttggttcgatcagcgtgtggcgggttggggaagtacgggattagagtcaacggtgttgcaccgtatggagtagcaacggggttaactagctacaacgaggaaactgtgaagatggttgaggattactgttcagccacggcgattctcaaaggtgttgtacttaaagctcgacatgtggcagatgcagctttgtttttggcttctgatgattcggtttatattagtggtcaaaacttgggggttgacggcggttatagcgtcgttaagctgacatcgaattaa

SEQ ID NO: 97269 - protein, 259 aa, Arabidopsis thaliana
  peptide (1)..(259): Ceres Seq. ID no. 12736805
MSGQRLDGKIVIITGGASGIGAEAARLFTDHGAKVVIVDLQEELGQNVAVSIGLDKASFYRCDITDETEVENAVKFTVEKHGKLDVLFSNAGVMEPHGSILDLDLEAFDRTMAVNVRGAAAFIKHAARSMVASGTRGSIVCTTSVTAEIGGPGPHSYTASKHALLGLVRSACGGLGKYGIRVNGVAPYGVATGLTSYNEETVKMVEDYCSATAILKGVVLKARHVADAALFLASDDSVYISGQNLGVDGGYSVVKLTSN

SEQ ID NO: 97270 - protein, 166 aa, Arabidopsis thaliana; identical to SEQ ID NO: 89262
  peptide (1)..(166): Ceres Seq. ID no. 12736806

SEQ ID NO: 97271 - protein, 148 aa, Arabidopsis thaliana; identical to SEQ ID NO: 89263
  peptide (1)..(148): Ceres Seq. ID no. 12736807

SEQ ID NO: 97272 - DNA, 1350 bp, Arabidopsis thaliana
  misc_feature (1)..(1350): Ceres Seq. ID no. 12736866
  misc_feature (1)..(1350): Ortholog of  Ceres SEQ ID NO 14314054 as cited in SEQ ID NO 56939
  misc_feature (1)..(1350): Ortholog of  Ceres SEQ ID NO 13503468 as cited in SEQ ID NO 63271
  misc_feature (1)..(1350): Ortholog of  Ceres SEQ ID NO 14303592 as cited in SEQ ID NO 68603
atggtgaatttcaactcagccgttaacatacttgaggtggtccaagttagcccgccgtcttctaactcgctcacactcccactcacttactttgacttgggttggctcaaacttcaccccgttgaccgagttcttttctaccacgtccccgagctgactcgctcttctctcatctctaaacttaagtcctctctctcagccacgctcctccactatctcccactcgccggccgcctcgtgtgggattcaatcaaaaccaaaccatccattgtctattctcctgacgacaaagatgccgtgtatctcacggtagctgagtctaacggtgacctttcccatctttccggagatgaacctcgtcccgccacggagtttcattctttagtccctgagttaccggtttccgacgaatcagctcgcgttctcgccgttcaggtaacgtttttcccaaaccaaggattttctctcggcgtaaccgcacatcatgccgttttagatggtaaaacaacagccatgtttctcaaagcatgggctcacaactgtaaacaagaacaagaagctctgccacacgatctagtaccgtctttagatcgtatcattgttcaagacccaacgggactcgagacaaaactcttgaaccggtggatatcagcttccaacaacaaaccaagcttaaaactgtttccttccaaaataattggatccgatattctccgagtcacgtaccggttaactcgagaagacatcaagaagctacgtgaacgagtggagaccgagtcacacgctaagcagctccgtttgtcgacttttgtcattacttacgcttacgttataacatgcatggtgaagatgcgtggaggtgacccgacccggtttgtgtgcgttggttttgcatcagactttcggtcacggttaaaccctccgttaccgccgacgttcttcgggaactgcattgtcgggtcgggagatttcgacgtgaaagcagaaccaatattggaagaaggagaaggaaaaggtttcatcacggcggtggagactttgaccggatgggtcaacggattgtgtccggagaatatagagaagaatatgcttttaccgtttgaagcgtttaagaggatggaaccgggaaggcaaatgatatcggttgctgggtcgacccggttagggatttacgggtctgattttgggtggggaaaaccggtcaaggtagagattgtgacgattgataaggatgcttcggtttcattgtcggagagtggagatggaagtggtggtgttgaggttggtgtttgtttgaagaaagatgatgtggaacgttttggttcattattctccatcgggttggaataa

SEQ ID NO: 97273 - protein, 449 aa, Arabidopsis thaliana
  peptide (1)..(449): Ceres Seq. ID no. 12736867
MVNFNSAVNILEVVQVSPPSSNSLTLPLTYFDLGWLKLHPVDRVLFYHVPELTRSSLISKLKSSLSATLLHYLPLAGRLVWDSIKTKPSIVYSPDDKDAVYLTVAESNGDLSHLSGDEPRPATEFHSLVPELPVSDESARVLAVQVTFFPNQGFSLGVTAHHAVLDGKTTAMFLKAWAHNCKQEQEALPHDLVPSLDRIIVQDPTGLETKLLNRWISASNNKPSLKLFPSKIIGSDILRVTYRLTREDIKKLRERVETESHAKQLRLSTFVITYAYVITCMVKMRGGDPTRFVCVGFASDFRSRLNPPLPPTFFGNCIVGSGDFDVKAEPILEEGEGKGFITAVETLTGWVNGLCPENIEKNMLLPFEAFKRMEPGRQMISVAGSTRLGIYGSDFGWGKPVKVEIVTIDKDASVSLSESGDGSGGVEVGVCLKKDDVERFGSLFSIGLE

SEQ ID NO: 97274 - protein, 278 aa, Arabidopsis thaliana
  peptide (1)..(278): Ceres Seq. ID no. 12736868
MFLKAWAHNCKQEQEALPHDLVPSLDRIIVQDPTGLETKLLNRWISASNNKPSLKLFPSKIIGSDILRVTYRLTREDIKKLRERVETESHAKQLRLSTFVITYAYVITCMVKMRGGDPTRFVCVGFASDFRSRLNPPLPPTFFGNCIVGSGDFDVKAEPILEEGEGKGFITAVETLTGWVNGLCPENIEKNMLLPFEAFKRMEPGRQMISVAGSTRLGIYGSDFGWGKPVKVEIVTIDKDASVSLSESGDGSGGVEVGVCLKKDDVERFGSLFSIGLE

SEQ ID NO: 97275 - DNA, 1347 bp, Arabidopsis thaliana
  misc_feature (1)..(1347): Ceres Seq. ID no. 12736873
  misc_feature (1)..(1347): Ortholog of  Ceres SEQ ID NO 13582281 as cited in SEQ ID NO 51014
  misc_feature (1)..(1347): Ortholog of  Ceres SEQ ID NO 12617417 as cited in SEQ ID NO 65089
atggggtcaaagtttcatgcttttctttatccatggtttggttttggtcatatgattccgtatcttcatctagctaacaaattagctgaaaaaggtcatagggttactttcttggctcccaagaaagctcagaaacaactcgaacctctcaacttgttcccaaacagcattcacttcgagaatgttactcttcctcatgttgatggtctccctgttggcgcagagacaaccgcggatctcccgaactcatctaagagagtcctcgctgatgccatggatcttctacgcgaacagattgaagttaagattcgttctttgaaacctgacctaattttcttcgattttgttgattggattccacaaatggcaaaagaattaggaatcaaaagtgtaagttaccagatcatatcggcagcttttatagctatgtttttcgctcctcgtgctgaattaggttctcctccacctgggtttccttcatcaaaagtagcattacgtggacatgacgctaacatctattcactcttcgcaaacacccgcaaatttctctttgatcgagtcaccacaggccttaagaactgcgacgtcattgccataaggacatgtgcagaaatcgaaggtaacttatgtgatttcatcgaaagacaatgtcagagaaaagttctcttaaccggtccaatgttccttgatccacaagggaagagtggtaagccgctagaagatcgatggaataattggttaaacggatttgaaccaagctcggtagtgtactgtgcgtttggcacccatttctttttcgagatagatcaatttcaagaactctgtttaggaatggagctcacgggtctaccttttttggtagcggttatgccaccgagagggtcttcaacgattcaagaagcattaccagaagggttcgaagaacggattaaagggcgtggaattgtttggggaggatgggtggaacaacctttgatattgtctcatccatcaataggttgctttgtgaaccattgcgggttcggttcaatgtgggagtctttggttagtgattgccagattgtgtttattccacaattggttgatcaagttctcacaacgagattgttgaccgaagaactcgaggtctccgtgaaagtaaagagagatgaaattactggttggttttcgaaggagagcttgagggatacggtcaaatctgtgatggataaaaatagtgagattgggaatctagtgaggaggaatcataagaaactgaaggaaactttggttagtcctggattgttgagtagttatgctgataagtttgttgacgaattagagaatcatatccacagtaagaattga

SEQ ID NO: 97276 - protein, 448 aa, Arabidopsis thaliana
  peptide (1)..(448): Ceres Seq. ID no. 12736874
MGSKFHAFLYPWFGFGHMIPYLHLANKLAEKGHRVTFLAPKKAQKQLEPLNLFPNSIHFENVTLPHVDGLPVGAETTADLPNSSKRVLADAMDLLREQIEVKIRSLKPDLIFFDFVDWIPQMAKELGIKSVSYQIISAAFIAMFFAPRAELGSPPPGFPSSKVALRGHDANIYSLFANTRKFLFDRVTTGLKNCDVIAIRTCAEIEGNLCDFIERQCQRKVLLTGPMFLDPQGKSGKPLEDRWNNWLNGFEPSSVVYCAFGTHFFFEIDQFQELCLGMELTGLPFLVAVMPPRGSSTIQEALPEGFEERIKGRGIVWGGWVEQPLILSHPSIGCFVNHCGFGSMWESLVSDCQIVFIPQLVDQVLTTRLLTEELEVSVKVKRDEITGWFSKESLRDTVKSVMDKNSEIGNLVRRNHKKLKETLVSPGLLSSYADKFVDELENHIHSKN

SEQ ID NO: 97277 - protein, 431 aa, Arabidopsis thaliana
  peptide (1)..(431): Ceres Seq. ID no. 12736875
MIPYLHLANKLAEKGHRVTFLAPKKAQKQLEPLNLFPNSIHFENVTLPHVDGLPVGAETTADLPNSSKRVLADAMDLLREQIEVKIRSLKPDLIFFDFVDWIPQMAKELGIKSVSYQIISAAFIAMFFAPRAELGSPPPGFPSSKVALRGHDANIYSLFANTRKFLFDRVTTGLKNCDVIAIRTCAEIEGNLCDFIERQCQRKVLLTGPMFLDPQGKSGKPLEDRWNNWLNGFEPSSVVYCAFGTHFFFEIDQFQELCLGMELTGLPFLVAVMPPRGSSTIQEALPEGFEERIKGRGIVWGGWVEQPLILSHPSIGCFVNHCGFGSMWESLVSDCQIVFIPQLVDQVLTTRLLTEELEVSVKVKRDEITGWFSKESLRDTVKSVMDKNSEIGNLVRRNHKKLKETLVSPGLLSSYADKFVDELENHIHSKN

SEQ ID NO: 97278 - protein, 357 aa, Arabidopsis thaliana
  peptide (1)..(357): Ceres Seq. ID no. 12736876
MDLLREQIEVKIRSLKPDLIFFDFVDWIPQMAKELGIKSVSYQIISAAFIAMFFAPRAELGSPPPGFPSSKVALRGHDANIYSLFANTRKFLFDRVTTGLKNCDVIAIRTCAEIEGNLCDFIERQCQRKVLLTGPMFLDPQGKSGKPLEDRWNNWLNGFEPSSVVYCAFGTHFFFEIDQFQELCLGMELTGLPFLVAVMPPRGSSTIQEALPEGFEERIKGRGIVWGGWVEQPLILSHPSIGCFVNHCGFGSMWESLVSDCQIVFIPQLVDQVLTTRLLTEELEVSVKVKRDEITGWFSKESLRDTVKSVMDKNSEIGNLVRRNHKKLKETLVSPGLLSSYADKFVDELENHIHSKN

SEQ ID NO: 97279 - DNA, 1377 bp, Arabidopsis thaliana
  misc_feature (1)..(1377): Ceres Seq. ID no. 12736877
  misc_feature (1)..(1377): Ortholog of  Ceres SEQ ID NO 14313049 as cited in SEQ ID NO 54099
  misc_feature (1)..(1377): Ortholog of  Ceres SEQ ID NO 14314054 as cited in SEQ ID NO 56939
  misc_feature (1)..(1377): Ortholog of  Ceres SEQ ID NO 13503468 as cited in SEQ ID NO 63271
  misc_feature (1)..(1377): Ortholog of  Ceres SEQ ID NO 14303592 as cited in SEQ ID NO 68603
atggcgctaaaggtaaccaagatctcccaagtcagcccagcaagtaactcgtccaatgactcagccaactcgatggttcttccactgacgttcttcgacttacgttggttacaattccatcccaccgaaagagttatcttctacaaactcatcaaagactcatctcttgagtccttcctctccgtgatcctccccaaacttgagctctctctctccatcgtccttcgtcactacctcccgctcgctggccgcctcacatggagctcacaagatcctaaacctagcatcatcgtctctccgaacgactatgtttccttgactgtcgcggagagtgatgctgatttctcccgtatctccggtaaagggatacgtcccgaatcggagatacgctctttggtgcccgagttatcgctttcttgtgactcaccttcggttctttctttgcaagtcactttgttccccaaccaagggttttgtattggtatcgcttctcatcattctgttatggacgggaaaacagtggttaggtttataaaatcatgggctcacatttgtaaacatggagccatggatttaccggaggatttgactccggttttagatcgtacggttatcaatgtccctgcaagtcttgatgcaaaaatcattgaacttttgtcatatttctcagaagtgaaagatagtttcagatcattgaagctgcttcctcccaaggagatcagccccgacctagtacggatctcgctcgagttgactcgagagaatatagagaaacttagggagcaagccaagagggagtcagctcgctctcatcatgagcttcacttgtcaacgttcgttgttgccaacgcgtatctttggacatgcttggtaaagacgcgtggaggagatgagaacagaccggtccgtttcatgtatgctgctgatttcaggaaccggttagatccaccggttcctgagatgtatttcgggaactgcgtgttcccgataggttgctttggttacaaggcgaatgtgtttttgggagaagatgggtttgttaatatggtcgaaattctaagtgattcggttagaagtattggtttacgaaagttggaaacaatttgcgaattgtacattaatggaacaaagagtgtgaaaccaggtacacagattggatccattgccggttcgaaccagtttgggctatacgggtcagatttcgggtggggaaaaccatgtaacagtgagattgcgtccattgaccgaaacgaggcgttttcgatgtcggagaggagggatgaacccggaggtgtggagatcggcttgtgtttgaagaaatgtgagatggacatatttatttatctgtttcaaaatggtttagaaatggttctttag

SEQ ID NO: 97280 - protein, 458 aa, Arabidopsis thaliana
  peptide (1)..(458): Ceres Seq. ID no. 12736878
MALKVTKISQVSPASNSSNDSANSMVLPLTFFDLRWLQFHPTERVIFYKLIKDSSLESFLSVILPKLELSLSIVLRHYLPLAGRLTWSSQDPKPSIIVSPNDYVSLTVAESDADFSRISGKGIRPESEIRSLVPELSLSCDSPSVLSLQVTLFPNQGFCIGIASHHSVMDGKTVVRFIKSWAHICKHGAMDLPEDLTPVLDRTVINVPASLDAKIIELLSYFSEVKDSFRSLKLLPPKEISPDLVRISLELTRENIEKLREQAKRESARSHHELHLSTFVVANAYLWTCLVKTRGGDENRPVRFMYAADFRNRLDPPVPEMYFGNCVFPIGCFGYKANVFLGEDGFVNMVEILSDSVRSIGLRKLETICELYINGTKSVKPGTQIGSIAGSNQFGLYGSDFGWGKPCNSEIASIDRNEAFSMSERRDEPGGVEIGLCLKKCEMDIFIYLFQNGLEMVL

SEQ ID NO: 97281 - protein, 434 aa, Arabidopsis thaliana
  peptide (1)..(434): Ceres Seq. ID no. 12736879
MVLPLTFFDLRWLQFHPTERVIFYKLIKDSSLESFLSVILPKLELSLSIVLRHYLPLAGRLTWSSQDPKPSIIVSPNDYVSLTVAESDADFSRISGKGIRPESEIRSLVPELSLSCDSPSVLSLQVTLFPNQGFCIGIASHHSVMDGKTVVRFIKSWAHICKHGAMDLPEDLTPVLDRTVINVPASLDAKIIELLSYFSEVKDSFRSLKLLPPKEISPDLVRISLELTRENIEKLREQAKRESARSHHELHLSTFVVANAYLWTCLVKTRGGDENRPVRFMYAADFRNRLDPPVPEMYFGNCVFPIGCFGYKANVFLGEDGFVNMVEILSDSVRSIGLRKLETICELYINGTKSVKPGTQIGSIAGSNQFGLYGSDFGWGKPCNSEIASIDRNEAFSMSERRDEPGGVEIGLCLKKCEMDIFIYLFQNGLEMVL

SEQ ID NO: 97282 - protein, 290 aa, Arabidopsis thaliana
  peptide (1)..(290): Ceres Seq. ID no. 12736880
MDGKTVVRFIKSWAHICKHGAMDLPEDLTPVLDRTVINVPASLDAKIIELLSYFSEVKDSFRSLKLLPPKEISPDLVRISLELTRENIEKLREQAKRESARSHHELHLSTFVVANAYLWTCLVKTRGGDENRPVRFMYAADFRNRLDPPVPEMYFGNCVFPIGCFGYKANVFLGEDGFVNMVEILSDSVRSIGLRKLETICELYINGTKSVKPGTQIGSIAGSNQFGLYGSDFGWGKPCNSEIASIDRNEAFSMSERRDEPGGVEIGLCLKKCEMDIFIYLFQNGLEMVL

SEQ ID NO: 97283 - DNA, 1372 bp, Arabidopsis thaliana
  misc_feature (1)..(1372): Ceres Seq. ID no. 12736923
  misc_feature (1)..(1372): Ortholog of  Ceres SEQ ID NO 13659394 as cited in SEQ ID NO 67049
atgactacaaaacgcatagacagagatctcccatcttccgacgatccttcctccgctaaacgccgtatcgaattccccgaagaaacactcgaaaacgacggtgctgccgcaatcaaactccttagcttactcctccaatgcgccgaatacgtagctactgatcatctccgtgaagcttcaacacttttatccgaaatctccgagatatgttctccgttcggttcctcgccggagcgagtcgtcgcttacttcgctcaagcgctacaaacgcgcgtgatcagctcttacctctccggcgcgtgttctcccctctccgagaaaccactcactgttgttcagtctcagaaaatcttctccgccttgcagacttataactccgttagtcctctgatcaaattctcacatttcacggcgaatcaagccatttttcaggcgcttgacggagaagattccgttcatatcatcgatctcgatgttatgcaaggtcttcaatggccggctctatttcacatcctcgcttcacgtcctcgaaaactccgatcaattcgaatcaccggatttggttcctcctccgatctactcgcttcaactggccggagactcgccgatttcgcatcatcgttaaacctccctttcgaatttcatccaattgaaggcataatcggaaacctaatcgatccgagccaactcgcaacgagacaaggagaagctgtggtggttcattggatgcagcaccggttatatgatgttacagggaacaatctcgagacgttggagattctacggaggctgaaaccgaatctgatcacggtggtggagcaagaattgagctacgacgatggaggaagctttttaggaagattcgtggaggctttgcattattatagcgcgttgtttgacgcgctaggagatggattgggtgaagagagtggtgagagattcacggtggagcagattgttttggggacggagataagaaacattgtggcgcacggaggaggaagaaggaagagaatgaagtggaaagaagaactgagccgggtcgggtttagacctgtttcgcttcggggtaacccggcgacacaagcgggtttattgttgggtatgttaccgtggaatggatatactttggttgaagagaatggaaccctccgtcttggctggaaggatctctcgcttttgactgcctctgcctggaaatctcagccgttcgattgattttatttttattttataatgcaaactgcaaagtgatcattaagattttttgttttgaaaatatttccaaacaaattacgataattacgataaaaaaaagtcttcattgacgcaaaaagttgttgatattgagaatgagaaggttgttgatact

SEQ ID NO: 97284 - protein, 405 aa, Arabidopsis thaliana
  peptide (1)..(405): Ceres Seq. ID no. 12736924
MTTKRIDRDLPSSDDPSSAKRRIEFPEETLENDGAAAIKLLSLLLQCAEYVATDHLREASTLLSEISEICSPFGSSPERVVAYFAQALQTRVISSYLSGACSPLSEKPLTVVQSQKIFSALQTYNSVSPLIKFSHFTANQAIFQALDGEDSVHIIDLDVMQGLQWPALFHILASRPRKLRSIRITGFGSSSDLLASTGRRLADFASSLNLPFEFHPIEGIIGNLIDPSQLATRQGEAVVVHWMQHRLYDVTGNNLETLEILRRLKPNLITVVEQELSYDDGGSFLGRFVEALHYYSALFDALGDGLGEESGERFTVEQIVLGTEIRNIVAHGGGRRKRMKWKEELSRVGFRPVSLRGNPATQAGLLLGMLPWNGYTLVEENGTLRLGWKDLSLLTASAWKSQPFD

SEQ ID NO: 97285 - protein, 246 aa, Arabidopsis thaliana
  peptide (1)..(246): Ceres Seq. ID no. 12736925
MQGLQWPALFHILASRPRKLRSIRITGFGSSSDLLASTGRRLADFASSLNLPFEFHPIEGIIGNLIDPSQLATRQGEAVVVHWMQHRLYDVTGNNLETLEILRRLKPNLITVVEQELSYDDGGSFLGRFVEALHYYSALFDALGDGLGEESGERFTVEQIVLGTEIRNIVAHGGGRRKRMKWKEELSRVGFRPVSLRGNPATQAGLLLGMLPWNGYTLVEENGTLRLGWKDLSLLTASAWKSQPFD

SEQ ID NO: 97286 - DNA, 2211 bp, Arabidopsis thaliana
  misc_feature (1)..(2211): Ceres Seq. ID no. 12736934
  misc_feature (1)..(2211): Ortholog of  Ceres SEQ ID NO 12465083 as cited in SEQ ID NO 68239
  misc_feature (1)..(2211): Ortholog of  Ceres SEQ ID NO 14309653 as cited in SEQ ID NO 0
ggaagctctctgttcaaatcaaaaagagagatcgtacgcaaaagtttccgatatggctcgctcgtttggagcaaacagcactgttgtgcttgcgatcatcttcttcggatgtttatttgcgttttccactgcaaaagaagaggctacgaagttaggatcagttattgggatagatcttggtaccacttactcttgtgttggtgtttacaagaatggtcatgttgaaattattgccaatgaccaaggaaaccgtattacaccttcatgggttggttttactgactctgaaaggctcattggtgaggctgctaagaatcaggcggctgttaatcctgagaggactgtcttcgacgttaagagattgatcgggcgaaaatttgaggacaaggaggttcaaaaggacaggaaacttgtaccttaccagattgtgaacaaggatggtaagccatacattcaagtcaagatcaaggatggtgagactaaggttttcagtcctgaggagatcagtgccatgattctgactaagatgaaggagacagccgaagcctaccttggaaagaaaatcaaggacgctgttgtcactgttccagcttacttcaatgatgctcaaaggcaagctaccaaggatgccggtgttattgctgggctcaatgttgctagaatcatcaacgaacctactgctgctgctattgcctacggtcttgataagaagggtggtgagaagaacatccttgtatttgaccttggtggtggtacttttgatgtcagtgtcttgaccattgataacggagtgtttgaggttctctccacaaatggtgacactcacttgggaggtgaggactttgaccacaggatcatggagtacttcatcaagttaattaagaagaagcaccagaaggacatcagcaaggacaacaaggctcttggtaagctccgaagggaatgtgagagggcaaagagagctctaagcagtcagcaccaagtccgtgtagagattgagtcactctttgatggtgttgatttatctgagccactcaccagagctcgtttcgaggagcttaacaatgatttgttcaggaagaccatgggacctgtgaagaaggccatggatgatgccggtctacagaagagccagatcgatgagattgtccttgttggtggaagcaccaggatcccaaaggttcagcaactgttgaaggacttctttgaaggtaaagagccaaacaagggtgtgaaccccgacgaggctgttgcctatggtgctgctgttcagggtggtattttgagcggagaaggcggtgatgagaccaaagatatccttcttcttgatgttgcgccactcactttaggtatcgagactgtaggaggagtgatgacaaagttgatcccaagaaacacggttattccaaccaagaaatctcaggttttcacaacgtaccaagaccagcagaccaccgtctccattcaggtctttgaaggtgaaagaagtctcaccaaggactgcaggctactcgggaaattcgacctcactggagtcccaccggccccaagaggaacccctcaaatcgaggtcacatttgaagtggacgccaacggtattcttaatgtgaaagcagaggacaaggcgagtggtaaatcagagaagattacaatcacaaacgagaagggtcgtctgagccaagaagagattgaccggatggtgaaggaggcagaggagtttgcagaggaagacaagaaggtgaaggagaagatcgacgccaggaatgccctggagacatacgtgtacaacatgaagaaccaagtgagcgacaaggacaagcttgcagacaaattggaaggagatgagaaggagaagatagaagcagcgacgaaagaggccttggagtggctcgacgagaaccaaaactcagagaaagaagagtacgacgagaagctcaaggaggtagaggcagtgtgtaacccaatcatcacagcagtttaccagagatcaggcggagcaccaggtgcaggaggagaatcatcgactgaggaggaagatgagtctcacgatgagctctagatgtcttctgttattgttaatttattaaaccatagagacaagttttgaggatgaaacgtcgtttttgttttttgtatttggtttcctttttcttatggatttttaggaaaggggagagattaagtagcgtcccttctttagtctccctggac

SEQ ID NO: 97287 - protein, 685 aa, Arabidopsis thaliana
  peptide (1)..(685): Ceres Seq. ID no. 12736935
EALCSNQKERSYAKVSDMARSFGANSTVVLAIIFFGCLFAFSTAKEEATKLGSVIGIDLGTTYSCVGVYKNGHVEIIANDQGNRITPSWVGFTDSERLIGEAAKNQAAVNPERTVFDVKRLIGRKFEDKEVQKDRKLVPYQIVNKDGKPYIQVKIKDGETKVFSPEEISAMILTKMKETAEAYLGKKIKDAVVTVPAYFNDAQRQATKDAGVIAGLNVARIINEPTAAAIAYGLDKKGGEKNILVFDLGGGTFDVSVLTIDNGVFEVLSTNGDTHLGGEDFDHRIMEYFIKLIKKKHQKDISKDNKALGKLRRECERAKRALSSQHQVRVEIESLFDGVDLSEPLTRARFEELNNDLFRKTMGPVKKAMDDAGLQKSQIDEIVLVGGSTRIPKVQQLLKDFFEGKEPNKGVNPDEAVAYGAAVQGGILSGEGGDETKDILLLDVAPLTLGIETVGGVMTKLIPRNTVIPTKKSQVFTTYQDQQTTVSIQVFEGERSLTKDCRLLGKFDLTGVPPAPRGTPQIEVTFEVDANGILNVKAEDKASGKSEKITITNEKGRLSQEEIDRMVKEAEEFAEEDKKVKEKIDARNALETYVYNMKNQVSDKDKLADKLEGDEKEKIEAATKEALEWLDENQNSEKEEYDEKLKEVEAVCNPIITAVYQRSGGAPGAGGESSTEEEDESHDEL

SEQ ID NO: 97288 - protein, 668 aa, Arabidopsis thaliana
  peptide (1)..(668): Ceres Seq. ID no. 12736936
MARSFGANSTVVLAIIFFGCLFAFSTAKEEATKLGSVIGIDLGTTYSCVGVYKNGHVEIIANDQGNRITPSWVGFTDSERLIGEAAKNQAAVNPERTVFDVKRLIGRKFEDKEVQKDRKLVPYQIVNKDGKPYIQVKIKDGETKVFSPEEISAMILTKMKETAEAYLGKKIKDAVVTVPAYFNDAQRQATKDAGVIAGLNVARIINEPTAAAIAYGLDKKGGEKNILVFDLGGGTFDVSVLTIDNGVFEVLSTNGDTHLGGEDFDHRIMEYFIKLIKKKHQKDISKDNKALGKLRRECERAKRALSSQHQVRVEIESLFDGVDLSEPLTRARFEELNNDLFRKTMGPVKKAMDDAGLQKSQIDEIVLVGGSTRIPKVQQLLKDFFEGKEPNKGVNPDEAVAYGAAVQGGILSGEGGDETKDILLLDVAPLTLGIETVGGVMTKLIPRNTVIPTKKSQVFTTYQDQQTTVSIQVFEGERSLTKDCRLLGKFDLTGVPPAPRGTPQIEVTFEVDANGILNVKAEDKASGKSEKITITNEKGRLSQEEIDRMVKEAEEFAEEDKKVKEKIDARNALETYVYNMKNQVSDKDKLADKLEGDEKEKIEAATKEALEWLDENQNSEKEEYDEKLKEVEAVCNPIITAVYQRSGGAPGAGGESSTEEEDESHDEL

SEQ ID NO: 97289 - protein, 515 aa, Arabidopsis thaliana
  peptide (1)..(515): Ceres Seq. ID no. 12736937
MILTKMKETAEAYLGKKIKDAVVTVPAYFNDAQRQATKDAGVIAGLNVARIINEPTAAAIAYGLDKKGGEKNILVFDLGGGTFDVSVLTIDNGVFEVLSTNGDTHLGGEDFDHRIMEYFIKLIKKKHQKDISKDNKALGKLRRECERAKRALSSQHQVRVEIESLFDGVDLSEPLTRARFEELNNDLFRKTMGPVKKAMDDAGLQKSQIDEIVLVGGSTRIPKVQQLLKDFFEGKEPNKGVNPDEAVAYGAAVQGGILSGEGGDETKDILLLDVAPLTLGIETVGGVMTKLIPRNTVIPTKKSQVFTTYQDQQTTVSIQVFEGERSLTKDCRLLGKFDLTGVPPAPRGTPQIEVTFEVDANGILNVKAEDKASGKSEKITITNEKGRLSQEEIDRMVKEAEEFAEEDKKVKEKIDARNALETYVYNMKNQVSDKDKLADKLEGDEKEKIEAATKEALEWLDENQNSEKEEYDEKLKEVEAVCNPIITAVYQRSGGAPGAGGESSTEEEDESHDEL

SEQ ID NO: 97290 - DNA, 792 bp, Arabidopsis thaliana
  misc_feature (1)..(792): Ceres Seq. ID no. 12736940
  misc_feature (1)..(792): Ortholog of  Ceres SEQ ID NO 13639117 as cited in SEQ ID NO 56691
atggctttaccttggtgcttaaagactggagttttaacgtctccggccgccggatttaatcatccatcggacagtggcttcgccgttccgacgaagttactgagtattcgaaaaggtgatcgggaaagattgagaatccaagctgttttcagctttcctccaagaaacggtggagccgagaagcggaaacagctcaaacatgaacttgtcgaagccattgagcctcttgaacgtggtgccactgcctcgcctgatgatcagcttctgattgatcagttagcacgtaaggtggaagcagtaaacccaaccaaggagcctctgaagtctgatttgatcaatgggaaatgggagctcatttacacaacatctgctgcgattttgcaagcaaagaaaccaaggttcttaagatcgttaactaactaccaatgtatcaatatggatacactaaaggtgcaaagaatggagacttggcctttctataactcggtaactggagacttgacacccctcaactcgaagacggttgctgtgaaacttcaagtgtttaaaattctcggctttattccggtaaaagcacctgatggtactgcacgcggtgaactagagattacctatgtggacgaggaactacggtcagtagtgaatgatagtttttcatttctctatggaactgacaaccaaaaacatttgaatcttgaaacaatgttcattttttacaggatatcaaggggcaaaggcaacttgttgtttatattgaagatgtttgatcccacttatcgaatccctctctga

SEQ ID NO: 97291 - protein, 263 aa, Arabidopsis thaliana
  peptide (1)..(263): Ceres Seq. ID no. 12736941
MALPWCLKTGVLTSPAAGFNHPSDSGFAVPTKLLSIRKGDRERLRIQAVFSFPPRNGGAEKRKQLKHELVEAIEPLERGATASPDDQLLIDQLARKVEAVNPTKEPLKSDLINGKWELIYTTSAAILQAKKPRFLRSLTNYQCINMDTLKVQRMETWPFYNSVTGDLTPLNSKTVAVKLQVFKILGFIPVKAPDGTARGELEITYVDEELRSVVNDSFSFLYGTDNQKHLNLETMFIFYRISRGKGNLLFILKMFDPTYRIPL

SEQ ID NO: 97292 - DNA, 654 bp, Arabidopsis thaliana
  misc_feature (1)..(654): Ceres Seq. ID no. 12736942
  misc_feature (1)..(654): Ortholog of  Ceres SEQ ID NO 13639117 as cited in SEQ ID NO 56691
atgaagtcagacagcggcttcgccgttccgacaaagttacagagtactcgaaaaggtgatcgagagagattgagagtccaagctattttcagtttccctcctgcgtttctgacaagaaacggtcgagctgagaaacagaaacagctcaaacaagaacttcttgaagccattgagcctcttgaacgtggtgctacggcctcgcctgatgaccagcttcggattgatcagttagcgcgtaaagtggaagcagttaatcccaccaaggagcctttgaagtctgatttggtcaatggaaaatgggagctcatttatacaacctctgcttcgattttgcaggcaaagaaaccaaggttcttaagatcaataaccaactaccaatctatcaatgtggatacacttaaggtgcaaaacatggagacttggcctttctataactcggtaactggagacataaaacccctcaattcgaagaaggttgctgtgaaactccaagtgtttaaaattctcggatttattcctataaaagcacctgatagcgcccgcggtgaacttgagattacctatgtggacgaggaactacggttatcaagaggtgacaaagggaacttgtttatattgaagatgtttgatcccacttatcgaatccctctttga

SEQ ID NO: 97293 - protein, 217 aa, Arabidopsis thaliana; identical to SEQ ID NO: 44517
  peptide (1)..(217): Ceres Seq. ID no. 12736943

SEQ ID NO: 97294 - DNA, 1656 bp, Arabidopsis thaliana
  misc_feature (1)..(1656): Ceres Seq. ID no. 12736948
  misc_feature (1)..(1656): Ortholog of  Ceres SEQ ID NO 14303500 as cited in SEQ ID NO 54123
  misc_feature (1)..(1656): Ortholog of  Ceres SEQ ID NO 14303141 as cited in SEQ ID NO 65752
atggaaaaattcttcttcatctctgtctttcttcttccctacgtcatcaccactttcgctttccctccctccaccgactcacgctggatcgtcgacgacggcaacaaagggcggcgcgtgaaactcacgtgcgtcaactggccgtcgcatctcgaaaccgcggtggctgaagggcttagcaagcagccgttggatgcgatcgcagagaagatagtctcaatgggtttcaattgcgttagattgacttggcctctctacttagccaccgatgaatctttctctgcttttatgacagtgagacaatcactccgcaagtttcgtctctttgaagctgtttctggttttcaaactcacaatccaacgattcttgatcttcctctaatcaaagctttccaggaagtagtgtattgtcttgaaaagcatagagtaatggttatcttagacaatcacataagccaacctggttggtgttgtagtgacaatgatggaaacgggtttttcggcgataaacatttaaaccctcaagtttggatcaaagggttaaaaaaaatggcatcaatgtttgctaatgtttcatcaaatgtggttggtatgagtttaaggaatgagcttagaggccctaaacagaacattaaagattggtacaagtatatgagagaaggcgctgaagcggtccactcagtgaatccgaatgttcttgttattgtctcgggtttaaattacgctactgacttatcgtttctccgagagagaccctttgaagttagcttcaggaggaaagtggtgtttgagatacattggtatggattttggaatacttgggaaggagataacttgaacaagatttgcgggaaagaaaccgagaagatgatgaaaatgtcggggtttttgctcgagaaagggataccgttgtttgtgagcgagtttgggattgatcaaagaggaaacaatgcaaacgacaataagtttctaagttgttttatggctttagcagctgatcgtgatctagattggtcactatggactcttgcaggaagctattatataagagagaaaagtattggatcagatgaatcttatggagttttggattttaattggtctagcataaggaactcaaccattttgcagatgatatctgcaattcagactccttttatagggctaatggaaactcaaccaaagaaaataatgttccatccttcaactggactttgcattgtaagaaaatcattgtttcaactaaagcttggttcttgcaatagatcagaaagctggagactttcttctcatcgagttttatcactagcagaagaacaaatcctctgtttaaaagcttatgagaaaggaaagtctgttaagctacgtctgtttttctctgaatcttactgttcgaaatggaaacttttttctgactcgaagatgcaactctcttctataacaaagaatggattctctgtttgtttggatgtggatacggagaataacaacattgtgacgaatagctgcaaatgtttacgaggaaactcgagttgcgatccgagaagccagtggtttaagcttgttactagcacgagaagacggtctagaccaaaaccttttcttcaaattagtctatactccaagacatttcttcagaaatctttatcagtttaa

SEQ ID NO: 97295 - protein, 551 aa, Arabidopsis thaliana
  peptide (1)..(551): Ceres Seq. ID no. 12736949
MEKFFFISVFLLPYVITTFAFPPSTDSRWIVDDGNKGRRVKLTCVNWPSHLETAVAEGLSKQPLDAIAEKIVSMGFNCVRLTWPLYLATDESFSAFMTVRQSLRKFRLFEAVSGFQTHNPTILDLPLIKAFQEVVYCLEKHRVMVILDNHISQPGWCCSDNDGNGFFGDKHLNPQVWIKGLKKMASMFANVSSNVVGMSLRNELRGPKQNIKDWYKYMREGAEAVHSVNPNVLVIVSGLNYATDLSFLRERPFEVSFRRKVVFEIHWYGFWNTWEGDNLNKICGKETEKMMKMSGFLLEKGIPLFVSEFGIDQRGNNANDNKFLSCFMALAADRDLDWSLWTLAGSYYIREKSIGSDESYGVLDFNWSSIRNSTILQMISAIQTPFIGLMETQPKKIMFHPSTGLCIVRKSLFQLKLGSCNRSESWRLSSHRVLSLAEEQILCLKAYEKGKSVKLRLFFSESYCSKWKLFSDSKMQLSSITKNGFSVCLDVDTENNNIVTNSCKCLRGNSSCDPRSQWFKLVTSTRRRSRPKPFLQISLYSKTFLQKSLSV

SEQ ID NO: 97296 - protein, 478 aa, Arabidopsis thaliana
  peptide (1)..(478): Ceres Seq. ID no. 12736950
MGFNCVRLTWPLYLATDESFSAFMTVRQSLRKFRLFEAVSGFQTHNPTILDLPLIKAFQEVVYCLEKHRVMVILDNHISQPGWCCSDNDGNGFFGDKHLNPQVWIKGLKKMASMFANVSSNVVGMSLRNELRGPKQNIKDWYKYMREGAEAVHSVNPNVLVIVSGLNYATDLSFLRERPFEVSFRRKVVFEIHWYGFWNTWEGDNLNKICGKETEKMMKMSGFLLEKGIPLFVSEFGIDQRGNNANDNKFLSCFMALAADRDLDWSLWTLAGSYYIREKSIGSDESYGVLDFNWSSIRNSTILQMISAIQTPFIGLMETQPKKIMFHPSTGLCIVRKSLFQLKLGSCNRSESWRLSSHRVLSLAEEQILCLKAYEKGKSVKLRLFFSESYCSKWKLFSDSKMQLSSITKNGFSVCLDVDTENNNIVTNSCKCLRGNSSCDPRSQWFKLVTSTRRRSRPKPFLQISLYSKTFLQKSLSV

SEQ ID NO: 97297 - protein, 455 aa, Arabidopsis thaliana
  peptide (1)..(455): Ceres Seq. ID no. 12736951
MTVRQSLRKFRLFEAVSGFQTHNPTILDLPLIKAFQEVVYCLEKHRVMVILDNHISQPGWCCSDNDGNGFFGDKHLNPQVWIKGLKKMASMFANVSSNVVGMSLRNELRGPKQNIKDWYKYMREGAEAVHSVNPNVLVIVSGLNYATDLSFLRERPFEVSFRRKVVFEIHWYGFWNTWEGDNLNKICGKETEKMMKMSGFLLEKGIPLFVSEFGIDQRGNNANDNKFLSCFMALAADRDLDWSLWTLAGSYYIREKSIGSDESYGVLDFNWSSIRNSTILQMISAIQTPFIGLMETQPKKIMFHPSTGLCIVRKSLFQLKLGSCNRSESWRLSSHRVLSLAEEQILCLKAYEKGKSVKLRLFFSESYCSKWKLFSDSKMQLSSITKNGFSVCLDVDTENNNIVTNSCKCLRGNSSCDPRSQWFKLVTSTRRRSRPKPFLQISLYSKTFLQKSLSV

SEQ ID NO: 97298 - DNA, 1527 bp, Arabidopsis thaliana
  misc_feature (1)..(1527): Ceres Seq. ID no. 12736952
  misc_feature (1)..(1527): Ortholog of  Ceres SEQ ID NO 14303500 as cited in SEQ ID NO 54123
  misc_feature (1)..(1527): Ortholog of  Ceres SEQ ID NO 14303141 as cited in SEQ ID NO 65752
atggcatatcctctctctacaaactctcgttggatcatcgacgaaaaagggcaaagagtgaagctggcgtgtgtgaattggccatcacatttgcagcctgtggtggcggaagggctgagcaagcagagtgtagatgacttggccaagaagataatggcaatgggtttcaactgtgttaggtttacttggccacttgatctagctacaaatgagacgttggctaataatgttactgtgagacaatcttttcaaagtcttggtcttaatgatgacatttctggtttcgaaacaaagaacccatccatgattgatcttcccctcattgaagcttacaagaaggtggtagctaagttgggaaacaataatgtgatggtgatattagacaaccacgtgaccaagccagggtggtgttgtggctacaacgacggcaacggtttctttggtgacactttctttgaccctactacgtggatcgccggtctgaccaagatagccatgactttcaaaggtgccactaatgtcgttggcatgagcctcagaaacgaacttagaggaccaaaacaaaacgtcgatgattggttcaagtacatgcaacaaggggccgaagcagttcacgaagcaaaccctaatgtacttgtaatcctttctggcctcagctacgacaccgacctctcatttgtccgatcacgacacgtaaacctaactttcactagaaaactcgtgtttgagctccatcggtactctttcaccaacacaaacacatggagttccaaaaaccctaacgaggcatgcggtgagattctgaaaagcatcgagaacgggggcggtttcaatctccgtgacttcccggtgtttcttagcgagtttggaatcgacttgagaggcaaaaatgttaacgataatcgctacattggatgtatattaggttgggccgcggaaaatgacgtagattggtcgatttggactcttcaaggaagttactatctcagagaaggtgtggtcggaatgagtgagttttacggtatcttggattcggattgggttcgtgttcgaagccaaagtttcttgcaaagattgtctctgattctatccccgcttcaaggaccaggctctcaatccaaagtctacaatcttgttttccacccgttaaccggactttgcatgctacaaagtatcttagatccaaccaaggtcactctcggtctatgtaatgaatctcaaccatggagctacactcctcagaacaccctgacactcaaagacaagtccctatgcttagagagcaccgggccgaatgcgccggttaagctcagtgaaacgagttgctcgagccctaatttgtcagaatgggagaccatctcagcctctaatatgctcttagctgctaaatcaaccaataactcactttgccttgacgtggatgaaacaaataacctcatggctagtaactgcaagtgtgtgaagggcgaagacagctcgtgtgatccgataagccagtggttcaagattgttaaagttagtaaataa

SEQ ID NO: 97299 - protein, 508 aa, Arabidopsis thaliana
  peptide (1)..(508): Ceres Seq. ID no. 12736953
MAYPLSTNSRWIIDEKGQRVKLACVNWPSHLQPVVAEGLSKQSVDDLAKKIMAMGFNCVRFTWPLDLATNETLANNVTVRQSFQSLGLNDDISGFETKNPSMIDLPLIEAYKKVVAKLGNNNVMVILDNHVTKPGWCCGYNDGNGFFGDTFFDPTTWIAGLTKIAMTFKGATNVVGMSLRNELRGPKQNVDDWFKYMQQGAEAVHEANPNVLVILSGLSYDTDLSFVRSRHVNLTFTRKLVFELHRYSFTNTNTWSSKNPNEACGEILKSIENGGGFNLRDFPVFLSEFGIDLRGKNVNDNRYIGCILGWAAENDVDWSIWTLQGSYYLREGVVGMSEFYGILDSDWVRVRSQSFLQRLSLILSPLQGPGSQSKVYNLVFHPLTGLCMLQSILDPTKVTLGLCNESQPWSYTPQNTLTLKDKSLCLESTGPNAPVKLSETSCSSPNLSEWETISASNMLLAAKSTNNSLCLDVDETNNLMASNCKCVKGEDSSCDPISQWFKIVKVSK

SEQ ID NO: 97300 - protein, 457 aa, Arabidopsis thaliana
  peptide (1)..(457): Ceres Seq. ID no. 12736954
MAMGFNCVRFTWPLDLATNETLANNVTVRQSFQSLGLNDDISGFETKNPSMIDLPLIEAYKKVVAKLGNNNVMVILDNHVTKPGWCCGYNDGNGFFGDTFFDPTTWIAGLTKIAMTFKGATNVVGMSLRNELRGPKQNVDDWFKYMQQGAEAVHEANPNVLVILSGLSYDTDLSFVRSRHVNLTFTRKLVFELHRYSFTNTNTWSSKNPNEACGEILKSIENGGGFNLRDFPVFLSEFGIDLRGKNVNDNRYIGCILGWAAENDVDWSIWTLQGSYYLREGVVGMSEFYGILDSDWVRVRSQSFLQRLSLILSPLQGPGSQSKVYNLVFHPLTGLCMLQSILDPTKVTLGLCNESQPWSYTPQNTLTLKDKSLCLESTGPNAPVKLSETSCSSPNLSEWETISASNMLLAAKSTNNSLCLDVDETNNLMASNCKCVKGEDSSCDPISQWFKIVKVSK

SEQ ID NO: 97301 - protein, 455 aa, Arabidopsis thaliana
  peptide (1)..(455): Ceres Seq. ID no. 12736955
MGFNCVRFTWPLDLATNETLANNVTVRQSFQSLGLNDDISGFETKNPSMIDLPLIEAYKKVVAKLGNNNVMVILDNHVTKPGWCCGYNDGNGFFGDTFFDPTTWIAGLTKIAMTFKGATNVVGMSLRNELRGPKQNVDDWFKYMQQGAEAVHEANPNVLVILSGLSYDTDLSFVRSRHVNLTFTRKLVFELHRYSFTNTNTWSSKNPNEACGEILKSIENGGGFNLRDFPVFLSEFGIDLRGKNVNDNRYIGCILGWAAENDVDWSIWTLQGSYYLREGVVGMSEFYGILDSDWVRVRSQSFLQRLSLILSPLQGPGSQSKVYNLVFHPLTGLCMLQSILDPTKVTLGLCNESQPWSYTPQNTLTLKDKSLCLESTGPNAPVKLSETSCSSPNLSEWETISASNMLLAAKSTNNSLCLDVDETNNLMASNCKCVKGEDSSCDPISQWFKIVKVSK

SEQ ID NO: 97302 - DNA, 1509 bp, Arabidopsis thaliana
  misc_feature (1)..(1509): Ceres Seq. ID no. 12736956
  misc_feature (1)..(1509): Ortholog of  Ceres SEQ ID NO 13594209 as cited in SEQ ID NO 59089
  misc_feature (1)..(1509): Ortholog of  Ceres SEQ ID NO 13502874 as cited in SEQ ID NO 66298
  misc_feature (1)..(1509): Ortholog of  Ceres SEQ ID NO 12614124 as cited in SEQ ID NO 68392
atggcaatctctttactctgtctttttctcatcaccttagtttcgttaatctttgtcgtcaagaagatcaaacactctaaatgggatcttcctccaagccctcctacgtttccggttatcggaaacttacaccaagttggagaattgcctcacaggtcatttcaacgtctagccgaaagaaccgggcatgttatgcttcttcactttgggtttgtccctgtaactgtaatctcatcgagggaagcagctgaagaagttcttagaactcatgacctaaagtgttgcaccaggcctaaacttgtcgggtcgaggctaatctctcggggttttaaagatatcagttttactccatacggtgaagagtggagagagcggcgtaagttcttggtgcgcgagcttttctgtttcaaaaaggttcagtattttgggtatatcgtagaagaagaatgtaacttgctggtcaagaaactgacggaatcagccgtaggtcggcctccggttgatttgagtaaatcccttttctggctagctgcgagtatcctgtttagaattgcttttggacagagtttccacgacaacaagtttatcgatgaagacaagatcgatgaacttatatttgaaaccgagacagctcaggctagtttcacttgctctgatttcttccctatcgccggccttggatggctcgctgactggatttccgggaaacacaggtggctcaacaatgtcttcttcaagctcgatgctctgtttcaacgtgtgattgatgatcattcagatcctggaagatggaaagatcacaaagatatcgtcgatgtaatgttggatgtgatgcataaacaaggcaaagatgattctttgaggctcacaatagatcatattaaggggtttctcacgaatataataatcgcagggatagacacaggagctcttaccatgatatgggcaatgacagagctcgcaagaaaccccgaactaatgaagaacgttcaaggcgagattagagacagctttggcaacaataaggagagaatcaccaaagaagatctaaataaagttcctttcttaaacatggtgatcaaggaaacattcagattacacccagtagctcctcttctgctcccaagggaaacaatgactcacatcaaggttcaaggctatgatattcctccaaagagacggatcttagtcaacacttgggcgataggaagagatcctacactctggataaatccggaagagtttaaccccgagaggtttatcaacaaccctgtagattatagaggacaacatttcgagctcttaccgttcgggtctggtcgaaggatatgtcccgggatggggttggggatcactatagtggaattgggactcttgaacttactatacttcttcgattggagagcacctgatgggatgacacataaagacatcgatacagaagaagctggtatacttacagtagtcaagaaagtacctctcaaacttgtcccagttcgagttcagtga

SEQ ID NO: 97303 - protein, 502 aa, Arabidopsis thaliana
  peptide (1)..(502): Ceres Seq. ID no. 12736957
MAISLLCLFLITLVSLIFVVKKIKHSKWDLPPSPPTFPVIGNLHQVGELPHRSFQRLAERTGHVMLLHFGFVPVTVISSREAAEEVLRTHDLKCCTRPKLVGSRLISRGFKDISFTPYGEEWRERRKFLVRELFCFKKVQYFGYIVEEECNLLVKKLTESAVGRPPVDLSKSLFWLAASILFRIAFGQSFHDNKFIDEDKIDELIFETETAQASFTCSDFFPIAGLGWLADWISGKHRWLNNVFFKLDALFQRVIDDHSDPGRWKDHKDIVDVMLDVMHKQGKDDSLRLTIDHIKGFLTNIIIAGIDTGALTMIWAMTELARNPELMKNVQGEIRDSFGNNKERITKEDLNKVPFLNMVIKETFRLHPVAPLLLPRETMTHIKVQGYDIPPKRRILVNTWAIGRDPTLWINPEEFNPERFINNPVDYRGQHFELLPFGSGRRICPGMGLGITIVELGLLNLLYFFDWRAPDGMTHKDIDTEEAGILTVVKKVPLKLVPVRVQ

SEQ ID NO: 97304 - protein, 438 aa, Arabidopsis thaliana
  peptide (1)..(438): Ceres Seq. ID no. 12736958
MLLHFGFVPVTVISSREAAEEVLRTHDLKCCTRPKLVGSRLISRGFKDISFTPYGEEWRERRKFLVRELFCFKKVQYFGYIVEEECNLLVKKLTESAVGRPPVDLSKSLFWLAASILFRIAFGQSFHDNKFIDEDKIDELIFETETAQASFTCSDFFPIAGLGWLADWISGKHRWLNNVFFKLDALFQRVIDDHSDPGRWKDHKDIVDVMLDVMHKQGKDDSLRLTIDHIKGFLTNIIIAGIDTGALTMIWAMTELARNPELMKNVQGEIRDSFGNNKERITKEDLNKVPFLNMVIKETFRLHPVAPLLLPRETMTHIKVQGYDIPPKRRILVNTWAIGRDPTLWINPEEFNPERFINNPVDYRGQHFELLPFGSGRRICPGMGLGITIVELGLLNLLYFFDWRAPDGMTHKDIDTEEAGILTVVKKVPLKLVPVRVQ

SEQ ID NO: 97305 - DNA, 1500 bp, Arabidopsis thaliana
  misc_feature (1)..(1500): Ceres Seq. ID no. 12736963
  misc_feature (1)..(1500): Ortholog of  Ceres SEQ ID NO 13594209 as cited in SEQ ID NO 59089
  misc_feature (1)..(1500): Ortholog of  Ceres SEQ ID NO 13502874 as cited in SEQ ID NO 66298
  misc_feature (1)..(1500): Ortholog of  Ceres SEQ ID NO 12614124 as cited in SEQ ID NO 68392
atgtcgatctttctctgtttcctcttgctcttacctctctttcttgttttttacaaaaggcttttaccgtcgaaagggaagcttcctccgggacctataagtcttccgatcatcggaaacttgcaccaacttggaaaatctcttcatagatctttttataaactctcccaagagtatggacccgtgatgtttcttcgtttcggtgtagtccctgtggtagtgttctccacaaaagaagcagccgaagaagttttaaagactcacgatctcgagacttgcacccgaccaaagctatctgccaccgggttatttacatataacttcaaagacattggctttgcacaatacggggaagactggagagagatgagaaagcttgcgatgctcgagctctttagctcaaaaaagttaaaggctttccggtatattagagaagaagagagtgaattgctcgtcaagaaagtcacagaatctgctcaaacacaaactttggtggatttgagaaaggctcttttctcttataccgctagtatcgtatgtagactcgctttcggacagaacttccatgagtgcgattttgtcgatatggataaagttgaagagcttgtgcttgagtctgagaccaatcttggctcattcgcattcattgacttcttccctgccggtcttgggtgggctattgatcggatctccggtcaacattcgaggttgcacaaagcctttgctagactaagtaatttctttcaacatgtgatcgatgatcatttgaagccctggcaatcggaagatcattcagacattgttggtgtcatgttggatatgatcaataaagagagcaaagtcggctcttttaaagtcacttatgatcatctcaaaggagtcatgtcggatgtgtttttggcgggagtgaacgcaggagcgatcacaatgatatgggcattgacagagttaactagacatcctagagtgatgaagaaacttcaacaagagattcgagaattactcggagacaacaaagaaaaaatcacggagcaggatctcgaaaaagttcactacctgaagcttgtgatccaagaaacattccgactacacccacccgctcctctcttgctcccaagagagacaatgtctgatgtgaagattcaaggctacaacattcccaaaaacacaatgatcgagatcaacacttacgcaataggacgtgatcccaactgctggacaaatcctaacgagtttatccctgagaggtttgttgatagccctatcgactacaagggtcagcattttgaattgttgccattcggtggaggccgtaggatctgtcccgggatggccacgggaatgaccatcgttgagctcggcctccttaacgttctttacttcttcgattggagtttaccctatggaatggccattgcagacattaacatggaagaagctggagctttcgtcattgccaagaaagtcccacttgagctcgtgccagttcttcattactga

SEQ ID NO: 97306 - protein, 499 aa, Arabidopsis thaliana
  peptide (1)..(499): Ceres Seq. ID no. 12736964
MSIFLCFLLLLPLFLVFYKRLLPSKGKLPPGPISLPIIGNLHQLGKSLHRSFYKLSQEYGPVMFLRFGVVPVVVFSTKEAAEEVLKTHDLETCTRPKLSATGLFTYNFKDIGFAQYGEDWREMRKLAMLELFSSKKLKAFRYIREEESELLVKKVTESAQTQTLVDLRKALFSYTASIVCRLAFGQNFHECDFVDMDKVEELVLESETNLGSFAFIDFFPAGLGWAIDRISGQHSRLHKAFARLSNFFQHVIDDHLKPWQSEDHSDIVGVMLDMINKESKVGSFKVTYDHLKGVMSDVFLAGVNAGAITMIWALTELTRHPRVMKKLQQEIRELLGDNKEKITEQDLEKVHYLKLVIQETFRLHPPAPLLLPRETMSDVKIQGYNIPKNTMIEINTYAIGRDPNCWTNPNEFIPERFVDSPIDYKGQHFELLPFGGGRRICPGMATGMTIVELGLLNVLYFFDWSLPYGMAIADINMEEAGAFVIAKKVPLELVPVLHY

SEQ ID NO: 97307 - protein, 437 aa, Arabidopsis thaliana
  peptide (1)..(437): Ceres Seq. ID no. 12736965
MFLRFGVVPVVVFSTKEAAEEVLKTHDLETCTRPKLSATGLFTYNFKDIGFAQYGEDWREMRKLAMLELFSSKKLKAFRYIREEESELLVKKVTESAQTQTLVDLRKALFSYTASIVCRLAFGQNFHECDFVDMDKVEELVLESETNLGSFAFIDFFPAGLGWAIDRISGQHSRLHKAFARLSNFFQHVIDDHLKPWQSEDHSDIVGVMLDMINKESKVGSFKVTYDHLKGVMSDVFLAGVNAGAITMIWALTELTRHPRVMKKLQQEIRELLGDNKEKITEQDLEKVHYLKLVIQETFRLHPPAPLLLPRETMSDVKIQGYNIPKNTMIEINTYAIGRDPNCWTNPNEFIPERFVDSPIDYKGQHFELLPFGGGRRICPGMATGMTIVELGLLNVLYFFDWSLPYGMAIADINMEEAGAFVIAKKVPLELVPVLHY

SEQ ID NO: 97308 - protein, 377 aa, Arabidopsis thaliana
  peptide (1)..(377): Ceres Seq. ID no. 12736966
MRKLAMLELFSSKKLKAFRYIREEESELLVKKVTESAQTQTLVDLRKALFSYTASIVCRLAFGQNFHECDFVDMDKVEELVLESETNLGSFAFIDFFPAGLGWAIDRISGQHSRLHKAFARLSNFFQHVIDDHLKPWQSEDHSDIVGVMLDMINKESKVGSFKVTYDHLKGVMSDVFLAGVNAGAITMIWALTELTRHPRVMKKLQQEIRELLGDNKEKITEQDLEKVHYLKLVIQETFRLHPPAPLLLPRETMSDVKIQGYNIPKNTMIEINTYAIGRDPNCWTNPNEFIPERFVDSPIDYKGQHFELLPFGGGRRICPGMATGMTIVELGLLNVLYFFDWSLPYGMAIADINMEEAGAFVIAKKVPLELVPVLHY

SEQ ID NO: 97309 - DNA, 1506 bp, Arabidopsis thaliana
  misc_feature (1)..(1506): Ceres Seq. ID no. 12736967
  misc_feature (1)..(1506): Ortholog of  Ceres SEQ ID NO 13594209 as cited in SEQ ID NO 59089
  misc_feature (1)..(1506): Ortholog of  Ceres SEQ ID NO 14313084 as cited in SEQ ID NO 59183
  misc_feature (1)..(1506): Ortholog of  Ceres SEQ ID NO 14308041 as cited in SEQ ID NO 62601
  misc_feature (1)..(1506): Ortholog of  Ceres SEQ ID NO 14308007 as cited in SEQ ID NO 65760
  misc_feature (1)..(1506): Ortholog of  Ceres SEQ ID NO 14308027 as cited in SEQ ID NO 65826
  misc_feature (1)..(1506): Ortholog of  Ceres SEQ ID NO 15170163 as cited in SEQ ID NO 66262
  misc_feature (1)..(1506): Ortholog of  Ceres SEQ ID NO 13502874 as cited in SEQ ID NO 66298
  misc_feature (1)..(1506): Ortholog of  Ceres SEQ ID NO 15169631 as cited in SEQ ID NO 67173
  misc_feature (1)..(1506): Ortholog of  Ceres SEQ ID NO 12614124 as cited in SEQ ID NO 68392
atgtcaattttcctctgtttcctcttgcttttgctacttcttttagtaacaataatcttcacaagaaaatctcaatcctcaaaactgaaacttcctccgggtccaccaaaacttccgattatcggaaacttacactaccttaacggattacctcacaaatgtctcctaaacctctggaaaatccacggaccagtgatgcagctccagttaggatacgtccctctagtcgtaatctcctcaaaccaagcagcagaagaagttctcaaaactcatgacctagattgttgcagccgaccagaaaccatagcgtcaaaaacaatatcttacaacttcaaagacataggattcgctccttacggcgaagaatggagagcgttgaggaagctcgctgtgatcgagctattcagcttgaaaaaattcaactcttttaggtatataagagaagaagagaatgacttgttggtcaagaaactctctgaagcttcagagaaacaatctcccgtgaatttgaagaaagcccttttcactctaagcgctagtatcgtgtgtagactcgctttcggtcaaaatcttcacgaatccgagtttatagatgaagatagcatggaggatttagcttctaggtcggagaagattcaggcgaaattcgctttctctaacttcttccccggaggttggattcttgataaaatcaccggtcaaagcaagagccttaacgaaatttttgctgatctcgacggattctttaaccaagtgctcgatgatcatctaaagccaggaagaaaagtattagagactccagatgttgtggatgtgatgattgatatgatgaataaacaaagccaagatggttcttttaagctcactactgatcatatcaaaggaatcatctctgatatatttctagccggagtaaacacaagtgcaacgaccattctttgggcaatgacagagttaataagaaacccaagagtgatgaagaaagtgcaagatgaggttaggacagtacttggtgaaaaaagagacagaatcacagaacaagatcttaaccaacttaactacttcaagctagtgatcaaagagacatttagattacacccagcagctccacttttattaccaagagaggcaatggctaaaatcaagatccaaggctatgacattccagagaaaactcagatcatggtcaatgtttacgcgataggacgtgatcctgacctctgggagaatccagaagagtttaaaccggaaagattcgttgatagttctgttgattatagaggacttaacttcgagcttctaccgtttggttctggtagaaggatttgtcccggtatgacgatggggatcgcgacagtcgaattaggattgttgaatttactttacttctttgattggggattgcctgaaggaaggacagtgaaagatatcgatttggaagaagaaggtgcgattattattggcaagaaagtttcgcttgaacttgtgcctactcgtcgtcaatga

SEQ ID NO: 97310 - protein, 501 aa, Arabidopsis thaliana
  peptide (1)..(501): Ceres Seq. ID no. 12736968
MSIFLCFLLLLLLLLVTIIFTRKSQSSKLKLPPGPPKLPIIGNLHYLNGLPHKCLLNLWKIHGPVMQLQLGYVPLVVISSNQAAEEVLKTHDLDCCSRPETIASKTISYNFKDIGFAPYGEEWRALRKLAVIELFSLKKFNSFRYIREEENDLLVKKLSEASEKQSPVNLKKALFTLSASIVCRLAFGQNLHESEFIDEDSMEDLASRSEKIQAKFAFSNFFPGGWILDKITGQSKSLNEIFADLDGFFNQVLDDHLKPGRKVLETPDVVDVMIDMMNKQSQDGSFKLTTDHIKGIISDIFLAGVNTSATTILWAMTELIRNPRVMKKVQDEVRTVLGEKRDRITEQDLNQLNYFKLVIKETFRLHPAAPLLLPREAMAKIKIQGYDIPEKTQIMVNVYAIGRDPDLWENPEEFKPERFVDSSVDYRGLNFELLPFGSGRRICPGMTMGIATVELGLLNLLYFFDWGLPEGRTVKDIDLEEEGAIIIGKKVSLELVPTRRQ

SEQ ID NO: 97311 - protein, 436 aa, Arabidopsis thaliana
  peptide (1)..(436): Ceres Seq. ID no. 12736969
MQLQLGYVPLVVISSNQAAEEVLKTHDLDCCSRPETIASKTISYNFKDIGFAPYGEEWRALRKLAVIELFSLKKFNSFRYIREEENDLLVKKLSEASEKQSPVNLKKALFTLSASIVCRLAFGQNLHESEFIDEDSMEDLASRSEKIQAKFAFSNFFPGGWILDKITGQSKSLNEIFADLDGFFNQVLDDHLKPGRKVLETPDVVDVMIDMMNKQSQDGSFKLTTDHIKGIISDIFLAGVNTSATTILWAMTELIRNPRVMKKVQDEVRTVLGEKRDRITEQDLNQLNYFKLVIKETFRLHPAAPLLLPREAMAKIKIQGYDIPEKTQIMVNVYAIGRDPDLWENPEEFKPERFVDSSVDYRGLNFELLPFGSGRRICPGMTMGIATVELGLLNLLYFFDWGLPEGRTVKDIDLEEEGAIIIGKKVSLELVPTRRQ

SEQ ID NO: 97312 - protein, 300 aa, Arabidopsis thaliana
  peptide (1)..(300): Ceres Seq. ID no. 12736970
MEDLASRSEKIQAKFAFSNFFPGGWILDKITGQSKSLNEIFADLDGFFNQVLDDHLKPGRKVLETPDVVDVMIDMMNKQSQDGSFKLTTDHIKGIISDIFLAGVNTSATTILWAMTELIRNPRVMKKVQDEVRTVLGEKRDRITEQDLNQLNYFKLVIKETFRLHPAAPLLLPREAMAKIKIQGYDIPEKTQIMVNVYAIGRDPDLWENPEEFKPERFVDSSVDYRGLNFELLPFGSGRRICPGMTMGIATVELGLLNLLYFFDWGLPEGRTVKDIDLEEEGAIIIGKKVSLELVPTRRQ

SEQ ID NO: 97313 - DNA, 1497 bp, Arabidopsis thaliana
  misc_feature (1)..(1497): Ceres Seq. ID no. 12736971
  misc_feature (1)..(1497): Ortholog of  Ceres SEQ ID NO 13594209 as cited in SEQ ID NO 59089
  misc_feature (1)..(1497): Ortholog of  Ceres SEQ ID NO 14308041 as cited in SEQ ID NO 62601
  misc_feature (1)..(1497): Ortholog of  Ceres SEQ ID NO 13502874 as cited in SEQ ID NO 66298
  misc_feature (1)..(1497): Ortholog of  Ceres SEQ ID NO 12614124 as cited in SEQ ID NO 68392
atgtcgattcttctgtacttcatcgctcttttatcgttaataatcataaagaaaatcaaagactcgaaccgaaatcttcctccgagcccactgaagctaccggttatcggaaacctataccagcttcgaggattgtttcacaaatgtcttcacgatctctccaagaaacacggacccgtgttgcttctccgtctaggttttctcgatatggttgtgatctcatcgaccgaagcagctgaagaagctcttaaagtacatgaccttgagtgttgtaccagacctataactaacgtcacatcaaaactctggcgtgacggtcaagatatcggcttagccccatatggtgagtctttgagagagttgcggaagctttcctttctcaagtttttcagcacgacaaaggttcgatcttttaggtacatcagagaggaagagaatgatttgatggtcaagaaactgaaggaagcggctctgaagaaatcttccgtagatttgagccaaacacttttcggtctagttgggagtatcatattcagatccgcctttggacagcgtttcgacgagggcaatcatgtgaatgctgaaaagatcgaagacctcatgtttgaggtccagaaactcggagcactcagtaattctgatcttttccctggtggtttgggatggtttgttgactttgtgtcgggacataataagaaacttcacaaagtcttcgtcgaggttgatactctgctgaatcatattattgatgatcacttgaaaaactctatagaagaaataactcatgatcgtcctgatatcatcgactcgctcctagatatgatacgaaaacaagaacaaggggattctttcaagctcaccattgataatctcaaaggaattatccaagatatatatcttgctggagtagatacaagtgccatcaccatgatttgggcaatggcagagcttgttaaaaacccgcgggtgatgaagaaagttcaagatgagatccgaacatgcattggaatcaaacaaaatgaaaaaatcgaggaagatgatgtcgataagcttcagtacttgaagcttgtggtgaaagaaaccttaagactacatccagcagctcctcttttacttccaagagaaacaatgtctcaaatcaagattcaaggctacaacattccctcaaaaaccattcttttggttaacgtgtggtcaataggacgagatcctaaacactggaaaaaccctgaggagtttaacccggagaggtttattgactgtcctattgactacaaaggaaatagctttgagatgttaccatttggttctggtcggaggatatgtccagggatagcttttgcgattgctaccgttgaattgggactattgaacttgctttaccactttgattggagattacctgaggaggataaagatcttgacatggaagaggctggtgatgtcactattattaagaaagttcctcttaaacttgtcccagttcttcatcactaa

SEQ ID NO: 97314 - protein, 498 aa, Arabidopsis thaliana
  peptide (1)..(498): Ceres Seq. ID no. 12736972
MSILLYFIALLSLIIIKKIKDSNRNLPPSPLKLPVIGNLYQLRGLFHKCLHDLSKKHGPVLLLRLGFLDMVVISSTEAAEEALKVHDLECCTRPITNVTSKLWRDGQDIGLAPYGESLRELRKLSFLKFFSTTKVRSFRYIREEENDLMVKKLKEAALKKSSVDLSQTLFGLVGSIIFRSAFGQRFDEGNHVNAEKIEDLMFEVQKLGALSNSDLFPGGLGWFVDFVSGHNKKLHKVFVEVDTLLNHIIDDHLKNSIEEITHDRPDIIDSLLDMIRKQEQGDSFKLTIDNLKGIIQDIYLAGVDTSAITMIWAMAELVKNPRVMKKVQDEIRTCIGIKQNEKIEEDDVDKLQYLKLVVKETLRLHPAAPLLLPRETMSQIKIQGYNIPSKTILLVNVWSIGRDPKHWKNPEEFNPERFIDCPIDYKGNSFEMLPFGSGRRICPGIAFAIATVELGLLNLLYHFDWRLPEEDKDLDMEEAGDVTIIKKVPLKLVPVLHH

SEQ ID NO: 97315 - protein, 429 aa, Arabidopsis thaliana
  peptide (1)..(429): Ceres Seq. ID no. 12736973
MVVISSTEAAEEALKVHDLECCTRPITNVTSKLWRDGQDIGLAPYGESLRELRKLSFLKFFSTTKVRSFRYIREEENDLMVKKLKEAALKKSSVDLSQTLFGLVGSIIFRSAFGQRFDEGNHVNAEKIEDLMFEVQKLGALSNSDLFPGGLGWFVDFVSGHNKKLHKVFVEVDTLLNHIIDDHLKNSIEEITHDRPDIIDSLLDMIRKQEQGDSFKLTIDNLKGIIQDIYLAGVDTSAITMIWAMAELVKNPRVMKKVQDEIRTCIGIKQNEKIEEDDVDKLQYLKLVVKETLRLHPAAPLLLPRETMSQIKIQGYNIPSKTILLVNVWSIGRDPKHWKNPEEFNPERFIDCPIDYKGNSFEMLPFGSGRRICPGIAFAIATVELGLLNLLYHFDWRLPEEDKDLDMEEAGDVTIIKKVPLKLVPVLHH

SEQ ID NO: 97316 - protein, 350 aa, Arabidopsis thaliana
  peptide (1)..(350): Ceres Seq. ID no. 12736974
MVKKLKEAALKKSSVDLSQTLFGLVGSIIFRSAFGQRFDEGNHVNAEKIEDLMFEVQKLGALSNSDLFPGGLGWFVDFVSGHNKKLHKVFVEVDTLLNHIIDDHLKNSIEEITHDRPDIIDSLLDMIRKQEQGDSFKLTIDNLKGIIQDIYLAGVDTSAITMIWAMAELVKNPRVMKKVQDEIRTCIGIKQNEKIEEDDVDKLQYLKLVVKETLRLHPAAPLLLPRETMSQIKIQGYNIPSKTILLVNVWSIGRDPKHWKNPEEFNPERFIDCPIDYKGNSFEMLPFGSGRRICPGIAFAIATVELGLLNLLYHFDWRLPEEDKDLDMEEAGDVTIIKKVPLKLVPVLHH

SEQ ID NO: 97317 - DNA, 1698 bp, Arabidopsis thaliana
  misc_feature (1)..(1698): Ceres Seq. ID no. 12736978
  misc_feature (1)..(1698): Ortholog of  Ceres SEQ ID NO 13594209 as cited in SEQ ID NO 59089
  misc_feature (1)..(1698): Ortholog of  Ceres SEQ ID NO 15170163 as cited in SEQ ID NO 66262
  misc_feature (1)..(1698): Ortholog of  Ceres SEQ ID NO 13502874 as cited in SEQ ID NO 66298
  misc_feature (1)..(1698): Ortholog of  Ceres SEQ ID NO 12614124 as cited in SEQ ID NO 68392
atcaaaaaaagcagagcacaaaccagaggaacgacaataatggtgagtcttctatcttttttcttgcttctactcgtccccattttcttcttgttaatcttcaccaagaagatcaaggagtcaaaacaaaatcttcctcctggcccagcaaagcttccgatcatcggaaacctacaccagctccaagggttgcttcataaatgtcttcacgatctctccaagaaacacggacctgtgatgcatctccgtctagggtttgccccaatggtcgtaatttcatcaagtgaagcagctgaagaagctcttaaaacacatgaccttgagtgttgttcaagacctatcactatggcctcaagggttttttcgcgtaacggtaaagacatcggatttggggtttacggtgatgaatggagagagctgcgtaagctttcggttcgcgaattctttagcgtgaaaaaagttcaatccttcaagtatattagagaggaagagaatgacttgatgatcaagaaactgaaagaattggcttcgaagcaatctccggtggatttgagcaaaatcctctttggtctcactgcgagtatcatattcagaaccgcctttggacaaagtttctttgataacaagcatgtcgatcaggaaagcatcaaagaactgatgtttgaatctctgagcaatatgacttttagattctctgattttttccctactgctggtcttaaatggtttataggctttgtgtcaggccaacataagaggctttacaacgtcttcaacagggttgatactttttttaatcatatagttgatgatcatcactcgaagaaagcaactcaagatcgtcctgatatggtcgacgctatcttagatatgatagataatgaacaacaatatgcatctttcaagctcaccgttgatcatctcaaaggagtcctctcaaatatatatcacgctggaattgacacaagcgccatcaccttgatttgggcgatggcagagctcgttagaaacccgcgggtaatgaagaaagctcaagacgagatccgaacttgcattggaatcaaacaggaaggaagaatcatggaagaagatcttgataagcttcaatacttgaagcttgtggtgaaagaaaccttaagactacacccagcagctcctcttttacttcctcgagaaacaatggctgatatcaagattcaaggctacgacattcctcagaaaagagctcttcttgttaatgcatggtctataggacgagatccggaatcctggaaaaatcctgaagagtttaacccggagaggtttattgattgtcctgtggattacaagggacatagctttgagttgttaccatttggttctggtcggagaatttgtccaggaatagctatggcgatcgcaaccattgaattggggctcttgaatttgctctacttctttgattggaatatgcctgagaagaagaaagatatggacatggaagaagctggtgatctcactgttgataagaaagttcctcttgagcttctgccagttattcgcatcagtttgtagatgagcttggagaaaaacatatggtatgcttattgtataaaccagaacgctttttctgtttattttgtttttttgaatctaatgttaaattatattcaaaaaaaaaataatcgttgttacaatcagaactctttttttttatct

SEQ ID NO: 97318 - protein, 517 aa, Arabidopsis thaliana
  peptide (1)..(517): Ceres Seq. ID no. 12736979
IKKSRAQTRGTTIMVSLLSFFLLLLVPIFFLLIFTKKIKESKQNLPPGPAKLPIIGNLHQLQGLLHKCLHDLSKKHGPVMHLRLGFAPMVVISSSEAAEEALKTHDLECCSRPITMASRVFSRNGKDIGFGVYGDEWRELRKLSVREFFSVKKVQSFKYIREEENDLMIKKLKELASKQSPVDLSKILFGLTASIIFRTAFGQSFFDNKHVDQESIKELMFESLSNMTFRFSDFFPTAGLKWFIGFVSGQHKRLYNVFNRVDTFFNHIVDDHHSKKATQDRPDMVDAILDMIDNEQQYASFKLTVDHLKGVLSNIYHAGIDTSAITLIWAMAELVRNPRVMKKAQDEIRTCIGIKQEGRIMEEDLDKLQYLKLVVKETLRLHPAAPLLLPRETMADIKIQGYDIPQKRALLVNAWSIGRDPESWKNPEEFNPERFIDCPVDYKGHSFELLPFGSGRRICPGIAMAIATIELGLLNLLYFFDWNMPEKKKDMDMEEAGDLTVDKKVPLELLPVIRISL

SEQ ID NO: 97319 - protein, 504 aa, Arabidopsis thaliana
  peptide (1)..(504): Ceres Seq. ID no. 12736980
MVSLLSFFLLLLVPIFFLLIFTKKIKESKQNLPPGPAKLPIIGNLHQLQGLLHKCLHDLSKKHGPVMHLRLGFAPMVVISSSEAAEEALKTHDLECCSRPITMASRVFSRNGKDIGFGVYGDEWRELRKLSVREFFSVKKVQSFKYIREEENDLMIKKLKELASKQSPVDLSKILFGLTASIIFRTAFGQSFFDNKHVDQESIKELMFESLSNMTFRFSDFFPTAGLKWFIGFVSGQHKRLYNVFNRVDTFFNHIVDDHHSKKATQDRPDMVDAILDMIDNEQQYASFKLTVDHLKGVLSNIYHAGIDTSAITLIWAMAELVRNPRVMKKAQDEIRTCIGIKQEGRIMEEDLDKLQYLKLVVKETLRLHPAAPLLLPRETMADIKIQGYDIPQKRALLVNAWSIGRDPESWKNPEEFNPERFIDCPVDYKGHSFELLPFGSGRRICPGIAMAIATIELGLLNLLYFFDWNMPEKKKDMDMEEAGDLTVDKKVPLELLPVIRISL

SEQ ID NO: 97320 - protein, 438 aa, Arabidopsis thaliana
  peptide (1)..(438): Ceres Seq. ID no. 12736981
MHLRLGFAPMVVISSSEAAEEALKTHDLECCSRPITMASRVFSRNGKDIGFGVYGDEWRELRKLSVREFFSVKKVQSFKYIREEENDLMIKKLKELASKQSPVDLSKILFGLTASIIFRTAFGQSFFDNKHVDQESIKELMFESLSNMTFRFSDFFPTAGLKWFIGFVSGQHKRLYNVFNRVDTFFNHIVDDHHSKKATQDRPDMVDAILDMIDNEQQYASFKLTVDHLKGVLSNIYHAGIDTSAITLIWAMAELVRNPRVMKKAQDEIRTCIGIKQEGRIMEEDLDKLQYLKLVVKETLRLHPAAPLLLPRETMADIKIQGYDIPQKRALLVNAWSIGRDPESWKNPEEFNPERFIDCPVDYKGHSFELLPFGSGRRICPGIAMAIATIELGLLNLLYFFDWNMPEKKKDMDMEEAGDLTVDKKVPLELLPVIRISL

SEQ ID NO: 97321 - DNA, 1373 bp, Arabidopsis thaliana
  misc_feature (1)..(1373): Ceres Seq. ID no. 12736988
  misc_feature (1)..(1373): Ortholog of  Ceres SEQ ID NO 12611314 as cited in SEQ ID NO 56535
  misc_feature (1)..(1373): Ortholog of  Ceres SEQ ID NO 13661438 as cited in SEQ ID NO 61414
aaagaaaaaaacagagttcataacttgtgattttgtgctttgtcttatttgttagattacggatagtgaagtctcggagactgaatgatattgtttctggtcaacttaaccaatttcagaacatggcaaacagagcagacaactcaatgcgttgttcaaatagtaagaaaccgaatgacggtatgatgctcgtaatatcgattttcgcgggaatagttatcggatttttattaggcatatctttccctacattgtcactaactaagatgaattttccatcaagcattcttccttctgttgctactgtctacatagaaaatgagaaaccggagaaatcatctaagacgagttcacaaaacgaaagtgatgcatcacatcatcataagatttgggttccatcgaatcctcgaggtgcagagatgttacctccaagttttgttgcagccgaatcggatttttacttacgaagattgtggggattgcctaaagatgatttaccagtggtgaagcctaagtatcttgttgcttttactgtttcttatgaacaaagaaaaaacatcgatgcttgtgtcaaaaaattctcagataacttcaccattgttctgtttcattacgatggaaaaacctcggagtatgatgaatttgaatggtctaaacgggcgatacacgtcagtgtacctaagcaaaccaagtggtggtatgctaaaaggtttctgcatcctgatatcatagcaccatatgaatatatattcatttgggatgaagatcttggcgttgaaaacttcgacgcagaagagtacatcaagattgtgaataagcatggtctagaaatatcgcaacccgctgtggaatcaagaaaatcaatcacatggaagataacaaagagaatacccggaatcgaagttcacaaagaagtcgaagagaaaccaggccgctgcaatgaccctcacctacctccttgtgcagggtttatagagattatggctccagttttctctagagaggcatggcgttgtgtgtggcatatgattcagaatgacttggttcacggttggggtcttgactttgcgctaagaaaatgcgtcgagcctgcacatgagaagattggtgttgtggattctcaatggatcattcatcaaaagattccttctttaggcagccagggaaccgcgcaggaagggaaaaccgcgttccaaggggtaagagagagatgtaaacgggaatggacaatgtttcagaaaagaatgacccgatcagagcagaagtatctgaaagaaattgcatctgcctcttcaaactctacacgtacttaaaccaaaagagtagaggaactgaataacaacctttagtgttcagatagcactttcagtaag

SEQ ID NO: 97322 - protein, 396 aa, Arabidopsis thaliana
  peptide (1)..(396): Ceres Seq. ID no. 12736989
MANRADNSMRCSNSKKPNDGMMLVISIFAGIVIGFLLGISFPTLSLTKMNFPSSILPSVATVYIENEKPEKSSKTSSQNESDASHHHKIWVPSNPRGAEMLPPSFVAAESDFYLRRLWGLPKDDLPVVKPKYLVAFTVSYEQRKNIDACVKKFSDNFTIVLFHYDGKTSEYDEFEWSKRAIHVSVPKQTKWWYAKRFLHPDIIAPYEYIFIWDEDLGVENFDAEEYIKIVNKHGLEISQPAVESRKSITWKITKRIPGIEVHKEVEEKPGRCNDPHLPPCAGFIEIMAPVFSREAWRCVWHMIQNDLVHGWGLDFALRKCVEPAHEKIGVVDSQWIIHQKIPSLGSQGTAQEGKTAFQGVRERCKREWTMFQKRMTRSEQKYLKEIASASSNSTRT

SEQ ID NO: 97323 - protein, 388 aa, Arabidopsis thaliana
  peptide (1)..(388): Ceres Seq. ID no. 12736990
MRCSNSKKPNDGMMLVISIFAGIVIGFLLGISFPTLSLTKMNFPSSILPSVATVYIENEKPEKSSKTSSQNESDASHHHKIWVPSNPRGAEMLPPSFVAAESDFYLRRLWGLPKDDLPVVKPKYLVAFTVSYEQRKNIDACVKKFSDNFTIVLFHYDGKTSEYDEFEWSKRAIHVSVPKQTKWWYAKRFLHPDIIAPYEYIFIWDEDLGVENFDAEEYIKIVNKHGLEISQPAVESRKSITWKITKRIPGIEVHKEVEEKPGRCNDPHLPPCAGFIEIMAPVFSREAWRCVWHMIQNDLVHGWGLDFALRKCVEPAHEKIGVVDSQWIIHQKIPSLGSQGTAQEGKTAFQGVRERCKREWTMFQKRMTRSEQKYLKEIASASSNSTRT

SEQ ID NO: 97324 - protein, 376 aa, Arabidopsis thaliana; identical to SEQ ID NO: 85062
  peptide (1)..(376): Ceres Seq. ID no. 12736991

SEQ ID NO: 97325 - DNA, 1662 bp, Arabidopsis thaliana
  misc_feature (1)..(1662): Ceres Seq. ID no. 12737006
  misc_feature (1)..(1662): Ortholog of  Ceres SEQ ID NO 13660287 as cited in SEQ ID NO 67316
actcgttggtccttagtcttcgacctcctttaatctctccatctctttctcttaagatggcaaaagacaaagatataacggagacgcttctcactgcggcggaagaacgttctgatcttcctttcttatccgtcgacgatattcctccgatcaccaccgtcggtggcttcgttagggaattcaacgtggaaaccaaaaagctatggtacttggccggtcccgccattttcacatccgtgaaccaatattctctcggcgctattactcaggtcttcgccggtcacatcagcaccatcgctcttgccgctgtctccgtcgaaaactccgtcgttgccggcttctcattcggcatcatgcttggaatgggaagtgcgttagaaacgctatgtggacaagcgtttggagcaggaaaattgtcaatgcttggcgtttacttgcaacgatcatgggtgatactaaacgtgactgctcttatcctctctctcctttacattttcgccgcccctatcctcgcgtccattggtcaaacggcggcaatctctagcgcggccggaatattttccatctacatgatccctcaaatctttgcctacgccatcaattttccaaccgctaaatttttgcaatcgcaaagcaagataatggtcatggccgtgatatcggctgttgcacttgttatacacgtgcctctcacgtggtttgtcattgtgaagctccagtggggtatgccaggtctagccgtagtgcttaacgcgtcgtggtgcttcattgacatggctcagcttgtgtacatatttagtggtacgtgtggtgaggcttggtctggtttctcgtgggaggcttttcataatttgtggagtttcgttagattatctttggcttctgctgttatgctctgtttggaggtttggtattttatggcaatcatattatttgctggatatttgaagaatgctgaaatctctgtagctgccctctccatctgcatgaatattttgggatggactgctatgattgctattgggatgaacacagccgtaagtgtgagagtgtctaatgaattaggagctaaccatccaagaaccgcgaaattctcactacttgtggcagtgataacatcgacgctaatcggattcattgtatcaatgattctactcatctttagagatcaatatccatcactttttgtgaaagacgaaaaagtcatcattcttgttaaagaactcacaccaatacttgcactttccattgtcatcaacaatgtccaacctgtcttatcaggtgtggctgtgggagctggatggcaagcagtggtggcctacgttaacatcgcctgctattacgtgtttggaatcccatttggtctattattggggtacaagcttaactatggtgtaatgggaatctggtgtggaatgttgacggggaccgtggttcagacaatagttttaacatggatgatctgcaaaacaaattgggacacagaggcttcaatggctgaggataggataagagaatggggaggagaagtatcagaaataaagcaactcataaactaaaagacatcatagtattcaaagaaacgatctgccccaccctttgtatttggtcacaataggtcttcgttttggttattataagtctttgatagagtttctctaa

SEQ ID NO: 97326 - protein, 518 aa, Arabidopsis thaliana
  peptide (1)..(518): Ceres Seq. ID no. 12737007
SLVLSLRPPLISPSLSLKMAKDKDITETLLTAAEERSDLPFLSVDDIPPITTVGGFVREFNVETKKLWYLAGPAIFTSVNQYSLGAITQVFAGHISTIALAAVSVENSVVAGFSFGIMLGMGSALETLCGQAFGAGKLSMLGVYLQRSWVILNVTALILSLLYIFAAPILASIGQTAAISSAAGIFSIYMIPQIFAYAINFPTAKFLQSQSKIMVMAVISAVALVIHVPLTWFVIVKLQWGMPGLAVVLNASWCFIDMAQLVYIFSGTCGEAWSGFSWEAFHNLWSFVRLSLASAVMLCLEVWYFMAIILFAGYLKNAEISVAALSICMNILGWTAMIAIGMNTAVSVRVSNELGANHPRTAKFSLLVAVITSTLIGFIVSMILLIFRDQYPSLFVKDEKVIILVKELTPILALSIVINNVQPVLSGVAVGAGWQAVVAYVNIACYYVFGIPFGLLLGYKLNYGVMGIWCGMLTGTVVQTIVLTWMICKTNWDTEASMAEDRIREWGGEVSEIKQLIN

SEQ ID NO: 97327 - protein, 500 aa, Arabidopsis thaliana
  peptide (1)..(500): Ceres Seq. ID no. 12737008
MAKDKDITETLLTAAEERSDLPFLSVDDIPPITTVGGFVREFNVETKKLWYLAGPAIFTSVNQYSLGAITQVFAGHISTIALAAVSVENSVVAGFSFGIMLGMGSALETLCGQAFGAGKLSMLGVYLQRSWVILNVTALILSLLYIFAAPILASIGQTAAISSAAGIFSIYMIPQIFAYAINFPTAKFLQSQSKIMVMAVISAVALVIHVPLTWFVIVKLQWGMPGLAVVLNASWCFIDMAQLVYIFSGTCGEAWSGFSWEAFHNLWSFVRLSLASAVMLCLEVWYFMAIILFAGYLKNAEISVAALSICMNILGWTAMIAIGMNTAVSVRVSNELGANHPRTAKFSLLVAVITSTLIGFIVSMILLIFRDQYPSLFVKDEKVIILVKELTPILALSIVINNVQPVLSGVAVGAGWQAVVAYVNIACYYVFGIPFGLLLGYKLNYGVMGIWCGMLTGTVVQTIVLTWMICKTNWDTEASMAEDRIREWGGEVSEIKQLIN

SEQ ID NO: 97328 - protein, 401 aa, Arabidopsis thaliana
  peptide (1)..(401): Ceres Seq. ID no. 12737009
MLGMGSALETLCGQAFGAGKLSMLGVYLQRSWVILNVTALILSLLYIFAAPILASIGQTAAISSAAGIFSIYMIPQIFAYAINFPTAKFLQSQSKIMVMAVISAVALVIHVPLTWFVIVKLQWGMPGLAVVLNASWCFIDMAQLVYIFSGTCGEAWSGFSWEAFHNLWSFVRLSLASAVMLCLEVWYFMAIILFAGYLKNAEISVAALSICMNILGWTAMIAIGMNTAVSVRVSNELGANHPRTAKFSLLVAVITSTLIGFIVSMILLIFRDQYPSLFVKDEKVIILVKELTPILALSIVINNVQPVLSGVAVGAGWQAVVAYVNIACYYVFGIPFGLLLGYKLNYGVMGIWCGMLTGTVVQTIVLTWMICKTNWDTEASMAEDRIREWGGEVSEIKQLIN

SEQ ID NO: 97329 - DNA, 1613 bp, Arabidopsis thaliana
  misc_feature (1)..(1613): Ceres Seq. ID no. 12737016
  misc_feature (1)..(1613): Ortholog of  Ceres SEQ ID NO 12586556 as cited in SEQ ID NO 64667
gaggaaagagtgaatgtgagaatttggtgatttatcgttaatccatggcggctccgtcgccgtcttcaccaccaaacctcctctctcctccaccattccgatctcccgaagcttcttactttctccgaacttgttcaaatttctctcaattgaaacaaattcacaccaaaatcatcaaacacaatctcaccaacgatcagttactagttcgtcagctcataagtgtttcttcttccttcggagaaacccaatacgcttctctcgtctttaatcaacttcaatctccttctacttttacctggaaccttatgataagatctctctctgttaatcacaaacctcgtgaagctcttcttctctttatccttatgatgatctctcatcaatcccagtttgataaattcactttcccttttgttatcaaagcttgtctcgcttcttcgtcgattcgtttaggtacccaagttcatggtttagctattaaagctgggttttttaatgatgtcttcttccaaaacactctcatggatctttactttaagtgtgggaaaccagatagtggacgtaaggtgtttgataaaatgcctgggagaagtattgtttcatggactactatgctttatggtcttgtctccaattctcagttagattctgcagagattgtattcaatcaaatgccaatgagaaacgttgtttcatggactgcaatgattacggcttacgttaagaaccgtagacccgacgaggcgtttcagctctttaggagaatgcaggttgatgatgtcaagcctaatgagtttacgattgttaatttgttgcaagcttctactcagttaggaagcttgtctatgggaagatgggttcatgactatgctcataaaaacggttttgtgcttgattgtttccttggaaccgctttgatcgatatgtatagcaaatgtggaagcttgcaggacgcaaggaaagtatttgacgtgatgcagggtaagagtttagcgacttggaactcgatgatcactagcttaggggtacatggatgtggtgaagaggctttgtctctgtttgaagagatggaagaagaagcaagcgtagaaccagacgctatcactttcgttggtgtcttatccgcttgtgcgaatactggaaatgtaaaggatggtttgaggtactttactcggatgatccaagtttacggtatctcacctattcgagaacataatgcttgtatgatccaattgttggagcaagcccttgaggtggagaaagcttcaaacttggttgaatccatggattctgatccagacttcaattcttcatttggtaatgaatacacggatggaatgaatgaaacgaacgaaactccgagccaacatcaaattatgttcaccaagtgggatacaggccgattttgaaggttcagtgtctcttgacatatatattttcgtctattaaacagattcattgatcatctttgtaactatacaagaaaagctccttcaaaagtagtgtaatgtcatgtacttgtaaaaggaatgggagcttaagcagggaaaatagtaaattcgatttgtaatagtgtcatgtattttgtaaacagattcatttatcttttt

SEQ ID NO: 97330 - protein, 455 aa, Arabidopsis thaliana
  peptide (1)..(455): Ceres Seq. ID no. 12737017
MAAPSPSSPPNLLSPPPFRSPEASYFLRTCSNFSQLKQIHTKIIKHNLTNDQLLVRQLISVSSSFGETQYASLVFNQLQSPSTFTWNLMIRSLSVNHKPREALLLFILMMISHQSQFDKFTFPFVIKACLASSSIRLGTQVHGLAIKAGFFNDVFFQNTLMDLYFKCGKPDSGRKVFDKMPGRSIVSWTTMLYGLVSNSQLDSAEIVFNQMPMRNVVSWTAMITAYVKNRRPDEAFQLFRRMQVDDVKPNEFTIVNLLQASTQLGSLSMGRWVHDYAHKNGFVLDCFLGTALIDMYSKCGSLQDARKVFDVMQGKSLATWNSMITSLGVHGCGEEALSLFEEMEEEASVEPDAITFVGVLSACANTGNVKDGLRYFTRMIQVYGISPIREHNACMIQLLEQALEVEKASNLVESMDSDPDFNSSFGNEYTDGMNETNETPSQHQIMFTKWDTGRF

SEQ ID NO: 97331 - protein, 367 aa, Arabidopsis thaliana
  peptide (1)..(367): Ceres Seq. ID no. 12737018
MIRSLSVNHKPREALLLFILMMISHQSQFDKFTFPFVIKACLASSSIRLGTQVHGLAIKAGFFNDVFFQNTLMDLYFKCGKPDSGRKVFDKMPGRSIVSWTTMLYGLVSNSQLDSAEIVFNQMPMRNVVSWTAMITAYVKNRRPDEAFQLFRRMQVDDVKPNEFTIVNLLQASTQLGSLSMGRWVHDYAHKNGFVLDCFLGTALIDMYSKCGSLQDARKVFDVMQGKSLATWNSMITSLGVHGCGEEALSLFEEMEEEASVEPDAITFVGVLSACANTGNVKDGLRYFTRMIQVYGISPIREHNACMIQLLEQALEVEKASNLVESMDSDPDFNSSFGNEYTDGMNETNETPSQHQIMFTKWDTGRF

SEQ ID NO: 97332 - protein, 347 aa, Arabidopsis thaliana
  peptide (1)..(347): Ceres Seq. ID no. 12737019
MMISHQSQFDKFTFPFVIKACLASSSIRLGTQVHGLAIKAGFFNDVFFQNTLMDLYFKCGKPDSGRKVFDKMPGRSIVSWTTMLYGLVSNSQLDSAEIVFNQMPMRNVVSWTAMITAYVKNRRPDEAFQLFRRMQVDDVKPNEFTIVNLLQASTQLGSLSMGRWVHDYAHKNGFVLDCFLGTALIDMYSKCGSLQDARKVFDVMQGKSLATWNSMITSLGVHGCGEEALSLFEEMEEEASVEPDAITFVGVLSACANTGNVKDGLRYFTRMIQVYGISPIREHNACMIQLLEQALEVEKASNLVESMDSDPDFNSSFGNEYTDGMNETNETPSQHQIMFTKWDTGRF

SEQ ID NO: 97333 - DNA, 1053 bp, Arabidopsis thaliana
  misc_feature (1)..(1053): Ceres Seq. ID no. 12737020
  misc_feature (1)..(1053): Ortholog of  Ceres SEQ ID NO 15176851 as cited in SEQ ID NO 61348
atgggaagcagtggtggatacaggaaaggtgtgactgaggccaagcttaaggtggccattaatggattcggtaggatcgggaggaacttcctgagatgttggcatggtcgcaaggactctcctcttgatatcattgccattaatgacactggtggcgtcaagcaggcttcgcatttacttaaatacgactctactctcggaatctttgatgctgatgtcaaaccttctggagagactgcaatctctgttgatggaaagatcatccaagttgtctctaaccgaaacccgtctcttctcccttggaaggagctaggaattgacattgtcatcgaaggaaccggagtgtttgtggatagagaaggtgcagggaaacacattgaagctggtgccaagaaggttatcattactgctccaggcaaaggagatattccaacttatgtcgttggtgtcaatgcagatgcttacagtcatgatgaacctatcatcagcaatgcatcttgcactaccaactgtcttgctccctttgtcaaagttcttgaccagaaattcggtatcataaagggtacaatgacgactactcactcttacaccggtgaccagaggttgctagacgcgagtcaccgtgatctaaggagagcaagagcagctgctttgaacattgttcctacttctacaggagcagctaaagctgtggctcttgtgctccctaacctcaaaggaaaactcaacgggatcgctctccgtgtaccaacaccaaacgtatcagtggttgatctcgttgtgcaggtctcaaagaagacatttgctgaggaagtcaacgctgctttcagagattctgcagagaaagagcttaaaggtatactcgatgtctgcgatgagccactagtgtccgttgatttcagatgctcagatttttcaacgaccattgattcatcactcactatggttatgggagatgatatggttaaggtgattgcttggtatgataatgaatggggttactcacagagagttgttgacttggctgacattgttgccaacaactggaagtga

SEQ ID NO: 97334 - protein, 350 aa, Arabidopsis thaliana; identical to SEQ ID NO: 45929
  peptide (1)..(350): Ceres Seq. ID no. 12737021

SEQ ID NO: 97335 - DNA, 810 bp, Arabidopsis thaliana
  misc_feature (1)..(810): Ceres Seq. ID no. 12737037
  misc_feature (1)..(810): Ortholog of  Ceres SEQ ID NO 13594163 as cited in SEQ ID NO 60426
atgtatagaaagttagaaggaaaagtagcggtcataaccggcggggcaagcggaatagggaaggccacagcggaggaatttgtgagccaaggtgcgcaagtgattatcgtagatatagatgaagaggctggtcatatggtcgcgaccgaacttggctcagccgcacatttcttaagatgtgatgtcactgaggaggaacaaatcgctaaggccgtggagaccgccgtgactcgtcatgggaagctcgacgtaatgctcaatagtgcgggaatatcatgctccatatcaccaccaagcatagcggacctagacatggacacttacgacaaagtgatgcgtctcaacgtgcgaggtactgtcttagggataaagcacgcggctcgagccatgatccccgctggctcgggctccatcctctgcctctctagcatcagcggcttgatgggtggtctaggcccacacgcatactcaatctctaaattcacaatcccgggtgtggtcaagacggttgcgagcgagctgtgtaagcacggactaagaatcaattgtatatcgcccgcaggcatcccgacgcctctaactttgaggatgtttcgagaggcgtttgcgggtcatagcattcgggaggaacaacttttggcgattgtgaacgcgacgggagaactaaagggagagaagtgtgaggagatagatgtggctaaagcggctttgtatttggcatcggatgatgctaagtttgtgacggggcataaccttgttgttgatggtggatttacttgtttcaagtctcttaatctcccttctgcttaa

SEQ ID NO: 97336 - protein, 269 aa, Arabidopsis thaliana
  peptide (1)..(269): Ceres Seq. ID no. 12737038
MYRKLEGKVAVITGGASGIGKATAEEFVSQGAQVIIVDIDEEAGHMVATELGSAAHFLRCDVTEEEQIAKAVETAVTRHGKLDVMLNSAGISCSISPPSIADLDMDTYDKVMRLNVRGTVLGIKHAARAMIPAGSGSILCLSSISGLMGGLGPHAYSISKFTIPGVVKTVASELCKHGLRINCISPAGIPTPLTLRMFREAFAGHSIREEQLLAIVNATGELKGEKCEEIDVAKAALYLASDDAKFVTGHNLVVDGGFTCFKSLNLPSA

SEQ ID NO: 97337 - protein, 224 aa, Arabidopsis thaliana
  peptide (1)..(224): Ceres Seq. ID no. 12737039
MVATELGSAAHFLRCDVTEEEQIAKAVETAVTRHGKLDVMLNSAGISCSISPPSIADLDMDTYDKVMRLNVRGTVLGIKHAARAMIPAGSGSILCLSSISGLMGGLGPHAYSISKFTIPGVVKTVASELCKHGLRINCISPAGIPTPLTLRMFREAFAGHSIREEQLLAIVNATGELKGEKCEEIDVAKAALYLASDDAKFVTGHNLVVDGGFTCFKSLNLPSA

SEQ ID NO: 97338 - protein, 185 aa, Arabidopsis thaliana
  peptide (1)..(185): Ceres Seq. ID no. 12737040
MLNSAGISCSISPPSIADLDMDTYDKVMRLNVRGTVLGIKHAARAMIPAGSGSILCLSSISGLMGGLGPHAYSISKFTIPGVVKTVASELCKHGLRINCISPAGIPTPLTLRMFREAFAGHSIREEQLLAIVNATGELKGEKCEEIDVAKAALYLASDDAKFVTGHNLVVDGGFTCFKSLNLPSA

SEQ ID NO: 97339 - DNA, 999 bp, Arabidopsis thaliana
  misc_feature (1)..(999): Ceres Seq. ID no. 12737041
  misc_feature (1)..(999): Ortholog of  Ceres SEQ ID NO 13594163 as cited in SEQ ID NO 60426
agcagtcttatggcggccatagtactgatcagatctatcgtcagaaactttaaacggccagccaccgcagcctcagccgcttactcgacaggtggtggtggcggcggttgtacttgtacgagtaaaaagctagaaggcaaagtagctctcataactggtggtgctagcgggctcggtaaggccacggccagcgagtttctccgccatggtgcccgagtcgtgatcgccgacttagacgcggaaaccgggacaaaaaccgctaaagaactaggctcggaggcagagtttgtgcggtgtgatgtcacggtggaggctgatatcgctggagccgtggaaatgacggtggagcggtatgggaagctagacgtgatgtacaataacgctgggattgttggacctatgactccagcgagcatatcgcagcttgatatgacagaattcgagagagtaatgaggattaatgtttttggtgttgtctccggcatcaaacacgccgctaagtttatgattccggctaggtctggatgcattttgtgcacatcaagcgttgcaggcgtgactggagggttggctccacattcatacacaatctcaaagttcacaactcccggaatagtcaagtcggcagcaagcgagctctgcgaacacggcgtgcgtataaactgtatctcaccgggtacggtggctacaccgctcactctcagttaccttcagaaagtgtttccgaaggtatcggaggagaagctacgcgaaacagtgaaaggaatgggtgagttaaaaggagctgagtgtgaagaagctgacgtggctaaggctgctttgtatttggcttccaacgacggtaaatacgttactggccataacttggtcgtggatggtggcatgactgctttcaaaatagctggttttccttttccttcggattcatgatcaatcattttgtatcgtctataaataactttgtactgtattcaagattttatatcaaagttggatctt

SEQ ID NO: 97340 - protein, 309 aa, Arabidopsis thaliana
  peptide (1)..(309): Ceres Seq. ID no. 12737042
SSLMAAIVLIRSIVRNFKRPATAASAAYSTGGGGGGCTCTSKKLEGKVALITGGASGLGKATASEFLRHGARVVIADLDAETGTKTAKELGSEAEFVRCDVTVEADIAGAVEMTVERYGKLDVMYNNAGIVGPMTPASISQLDMTEFERVMRINVFGVVSGIKHAAKFMIPARSGCILCTSSVAGVTGGLAPHSYTISKFTTPGIVKSAASELCEHGVRINCISPGTVATPLTLSYLQKVFPKVSEEKLRETVKGMGELKGAECEEADVAKAALYLASNDGKYVTGHNLVVDGGMTAFKIAGFPFPSDS

SEQ ID NO: 97341 - protein, 306 aa, Arabidopsis thaliana
  peptide (1)..(306): Ceres Seq. ID no. 12737043
MAAIVLIRSIVRNFKRPATAASAAYSTGGGGGGCTCTSKKLEGKVALITGGASGLGKATASEFLRHGARVVIADLDAETGTKTAKELGSEAEFVRCDVTVEADIAGAVEMTVERYGKLDVMYNNAGIVGPMTPASISQLDMTEFERVMRINVFGVVSGIKHAAKFMIPARSGCILCTSSVAGVTGGLAPHSYTISKFTTPGIVKSAASELCEHGVRINCISPGTVATPLTLSYLQKVFPKVSEEKLRETVKGMGELKGAECEEADVAKAALYLASNDGKYVTGHNLVVDGGMTAFKIAGFPFPSDS

SEQ ID NO: 97342 - protein, 197 aa, Arabidopsis thaliana
  peptide (1)..(197): Ceres Seq. ID no. 12737044
MTVERYGKLDVMYNNAGIVGPMTPASISQLDMTEFERVMRINVFGVVSGIKHAAKFMIPARSGCILCTSSVAGVTGGLAPHSYTISKFTTPGIVKSAASELCEHGVRINCISPGTVATPLTLSYLQKVFPKVSEEKLRETVKGMGELKGAECEEADVAKAALYLASNDGKYVTGHNLVVDGGMTAFKIAGFPFPSDS

SEQ ID NO: 97343 - DNA, 1238 bp, Arabidopsis thaliana
  misc_feature (1)..(1238): Ceres Seq. ID no. 12737045
  misc_feature (1)..(1238): Ortholog of  Ceres SEQ ID NO 13582564 as cited in SEQ ID NO 56447
cacaaaccacagtctctctttctctctctatctatcttctctttctctctctatctctatcactgaaacccaaagagatccaccatttgttcttttttccttcacacagagaactgttttcttccacacttcctttttactaggcagtgttaaccaattgagagagaaaaatgatggttgatgaaaatgtggaaaccaaggcctctactttagtggcaagtgttgatcatgggtttggatccgggtcgggtcatgatcatcatgggttatcggcgtctgtgcctcttcttggtgttaactggaagaagagaaggatgcctagacagagacgatcttcttcttcctttaaccttctctctttccctcctcctatgcctcctatttcccacgtgccaactcctctccccgcacgtaaaattgacccaagaaagctaagattcctcttccaaaaggaactcaagaacagtgacgtcagctctctccgacgtatgatactcccgaagaaagccgcggaggctcacttgccggcacttgaatgcaaggaagggattcctataagaatggaagatttggacggttttcacgtttggaccttcaagtataggtactggccaaacaacaatagcagaatgtacgtgctagaaaacacaggcgattttgtgaatgctcatggtctgcagctaggtgacttcatcatggtttaccaagatctctactcaaacaattacgttatacaagcaagaaaagcatcggaagaagaagaagtagacgtaatcaatcttgaagaagacgacgtttacacaaacttaacaaggatcgaaaacactgtggttaacgatcttctcctccaagattttaatcatcacaacaacaacaacaacaacaacagcaacagcaacagcaacaaatgttcttactattatccagtcatagatgatgtcaccacaaacacagagtcttttgtctacgacacgacggctcttacctccaacgatactcctctcgattttttgggtggacatacgacgactactaataattattactccaagttcggaacattcgatggtttgggctccgttgagaatatctctctcgatgacttctactagataatcaatcgatgggctcatggtattcttgatggtgatcagctatttaatatccttataatatatataagaattaaatgcaatttgcatatatattatcaagtgttgaatataacattacagttt

SEQ ID NO: 97344 - protein, 313 aa, Arabidopsis thaliana
  peptide (1)..(313): Ceres Seq. ID no. 12737046
MMVDENVETKASTLVASVDHGFGSGSGHDHHGLSASVPLLGVNWKKRRMPRQRRSSSSFNLLSFPPPMPPISHVPTPLPARKIDPRKLRFLFQKELKNSDVSSLRRMILPKKAAEAHLPALECKEGIPIRMEDLDGFHVWTFKYRYWPNNNSRMYVLENTGDFVNAHGLQLGDFIMVYQDLYSNNYVIQARKASEEEEVDVINLEEDDVYTNLTRIENTVVNDLLLQDFNHHNNNNNNNSNSNSNKCSYYYPVIDDVTTNTESFVYDTTALTSNDTPLDFLGGHTTTTNNYYSKFGTFDGLGSVENISLDDFY

SEQ ID NO: 97345 - protein, 312 aa, Arabidopsis thaliana
  peptide (1)..(312): Ceres Seq. ID no. 12737047
MVDENVETKASTLVASVDHGFGSGSGHDHHGLSASVPLLGVNWKKRRMPRQRRSSSSFNLLSFPPPMPPISHVPTPLPARKIDPRKLRFLFQKELKNSDVSSLRRMILPKKAAEAHLPALECKEGIPIRMEDLDGFHVWTFKYRYWPNNNSRMYVLENTGDFVNAHGLQLGDFIMVYQDLYSNNYVIQARKASEEEEVDVINLEEDDVYTNLTRIENTVVNDLLLQDFNHHNNNNNNNSNSNSNKCSYYYPVIDDVTTNTESFVYDTTALTSNDTPLDFLGGHTTTTNNYYSKFGTFDGLGSVENISLDDFY

SEQ ID NO: 97346 - protein, 265 aa, Arabidopsis thaliana
  peptide (1)..(265): Ceres Seq. ID no. 12737048
MPRQRRSSSSFNLLSFPPPMPPISHVPTPLPARKIDPRKLRFLFQKELKNSDVSSLRRMILPKKAAEAHLPALECKEGIPIRMEDLDGFHVWTFKYRYWPNNNSRMYVLENTGDFVNAHGLQLGDFIMVYQDLYSNNYVIQARKASEEEEVDVINLEEDDVYTNLTRIENTVVNDLLLQDFNHHNNNNNNNSNSNSNKCSYYYPVIDDVTTNTESFVYDTTALTSNDTPLDFLGGHTTTTNNYYSKFGTFDGLGSVENISLDDFY

SEQ ID NO: 97347 - DNA, 1680 bp, Arabidopsis thaliana
  misc_feature (1)..(1680): Ceres Seq. ID no. 12737059
  misc_feature (1)..(1680): Ortholog of  Ceres SEQ ID NO 13638292 as cited in SEQ ID NO 57738
atgggaatagagaactgcatagtttatgttgtggttctaagtgctattgcggctacggtgacatcatacccttactcatctcctcaaaccccaagttacaattctcccagctatgaacacaaaggccctaagtacgcgccacatccaaaaccatatgttaaaagttccccaccaccacaatactacactccatcgccaaaggtaaactacaaatctccaccaccaccatatgtatacagctccccacctccaccgtactactctccatctccaaaggtagactacaagtccccaccaccaccatacgtctacagctccccaccaccaccgtattactctccatctccaaaggttgactacaagtctccaccaccaccatatgtatacagctccccacctccaccgtactactctccatctccaaaggtagactacaagtccccaccaccaccgtacgtctacaactccccgcccccaccgtactattctccatctccaaaggtagactacaagtctccaccaccaccgtacgtctacagttccccacccccaccgtactattctccttctccaaaggtatactacaagtctccaccaccaccatacgtctacagctccccaccaccaccgtactattctccttctccaaaggtatactacaagtctccaccaccaccatacgtctacagctccccaccaccaccgtactattctccttctccaaaggtatactacaagtctccaccaccaccatacgtctacagctccccaccaccaccatactactctccttctcctaaggtttactacaagtccccacctccaccgtacgtctacagctccccaccaccaccatactattctccttctcctaaggtttactacaagtccccacctccaccatacgtctacagctctccacctccaccatactactctccttctcctaaggtttactacaagtccccacctccaccatacgtctacagctccccacctccaccatactactctccttctcctaaggtttactacaagtccccacctccaccatacgtctacagctccccacctccaccatactactctccttctcctaaggtttactacaagtccccacctccaccatacgtctacagctccccacctccaccatactactctccttctccaaaggtttactacaagtctccaccaccaccatacgtctacaactctccaccaccaccatactactctccttctcctaaggtttactacaagtccccacctccaccatacgtctacagctccccacctccaccatactactctccttctcctaaggtttactacaagtctccacctccaccatacgtctacagctccccaccaccaccgtactactcgccttctccaaaggtttactacaagtctccaccaccatcatacgtctacagctccccaccaccaccgtactactcgccttctccaaaggtttactacaagtctccaccaccatcatacgtctacagctctccaccaccaccatactactctccttctcctaaggtttactacaagtccccacctccaccatacgtctacagctccccacctcctccatactactctccttctcctaaagtcacttacaagtctccaccaccaccatatgtctacaagacgccttactattga

SEQ ID NO: 97348 - protein, 559 aa, Arabidopsis thaliana
  peptide (1)..(559): Ceres Seq. ID no. 12737060
MGIENCIVYVVVLSAIAATVTSYPYSSPQTPSYNSPSYEHKGPKYAPHPKPYVKSSPPPQYYTPSPKVNYKSPPPPYVYSSPPPPYYSPSPKVDYKSPPPPYVYSSPPPPYYSPSPKVDYKSPPPPYVYSSPPPPYYSPSPKVDYKSPPPPYVYNSPPPPYYSPSPKVDYKSPPPPYVYSSPPPPYYSPSPKVYYKSPPPPYVYSSPPPPYYSPSPKVYYKSPPPPYVYSSPPPPYYSPSPKVYYKSPPPPYVYSSPPPPYYSPSPKVYYKSPPPPYVYSSPPPPYYSPSPKVYYKSPPPPYVYSSPPPPYYSPSPKVYYKSPPPPYVYSSPPPPYYSPSPKVYYKSPPPPYVYSSPPPPYYSPSPKVYYKSPPPPYVYSSPPPPYYSPSPKVYYKSPPPPYVYNSPPPPYYSPSPKVYYKSPPPPYVYSSPPPPYYSPSPKVYYKSPPPPYVYSSPPPPYYSPSPKVYYKSPPPSYVYSSPPPPYYSPSPKVYYKSPPPSYVYSSPPPPYYSPSPKVYYKSPPPPYVYSSPPPPYYSPSPKVTYKSPPPPYVYKTPYY

SEQ ID NO: 97349 - DNA, 1515 bp, Arabidopsis thaliana
  misc_feature (1)..(1515): Ceres Seq. ID no. 12737065
  misc_feature (1)..(1515): Ortholog of  Ceres SEQ ID NO 15177947 as cited in SEQ ID NO 60308
ttttgtccttaggatttgattgtacatacatctgatctcaagtgatttcaagtggttggttctgttccttttctcgtccccgatcaagtttcttctcctaaactccagaatttggtcttgaagatctctaaaggctcttcctttttgttcatttctctacccagatatcgatgggtacatacctaagttctccgaaaactgaaaagttatcagaagatggtgagaatgataagctcagatttggtttatcgtctatgcaaggttggcgcgctaccatggaagacgcgcatgctgcaattcttgatcttgatgataagacatcgttcttcggtgtgtatgatggccatggaggtaaagtcgttgcaaagttctgtgccaagtatctacaccagcaggttatcagtaatgaagcgtataaaactggagacgtcgaaacatctcttcgaagagcattctttagaatggatgacatgatgcaaggacaaagaggatggcgagagttagctgtacttggcgacaagatgaacaaatttagcggcatgattgaaggatttatatggtcaccaagaagcggtgacaccaataaccaacccgatagttggcctcttgaagatggtcctcattctgatttcacgggacctacctcggggtgcacagcgtgtgtagctcttattaaagataagaagctctttgttgcaaatgccggtgactcacgttgtgtgatatcaagaaagagtcaggcttacaatctttctaaagatcacaagcctgatcttgaagttgaaaaagaaaggatattgaaagctggtggctttattcacgctgggagaatcaatggaagcttgaatctgacaagagccattggtgatatggagttcaagcagaataagtttttaccatctgaaaagcaaatggttactgctgatccagatataaacactattgacctatgtgatgatgatgactttcttgttgttgcttgcgatggaatatgggattgtatgtcaagccaggaactagttgattttatccatgaacagttaaaatctgaaacaaaactttcaacagtatgtgaaaaggttgttgatagatgtttggctccagatacagcgactggtgaaggttgtgataatatgaccatcatcttggttcagttcaagaagcctaacccatctgagactgaaccagaagattccaaaccagaaccaagcgaagatgagccgagctcatcaagctagatatctttaaagagccaagaggaagaagatttgtgaaagtgtctcttttatcattgactttttgttcaacattgtaaatccttttgaatgtggcttagattcaagaagctggctttttcccagtttagcttcaagaagtctgagatgtcacagagtttggtttaatcttaaaaggacctttgtatagatatttcttgtgattgatgttttcagctatagtttaaaaaattcacaaggacaagctttttgtaccaacatcatgggatttgttttcatc

SEQ ID NO: 97350 - protein, 355 aa, Arabidopsis thaliana; identical to SEQ ID NO: 28678
  peptide (1)..(355): Ceres Seq. ID no. 12737066

SEQ ID NO: 97351 - protein, 327 aa, Arabidopsis thaliana; identical to SEQ ID NO: 28679
  peptide (1)..(327): Ceres Seq. ID no. 12737067

SEQ ID NO: 97352 - protein, 320 aa, Arabidopsis thaliana; identical to SEQ ID NO: 28680
  peptide (1)..(320): Ceres Seq. ID no. 12737068

SEQ ID NO: 97353 - DNA, 961 bp, Arabidopsis thaliana
  misc_feature (1)..(961): Ceres Seq. ID no. 12737069
  misc_feature (1)..(961): Ortholog of  Ceres SEQ ID NO 13599287 as cited in SEQ ID NO 338
  misc_feature (1)..(961): Ortholog of  Ceres SEQ ID NO 15172934 as cited in SEQ ID NO 51783
  misc_feature (1)..(961): Ortholog of  Ceres SEQ ID NO 15174056 as cited in SEQ ID NO 0
atctctcggtttcactattgaacgtgtaacactggtcgaaagaagacgaacataaactcgtctccggtaaccaaaaatggtttccatgactacttcatcttcttcgtacggaacattctctacagtcgtcaacagttctagacctaattcctcagcaacctttctcgtcccttccttgaaattctccaccggaatatcgaatttcgcgaatctgagtaatgggttttctctaaaatctccaattaatcctgggtttctcttcaagtctcgtcctttcactgtccaagctagagctgctgcagaaaaaaccgttcacgatttcaccgttaaggacattgatgggaaggatgttgctttgaacaaattcaaggggaaagttatgttgattgtcaatgttgcttcaagatgtggtttgacatcatcaaattactcagagctttcacatctgtacgagaaatacaaaactcaaggatttgagattctagcttttccctgcaatcagtttggtttccaagagcccgggtcaaactccgagatcaaacaattcgcttgcacccggtttaaagcagagttccctatatttgataaggttgacgtgaatggaccaagcacagcgccgatctacgagttcttgaaatcaaacgcaggaggattcttgggtggtctcattaaatggaactttgagaagttcttgattgataaaaagggaaaggtcgttgagaggtaccctcccaccacatcccctttccaaatcgagaaagacatccagaagttgcttgccgcttaaaaacttttgctcatgagtgagcatatagagactgatggttaaagtaaccgtaaattgtgacataaagtttccggttattgcttgtataccttcttacattctaagttgtactaatcgcttaataatttgcgtataatggtaatgttatatacattatattataaaaatggtgtt

SEQ ID NO: 97354 - protein, 236 aa, Arabidopsis thaliana [sequence omitted]

SEQ ID NO: 97355 - protein, 233 aa, Arabidopsis thaliana; identical to SEQ ID NO: 85339
  peptide (1)..(233): Ceres Seq. ID no. 12737071

SEQ ID NO: 97356 - protein, 135 aa, Arabidopsis thaliana; identical to SEQ ID NO: 29401
  peptide (1)..(135): Ceres Seq. ID no. 12737072

SEQ ID NO: 97357 - DNA, 3223 bp, Arabidopsis thaliana
  misc_feature (1)..(3223): Ceres Seq. ID no. 12737081
  misc_feature (1)..(3223): Ortholog of  Ceres SEQ ID NO 14307530 as cited in SEQ ID NO 58394
aacttctcgatgaaatgactttcttctacaaacttctttttccctcttctccaagcttacgcttgtctccatgtaaaaaacctccgtcgtcttcttcctcctccttcataaccctaaaccaaaaaccctcatttccttcaatcttcttactcacatggcgctaaggagattatcaaagtctgtttcgtcagccatcaaagctcaatacactctctcgagaccctctcctctcctccgttctcgctctctctcttcctctcctcactacacctctattggccggccaacaaattcattcatcggaaaaatcaataactcttctatcactcatgcgactactactcatggtcaactcttccctctttcttctccgcgacgcttttgtactaccacagctcaggttaatcaaaatgagtttacggagatggcatgggaagggcttatcaacgcctttgacgcggctcgtgaatcgaaacaacagattgtggaatctgaacatttgatgaaagctcttcttgagcaaaaagatggtatggctagaaagattttcactaaagctggaattgacaattcctctgttcttcaagctacagacttgttcatatctaaacaaccaacggttagtgatgcaagtggtcagagactagggtcatctcttagtgttatattagaaaatgcaaagaggcataagaaagatatgttggatagttatgtatccgtggagcactttttgttggcttattattcagatacaaggtttggacaagagtttttcagggacatgaaacttgatattcaagtgctaaaggatgctattaaagatgtacgcggtgatcaacgagtaactgatcggaatcctgaaagcaaatatcaagcacttgaaaagtatggaaatgatttaactgagatggctagacgagggaagctggatcctgtcattgggcgggatgatgaaattaggcgttgcatccagatattatgtaggagaacaaaaaacaatccggttattattggtgaacctggtgtagggaaaactgcaattgcagaggggttggctcaacgaattgtgcgaggagatgtccctgaacctctcatgaatcgaaagttgatatctctcgacatgggttcacttcttgctggtgccaaatttcgaggagattttgaggagaggttgaaagcagtaatgaaggaagtatctgcttccaatgggcaaacaatcttgtttattgatgagatccacactgttgttggtgcaggagctatggatggagcaatggatgcaagcaacctcttgaaaccaatgcttggacgaggtgaactgagatgcattggtgcaactacactgaccgaataccgcaaatatatagagaaagacccagctctagagcgtaggtttcaacaagtgttatgtgttcagccctctgttgaagatacaatctcgattcttcgtgggttaagagagcggtacgagttacaccatggcgttactatatcagatagtgcccttgtttcagcagcagttcttgcagaccgctacatcaccgaacgctttctgccagacaaagctattgatcttgttgacgaagctggtgcaaagctgaagatggagatcacttctaaaccaactgaactagatggaatagatagagctgtgatcaaattggagatggaaaagctttctcttaaaaatgatactgataaagcatctaaagaacggctacagaagattgagaatgatctgtccacgctcaaacagaaacagaaagaactcaatgtccaatgggagaaagaaaagtcgctcatgacaaaaatacgttcgtttaaggaagagattgatcgagttaacctcgaaattgaatctgctgaacgtgaatatgatctaaaccgagctgctgagctgaagtatggaacacttttgtccctccaacgccaattagaagaagctgagaagaatctcacgaatttccgacagtttggacagtcactactccgagaagtggttaccgatcttgacatagcagaaatagtaagcaagtggactggtattccactatctaatcttcagcaatcagagagagagaagttagtgatgttggaagaagtgctccaccatagagttattggtcaagacatggctgtaaaatcagtagcagatgctatccgacgttcaagggctggtctttctgatcctaaccgcccaatagctagtttcatgttcatgggtccaacaggtgttggtaagaccgagcttgccaaggctctagcgggatacctttttaacactgaaaatgcaatagtgagggtcgatatgagtgagtacatggaaaaacactcagtctcacggcttgttggtgcaccacctggctatgtcggttatgaagaaggtgggcagttaactgaagttgttcgcaggagaccttactcggtggttctgtttgatgagatcgagaaagcccaccctgatgtctttaatatcttgctacaactgctagacgatggaagaataactgattctcaaggaaggaccgtaagtttcaaaaactgtgttgtaattatgacgtcgaatataggatctcaccacatacttgagaccctccgcaacaatgaagacagcaaagaagcagtttatgagataatgaagcggcaagttgtggagttagcaagacaaaatttcaggcctgagttcatgaacagaattgacgagtacatagttttccagccgctggattctaacgaaatctccaaaatcgtagagttacagatgagacgggtgaagaatagcttggaacagaagaaaatcaaacttcagtataccaaagaggcagtggatctccttgctcagcttggctttgaccctaactacggggcaaggccggtgaagcgagtgattcaacagatggtggagaatgagatcgctgtcgggattttgaaaggagattttgcagaagaagataccgttcttgtcgatgttgaccacttggctagtgacaacaaattggttatcaagaagcttgagagtaatgcttcagctgaagaaatggccgcttaattgcacaaacaaaattagacgattcggggtttagcgtttataactcttttgttctgtcttttgtagattcgtactttagtgttgctctctcttctaactcgtacggaatgtaatgttttgaggattatcttttgccgacaaaagtaaatgggaacacaccgacttattcctccg

SEQ ID NO: 97358 - protein, 964 aa, Arabidopsis thaliana
  peptide (1)..(964): Ceres Seq. ID no. 12737082
MALRRLSKSVSSAIKAQYTLSRPSPLLRSRSLSSSPHYTSIGRPTNSFIGKINNSSITHATTTHGQLFPLSSPRRFCTTTAQVNQNEFTEMAWEGLINAFDAARESKQQIVESEHLMKALLEQKDGMARKIFTKAGIDNSSVLQATDLFISKQPTVSDASGQRLGSSLSVILENAKRHKKDMLDSYVSVEHFLLAYYSDTRFGQEFFRDMKLDIQVLKDAIKDVRGDQRVTDRNPESKYQALEKYGNDLTEMARRGKLDPVIGRDDEIRRCIQILCRRTKNNPVIIGEPGVGKTAIAEGLAQRIVRGDVPEPLMNRKLISLDMGSLLAGAKFRGDFEERLKAVMKEVSASNGQTILFIDEIHTVVGAGAMDGAMDASNLLKPMLGRGELRCIGATTLTEYRKYIEKDPALERRFQQVLCVQPSVEDTISILRGLRERYELHHGVTISDSALVSAAVLADRYITERFLPDKAIDLVDEAGAKLKMEITSKPTELDGIDRAVIKLEMEKLSLKNDTDKASKERLQKIENDLSTLKQKQKELNVQWEKEKSLMTKIRSFKEEIDRVNLEIESAEREYDLNRAAELKYGTLLSLQRQLEEAEKNLTNFRQFGQSLLREVVTDLDIAEIVSKWTGIPLSNLQQSEREKLVMLEEVLHHRVIGQDMAVKSVADAIRRSRAGLSDPNRPIASFMFMGPTGVGKTELAKALAGYLFNTENAIVRVDMSEYMEKHSVSRLVGAPPGYVGYEEGGQLTEVVRRRPYSVVLFDEIEKAHPDVFNILLQLLDDGRITDSQGRTVSFKNCVVIMTSNIGSHHILETLRNNEDSKEAVYEIMKRQVVELARQNFRPEFMNRIDEYIVFQPLDSNEISKIVELQMRRVKNSLEQKKIKLQYTKEAVDLLAQLGFDPNYGARPVKRVIQQMVENEIAVGILKGDFAEEDTVLVDVDHLASDNKLVIKKLESNASAEEMAA

SEQ ID NO: 97359 - protein, 874 aa, Arabidopsis thaliana
  peptide (1)..(874): Ceres Seq. ID no. 12737083
MAWEGLINAFDAARESKQQIVESEHLMKALLEQKDGMARKIFTKAGIDNSSVLQATDLFISKQPTVSDASGQRLGSSLSVILENAKRHKKDMLDSYVSVEHFLLAYYSDTRFGQEFFRDMKLDIQVLKDAIKDVRGDQRVTDRNPESKYQALEKYGNDLTEMARRGKLDPVIGRDDEIRRCIQILCRRTKNNPVIIGEPGVGKTAIAEGLAQRIVRGDVPEPLMNRKLISLDMGSLLAGAKFRGDFEERLKAVMKEVSASNGQTILFIDEIHTVVGAGAMDGAMDASNLLKPMLGRGELRCIGATTLTEYRKYIEKDPALERRFQQVLCVQPSVEDTISILRGLRERYELHHGVTISDSALVSAAVLADRYITERFLPDKAIDLVDEAGAKLKMEITSKPTELDGIDRAVIKLEMEKLSLKNDTDKASKERLQKIENDLSTLKQKQKELNVQWEKEKSLMTKIRSFKEEIDRVNLEIESAEREYDLNRAAELKYGTLLSLQRQLEEAEKNLTNFRQFGQSLLREVVTDLDIAEIVSKWTGIPLSNLQQSEREKLVMLEEVLHHRVIGQDMAVKSVADAIRRSRAGLSDPNRPIASFMFMGPTGVGKTELAKALAGYLFNTENAIVRVDMSEYMEKHSVSRLVGAPPGYVGYEEGGQLTEVVRRRPYSVVLFDEIEKAHPDVFNILLQLLDDGRITDSQGRTVSFKNCVVIMTSNIGSHHILETLRNNEDSKEAVYEIMKRQVVELARQNFRPEFMNRIDEYIVFQPLDSNEISKIVELQMRRVKNSLEQKKIKLQYTKEAVDLLAQLGFDPNYGARPVKRVIQQMVENEIAVGILKGDFAEEDTVLVDVDHLASDNKLVIKKLESNASAEEMAA

SEQ ID NO: 97360 - protein, 848 aa, Arabidopsis thaliana
  peptide (1)..(848): Ceres Seq. ID no. 12737084
MKALLEQKDGMARKIFTKAGIDNSSVLQATDLFISKQPTVSDASGQRLGSSLSVILENAKRHKKDMLDSYVSVEHFLLAYYSDTRFGQEFFRDMKLDIQVLKDAIKDVRGDQRVTDRNPESKYQALEKYGNDLTEMARRGKLDPVIGRDDEIRRCIQILCRRTKNNPVIIGEPGVGKTAIAEGLAQRIVRGDVPEPLMNRKLISLDMGSLLAGAKFRGDFEERLKAVMKEVSASNGQTILFIDEIHTVVGAGAMDGAMDASNLLKPMLGRGELRCIGATTLTEYRKYIEKDPALERRFQQVLCVQPSVEDTISILRGLRERYELHHGVTISDSALVSAAVLADRYITERFLPDKAIDLVDEAGAKLKMEITSKPTELDGIDRAVIKLEMEKLSLKNDTDKASKERLQKIENDLSTLKQKQKELNVQWEKEKSLMTKIRSFKEEIDRVNLEIESAEREYDLNRAAELKYGTLLSLQRQLEEAEKNLTNFRQFGQSLLREVVTDLDIAEIVSKWTGIPLSNLQQSEREKLVMLEEVLHHRVIGQDMAVKSVADAIRRSRAGLSDPNRPIASFMFMGPTGVGKTELAKALAGYLFNTENAIVRVDMSEYMEKHSVSRLVGAPPGYVGYEEGGQLTEVVRRRPYSVVLFDEIEKAHPDVFNILLQLLDDGRITDSQGRTVSFKNCVVIMTSNIGSHHILETLRNNEDSKEAVYEIMKRQVVELARQNFRPEFMNRIDEYIVFQPLDSNEISKIVELQMRRVKNSLEQKKIKLQYTKEAVDLLAQLGFDPNYGARPVKRVIQQMVENEIAVGILKGDFAEEDTVLVDVDHLASDNKLVIKKLESNASAEEMAA

SEQ ID NO: 97361 - DNA, 1158 bp, Arabidopsis thaliana
  misc_feature (1)..(1158): Ceres Seq. ID no. 12737104
  misc_feature (1)..(1158): Ortholog of  Ceres SEQ ID NO 13596465 as cited in SEQ ID NO 62133
atggagttgggaaaatcgattgagaaccataacgacgttgtggtaagactaacgaagcatgtcatcgctaccgtcgccaatggctccaatcttgtcttctcaccgatatcaatcaacgttttgctcagcctcatcgcggcaggttcatgttcagtcaccaaagaacaaatcctctcattcctcatgttaccgtcaacggatcacctcaacctagtcttggctcagatcatcgacggcggcaccgagaaaagtgatttgcgcttgtctatagccaatggtgtttggatagacaagtttttctccttgaagctttcctttaaagaccttttggagaattcttacaaggcaacttgtagtcaagttgacttcgcaagcaagccttctgaagtgattgatgaggtgaatacatgggctgaagtccacaccaatggactcatcaagcagattctttcacgcgattctatcgatactatccgtagcagcacactcgttcttgcaaatgctgtatatttcaaaggagcgtggagcagtaaatttgatgcaaacatgacaaaaaaaaacgattttcatcttcttgatggtacctcggtgaaagtcccctttatgaccaattacgaggaccagtacctaagaagctatgatggtttcaaagttttgcgcctcccttatatagaggatcaacgtcaattctccatgtacatttatctgcctaatgataaagaaggattagctcctctgcttgagaagataggctccgaaccaagtttcttcgataaccatattccgctccactgtatatcagttggtgcttttagaatcccaaagtttaaattctctttcgagtttaatgcttcagaagttctgaaagatatggggctgacttcaccatttaataatggaggtggtttaactgagatggttgattcaccttccaatggtgacgatctatacgtctcaagcattcttcataaagcttgtattgaagtggatgaagagggaaccgaagctgcagccgtctctgttggcgtcgtaagttgcacttcttttaggcggaatcccgatttcgtagctgaccgtccatttctgttcactgtcagagaagacaagagtggagtgattttgttcatgggtcaagttcttgatccttcaaaacattga

SEQ ID NO: 97362 - protein, 385 aa, Arabidopsis thaliana
  peptide (1)..(385): Ceres Seq. ID no. 12737105
MELGKSIENHNDVVVRLTKHVIATVANGSNLVFSPISINVLLSLIAAGSCSVTKEQILSFLMLPSTDHLNLVLAQIIDGGTEKSDLRLSIANGVWIDKFFSLKLSFKDLLENSYKATCSQVDFASKPSEVIDEVNTWAEVHTNGLIKQILSRDSIDTIRSSTLVLANAVYFKGAWSSKFDANMTKKNDFHLLDGTSVKVPFMTNYEDQYLRSYDGFKVLRLPYIEDQRQFSMYIYLPNDKEGLAPLLEKIGSEPSFFDNHIPLHCISVGAFRIPKFKFSFEFNASEVLKDMGLTSPFNNGGGLTEMVDSPSNGDDLYVSSILHKACIEVDEEGTEAAAVSVGVVSCTSFRRNPDFVADRPFLFTVREDKSGVILFMGQVLDPSKH

SEQ ID NO: 97363 - protein, 324 aa, Arabidopsis thaliana
  peptide (1)..(324): Ceres Seq. ID no. 12737106
MLPSTDHLNLVLAQIIDGGTEKSDLRLSIANGVWIDKFFSLKLSFKDLLENSYKATCSQVDFASKPSEVIDEVNTWAEVHTNGLIKQILSRDSIDTIRSSTLVLANAVYFKGAWSSKFDANMTKKNDFHLLDGTSVKVPFMTNYEDQYLRSYDGFKVLRLPYIEDQRQFSMYIYLPNDKEGLAPLLEKIGSEPSFFDNHIPLHCISVGAFRIPKFKFSFEFNASEVLKDMGLTSPFNNGGGLTEMVDSPSNGDDLYVSSILHKACIEVDEEGTEAAAVSVGVVSCTSFRRNPDFVADRPFLFTVREDKSGVILFMGQVLDPSKH

SEQ ID NO: 97364 - protein, 203 aa, Arabidopsis thaliana
  peptide (1)..(203): Ceres Seq. ID no. 12737107
MTKKNDFHLLDGTSVKVPFMTNYEDQYLRSYDGFKVLRLPYIEDQRQFSMYIYLPNDKEGLAPLLEKIGSEPSFFDNHIPLHCISVGAFRIPKFKFSFEFNASEVLKDMGLTSPFNNGGGLTEMVDSPSNGDDLYVSSILHKACIEVDEEGTEAAAVSVGVVSCTSFRRNPDFVADRPFLFTVREDKSGVILFMGQVLDPSKH

SEQ ID NO: 97365 - DNA, 660 bp, Arabidopsis thaliana
  misc_feature (1)..(660): Ceres Seq. ID no. 12737110
  misc_feature (1)..(660): Ortholog of  Ceres SEQ ID NO 12620986 as cited in SEQ ID NO 66720
atgtcgatattatacgcgttggtggcgcgtggaacggtggttcttgcggagttaagcactacgtccacgaacgctagcacgatcgcgaagcagatccttgagaagatccctggtaacggcgacagccacgtgtcatactctcaggatcgttacgtcttccacgtaaaacgtactgatggcctcaccgttctttgtatggctgatgaagacgccggaaggaggattccattttcgtttctagaggatattcatcagaggtttgttcggacttatggccgcgcaattcattcggcacaagcttatgctatgaatgatgagttctcaagagttcttaaccaacaaattgagtattactctaatgatcctaatgccgatacgataagtcgaattaagggtgaaatgaatcaggtgagggatgttatgatagagaacattgacaacattcttgatagaggtgaacgtcttgagcttcttgtcgataaaaccgcgaacatgcaagggaataccttccgattcagaaagcaaacacgtcgtttcaacaacacggtgtggtggagaaattgcaagctcacgctactcttaatactagtgttgttggtgatcatatacatcggtgtggcctttgcttgccatggaccaactctaccctcttgcgtttaa

SEQ ID NO: 97366 - protein, 219 aa, Arabidopsis thaliana
  peptide (1)..(219): Ceres Seq. ID no. 12737111
MSILYALVARGTVVLAELSTTSTNASTIAKQILEKIPGNGDSHVSYSQDRYVFHVKRTDGLTVLCMADEDAGRRIPFSFLEDIHQRFVRTYGRAIHSAQAYAMNDEFSRVLNQQIEYYSNDPNADTISRIKGEMNQVRDVMIENIDNILDRGERLELLVDKTANMQGNTFRFRKQTRRFNNTVWWRNCKLTLLLILVLLVIIYIGVAFACHGPTLPSCV

SEQ ID NO: 97367 - protein, 154 aa, Arabidopsis thaliana
  peptide (1)..(154): Ceres Seq. ID no. 12737112
MADEDAGRRIPFSFLEDIHQRFVRTYGRAIHSAQAYAMNDEFSRVLNQQIEYYSNDPNADTISRIKGEMNQVRDVMIENIDNILDRGERLELLVDKTANMQGNTFRFRKQTRRFNNTVWWRNCKLTLLLILVLLVIIYIGVAFACHGPTLPSCV

SEQ ID NO: 97368 - protein, 117 aa, Arabidopsis thaliana
  peptide (1)..(117): Ceres Seq. ID no. 12737113
MNDEFSRVLNQQIEYYSNDPNADTISRIKGEMNQVRDVMIENIDNILDRGERLELLVDKTANMQGNTFRFRKQTRRFNNTVWWRNCKLTLLLILVLLVIIYIGVAFACHGPTLPSCV

SEQ ID NO: 97369 - DNA, 576 bp, Arabidopsis thaliana
  misc_feature (1)..(576): Ceres Seq. ID no. 12737153
  misc_feature (1)..(576): Ortholog of  Ceres SEQ ID NO 14315878 as cited in SEQ ID NO 60086
atgtcgtttgggtctctcgtgcttccatctccaccttcctccttgtctgcaaatgtcaagcatttcaatggctacggtaggcttaatcgtaatctcgtgcgagcttcttcgtccgatgttcccgatttcctctctgccgattggttggagagccgtaggaaacgaccttttggccccagacttgattttagtgcagaagacgctgttcgacatcagcttgatgcattgaagtataatgaccatcctcgtgatgattatggcattgaggtcatgtatcggtttgaaaggtttaggcgtatttttcatcactcgtcttaccgtgtgttgcttggtcacaaggatagaaaacttttaagcagtttgttcgtggaggagagctcccctcatgatatcctctttttcgatatgcagaatcgtttcaagcagaggatctggattcagggaaatcgacctgaagaggaagagatatttgaattcacaatgttccagcgaataggcggttcatgggatggatattggttgacagaaagcttgcttcatgacggagatgtgttttcaggagggatggcttactga

SEQ ID NO: 97370 - protein, 191 aa, Arabidopsis thaliana
  peptide (1)..(191): Ceres Seq. ID no. 12737154
MSFGSLVLPSPPSSLSANVKHFNGYGRLNRNLVRASSSDVPDFLSADWLESRRKRPFGPRLDFSAEDAVRHQLDALKYNDHPRDDYGIEVMYRFERFRRIFHHSSYRVLLGHKDRKLLSSLFVEESSPHDILFFDMQNRFKQRIWIQGNRPEEEEIFEFTMFQRIGGSWDGYWLTESLLHDGDVFSGGMAY

SEQ ID NO: 97371 - protein, 101 aa, Arabidopsis thaliana
  peptide (1)..(101): Ceres Seq. ID no. 12737155
MYRFERFRRIFHHSSYRVLLGHKDRKLLSSLFVEESSPHDILFFDMQNRFKQRIWIQGNRPEEEEIFEFTMFQRIGGSWDGYWLTESLLHDGDVFSGGMAY

SEQ ID NO: 97372 - DNA, 750 bp, Arabidopsis thaliana
  misc_feature (1)..(750): Ceres Seq. ID no. 12737181
  misc_feature (1)..(750): Ortholog of  Ceres SEQ ID NO 13655598 as cited in SEQ ID NO 64077
  misc_feature (1)..(750): Ortholog of  Ceres SEQ ID NO 15180408 as cited in SEQ ID NO 0
atgaagaagatcgagttagggcaccatagcgaagcggctaaaccggactgcattaaagccctcattgtcgaattcatcactacctttctctttgtcttcgctggtgttggatctgccatggccactgacagtttagtcggaaacacattggtgggacttttcgcggtcgcggtggctcatgcattcgttgtggcggtaatgatatctgcgggccatatctccggtggccacctcaaccccgccgtcaccctcggtctactcttgggtggccacatcagcgtattccgtgcattcctttattggattgatcaattgttggcctcctccgcagcatgcttcctcctcagttacctcaccggaggaatgggaactccggttcacacattggcaagtggagtgagttacacgcaagggatcatatgggagatcatcttaacattttcacttctcttcactgtctacgccactattgtggatccgaagaaaggatcccttgatgggttcggcccacttctcacaggatttgtcgttggagccaacatccttgcaggaggtgccttttctggcgcctccatgaaccccgcccggtcttttggtcccgctttggtctctggaaactggactgaccattgggtatattgggttggaccgttgatcggtggtggactcgccggtttcatctacgagaatgtcctcattgaccgtccacatgtcccagtcgctgacgacgagcaaccattgttgaattaa

SEQ ID NO: 97373 - protein, 249 aa, Arabidopsis thaliana
  peptide (1)..(249): Ceres Seq. ID no. 12737182
MKKIELGHHSEAAKPDCIKALIVEFITTFLFVFAGVGSAMATDSLVGNTLVGLFAVAVAHAFVVAVMISAGHISGGHLNPAVTLGLLLGGHISVFRAFLYWIDQLLASSAACFLLSYLTGGMGTPVHTLASGVSYTQGIIWEIILTFSLLFTVYATIVDPKKGSLDGFGPLLTGFVVGANILAGGAFSGASMNPARSFGPALVSGNWTDHWVYWVGPLIGGGLAGFIYENVLIDRPHVPVADDEQPLLN

SEQ ID NO: 97374 - protein, 210 aa, Arabidopsis thaliana
  peptide (1)..(210): Ceres Seq. ID no. 12737183
MATDSLVGNTLVGLFAVAVAHAFVVAVMISAGHISGGHLNPAVTLGLLLGGHISVFRAFLYWIDQLLASSAACFLLSYLTGGMGTPVHTLASGVSYTQGIIWEIILTFSLLFTVYATIVDPKKGSLDGFGPLLTGFVVGANILAGGAFSGASMNPARSFGPALVSGNWTDHWVYWVGPLIGGGLAGFIYENVLIDRPHVPVADDEQPLLN

SEQ ID NO: 97375 - protein, 183 aa, Arabidopsis thaliana
  peptide (1)..(183): Ceres Seq. ID no. 12737184
MISAGHISGGHLNPAVTLGLLLGGHISVFRAFLYWIDQLLASSAACFLLSYLTGGMGTPVHTLASGVSYTQGIIWEIILTFSLLFTVYATIVDPKKGSLDGFGPLLTGFVVGANILAGGAFSGASMNPARSFGPALVSGNWTDHWVYWVGPLIGGGLAGFIYENVLIDRPHVPVADDEQPLLN

SEQ ID NO: 97376 - DNA, 1616 bp, Arabidopsis thaliana
  misc_feature (1)..(1616): Ceres Seq. ID no. 12737192
  misc_feature (1)..(1616): Ortholog of  Ceres SEQ ID NO 15170670 as cited in SEQ ID NO 68165
acctaacaatgaccaccgtcgtttcctttctcgccctcttcctctttctagtcgccgccgtttctggtgacgtcatcaaacttccttctctagcttctaagttcttccgcccaactgaaaacgacgatgattctactaagtgggctgttctcgtcgccggatccagcggatactggaattatcgtcatcaggcggatgtttgtcatgcttatcagcttttgaagaaaggtggagtgaaagaggagaatattgtggtgtttatgtatgatgacattgcgaagaacgaggagaatccaagacctggagttattatcaatagtcctaatggagaggatgtctataatggagttcccaaggattacactggagatgaagttaatgttgataacttattagctgtgattcttggaaacaaaacggctcttaaaggaggaagtgggaaagttgtagatagcggtccaaacgatcatatctttatatactatagtgatcacggtggtccgggagtgctcgggatgccaacttctccaaacctatatgcaaatgatctcaatgatgtcttgaagaaaaaatatgcttcaggaacatataagagcttggtgttttatttggaggcttgtgaatctggaagtatttttgaaggtcttttaccagagggtttaaatatttacgcgacaactgcatcgaatgcagaagaaagtagctggggtacttactgtcctggagaggatcctagtcctccttctgagtatgagacctgtttgggtgacttatacagtgttgcttggatagaagatagtgaaaaacacaatttacaaacagagactttgcacgagcaatatgaattggtgaaaaagagaactgcaggttctggtaagtcttatggttctcatgttatggaatttggagatataggactcagcaaggagaagcttgtcctttttatgggtacaaatccagcagatgaaaacttcacctttgtgaatgagaattcaataaggccgccttcaagagttacaaaccagcgtgatgcggatcttgtccatttctggcataagtatcaaaaggcaccggaagggtcagcaagaaaagttgaagctcagaagcaagtccttgaagcaatgtctcacagacttcatgttgataatagcattctgttgattgggattcttttgtttggtttggaaggtcatgcggtgttaaataaagtccggccttctggagaaccgcttgttgacgattgggactgccttaaatctctggtgagagctttcgagaggcactgtggatcgttgtctcagtacggaataaagcacatgaggtcgattgcaaacatgtgcaacgcagggattcagatgaggcaaatggaggaggcagcaatgcaggcttgtcccaccatccctaccagtccttggagctctcttgaccgtggattcagtgcttgatcttcgtctccgccctatattaatcgatgtccattaatatcttactaccaattatactccttcctatgtagacaagatgttgtaaatatgggatgcttaagttcttgatgtcacagacaaaagaaacagtgattgtaagtagttgtttcaaataatctttgttgttcaagt

SEQ ID NO: 97377 - protein, 480 aa, Arabidopsis thaliana
  peptide (1)..(480): Ceres Seq. ID no. 12737193
LTMTTVVSFLALFLFLVAAVSGDVIKLPSLASKFFRPTENDDDSTKWAVLVAGSSGYWNYRHQADVCHAYQLLKKGGVKEENIVVFMYDDIAKNEENPRPGVIINSPNGEDVYNGVPKDYTGDEVNVDNLLAVILGNKTALKGGSGKVVDSGPNDHIFIYYSDHGGPGVLGMPTSPNLYANDLNDVLKKKYASGTYKSLVFYLEACESGSIFEGLLPEGLNIYATTASNAEESSWGTYCPGEDPSPPSEYETCLGDLYSVAWIEDSEKHNLQTETLHEQYELVKKRTAGSGKSYGSHVMEFGDIGLSKEKLVLFMGTNPADENFTFVNENSIRPPSRVTNQRDADLVHFWHKYQKAPEGSARKVEAQKQVLEAMSHRLHVDNSILLIGILLFGLEGHAVLNKVRPSGEPLVDDWDCLKSLVRAFERHCGSLSQYGIKHMRSIANMCNAGIQMRQMEEAAMQACPTIPTSPWSSLDRGFSA

SEQ ID NO: 97378 - protein, 478 aa, Arabidopsis thaliana
  peptide (1)..(478): Ceres Seq. ID no. 12737194
MTTVVSFLALFLFLVAAVSGDVIKLPSLASKFFRPTENDDDSTKWAVLVAGSSGYWNYRHQADVCHAYQLLKKGGVKEENIVVFMYDDIAKNEENPRPGVIINSPNGEDVYNGVPKDYTGDEVNVDNLLAVILGNKTALKGGSGKVVDSGPNDHIFIYYSDHGGPGVLGMPTSPNLYANDLNDVLKKKYASGTYKSLVFYLEACESGSIFEGLLPEGLNIYATTASNAEESSWGTYCPGEDPSPPSEYETCLGDLYSVAWIEDSEKHNLQTETLHEQYELVKKRTAGSGKSYGSHVMEFGDIGLSKEKLVLFMGTNPADENFTFVNENSIRPPSRVTNQRDADLVHFWHKYQKAPEGSARKVEAQKQVLEAMSHRLHVDNSILLIGILLFGLEGHAVLNKVRPSGEPLVDDWDCLKSLVRAFERHCGSLSQYGIKHMRSIANMCNAGIQMRQMEEAAMQACPTIPTSPWSSLDRGFSA

SEQ ID NO: 97379 - protein, 394 aa, Arabidopsis thaliana
  peptide (1)..(394): Ceres Seq. ID no. 12737195
MYDDIAKNEENPRPGVIINSPNGEDVYNGVPKDYTGDEVNVDNLLAVILGNKTALKGGSGKVVDSGPNDHIFIYYSDHGGPGVLGMPTSPNLYANDLNDVLKKKYASGTYKSLVFYLEACESGSIFEGLLPEGLNIYATTASNAEESSWGTYCPGEDPSPPSEYETCLGDLYSVAWIEDSEKHNLQTETLHEQYELVKKRTAGSGKSYGSHVMEFGDIGLSKEKLVLFMGTNPADENFTFVNENSIRPPSRVTNQRDADLVHFWHKYQKAPEGSARKVEAQKQVLEAMSHRLHVDNSILLIGILLFGLEGHAVLNKVRPSGEPLVDDWDCLKSLVRAFERHCGSLSQYGIKHMRSIANMCNAGIQMRQMEEAAMQACPTIPTSPWSSLDRGFSA

SEQ ID NO: 97380 - DNA, 1440 bp, Arabidopsis thaliana
  misc_feature (1)..(1440): Ceres Seq. ID no. 12737200
  misc_feature (1)..(1440): Ortholog of  Ceres SEQ ID NO 15171693 as cited in SEQ ID NO 60124
atgaactcggcaagcgtttccggtgaatcctctctctccgatatgattcagacagttcatttttcctctggaaaccctagaatcggcgagactcgcggtgtcatgcatctaatttccgacaatgctgtttcgtcatcttcttcttcctcctcctcgaatctccctattggaaggaaccctctcgtttgcgttcttggggtgcccaaccacatgacatatgcagatttttgccagttctgcggctccttcattcagcacatactggatatgcgaaccgtcaggaatgatgacattgaaaatagatacagcattttgataaggtttgatagtcaggaatctaccgatacattcttccagcatttcagagggaaacagttcaactctctggacgaagatgtctgtcgcctgctttttgctcttgatgttcagtttaccggttatagtggatccattgaccatacacagccttctgctgctggcccaatagagcaacctacttgcccagtgtgtcttgagagattggaccaagacacaggtggcattctcacaaccatgtgcaatcattccttccattgctcatgtatttctaattggccagattcttcttgcccagtttgtcgatattgccaacagcaacctgaaaattcagtatgttgtgtttgccaaacaacggagaatctctggatgtgtgttatctgtggggttgttggctgcggaaggtacaaggaaggacatgccagaaggcactgggaggagacagagcattgctattcacttgagcttgaaacacaacgtgtttgggattatgctggtgacaattatgttcaccggcttattcaatccaaaactgatggcaagctagtggagttgaattctcatggaagtctgagcaaggatggttgtggaagctgtgaatattctgacagtggaatgactgatgctctcctgaacagcaaagtggacatgatcattagtgagtacaacgaacttctccaggcacaactagagaatcaaaaacaatattttgaaaagttgctacaaaatgtcaaagaggaaacggaacagaaaatctcagaagctgcgagcaaggcaataagccagagactgcagaagctgcaaaccaggtttgacagatgtgtcaaagagaagcaatttcttgaagatttgaacgaaaatcttgtgaaaaataaggacgtatggagcaccaagattacagaaatgaaagaaagggagaagaaggcagttcgggcaaaggatgaaaagattcagggcttagaagaacagcttggaaacctaatggcccaaatggatggtgagagtgaagtctcagagacgaaagaggtccaggacgccactgtctcgaccaccaatacctcttcttctggggcagggaatgttatacatgcaaataaaaagaagagtaacagaagaaagggttag

SEQ ID NO: 97381 - protein, 479 aa, Arabidopsis thaliana
  peptide (1)..(479): Ceres Seq. ID no. 12737201
MNSASVSGESSLSDMIQTVHFSSGNPRIGETRGVMHLISDNAVSSSSSSSSSNLPIGRNPLVCVLGVPNHMTYADFCQFCGSFIQHILDMRTVRNDDIENRYSILIRFDSQESTDTFFQHFRGKQFNSLDEDVCRLLFALDVQFTGYSGSIDHTQPSAAGPIEQPTCPVCLERLDQDTGGILTTMCNHSFHCSCISNWPDSSCPVCRYCQQQPENSVCCVCQTTENLWMCVICGVVGCGRYKEGHARRHWEETEHCYSLELETQRVWDYAGDNYVHRLIQSKTDGKLVELNSHGSLSKDGCGSCEYSDSGMTDALLNSKVDMIISEYNELLQAQLENQKQYFEKLLQNVKEETEQKISEAASKAISQRLQKLQTRFDRCVKEKQFLEDLNENLVKNKDVWSTKITEMKEREKKAVRAKDEKIQGLEEQLGNLMAQMDGESEVSETKEVQDATVSTTNTSSSGAGNVIHANKKKSNRRKG

SEQ ID NO: 97382 - protein, 465 aa, Arabidopsis thaliana
  peptide (1)..(465): Ceres Seq. ID no. 12737202
MIQTVHFSSGNPRIGETRGVMHLISDNAVSSSSSSSSSNLPIGRNPLVCVLGVPNHMTYADFCQFCGSFIQHILDMRTVRNDDIENRYSILIRFDSQESTDTFFQHFRGKQFNSLDEDVCRLLFALDVQFTGYSGSIDHTQPSAAGPIEQPTCPVCLERLDQDTGGILTTMCNHSFHCSCISNWPDSSCPVCRYCQQQPENSVCCVCQTTENLWMCVICGVVGCGRYKEGHARRHWEETEHCYSLELETQRVWDYAGDNYVHRLIQSKTDGKLVELNSHGSLSKDGCGSCEYSDSGMTDALLNSKVDMIISEYNELLQAQLENQKQYFEKLLQNVKEETEQKISEAASKAISQRLQKLQTRFDRCVKEKQFLEDLNENLVKNKDVWSTKITEMKEREKKAVRAKDEKIQGLEEQLGNLMAQMDGESEVSETKEVQDATVSTTNTSSSGAGNVIHANKKKSNRRKG

SEQ ID NO: 97383 - protein, 445 aa, Arabidopsis thaliana
  peptide (1)..(445): Ceres Seq. ID no. 12737203
MHLISDNAVSSSSSSSSSNLPIGRNPLVCVLGVPNHMTYADFCQFCGSFIQHILDMRTVRNDDIENRYSILIRFDSQESTDTFFQHFRGKQFNSLDEDVCRLLFALDVQFTGYSGSIDHTQPSAAGPIEQPTCPVCLERLDQDTGGILTTMCNHSFHCSCISNWPDSSCPVCRYCQQQPENSVCCVCQTTENLWMCVICGVVGCGRYKEGHARRHWEETEHCYSLELETQRVWDYAGDNYVHRLIQSKTDGKLVELNSHGSLSKDGCGSCEYSDSGMTDALLNSKVDMIISEYNELLQAQLENQKQYFEKLLQNVKEETEQKISEAASKAISQRLQKLQTRFDRCVKEKQFLEDLNENLVKNKDVWSTKITEMKEREKKAVRAKDEKIQGLEEQLGNLMAQMDGESEVSETKEVQDATVSTTNTSSSGAGNVIHANKKKSNRRKG

SEQ ID NO: 97384 - DNA, 573 bp, Arabidopsis thaliana
  misc_feature (1)..(573): Ceres Seq. ID no. 12737215
  misc_feature (1)..(573): Ortholog of  Ceres SEQ ID NO 13599448 as cited in SEQ ID NO 521
  misc_feature (1)..(573): Ortholog of  Ceres SEQ ID NO 14311918 as cited in SEQ ID NO 51684
  misc_feature (1)..(573): Ortholog of  Ceres SEQ ID NO 13596408 as cited in SEQ ID NO 62028
atgagctcatccccggccgtgaaaggcctaaccgatgaagagcagaaaaccctcgaaccggttatcaaaacgtaccaccagttcgaaccagacccaaccacgtgcacttctctcataacccaacgcatccacgctccggcctccgtggtttggcctcttatccgccgcttcgacaaccccgaacgctacaaacactttgtaaaaaggtgccgtctcatctccggtgatggtgacgtcggaagcgtcagagaagtgaccgtaatctccggcctcccagcctcaaccagtaccgagcggcttgagttcgtcgatgacgaccaccgtgttctaagcttcagggtcgtcggcggagagcaccgactcaagaactacaaatcagtgacgtcggtcaatgagttcttgaatcaagattccggcaaggtttacacggtggttcttgaatcttacaccgttgatattcccgagggaaacacagaggaagacactaaaatgtttgtggacactgtcgtcaaactcaaccttcagaaactcggagttgccgccacatctgcacctatgcatgatgatgaataa

SEQ ID NO: 97385 - protein, 190 aa, Arabidopsis thaliana
  peptide (1)..(190): Ceres Seq. ID no. 12737216
MSSSPAVKGLTDEEQKTLEPVIKTYHQFEPDPTTCTSLITQRIHAPASVVWPLIRRFDNPERYKHFVKRCRLISGDGDVGSVREVTVISGLPASTSTERLEFVDDDHRVLSFRVVGGEHRLKNYKSVTSVNEFLNQDSGKVYTVVLESYTVDIPEGNTEEDTKMFVDTVVKLNLQKLGVAATSAPMHDDE

SEQ ID NO: 97386 - DNA, 1275 bp, Arabidopsis thaliana
  misc_feature (1)..(1275): Ceres Seq. ID no. 12737233
  misc_feature (1)..(1275): Ortholog of  Ceres SEQ ID NO 13594213 as cited in SEQ ID NO 57038
  misc_feature (1)..(1275): Ortholog of  Ceres SEQ ID NO 13654989 as cited in SEQ ID NO 63117
  misc_feature (1)..(1275): Ortholog of  Ceres SEQ ID NO 13584744 as cited in SEQ ID NO 69137
atggcagtgttcaagaagaagaaaacatcattgacatctctgttcttggggtgttacaaggcaaagaacgcaagcaaatacgaaggaggggagaaggctgtaatgaaaataagaacttgtccagcgttcaagaggctgtctttatcggacataagcgatccaagctcgcccatgtcggttatggatgatctctctcactccttcacatcgcagaagcttcgtttgttcacgttgtctgagctgagagtgattacgcataatttctctagaagtaacatgttgggggaaggagggtttgggccggtttacaaagggtttattgatgataaggttaaaccgggtatcgaagcccaaccggttgctgtaaaggctcttgatcttcatggccatcaaggccatagagaatggctggcggagatattatttttgggacaactaagtaacaaacatcttgtgaagctgatagggttttgttgtgaagaagagcaaagagttcttgtttatgagtacatgcctcgaggtagcttggagaatcagctctttcgaagaaatagcttagcaatggcttggggaataaggatgaagatagctctcggagccgccaaaggtttagcttttctccatgaagcagagaaacctgtcatctacagagactttaaaacctctaacatattgttagactccgactataacgccaaattatctgacttcggtctagccaaagatggacctgaaggcgaacatacgcatgtaactacccgagtgatgggaacacaaggttatgctgcgcccgaatatatcatgactggtcatttgacgacgatgaatgatgtatacagttttggagtagttttgttagagctgataaccggaaaacggtcaatggacaatacccgaacacggagggaacaaagcctagtggaatgggcgcggcctatgttaagggaccaaagaaagttagagaggataattgacccgaggctcgcgaaccagcacaaaacagaagcggctcaggtagctgcttccctagcatacaagtgtctaagccaacatcctaagtatagacctacaatgtgtgaggtggttaaggtcttagagtctatccaagaagttgatattaggaagcatgatggcaataacaacaaagaaggaaagaagtttgttgatataaataagtttaggcatcaccgtaaaggcaaaagacgtgtgaacatcgcttattcagattctctcgtttacaaggaatccaaggcaaagcaaaacgatggcatttga

SEQ ID NO: 97387 - protein, 424 aa, Arabidopsis thaliana
  peptide (1)..(424): Ceres Seq. ID no. 12737234
MAVFKKKKTSLTSLFLGCYKAKNASKYEGGEKAVMKIRTCPAFKRLSLSDISDPSSPMSVMDDLSHSFTSQKLRLFTLSELRVITHNFSRSNMLGEGGFGPVYKGFIDDKVKPGIEAQPVAVKALDLHGHQGHREWLAEILFLGQLSNKHLVKLIGFCCEEEQRVLVYEYMPRGSLENQLFRRNSLAMAWGIRMKIALGAAKGLAFLHEAEKPVIYRDFKTSNILLDSDYNAKLSDFGLAKDGPEGEHTHVTTRVMGTQGYAAPEYIMTGHLTTMNDVYSFGVVLLELITGKRSMDNTRTRREQSLVEWARPMLRDQRKLERIIDPRLANQHKTEAAQVAASLAYKCLSQHPKYRPTMCEVVKVLESIQEVDIRKHDGNNNKEGKKFVDINKFRHHRKGKRRVNIAYSDSLVYKESKAKQNDGI

SEQ ID NO: 97388 - protein, 390 aa, Arabidopsis thaliana
  peptide (1)..(390): Ceres Seq. ID no. 12737235
MKIRTCPAFKRLSLSDISDPSSPMSVMDDLSHSFTSQKLRLFTLSELRVITHNFSRSNMLGEGGFGPVYKGFIDDKVKPGIEAQPVAVKALDLHGHQGHREWLAEILFLGQLSNKHLVKLIGFCCEEEQRVLVYEYMPRGSLENQLFRRNSLAMAWGIRMKIALGAAKGLAFLHEAEKPVIYRDFKTSNILLDSDYNAKLSDFGLAKDGPEGEHTHVTTRVMGTQGYAAPEYIMTGHLTTMNDVYSFGVVLLELITGKRSMDNTRTRREQSLVEWARPMLRDQRKLERIIDPRLANQHKTEAAQVAASLAYKCLSQHPKYRPTMCEVVKVLESIQEVDIRKHDGNNNKEGKKFVDINKFRHHRKGKRRVNIAYSDSLVYKESKAKQNDGI

SEQ ID NO: 97389 - protein, 367 aa, Arabidopsis thaliana
  peptide (1)..(367): Ceres Seq. ID no. 12737236
MSVMDDLSHSFTSQKLRLFTLSELRVITHNFSRSNMLGEGGFGPVYKGFIDDKVKPGIEAQPVAVKALDLHGHQGHREWLAEILFLGQLSNKHLVKLIGFCCEEEQRVLVYEYMPRGSLENQLFRRNSLAMAWGIRMKIALGAAKGLAFLHEAEKPVIYRDFKTSNILLDSDYNAKLSDFGLAKDGPEGEHTHVTTRVMGTQGYAAPEYIMTGHLTTMNDVYSFGVVLLELITGKRSMDNTRTRREQSLVEWARPMLRDQRKLERIIDPRLANQHKTEAAQVAASLAYKCLSQHPKYRPTMCEVVKVLESIQEVDIRKHDGNNNKEGKKFVDINKFRHHRKGKRRVNIAYSDSLVYKESKAKQNDGI

SEQ ID NO: 97390 - DNA, 990 bp, Arabidopsis thaliana
  misc_feature (1)..(990): Ceres Seq. ID no. 12737275
  misc_feature (1)..(990): Ortholog of  Ceres SEQ ID NO 14301430 as cited in SEQ ID NO 56553
  misc_feature (1)..(990): Ortholog of  Ceres SEQ ID NO 13596969 as cited in SEQ ID NO 63375
  misc_feature (1)..(990): Ortholog of  Ceres SEQ ID NO 13597519 as cited in SEQ ID NO 64759
  misc_feature (1)..(990): Ortholog of  Ceres SEQ ID NO 13597870 as cited in SEQ ID NO 64982
  misc_feature (1)..(990): Ortholog of  Ceres SEQ ID NO 13595926 as cited in SEQ ID NO 67778
  misc_feature (1)..(990): Ortholog of  Ceres SEQ ID NO 13662323 as cited in SEQ ID NO 68305
  misc_feature (1)..(990): Ortholog of  Ceres SEQ ID NO 12567001 as cited in SEQ ID NO 0
atggcgttgcagtttttttcatgcaaaccaaaatatacattcctctcctctcttcttctacttttgcttctttcttcttcagtagctgagctctctttcaacttctacgccggttcttgtcctggagctgagttaatcgtcagaaacaccgttagatctgcttcttcctctgatccatcagtccttgggaagctcctacgtctcatcttccatgactgcttcgtccagggttgtgatggctcagtgttgattcgaggaaacggtacagagcgaagcgaccctgggaatgcgtctctaggaggattcgctgtgatagaaagcgtcaaaaatatcctcgaaatcttttgtcccggcacagtctcttgtgctgatatacttgttcttgccgcaagagatgcagtagaagctctcggaggaccggtagttccgataccgacagggaggagagacgggagagtctcaatggcagcaaatgtcagaccaaacatcatagataccgatttcacagttgataagatgatcaatatcttttcctctaaaggcttatctgttcatgatctagttgtcctctcaggagcgcacactattggagctgcgcattgtaacacgttcaacagcaggtttaagcttgatccaaaaggcaacttagaactaatagacgcgtctctcgataactcctatgcgcaaacacttgtaaacaagtgttcatcgtcactagatccaacgaccacggtggttgataacgatccagagacatcgtcgacgttcgataatcagtactacaagaatctgttggctcacaagggtttgtttcaaacggattcagctctcatggaagatgatcggacgaggaagattgttgagattcttgcgaatgatcaggagagttttttcgatagatggactgagtcttttttgaagatgagtttgatgggagtgagagttggtgaagaaggtgagattagacgttcttgttctgctgttaattaa

SEQ ID NO: 97391 - protein, 329 aa, Arabidopsis thaliana
  peptide (1)..(329): Ceres Seq. ID no. 12737276
MALQFFSCKPKYTFLSSLLLLLLLSSSVAELSFNFYAGSCPGAELIVRNTVRSASSSDPSVLGKLLRLIFHDCFVQGCDGSVLIRGNGTERSDPGNASLGGFAVIESVKNILEIFCPGTVSCADILVLAARDAVEALGGPVVPIPTGRRDGRVSMAANVRPNIIDTDFTVDKMINIFSSKGLSVHDLVVLSGAHTIGAAHCNTFNSRFKLDPKGNLELIDASLDNSYAQTLVNKCSSSLDPTTTVVDNDPETSSTFDNQYYKNLLAHKGLFQTDSALMEDDRTRKIVEILANDQESFFDRWTESFLKMSLMGVRVGEEGEIRRSCSAVN

SEQ ID NO: 97392 - protein, 175 aa, Arabidopsis thaliana
  peptide (1)..(175): Ceres Seq. ID no. 12737277
MAANVRPNIIDTDFTVDKMINIFSSKGLSVHDLVVLSGAHTIGAAHCNTFNSRFKLDPKGNLELIDASLDNSYAQTLVNKCSSSLDPTTTVVDNDPETSSTFDNQYYKNLLAHKGLFQTDSALMEDDRTRKIVEILANDQESFFDRWTESFLKMSLMGVRVGEEGEIRRSCSAVN

SEQ ID NO: 97393 - DNA, 1494 bp, Arabidopsis thaliana
  misc_feature (1)..(1494): Ceres Seq. ID no. 12737278
  misc_feature (1)..(1494): Ortholog of  Ceres SEQ ID NO 13598401 as cited in SEQ ID NO 62402
atggcgagcgaagaaaacaacgaccttgaaaatcttcttgacattcagctaattgaacaaaaagaatctctttcctccattgacgaagccctactctctgacccatctaatcccgaactcctctcggtccatgaagaacttctcagtgcaatcaaggaggtagaggaagggcttttgcatttaaaacgagctcggttattggaggaagctgatatagtgttgaatggtctaaatcatgatgctggagttaaacctgagcatctggagccagagaaaactgaagagaaaaaggatttggatggatcgaaatgtcggtttcgacatactgatggtcgttggtataatggtcgtattattggatttgaaggctctgattctgctaagatctctttccttacacccacatctgagagtatgatgatttgcaagttttttatgcagcagaggtgtcggtttggcagttcttgtcgttcatcacatggactagatgtgccgatatcttctctgaagaactatgaacagactgagtggaagcaattgatggtaggctctaagatttgggcggtttctggcagtaaatacgatatatggagaaaggctgaacttgaatcatgggatgatgagttacaagtaggcggagttgttttcagagatgataaaagctctgcaaagctaggatctgattctttggcattatcagagtacgctcagatgactgatgatgatggggaagaggaggaggaggaggatgaacaacagagtgcttcagattctgaagattctgtttcaagtgattatgatgaagggtctccacaaggcataggctttctagaaagcacaaatctaccaagaggtgtccaaactgacactgccttatttgctaaatgggagaatcatactagaggaatagcttcgaagatgatggcaagtatgggttaccgtgaagggatgggtcttggcgtctctggccaagggatattaaatccaatcttagtaaaagtacttccagcaaagcggtcactggattatgctcttgagcacattaggaatggagaatgtaaaagcgagaaacaaaagaagaaaaggagcagaggtgggaaaaggaagcgtgggaagaagtttgcagaagcagctaaagcagcgaaacaggaagaggaatcgaagccagatttgtttagcttaatcaatgaacaaatttttcctacccgccatgagaaagtacacagcgagtctgtaaaaaataggcaaaacaaaggtccagtagacaggaaagctttggttgaataccaagatgaagtcagagacttgaagttagaaatgttgaaactagaacagatggtgaacagaaacaagaaagatctagttgtttcagaggctgcgacgagaagattgaaagaagtccgaaaggcattggcaagtacattagcatgtcaagcagctgcctcaaatgctatagtaagcaaagagaatgagaagaaatggctcaagttttag

SEQ ID NO: 97394 - protein, 497 aa, Arabidopsis thaliana
  peptide (1)..(497): Ceres Seq. ID no. 12737279
MASEENNDLENLLDIQLIEQKESLSSIDEALLSDPSNPELLSVHEELLSAIKEVEEGLLHLKRARLLEEADIVLNGLNHDAGVKPEHLEPEKTEEKKDLDGSKCRFRHTDGRWYNGRIIGFEGSDSAKISFLTPTSESMMICKFFMQQRCRFGSSCRSSHGLDVPISSLKNYEQTEWKQLMVGSKIWAVSGSKYDIWRKAELESWDDELQVGGVVFRDDKSSAKLGSDSLALSEYAQMTDDDGEEEEEEDEQQSASDSEDSVSSDYDEGSPQGIGFLESTNLPRGVQTDTALFAKWENHTRGIASKMMASMGYREGMGLGVSGQGILNPILVKVLPAKRSLDYALEHIRNGECKSEKQKKKRSRGGKRKRGKKFAEAAKAAKQEEESKPDLFSLINEQIFPTRHEKVHSESVKNRQNKGPVDRKALVEYQDEVRDLKLEMLKLEQMVNRNKKDLVVSEAATRRLKEVRKALASTLACQAAASNAIVSKENEKKWLKF

SEQ ID NO: 97395 - protein, 359 aa, Arabidopsis thaliana
  peptide (1)..(359): Ceres Seq. ID no. 12737280
MMICKFFMQQRCRFGSSCRSSHGLDVPISSLKNYEQTEWKQLMVGSKIWAVSGSKYDIWRKAELESWDDELQVGGVVFRDDKSSAKLGSDSLALSEYAQMTDDDGEEEEEEDEQQSASDSEDSVSSDYDEGSPQGIGFLESTNLPRGVQTDTALFAKWENHTRGIASKMMASMGYREGMGLGVSGQGILNPILVKVLPAKRSLDYALEHIRNGECKSEKQKKKRSRGGKRKRGKKFAEAAKAAKQEEESKPDLFSLINEQIFPTRHEKVHSESVKNRQNKGPVDRKALVEYQDEVRDLKLEMLKLEQMVNRNKKDLVVSEAATRRLKEVRKALASTLACQAAASNAIVSKENEKKWLKF

SEQ ID NO: 97396 - protein, 358 aa, Arabidopsis thaliana
  peptide (1)..(358): Ceres Seq. ID no. 12737281
MICKFFMQQRCRFGSSCRSSHGLDVPISSLKNYEQTEWKQLMVGSKIWAVSGSKYDIWRKAELESWDDELQVGGVVFRDDKSSAKLGSDSLALSEYAQMTDDDGEEEEEEDEQQSASDSEDSVSSDYDEGSPQGIGFLESTNLPRGVQTDTALFAKWENHTRGIASKMMASMGYREGMGLGVSGQGILNPILVKVLPAKRSLDYALEHIRNGECKSEKQKKKRSRGGKRKRGKKFAEAAKAAKQEEESKPDLFSLINEQIFPTRHEKVHSESVKNRQNKGPVDRKALVEYQDEVRDLKLEMLKLEQMVNRNKKDLVVSEAATRRLKEVRKALASTLACQAAASNAIVSKENEKKWLKF

SEQ ID NO: 97397 - DNA, 935 bp, Arabidopsis thaliana
  misc_feature (1)..(935): Ceres Seq. ID no. 12737324
  misc_feature (1)..(935): Ortholog of  Ceres SEQ ID NO 13595187 as cited in SEQ ID NO 56052
  misc_feature (1)..(935): Ortholog of  Ceres SEQ ID NO 14312239 as cited in SEQ ID NO 59176
  misc_feature (1)..(935): Ortholog of  Ceres SEQ ID NO 14313718 as cited in SEQ ID NO 59559
  misc_feature (1)..(935): Ortholog of  Ceres SEQ ID NO 15169505 as cited in SEQ ID NO 61011
  misc_feature (1)..(935): Ortholog of  Ceres SEQ ID NO 13662053 as cited in SEQ ID NO 61547
  misc_feature (1)..(935): Ortholog of  Ceres SEQ ID NO 13624283 as cited in SEQ ID NO 0
aaccgcacaaacaaaatttcagctcctccatatccatcaagaaagatcaagaatcaagaactaatcaatatcgatcgatccgttaaaaaaaaatggatatgattccccaattgatggaaggctcttcagcttacggaggtgtcacaaacctcaacatcatctcaaacaactcctcctccgtcaccggagccaccggaggtgaagcaacgcaaccactgtcttcctcctcctcaccatcggcgaactcaagccgttacgagaaccagaagaggagagactggaacacgttcggacagtacttaaggaaccatcggccaccgctttcgctttcccgatgcagtggagctcacgtgctcgagttcctccgttacttggaccagttcggtaagacaaaagtccacacgaacatttgtcacttctatggccatcctaatcctccggcaccgtgtccgtgtcctctccgacaagcttggggaagtcttgacgctcttatcggtcgtcttcgagctgcctttgaggaaaacggaggcaagcctgagacgaatccttttggagctcgtgccgttaggctttatctaagggaagttagagatatgcagagtaaagctagaggtgttagctacgagaagaagaagcgaaagcgtcctcttccttcgtcgtcgacttcttcttcctccgccgtagctagccaccagcaatttcaaatgctaccgggtactagttctactactcaattaaagtttgagaagtaagtaattatataattaagagaaatggagtattttatgtaatctgaaatgtgatttggtctctttcttatatgttgattttaattttaggttatgtggttcagttttagttactagtgtatgctggggggaggaaggtagggttttcaattttatttatatctaataaaagagaaattcacatgt

SEQ ID NO: 97398 - protein, 219 aa, Arabidopsis thaliana
  peptide (1)..(219): Ceres Seq. ID no. 12737325
MDMIPQLMEGSSAYGGVTNLNIISNNSSSVTGATGGEATQPLSSSSSPSANSSRYENQKRRDWNTFGQYLRNHRPPLSLSRCSGAHVLEFLRYLDQFGKTKVHTNICHFYGHPNPPAPCPCPLRQAWGSLDALIGRLRAAFEENGGKPETNPFGARAVRLYLREVRDMQSKARGVSYEKKKRKRPLPSSSTSSSSAVASHQQFQMLPGTSSTTQLKFEK

SEQ ID NO: 97399 - protein, 217 aa, Arabidopsis thaliana
  peptide (1)..(217): Ceres Seq. ID no. 12737326
MIPQLMEGSSAYGGVTNLNIISNNSSSVTGATGGEATQPLSSSSSPSANSSRYENQKRRDWNTFGQYLRNHRPPLSLSRCSGAHVLEFLRYLDQFGKTKVHTNICHFYGHPNPPAPCPCPLRQAWGSLDALIGRLRAAFEENGGKPETNPFGARAVRLYLREVRDMQSKARGVSYEKKKRKRPLPSSSTSSSSAVASHQQFQMLPGTSSTTQLKFEK

SEQ ID NO: 97400 - protein, 212 aa, Arabidopsis thaliana
  peptide (1)..(212): Ceres Seq. ID no. 12737327
MEGSSAYGGVTNLNIISNNSSSVTGATGGEATQPLSSSSSPSANSSRYENQKRRDWNTFGQYLRNHRPPLSLSRCSGAHVLEFLRYLDQFGKTKVHTNICHFYGHPNPPAPCPCPLRQAWGSLDALIGRLRAAFEENGGKPETNPFGARAVRLYLREVRDMQSKARGVSYEKKKRKRPLPSSSTSSSSAVASHQQFQMLPGTSSTTQLKFEK

SEQ ID NO: 97401 - DNA, 2048 bp, Arabidopsis thaliana
  misc_feature (1)..(2048): Ceres Seq. ID no. 12737346
  misc_feature (1)..(2048): Ortholog of  Ceres SEQ ID NO 14302419 as cited in SEQ ID NO 66752
atttttgttagcgagaggattttctcgacgcgagctccggcaatgaaaagtttatcgatttctctaatccgtcggcttcatttccacaaaatcagaccaatcccactttcaatccaccttaatgctgcttcttcatcgtcttcgtcctcttctctgatctcgccagcacgcgaaatctccactagctgcagaagaaccaatgatctgatcaagcgtcagttctgggtcaatccatatcggaatttgaatacccatgtcgaggaacctccggagatttcgtcatctgataaagaaaaaatcgatctcgaagaagcgttcgagtcagcgaacaccactgatgaaatggtacgtttgttcaaggagatggagttatcattcgaagggaacgaattaggtttatctgctttgaaattagggctccatctcgatcgtgaaggtgaagatcctgaaaaggttctgtcttacgctgataaagctcttaaatcattcgatggagatggtaataaacctaatcttctcgttgctatggcgtcgcaattaatgggttctgctaattacggtttgaaacgttttagtgatagtttaggttacttgaatagagctaataggattcttgtgaagttagaggcggatggtgattgtgttgtggaagacgttaggcctgttttacacgctgtgcagcttgagcttgctaatgttaagaatgctatgggaaggagagaggaagctattgagaatttgaagaagagtttggagataaaggagatgacttttgatgaagatagtaaagagatgggtgttgcgaatcggagtcttgctgatgcttatgttgcggttttgaattttaatgaggctttgccttatgcgttgaaggcgttggagattcataagaaggagttggggaataattcagctgaggttgcgcaggatcggaggctactcggtgtgatttatagtggtttggagcaacatgacaaggcgttggagcagaaccgattgtctcagagagtgttaaagaattgggggatgaagttggagctgattcgtgcggagattgatgctgctaacatgaaggttgctttgggtaaatacgaggaagcgattgatatattgaagagcgttgttcaacaaactgacaaggacagtgagatgagagctatggtgtttatatcaatgtcgaaagctttggtaaaccaacagaagtttgctgaatcaaagagatgtttggagtttgcttgtgaaatcctcgagaaaaaagaaacagctttgccagttgaagtcgctgaagcatactctgaggtagcaatgcagtacgagtcaatgaacgaatttgaaaccgccatctctttattgcagaaaactttaggtatactagagaagcttcctcaagaacagcactcagaaggaagtgtttctgctaggataggttggttgcttctattctcaggccgagtctcacaagcggttccttacttggaaagtgcagccgagaggttaaaagaaagctttggtgctaaacattttggagttggatatgtatataacaatctcggtgctgcttatttagaactcggaagacctcaatccgctgctcaaatgtttgcagttgctaaagacattatggatgtttcacttggtccaaaccatgtggattccatcgatgcttgccagaatctttctaaagcttacgctggaatgggaaattatagcctcgcagtggaatttcaacagcgagtaatcaatgcttgggataatcatggagatagcgcgaaagacgaaatgaaagaagcgaaaagacttcttgaggatttgcgattgaaggctcgaggaggtgtatcaacgaataagcttctgaataaggctttacctttgcccaagccaagccattcatcttagtgagctttgtgaagtctcagccccaaagaacaatgaaaagaatagtgagatttaatgttttttcttttcaaatgatcgtcgtatactaaactcttgttttgccactgaattatgaagttattctcgaaataatttgtttagctacttcgatc

SEQ ID NO: 97402 - protein, 631 aa, Arabidopsis thaliana
  peptide (1)..(631): Ceres Seq. ID no. 12737347
IFVSERIFSTRAPAMKSLSISLIRRLHFHKIRPIPLSIHLNAASSSSSSSSLISPAREISTSCRRTNDLIKRQFWVNPYRNLNTHVEEPPEISSSDKEKIDLEEAFESANTTDEMVRLFKEMELSFEGNELGLSALKLGLHLDREGEDPEKVLSYADKALKSFDGDGNKPNLLVAMASQLMGSANYGLKRFSDSLGYLNRANRILVKLEADGDCVVEDVRPVLHAVQLELANVKNAMGRREEAIENLKKSLEIKEMTFDEDSKEMGVANRSLADAYVAVLNFNEALPYALKALEIHKKELGNNSAEVAQDRRLLGVIYSGLEQHDKALEQNRLSQRVLKNWGMKLELIRAEIDAANMKVALGKYEEAIDILKSVVQQTDKDSEMRAMVFISMSKALVNQQKFAESKRCLEFACEILEKKETALPVEVAEAYSEVAMQYESMNEFETAISLLQKTLGILEKLPQEQHSEGSVSARIGWLLLFSGRVSQAVPYLESAAERLKESFGAKHFGVGYVYNNLGAAYLELGRPQSAAQMFAVAKDIMDVSLGPNHVDSIDACQNLSKAYAGMGNYSLAVEFQQRVINAWDNHGDSAKDEMKEAKRLLEDLRLKARGGVSTNKLLNKALPLPKPSHSS

SEQ ID NO: 97403 - protein, 617 aa, Arabidopsis thaliana
  peptide (1)..(617): Ceres Seq. ID no. 12737348
MKSLSISLIRRLHFHKIRPIPLSIHLNAASSSSSSSSLISPAREISTSCRRTNDLIKRQFWVNPYRNLNTHVEEPPEISSSDKEKIDLEEAFESANTTDEMVRLFKEMELSFEGNELGLSALKLGLHLDREGEDPEKVLSYADKALKSFDGDGNKPNLLVAMASQLMGSANYGLKRFSDSLGYLNRANRILVKLEADGDCVVEDVRPVLHAVQLELANVKNAMGRREEAIENLKKSLEIKEMTFDEDSKEMGVANRSLADAYVAVLNFNEALPYALKALEIHKKELGNNSAEVAQDRRLLGVIYSGLEQHDKALEQNRLSQRVLKNWGMKLELIRAEIDAANMKVALGKYEEAIDILKSVVQQTDKDSEMRAMVFISMSKALVNQQKFAESKRCLEFACEILEKKETALPVEVAEAYSEVAMQYESMNEFETAISLLQKTLGILEKLPQEQHSEGSVSARIGWLLLFSGRVSQAVPYLESAAERLKESFGAKHFGVGYVYNNLGAAYLELGRPQSAAQMFAVAKDIMDVSLGPNHVDSIDACQNLSKAYAGMGNYSLAVEFQQRVINAWDNHGDSAKDEMKEAKRLLEDLRLKARGGVSTNKLLNKALPLPKPSHSS

SEQ ID NO: 97404 - protein, 517 aa, Arabidopsis thaliana
  peptide (1)..(517): Ceres Seq. ID no. 12737349
MVRLFKEMELSFEGNELGLSALKLGLHLDREGEDPEKVLSYADKALKSFDGDGNKPNLLVAMASQLMGSANYGLKRFSDSLGYLNRANRILVKLEADGDCVVEDVRPVLHAVQLELANVKNAMGRREEAIENLKKSLEIKEMTFDEDSKEMGVANRSLADAYVAVLNFNEALPYALKALEIHKKELGNNSAEVAQDRRLLGVIYSGLEQHDKALEQNRLSQRVLKNWGMKLELIRAEIDAANMKVALGKYEEAIDILKSVVQQTDKDSEMRAMVFISMSKALVNQQKFAESKRCLEFACEILEKKETALPVEVAEAYSEVAMQYESMNEFETAISLLQKTLGILEKLPQEQHSEGSVSARIGWLLLFSGRVSQAVPYLESAAERLKESFGAKHFGVGYVYNNLGAAYLELGRPQSAAQMFAVAKDIMDVSLGPNHVDSIDACQNLSKAYAGMGNYSLAVEFQQRVINAWDNHGDSAKDEMKEAKRLLEDLRLKARGGVSTNKLLNKALPLPKPSHSS

SEQ ID NO: 97405 - DNA, 660 bp, Arabidopsis thaliana
  misc_feature (1)..(660): Ceres Seq. ID no. 12737376
  misc_feature (1)..(660): Ortholog of  Ceres SEQ ID NO 13593955 as cited in SEQ ID NO 54278
  misc_feature (1)..(660): Ortholog of  Ceres SEQ ID NO 13597380 as cited in SEQ ID NO 64054
atgttcaagagttacattgctcgtctcaaaggtatcgtgggagacaagaaagcgatggagatcataaacaatgctttcgtggttgtgagtgcagggcctaatgatttcattttgaactattacgatattccctcaaggcgtctcgagtatcctttcatttctggttaccaagattttattcttaagaggcttgaaaatttcgtgcgggagctttacagtttaggtgtccggaatgttttggttggaggtttaccgccaatggggtgtttaccgatccatatgactgctaaattccgcaacatttttagattctgcttggaacaccataacaaagactctgttttgtacaatgagaaacttcagaagctcttgccccaaatcgaagcatctcttccaggaagcaaattcctttacgccgatgtctataatcctatgatggagatgatccaaaaccctagcaaatacgggttcaaagagacgaagagaggatgttgtggaacagggttcttggagacgagcttcatgtgtaatgtcttttctcctgtgtgtcaaaatcggtcggagtttatgttctttgactcgattcatccatcggaagctacctataatgtcataggcaatcgtctggatcctctgattcgtgggaagtttcaggcttaa

SEQ ID NO: 97406 - protein, 219 aa, Arabidopsis thaliana; identical to SEQ ID NO: 78385
  peptide (1)..(219): Ceres Seq. ID no. 12737377

SEQ ID NO: 97407 - protein, 201 aa, Arabidopsis thaliana
  peptide (1)..(201): Ceres Seq. ID no. 12737378
MEIINNAFVVVSAGPNDFILNYYDIPSRRLEYPFISGYQDFILKRLENFVRELYSLGVRNVLVGGLPPMGCLPIHMTAKFRNIFRFCLEHHNKDSVLYNEKLQKLLPQIEASLPGSKFLYADVYNPMMEMIQNPSKYGFKETKRGCCGTGFLETSFMCNVFSPVCQNRSEFMFFDSIHPSEATYNVIGNRLDPLIRGKFQA

SEQ ID NO: 97408 - protein, 133 aa, Arabidopsis thaliana
  peptide (1)..(133): Ceres Seq. ID no. 12737379
MGCLPIHMTAKFRNIFRFCLEHHNKDSVLYNEKLQKLLPQIEASLPGSKFLYADVYNPMMEMIQNPSKYGFKETKRGCCGTGFLETSFMCNVFSPVCQNRSEFMFFDSIHPSEATYNVIGNRLDPLIRGKFQA

SEQ ID NO: 97409 - DNA, 768 bp, Arabidopsis thaliana
  misc_feature (1)..(768): Ceres Seq. ID no. 12737380
  misc_feature (1)..(768): Ortholog of  Ceres SEQ ID NO 13661768 as cited in SEQ ID NO 61427
atgttttcttcctctgtatccatctctatcttggtcgtggtggccatgcaattctcttttatccacaatgttttgtccctaaatcagaccaattcgtatctgcaacacatatgcatcaacagtgaaggaaaatacaaggcaaagaattcatacgagagcagactcaaagatcatctcgacagtatgtctaacattctagactacggtttcatccacggtgttggtggtgcggattctagtacctactacatcaaggcccaatgtcggggagatgcctccgaatccaagtgccgctcttgcctctttaccgccttctctgggattcttaggagatgtccgaacaacagagggagaataatatggtacgacaactgttttctctacatttccgagatatatacctacgagaagattgatttcaagcactatttgtatttgcacaatgccaaagatgtgagcggcaataaaaagttgttcaacaagaacacaaaggctctcctagataagctcaaggagaaagcaattcgtaaagaacaagagccttacacaagagactacatgtatgcagcgggggaggaaagtctcgggacgacgaaattgtatgggatgatgcagtgtacacaagacttatcagttaaaaattgcagtgtgtgtttggattcgattattgcaaagcttcccagatgctgcaacggtaaacaaggaggaagagttttgaatccgagttgtacttttaggtacgagctctatccttttgtaaaaccgtaa

SEQ ID NO: 97410 - protein, 255 aa, Arabidopsis thaliana
  peptide (1)..(255): Ceres Seq. ID no. 12737381
MFSSSVSISILVVVAMQFSFIHNVLSLNQTNSYLQHICINSEGKYKAKNSYESRLKDHLDSMSNILDYGFIHGVGGADSSTYYIKAQCRGDASESKCRSCLFTAFSGILRRCPNNRGRIIWYDNCFLYISEIYTYEKIDFKHYLYLHNAKDVSGNKKLFNKNTKALLDKLKEKAIRKEQEPYTRDYMYAAGEESLGTTKLYGMMQCTQDLSVKNCSVCLDSIIAKLPRCCNGKQGGRVLNPSCTFRYELYPFVKP

SEQ ID NO: 97411 - protein, 240 aa, Arabidopsis thaliana
  peptide (1)..(240): Ceres Seq. ID no. 12737382
MQFSFIHNVLSLNQTNSYLQHICINSEGKYKAKNSYESRLKDHLDSMSNILDYGFIHGVGGADSSTYYIKAQCRGDASESKCRSCLFTAFSGILRRCPNNRGRIIWYDNCFLYISEIYTYEKIDFKHYLYLHNAKDVSGNKKLFNKNTKALLDKLKEKAIRKEQEPYTRDYMYAAGEESLGTTKLYGMMQCTQDLSVKNCSVCLDSIIAKLPRCCNGKQGGRVLNPSCTFRYELYPFVKP

SEQ ID NO: 97412 - protein, 194 aa, Arabidopsis thaliana
  peptide (1)..(194): Ceres Seq. ID no. 12737383
MSNILDYGFIHGVGGADSSTYYIKAQCRGDASESKCRSCLFTAFSGILRRCPNNRGRIIWYDNCFLYISEIYTYEKIDFKHYLYLHNAKDVSGNKKLFNKNTKALLDKLKEKAIRKEQEPYTRDYMYAAGEESLGTTKLYGMMQCTQDLSVKNCSVCLDSIIAKLPRCCNGKQGGRVLNPSCTFRYELYPFVKP

SEQ ID NO: 97413 - DNA, 2077 bp, Arabidopsis thaliana
  misc_feature (1)..(2077): Ceres Seq. ID no. 12737426
  misc_feature (1)..(2077): Ortholog of  Ceres SEQ ID NO 13657138 as cited in SEQ ID NO 65923
  misc_feature (1)..(2077): Ortholog of  Ceres SEQ ID NO 13584744 as cited in SEQ ID NO 69137
aagaagaaactttctctaattaaaatggctgttcccacgggaagcgccaatctctttctccggcctctcatcctcgccgttctctcctttcttcttctctcttcattcgtctcctctgttgagtggctcgatatcgattcctcagatctcaaagctcttcaggtcatcgaaacagagctcggagtcaacagtcaacgttcttcggccagtgatgtcaacccttgcggtcgccgaggagttttctgcgagagacggcactctgccaccaccggagaatacgttctccgtgtcacgaggctcgtctaccgatccaggagcttgacggggactatctctccggtcatcggaatgttgtcggagctcaaggaacttactttgtctaataaccagttggtcaacgctgttccggtggatatcttaagctgtaagcaacttgaagttcttgatcttcggaaaaatagattttccggtcagattccgggaaacttttctagtttgagccgtcttcgaatccttgatctctcttcgaacaagttatccgggaacttgaatttcttgaagaatctacgcaatctggagaatctctctgttgcaaacaatctcttctcaggcaaaatcccggaacaaattgtgtcgttccacaatctccggttctttgatttctccggaaaccggtatttggaaggtccggctccggttatgagcagtatcaagcttcagacatctccacatcaaacaagacacattcttgctgaaactccaacttcaagtcccacgaacaaacccaacaacagcactacatcaaaagctccaaagggagctccaaaaccagggaagttgaagaagaagaagaagaagagcaagaagaagaaagtagcggcatggatcttagggtttgtcgttggagccataggaggaacaatctctgggtttgtcttctcggtgttgttcaaattgattattcaagcaataagaggatcagaaaaaccaccaggtccttccatattcagcccattgatcaagaaagctgaagatttagctttcttggagaatgaagaagcgttagcttctctggagatcataggaagaggaggttgtggagaagttttcaaagctgaactaccaggaagcaatgggaagatcatagctgtgaagaaagtgatccaaccgcctaaagacgccgatgaactaacagatgaagattccaagtttctgaacaagaaaatgaggcaaattagatccgagatcaacacagtcggccatatccggcaccggaatcttctcccattgttagcacacgtgtcaagacccgagtgccactacctcgtttacgagtacatggaaaaggggagtttgcaagatatattgactgacgtacaagctggaaatcaagaactaatgtggccagcgaggcacaagattgctttaggtatagctgcagggcttgagtaccttcacatggatcataacccacgaatcattcacagagacttaaagccagccaatgttcttcttgatgatgacatggaagccagaatttcagatttcggactggcaaaggcaatgccagatgcagtcacacatattacaacctcgcatgttgcaggtactgtgggatacatagcaccagagttttatcaaacccacaagttcacagataaatgtgatatctatagttttggagtgattcttgggattctggtgattgggaagcttccttcagatgagttttttcagcatactgacgagatgagtctgataaagtggatgaggaacataataacatcggaaaatcctagccttgcgattgatccgaagttgatggatcaaggattcgatgaacagatgcttctggttctgaagatcgcctgttactgtactttggatgatccaaaacagaggccgaacagtaaagatgtcaggaccatgttgtcccagatcaagcactagtgtttcaatatgtattgtttgcttctatctatatttcctagattcctgttgcatacgaaataactatgaacacaatcttggcagaaatttgtaatggcgactgtaaaatttaaatggatttcaatta

SEQ ID NO: 97414 - protein, 649 aa, Arabidopsis thaliana
  peptide (1)..(649): Ceres Seq. ID no. 12737427
KKKLSLIKMAVPTGSANLFLRPLILAVLSFLLLSSFVSSVEWLDIDSSDLKALQVIETELGVNSQRSSASDVNPCGRRGVFCERRHSATTGEYVLRVTRLVYRSRSLTGTISPVIGMLSELKELTLSNNQLVNAVPVDILSCKQLEVLDLRKNRFSGQIPGNFSSLSRLRILDLSSNKLSGNLNFLKNLRNLENLSVANNLFSGKIPEQIVSFHNLRFFDFSGNRYLEGPAPVMSSIKLQTSPHQTRHILAETPTSSPTNKPNNSTTSKAPKGAPKPGKLKKKKKKSKKKKVAAWILGFVVGAIGGTISGFVFSVLFKLIIQAIRGSEKPPGPSIFSPLIKKAEDLAFLENEEALASLEIIGRGGCGEVFKAELPGSNGKIIAVKKVIQPPKDADELTDEDSKFLNKKMRQIRSEINTVGHIRHRNLLPLLAHVSRPECHYLVYEYMEKGSLQDILTDVQAGNQELMWPARHKIALGIAAGLEYLHMDHNPRIIHRDLKPANVLLDDDMEARISDFGLAKAMPDAVTHITTSHVAGTVGYIAPEFYQTHKFTDKCDIYSFGVILGILVIGKLPSDEFFQHTDEMSLIKWMRNIITSENPSLAIDPKLMDQGFDEQMLLVLKIACYCTLDDPKQRPNSKDVRTMLSQIKH

SEQ ID NO: 97415 - protein, 641 aa, Arabidopsis thaliana
  peptide (1)..(641): Ceres Seq. ID no. 12737428
MAVPTGSANLFLRPLILAVLSFLLLSSFVSSVEWLDIDSSDLKALQVIETELGVNSQRSSASDVNPCGRRGVFCERRHSATTGEYVLRVTRLVYRSRSLTGTISPVIGMLSELKELTLSNNQLVNAVPVDILSCKQLEVLDLRKNRFSGQIPGNFSSLSRLRILDLSSNKLSGNLNFLKNLRNLENLSVANNLFSGKIPEQIVSFHNLRFFDFSGNRYLEGPAPVMSSIKLQTSPHQTRHILAETPTSSPTNKPNNSTTSKAPKGAPKPGKLKKKKKKSKKKKVAAWILGFVVGAIGGTISGFVFSVLFKLIIQAIRGSEKPPGPSIFSPLIKKAEDLAFLENEEALASLEIIGRGGCGEVFKAELPGSNGKIIAVKKVIQPPKDADELTDEDSKFLNKKMRQIRSEINTVGHIRHRNLLPLLAHVSRPECHYLVYEYMEKGSLQDILTDVQAGNQELMWPARHKIALGIAAGLEYLHMDHNPRIIHRDLKPANVLLDDDMEARISDFGLAKAMPDAVTHITTSHVAGTVGYIAPEFYQTHKFTDKCDIYSFGVILGILVIGKLPSDEFFQHTDEMSLIKWMRNIITSENPSLAIDPKLMDQGFDEQMLLVLKIACYCTLDDPKQRPNSKDVRTMLSQIKH

SEQ ID NO: 97416 - protein, 533 aa, Arabidopsis thaliana
  peptide (1)..(533): Ceres Seq. ID no. 12737429
MLSELKELTLSNNQLVNAVPVDILSCKQLEVLDLRKNRFSGQIPGNFSSLSRLRILDLSSNKLSGNLNFLKNLRNLENLSVANNLFSGKIPEQIVSFHNLRFFDFSGNRYLEGPAPVMSSIKLQTSPHQTRHILAETPTSSPTNKPNNSTTSKAPKGAPKPGKLKKKKKKSKKKKVAAWILGFVVGAIGGTISGFVFSVLFKLIIQAIRGSEKPPGPSIFSPLIKKAEDLAFLENEEALASLEIIGRGGCGEVFKAELPGSNGKIIAVKKVIQPPKDADELTDEDSKFLNKKMRQIRSEINTVGHIRHRNLLPLLAHVSRPECHYLVYEYMEKGSLQDILTDVQAGNQELMWPARHKIALGIAAGLEYLHMDHNPRIIHRDLKPANVLLDDDMEARISDFGLAKAMPDAVTHITTSHVAGTVGYIAPEFYQTHKFTDKCDIYSFGVILGILVIGKLPSDEFFQHTDEMSLIKWMRNIITSENPSLAIDPKLMDQGFDEQMLLVLKIACYCTLDDPKQRPNSKDVRTMLSQIKH

SEQ ID NO: 97417 - DNA, 1464 bp, Arabidopsis thaliana
  misc_feature (1)..(1464): Ceres Seq. ID no. 12737438
  misc_feature (1)..(1464): Ortholog of  Ceres SEQ ID NO 14310024 as cited in SEQ ID NO 20634
  misc_feature (1)..(1464): Ortholog of  Ceres SEQ ID NO 15177184 as cited in SEQ ID NO 58157
atggatcatcaaatcaagaacaccatgaagaacaacaacagttcatcagtttcaatcgagaatcatccatggaagaaaaaaccaaccactcttttacttttcctttctcttctctccatctctctgcttctccttcgtctctcccaagacaaaatcatactcatcaccaccaccaaaaccacagccaccactggaaccgatcatcaacgcagtcacaaatcttctgaggacgatacgtgtctcggacgctacatatatatccacaatctaccttctcgattcaatcttgaaatcatcaaagattgtaagtctattacaagaccaaaggacaaaatcagtatgtgtaagtatctcgacaactccggattcggacctttgatcggcggtaaaagttctgactactctccgagctggtacgctactaatcagttcatgctcgaagtgatttttcacgagaaaatgaagagttacgagtgcttgacgagaaattcttcactggcttcagctatttacgtaccttattatgctggcctcgatttccggcgacatttacggcggcgtaacgttgctgcgagagacgccgccgggaaggaacttgttaaatggctcaagaagcaacctcagtggaaagatatgtcaggtaaaaaccatttccttgtaaccggtcggatttcacgagatttccggcgaaactccggcagtaggtcagcatggggaaccaacttcatgctcttatctgagtcgctaaacctcactttcctcagcattgaacgaagtctaacgagccacaacgagttcgcaattccttatcctacttactttcaccctacgtcaacccccgagatccttcagtggcaagaaaagatcaggcttacaaaccggacggtcctcttctcatttgccggagctcaaagaccaagcagaaaccagaacggtgtggttcgcactgaagttataaaacaatgcaagagttcatctaaaacgtgtaggtttcttgactgtgacgtcaatgcaaatagctgtgatgatccgatcagtctgatgaaacttttcgagagttcgactttctgcttacaaccgccgggtgattcgttgaccagaaaatcggtatttgattcaatcttggctggttgtataccggttttctttaaccaaggaagtgcatacaagcaatatttatggcacatacctaagaatagtagcaaatattctgtttatataacggttaaggagctgagaaccggtggaaagaacaaaatcgaagagattttgcgtggaataccaaatgagagagtggttggtatgagagaaaacgtaataagattgattccgaagattgtgtatgctaaaccaaaccggaacaaaccggatggagagattcttgaagattcttttgatgttgctgtgaagggagtgctagagagaatagaagggataaggagaaacgaattcaaaactgattag

SEQ ID NO: 97418 - protein, 487 aa, Arabidopsis thaliana
  peptide (1)..(487): Ceres Seq. ID no. 12737439
MDHQIKNTMKNNNSSSVSIENHPWKKKPTTLLLFLSLLSISLLLLRLSQDKIILITTTKTTATTGTDHQRSHKSSEDDTCLGRYIYIHNLPSRFNLEIIKDCKSITRPKDKISMCKYLDNSGFGPLIGGKSSDYSPSWYATNQFMLEVIFHEKMKSYECLTRNSSLASAIYVPYYAGLDFRRHLRRRNVAARDAAGKELVKWLKKQPQWKDMSGKNHFLVTGRISRDFRRNSGSRSAWGTNFMLLSESLNLTFLSIERSLTSHNEFAIPYPTYFHPTSTPEILQWQEKIRLTNRTVLFSFAGAQRPSRNQNGVVRTEVIKQCKSSSKTCRFLDCDVNANSCDDPISLMKLFESSTFCLQPPGDSLTRKSVFDSILAGCIPVFFNQGSAYKQYLWHIPKNSSKYSVYITVKELRTGGKNKIEEILRGIPNERVVGMRENVIRLIPKIVYAKPNRNKPDGEILEDSFDVAVKGVLERIEGIRRNEFKTD

SEQ ID NO: 97419 - protein, 479 aa, Arabidopsis thaliana
  peptide (1)..(479): Ceres Seq. ID no. 12737440
MKNNNSSSVSIENHPWKKKPTTLLLFLSLLSISLLLLRLSQDKIILITTTKTTATTGTDHQRSHKSSEDDTCLGRYIYIHNLPSRFNLEIIKDCKSITRPKDKISMCKYLDNSGFGPLIGGKSSDYSPSWYATNQFMLEVIFHEKMKSYECLTRNSSLASAIYVPYYAGLDFRRHLRRRNVAARDAAGKELVKWLKKQPQWKDMSGKNHFLVTGRISRDFRRNSGSRSAWGTNFMLLSESLNLTFLSIERSLTSHNEFAIPYPTYFHPTSTPEILQWQEKIRLTNRTVLFSFAGAQRPSRNQNGVVRTEVIKQCKSSSKTCRFLDCDVNANSCDDPISLMKLFESSTFCLQPPGDSLTRKSVFDSILAGCIPVFFNQGSAYKQYLWHIPKNSSKYSVYITVKELRTGGKNKIEEILRGIPNERVVGMRENVIRLIPKIVYAKPNRNKPDGEILEDSFDVAVKGVLERIEGIRRNEFKTD

SEQ ID NO: 97420 - protein, 374 aa, Arabidopsis thaliana
  peptide (1)..(374): Ceres Seq. ID no. 12737441
MCKYLDNSGFGPLIGGKSSDYSPSWYATNQFMLEVIFHEKMKSYECLTRNSSLASAIYVPYYAGLDFRRHLRRRNVAARDAAGKELVKWLKKQPQWKDMSGKNHFLVTGRISRDFRRNSGSRSAWGTNFMLLSESLNLTFLSIERSLTSHNEFAIPYPTYFHPTSTPEILQWQEKIRLTNRTVLFSFAGAQRPSRNQNGVVRTEVIKQCKSSSKTCRFLDCDVNANSCDDPISLMKLFESSTFCLQPPGDSLTRKSVFDSILAGCIPVFFNQGSAYKQYLWHIPKNSSKYSVYITVKELRTGGKNKIEEILRGIPNERVVGMRENVIRLIPKIVYAKPNRNKPDGEILEDSFDVAVKGVLERIEGIRRNEFKTD

SEQ ID NO: 97421 - DNA, 771 bp, Arabidopsis thaliana
  misc_feature (1)..(771): Ceres Seq. ID no. 12737442
  misc_feature (1)..(771): Ortholog of  Ceres SEQ ID NO 14306264 as cited in SEQ ID NO 1386
  misc_feature (1)..(771): Ortholog of  Ceres SEQ ID NO 13600592 as cited in SEQ ID NO 1398
  misc_feature (1)..(771): Ortholog of  Ceres SEQ ID NO 15179159 as cited in SEQ ID NO 0
atggagaaagcagttcactcgtcgaccacgtctggaccggcggttccaggggagacaacaaagaccggaacctccataattgacactgcagcctccgctgttcaaagttttgcaccggttaaccaaatccaccaacatctctgcgcgttccatttctatgctgacgacatggcacgacaagtagaggctcaccatttctgcagtcacgtgaacgaagagatgcgtcagtgtttgatctacgacggtccggatgcaaacgctcgtctaattggattggagtacatagtgtcagagaagctgttcatgactttgcctgacgaagagaagaagctttggcactcgcacgagtgggaagtgaaaggagggttcttgttcatgcctggtgttccaggtgccattcagcgtaaagatcttgataaagtcgctaagacttatgggaaagttttccatttttggcaagttgatttgggccatgagcttcccattggtttacctaatgtcatgatggctgttacacgcgatggccagcttttccacgagatgattcaggagacagataagcggtttagggtatcaatagagaaacaacctagaccggcagagaagcggtttggggtatcggtagagggggagagggactcacgggcgtatatgtctggacctgagctcgggatccatccattggcgaatggaggaggcaaagggatgaaactagagctacgagaggtcgatatcaagccggttgagtctgtcggcagcgtctttgtctga

SEQ ID NO: 97422 - protein, 256 aa, Arabidopsis thaliana
  peptide (1)..(256): Ceres Seq. ID no. 12737443
MEKAVHSSTTSGPAVPGETTKTGTSIIDTAASAVQSFAPVNQIHQHLCAFHFYADDMARQVEAHHFCSHVNEEMRQCLIYDGPDANARLIGLEYIVSEKLFMTLPDEEKKLWHSHEWEVKGGFLFMPGVPGAIQRKDLDKVAKTYGKVFHFWQVDLGHELPIGLPNVMMAVTRDGQLFHEMIQETDKRFRVSIEKQPRPAEKRFGVSVEGERDSRAYMSGPELGIHPLANGGGKGMKLELREVDIKPVESVGSVFV

SEQ ID NO: 97423 - protein, 200 aa, Arabidopsis thaliana
  peptide (1)..(200): Ceres Seq. ID no. 12737444
MARQVEAHHFCSHVNEEMRQCLIYDGPDANARLIGLEYIVSEKLFMTLPDEEKKLWHSHEWEVKGGFLFMPGVPGAIQRKDLDKVAKTYGKVFHFWQVDLGHELPIGLPNVMMAVTRDGQLFHEMIQETDKRFRVSIEKQPRPAEKRFGVSVEGERDSRAYMSGPELGIHPLANGGGKGMKLELREVDIKPVESVGSVFV

SEQ ID NO: 97424 - protein, 183 aa, Arabidopsis thaliana
  peptide (1)..(183): Ceres Seq. ID no. 12737445
MRQCLIYDGPDANARLIGLEYIVSEKLFMTLPDEEKKLWHSHEWEVKGGFLFMPGVPGAIQRKDLDKVAKTYGKVFHFWQVDLGHELPIGLPNVMMAVTRDGQLFHEMIQETDKRFRVSIEKQPRPAEKRFGVSVEGERDSRAYMSGPELGIHPLANGGGKGMKLELREVDIKPVESVGSVFV

SEQ ID NO: 97425 - DNA, 1713 bp, Arabidopsis thaliana
  misc_feature (1)..(1713): Ceres Seq. ID no. 12737465
  misc_feature (1)..(1713): Ortholog of  Ceres SEQ ID NO 12581709 as cited in SEQ ID NO 54052
  misc_feature (1)..(1713): Ortholog of  Ceres SEQ ID NO 13662854 as cited in SEQ ID NO 64786
aaaaccgaagagccaccaccatggtttcgccgtcagagatgacggagacggcaccggcaattatgacaacggaaagcgaaaggatagagagttcgagggaactcgtggataatgaagaggaggagaaaatacgccgtcagaagaagctcgaagaagctctcgaagccaaatctcttcgccgcattatcagtgcttacctcaattacccagaggcttcggaagaggatttgaaaagatgggaaagatcatatcggaagctgtctcctgcacacaaggcattggtaccccattaccctatgaagtttcagagattaagaaggtgtatatcggcgaattcatatttcatatttaatatgcttcaggcttttgagcctcctatagacttgagtcaggaacttgatggttgtgaagactcaaatcttgactgcgctccacatgagagatacactctagatgaaaggcacgactcttcttgtcagccggccttgaccaatagttgtacatataaggaagaaagcaaacacattcgtgacccaataacaggagtgtctatcgaggagcttcagaggaaagaagctcatgatcattctcccaaggatgactctgcagacacaagaatcaacgataagacatgtgattgtcatgaaggccagttaaatcatgaccatggcagtgtatcattttcatcccatgattggttggattcatcgttacagacacatgttcctctggttgatgtagataaggttcgttgtattataaggaatattgttcgagactgggcagcagagggtcagagagaacgagatcaatgctacaagcctatccttgaagagcttgattccttgtttcctgaccgtttgaaggagagcacccctcctgcctgtttagtccctggtgctggacttggacgtctggcccttgaaatttcttgtctaggtttcataagccaaggaaatgaattttcatactacatgatgatatgctcaagttttattctgaattatacacaagtccctggtgagtggacaatatacccctggatacacagcaactgcaattcgctctcggacaatgatcagctacgccctattgcgattcctgatattcatcctgcaagtgcaggaataacagaaggtttctctatgtgtggtggtgattttgttgaagtatacaatgaatcaagtcatgcaggaatgtgggatgcagttgttacttgctttttcatcgacactgctcataatgtcatcgagtacattcaaaccatatccaagatcctaaaagatggaggagtttggataaatttaggacctctgttgtatcattttgcggacacatatggccatgaaaatgaaatgtctatcgagctaagtttggaggatgtaaagagggttgcttcacattttgggtttgtgatcgagaaagaaagaacaattgaaacaacttacactacaaatccccgggctatgatgcagaaccgatactatactgccttctggacaatgaggaagaaatgtgctataacaacaacttaagcaaattactcctggactctttatttgtgtctggatttcttttgtttttctttgatgaataaattatgatcttataacagaagcgtcgaaactattaaactagttgcttccatatcaaaacaacgtattcatgacttcgttttattatggaaaaataagaaacagaacaagtatttct

SEQ ID NO: 97426 - protein, 510 aa, Arabidopsis thaliana
  peptide (1)..(510): Ceres Seq. ID no. 12737466
NRRATTMVSPSEMTETAPAIMTTESERIESSRELVDNEEEEKIRRQKKLEEALEAKSLRRIISAYLNYPEASEEDLKRWERSYRKLSPAHKALVPHYPMKFQRLRRCISANSYFIFNMLQAFEPPIDLSQELDGCEDSNLDCAPHERYTLDERHDSSCQPALTNSCTYKEESKHIRDPITGVSIEELQRKEAHDHSPKDDSADTRINDKTCDCHEGQLNHDHGSVSFSSHDWLDSSLQTHVPLVDVDKVRCIIRNIVRDWAAEGQRERDQCYKPILEELDSLFPDRLKESTPPACLVPGAGLGRLALEISCLGFISQGNEFSYYMMICSSFILNYTQVPGEWTIYPWIHSNCNSLSDNDQLRPIAIPDIHPASAGITEGFSMCGGDFVEVYNESSHAGMWDAVVTCFFIDTAHNVIEYIQTISKILKDGGVWINLGPLLYHFADTYGHENEMSIELSLEDVKRVASHFGFVIEKERTIETTYTTNPRAMMQNRYYTAFWTMRKKCAITTT

SEQ ID NO: 97427 - protein, 504 aa, Arabidopsis thaliana
  peptide (1)..(504): Ceres Seq. ID no. 12737467
MVSPSEMTETAPAIMTTESERIESSRELVDNEEEEKIRRQKKLEEALEAKSLRRIISAYLNYPEASEEDLKRWERSYRKLSPAHKALVPHYPMKFQRLRRCISANSYFIFNMLQAFEPPIDLSQELDGCEDSNLDCAPHERYTLDERHDSSCQPALTNSCTYKEESKHIRDPITGVSIEELQRKEAHDHSPKDDSADTRINDKTCDCHEGQLNHDHGSVSFSSHDWLDSSLQTHVPLVDVDKVRCIIRNIVRDWAAEGQRERDQCYKPILEELDSLFPDRLKESTPPACLVPGAGLGRLALEISCLGFISQGNEFSYYMMICSSFILNYTQVPGEWTIYPWIHSNCNSLSDNDQLRPIAIPDIHPASAGITEGFSMCGGDFVEVYNESSHAGMWDAVVTCFFIDTAHNVIEYIQTISKILKDGGVWINLGPLLYHFADTYGHENEMSIELSLEDVKRVASHFGFVIEKERTIETTYTTNPRAMMQNRYYTAFWTMRKKCAITTT

SEQ ID NO: 97428 - protein, 498 aa, Arabidopsis thaliana
  peptide (1)..(498): Ceres Seq. ID no. 12737468
MTETAPAIMTTESERIESSRELVDNEEEEKIRRQKKLEEALEAKSLRRIISAYLNYPEASEEDLKRWERSYRKLSPAHKALVPHYPMKFQRLRRCISANSYFIFNMLQAFEPPIDLSQELDGCEDSNLDCAPHERYTLDERHDSSCQPALTNSCTYKEESKHIRDPITGVSIEELQRKEAHDHSPKDDSADTRINDKTCDCHEGQLNHDHGSVSFSSHDWLDSSLQTHVPLVDVDKVRCIIRNIVRDWAAEGQRERDQCYKPILEELDSLFPDRLKESTPPACLVPGAGLGRLALEISCLGFISQGNEFSYYMMICSSFILNYTQVPGEWTIYPWIHSNCNSLSDNDQLRPIAIPDIHPASAGITEGFSMCGGDFVEVYNESSHAGMWDAVVTCFFIDTAHNVIEYIQTISKILKDGGVWINLGPLLYHFADTYGHENEMSIELSLEDVKRVASHFGFVIEKERTIETTYTTNPRAMMQNRYYTAFWTMRKKCAITTT

SEQ ID NO: 97429 - DNA, 1572 bp, Arabidopsis thaliana
  misc_feature (1)..(1572): Ceres Seq. ID no. 12737519
  misc_feature (1)..(1572): Ortholog of  Ceres SEQ ID NO 14305500 as cited in SEQ ID NO 0
atggcggaacccaaaaccaagtatgatcgtcagctaaggatttggggagaattaggtcaatcagctcttgaaaccgcgagcatatgtttgctcaattgtggtccaactggctctgaggctctaaagaatcttgttattggtggaatcggaagtatcaccattgtcgacggatctaaagtagaaattggcgaccttggaaacaatttcatggtggatgcgaagagcgttggtcagtcaagagccaaaacggtctgtggctttcttcaggagcttaacgattctgttaaagcaaattttgttgaggagaatccagacactttgatatcgacagacccatctttcttctctcagttcactctagttatcgccactcagctagtagaagattcaatggtgaaattagatagaatctgccgggaagcaaacgtcatgttggttttggctcgctcctatggacttactgggtttgttcgtatcagtgtaaaggaacacaccgctattgagacaaagcctgatcattctcttgatgatctccgcttgaatagtccatggcctgagctgaagagctatgtggagtccattgatctaaatgtagaagaacccgctgcccataagcacattccttacgtcgtcattctagtcaaggtggctgaagaatgggctcaacaccatagcggcaaccttccatcaaccagggaagagaaaaacgagtttaaggacttagttaagtccaagatggtatcagcggatgaagaaaattacaaagaagcccttcttgcagctttcaaagtctttgctcctacaggaatcagccaagagattcaagacattaatcatgatagttgtgctgaagttggctcaaattcctcagatttttgggtaatggtagcagcactcaaggagtttatttcaaatgaaggtggtggggaggtaccacttgaaggttccatgcctgatatgatatcttccacagagcactacatcaatttgcagaaaatctaccattccaaagcggaagctgattttctttccatggaacagagagtaaaaagtattctagttaaagttggtcaggatccaagtagcatctcaaagccaactatcaagagcttctgcaagaatgcacgaaaacttaaagtctgcagatatagaacgatagaagacgagttcaaaagtccttctacaacagaactacataagtacttggctgatgagaattacagtggcgcaattggattttatattcttcttagagctgttgatagatttgctggtacctataagaagtttcctggacagtttgatggatcaactgatgaggacgcatcccagttaaagactattgccctgagtcttcttagtgaaatgggttgtgacggctatgaacttcaggaagaactgtacaatgagatgtgtagatttggtgctgcagagattcacgtggttgctgctttaataggaggaatcacatctcaagaagtgatcaagctcatcacaaagcagtttgttcccaagcgaggaactttcatcttcaacggcattgatcacaagtctcagtctttgacattatag

SEQ ID NO: 97430 - protein, 523 aa, Arabidopsis thaliana
  peptide (1)..(523): Ceres Seq. ID no. 12737520
MAEPKTKYDRQLRIWGELGQSALETASICLLNCGPTGSEALKNLVIGGIGSITIVDGSKVEIGDLGNNFMVDAKSVGQSRAKTVCGFLQELNDSVKANFVEENPDTLISTDPSFFSQFTLVIATQLVEDSMVKLDRICREANVMLVLARSYGLTGFVRISVKEHTAIETKPDHSLDDLRLNSPWPELKSYVESIDLNVEEPAAHKHIPYVVILVKVAEEWAQHHSGNLPSTREEKNEFKDLVKSKMVSADEENYKEALLAAFKVFAPTGISQEIQDINHDSCAEVGSNSSDFWVMVAALKEFISNEGGGEVPLEGSMPDMISSTEHYINLQKIYHSKAEADFLSMEQRVKSILVKVGQDPSSISKPTIKSFCKNARKLKVCRYRTIEDEFKSPSTTELHKYLADENYSGAIGFYILLRAVDRFAGTYKKFPGQFDGSTDEDASQLKTIALSLLSEMGCDGYELQEELYNEMCRFGAAEIHVVAALIGGITSQEVIKLITKQFVPKRGTFIFNGIDHKSQSLTL

SEQ ID NO: 97431 - protein, 454 aa, Arabidopsis thaliana
  peptide (1)..(454): Ceres Seq. ID no. 12737521
MVDAKSVGQSRAKTVCGFLQELNDSVKANFVEENPDTLISTDPSFFSQFTLVIATQLVEDSMVKLDRICREANVMLVLARSYGLTGFVRISVKEHTAIETKPDHSLDDLRLNSPWPELKSYVESIDLNVEEPAAHKHIPYVVILVKVAEEWAQHHSGNLPSTREEKNEFKDLVKSKMVSADEENYKEALLAAFKVFAPTGISQEIQDINHDSCAEVGSNSSDFWVMVAALKEFISNEGGGEVPLEGSMPDMISSTEHYINLQKIYHSKAEADFLSMEQRVKSILVKVGQDPSSISKPTIKSFCKNARKLKVCRYRTIEDEFKSPSTTELHKYLADENYSGAIGFYILLRAVDRFAGTYKKFPGQFDGSTDEDASQLKTIALSLLSEMGCDGYELQEELYNEMCRFGAAEIHVVAALIGGITSQEVIKLITKQFVPKRGTFIFNGIDHKSQSLTL

SEQ ID NO: 97432 - protein, 393 aa, Arabidopsis thaliana
  peptide (1)..(393): Ceres Seq. ID no. 12737522
MVKLDRICREANVMLVLARSYGLTGFVRISVKEHTAIETKPDHSLDDLRLNSPWPELKSYVESIDLNVEEPAAHKHIPYVVILVKVAEEWAQHHSGNLPSTREEKNEFKDLVKSKMVSADEENYKEALLAAFKVFAPTGISQEIQDINHDSCAEVGSNSSDFWVMVAALKEFISNEGGGEVPLEGSMPDMISSTEHYINLQKIYHSKAEADFLSMEQRVKSILVKVGQDPSSISKPTIKSFCKNARKLKVCRYRTIEDEFKSPSTTELHKYLADENYSGAIGFYILLRAVDRFAGTYKKFPGQFDGSTDEDASQLKTIALSLLSEMGCDGYELQEELYNEMCRFGAAEIHVVAALIGGITSQEVIKLITKQFVPKRGTFIFNGIDHKSQSLTL

SEQ ID NO: 97433 - DNA, 1119 bp, Arabidopsis thaliana
  misc_feature (1)..(1119): Ceres Seq. ID no. 12737539
  misc_feature (1)..(1119): Ortholog of  Ceres SEQ ID NO 13596198 as cited in SEQ ID NO 68488
atggaatggactagaggaagaatcctaggccgaggctctacagccaccgtatacgccgccgcaggtcacaattcagatgaaatcctcgccgttaaatcatctgaggttcaccgctcagagttcttgcaaagagaagccaagattctctcgtcgttaagttctccttacgtgatcggatacagaggatcagaaaccaagagagagtcaaacggtgtcgttatgtataatcttttgatggagtacgcaccgtatggaacgttgaccgatgcggcggcgaaagacgggggaagagtcgacgagactcgggtagtgaagtacacgcgcgatatactaaaaggattggagtatatacactcgaaaggaatcgtgcattgtgatgtaaagggtagtaacgtggttatttcggagaaaggcgaggccaagattgcggattttggttgtgcgaaacgggttgacccggtgttcgagtcgccggttatgggaacgccggcttttatggctccagaggtggcgcgtggagagaaacaggggaaggagagtgatatatgggcggttggttgtacgatgatagagatggttacgggttctccaccgtggacgaaggcagattcgagggaggatccggtttcggttctttatcgggtcgggtattcgagtgaaactccggagcttccttgtttgcttgcggaagaagcaaaagattttttggaaaagtgtttgaagagggaagcaaatgaaagatggacagcgacacaactcctaaaccatccttttttgacaactaaaccagacattgaaccagttctggttcccggtttgatttcaaactcaccgacaagtgtgacagatcaaacgttttggagatcagtagaggaagaggaagaagaagaaacagaggaaatacagaaggattcgagagatcttgatcgtttaagcttgtggggttgttactcggagaggatcggacggctgaagtgtgttggtggtttggatgggaccagatgtgatatggagggtggggattggattatggtgagagcgaggtgtgaaggaacaatgattagtgggtcacaaaaggaattgattattagtgaaaatgtattggtgggggaattgtaa

SEQ ID NO: 97434 - protein, 372 aa, Arabidopsis thaliana
  peptide (1)..(372): Ceres Seq. ID no. 12737540
MEWTRGRILGRGSTATVYAAAGHNSDEILAVKSSEVHRSEFLQREAKILSSLSSPYVIGYRGSETKRESNGVVMYNLLMEYAPYGTLTDAAAKDGGRVDETRVVKYTRDILKGLEYIHSKGIVHCDVKGSNVVISEKGEAKIADFGCAKRVDPVFESPVMGTPAFMAPEVARGEKQGKESDIWAVGCTMIEMVTGSPPWTKADSREDPVSVLYRVGYSSETPELPCLLAEEAKDFLEKCLKREANERWTATQLLNHPFLTTKPDIEPVLVPGLISNSPTSVTDQTFWRSVEEEEEEETEEIQKDSRDLDRLSLWGCYSERIGRLKCVGGLDGTRCDMEGGDWIMVRARCEGTMISGSQKELIISENVLVGEL

SEQ ID NO: 97435 - protein, 299 aa, Arabidopsis thaliana
  peptide (1)..(299): Ceres Seq. ID no. 12737541
MYNLLMEYAPYGTLTDAAAKDGGRVDETRVVKYTRDILKGLEYIHSKGIVHCDVKGSNVVISEKGEAKIADFGCAKRVDPVFESPVMGTPAFMAPEVARGEKQGKESDIWAVGCTMIEMVTGSPPWTKADSREDPVSVLYRVGYSSETPELPCLLAEEAKDFLEKCLKREANERWTATQLLNHPFLTTKPDIEPVLVPGLISNSPTSVTDQTFWRSVEEEEEEETEEIQKDSRDLDRLSLWGCYSERIGRLKCVGGLDGTRCDMEGGDWIMVRARCEGTMISGSQKELIISENVLVGEL

SEQ ID NO: 97436 - protein, 294 aa, Arabidopsis thaliana
  peptide (1)..(294): Ceres Seq. ID no. 12737542
MEYAPYGTLTDAAAKDGGRVDETRVVKYTRDILKGLEYIHSKGIVHCDVKGSNVVISEKGEAKIADFGCAKRVDPVFESPVMGTPAFMAPEVARGEKQGKESDIWAVGCTMIEMVTGSPPWTKADSREDPVSVLYRVGYSSETPELPCLLAEEAKDFLEKCLKREANERWTATQLLNHPFLTTKPDIEPVLVPGLISNSPTSVTDQTFWRSVEEEEEEETEEIQKDSRDLDRLSLWGCYSERIGRLKCVGGLDGTRCDMEGGDWIMVRARCEGTMISGSQKELIISENVLVGEL

SEQ ID NO: 97437 - DNA, 606 bp, Arabidopsis thaliana
  misc_feature (1)..(606): Ceres Seq. ID no. 12737554
  misc_feature (1)..(606): Ortholog of  Ceres SEQ ID NO 14306355 as cited in SEQ ID NO 1268
  misc_feature (1)..(606): Ortholog of  Ceres SEQ ID NO 13624427 as cited in SEQ ID NO 0
  misc_feature (1)..(606): Ortholog of  Ceres SEQ ID NO 14305939 as cited in SEQ ID NO 0
atgggtttaatttccgggaaggtgtgtgtgtttatctttgtattcgctctagtcgctgaattttcgttcggaaatgttgaggttaacgacgacaaacactttttccacaaacctcgtccatttttacacaaacctcgtccattcctccacaagcatggcatttacaagaaaggtttcggtaagggtttgggcggtggaggcggtctaggcggcggaggtggtctaggaggcggtggtggcctaggaggcggtggaggtttaggcggtggtggaggtttaggcggcggtggtggtctaggaggcggtagcggtttgggaggaggagggggtctaggaggcggtagcggtttgggaggaggagggggtctaggaggtggtggtggtggtggtttaggaggaggaggtggattgggtggtggagctggaggaggatacggtggtggtgctggaggaggacttggaggcggaggtggaattggaggaggaggaggctttggcggtggagggggaggaggattcgggggcggagccggtggtggatttggtaaaggcattggtggtggaggaggtcttggaggaggttatgttggtggtggccatcactga

SEQ ID NO: 97438 - protein, 201 aa, Arabidopsis thaliana
  peptide (1)..(201): Ceres Seq. ID no. 12737555
MGLISGKVCVFIFVFALVAEFSFGNVEVNDDKHFFHKPRPFLHKPRPFLHKHGIYKKGFGKGLGGGGGLGGGGGLGGGGGLGGGGGLGGGGGLGGGGGLGGGSGLGGGGGLGGGSGLGGGGGLGGGGGGGLGGGGGLGGGAGGGYGGGAGGGLGGGGGIGGGGGFGGGGGGGFGGGAGGGFGKGIGGGGGLGGGYVGGGHH

SEQ ID NO: 97439 - DNA, 1695 bp, Arabidopsis thaliana
  misc_feature (1)..(1695): Ceres Seq. ID no. 12737563
  misc_feature (1)..(1695): Ortholog of  Ceres SEQ ID NO 13598740 as cited in SEQ ID NO 61147
ctgacccggaagtttctaatctctctctctttcctaaagtaacaaactttaaattttctgcaaaatcgaacaacgaatcatcagcccgagaagcttcttcaatcctgtaaatttttcattctacgtaccaatctctcatttcccagattcgtttcttgcttccattgctcttcctttgtaccaatcatcatctccaggtgatcggtttattaaaaattagggtttttgattgttctaatccgatctctcggttcctttaagattgatgatgaatttcgaagcgtgatatgaaaagatctgaagacttgatgtcagaacttgcgttgcgtgggttccgagataattgttgatggaaagagtatcagagcgaagtttgtcagaaaatttgagaagaagcgatcgagaagatgggaagattatagaatgggaagaattcgaccatgagcttacgaggttatggagtctttcttctgctatgaaattagccacagagaggaaacaaatcctgcaaccgaaacttgagtctcttattcaggttagtactgaatcattgagacgcactaatgaacttgaagaaatgcgtcagaggcttgaagcaagaaaattgttggtggacaagacatcagttgcttgcaaagttactgagcaggatgttaaaaagaaagaggagaatcttagtacagaagtgaggtctttgctagtaggcggaacaactctttcgatcgctaaaagcaaattgcaggaatcaaactgccaactagaaggagaaagtggttatgcacatttaaagattgtaacgaataagctgagaaagaggcagcagttcatggtatctcaagtttcatttatctatcccttgaagattgaagctggaccttcacaagaccaagaactggaatcatttcctggtggcagtagattaggaactaagcctctgagtcaaggatctgtgagaattctggggttgccttttagtatggccccgtttacaaagatgagcttcttcaccgacaagaaagaagttcagaagtctgcaactgccctaggatatgtagcccatgccgtgtcactaatagctccttacttgagagtgccaattcgttatcctttgtgcctggggggttccaaaacatacattcgagactatgcaccttacattgagccttcaccatcagacatgtctccgattaccacgctttcccaaaatattaactttgtagagtttcctctgtttctggatggtcaagatacaacacgagctgcctatgctgtcttcttactaaacaagaacatcgagcaactcttgaactttgtgggggaaaatagtctaggaccacgtcaggttctagcaaacctgaaggagctaattcgaatcatccaatctccagattatatcgattatttatgacgatgatgatgatgacgacgaaaataatgacgatgatgaagatatcaatccattccttctcacacatcttccagagttccagtgtctcttcttgtttattgaatcatctcaagtcagacactttgtggaggtaaaaaagtacaaataattgattttgttagagaaattttagacatggaaattctctttaggatgagactcctcctctctagatgtgatgtttttggtttggagagaccgacgataaacgaaagcttagtctattatacagttctttcttaagttct

SEQ ID NO: 97440 - protein, 352 aa, Arabidopsis thaliana
  peptide (1)..(352): Ceres Seq. ID no. 12737564
MERVSERSLSENLRRSDREDGKIIEWEEFDHELTRLWSLSSAMKLATERKQILQPKLESLIQVSTESLRRTNELEEMRQRLEARKLLVDKTSVACKVTEQDVKKKEENLSTEVRSLLVGGTTLSIAKSKLQESNCQLEGESGYAHLKIVTNKLRKRQQFMVSQVSFIYPLKIEAGPSQDQELESFPGGSRLGTKPLSQGSVRILGLPFSMAPFTKMSFFTDKKEVQKSATALGYVAHAVSLIAPYLRVPIRYPLCLGGSKTYIRDYAPYIEPSPSDMSPITTLSQNINFVEFPLFLDGQDTTRAAYAVFLLNKNIEQLLNFVGENSLGPRQVLANLKELIRIIQSPDYIDYL

SEQ ID NO: 97441 - protein, 310 aa, Arabidopsis thaliana
  peptide (1)..(310): Ceres Seq. ID no. 12737565
MKLATERKQILQPKLESLIQVSTESLRRTNELEEMRQRLEARKLLVDKTSVACKVTEQDVKKKEENLSTEVRSLLVGGTTLSIAKSKLQESNCQLEGESGYAHLKIVTNKLRKRQQFMVSQVSFIYPLKIEAGPSQDQELESFPGGSRLGTKPLSQGSVRILGLPFSMAPFTKMSFFTDKKEVQKSATALGYVAHAVSLIAPYLRVPIRYPLCLGGSKTYIRDYAPYIEPSPSDMSPITTLSQNINFVEFPLFLDGQDTTRAAYAVFLLNKNIEQLLNFVGENSLGPRQVLANLKELIRIIQSPDYIDYL

SEQ ID NO: 97442 - protein, 276 aa, Arabidopsis thaliana
  peptide (1)..(276): Ceres Seq. ID no. 12737566
MRQRLEARKLLVDKTSVACKVTEQDVKKKEENLSTEVRSLLVGGTTLSIAKSKLQESNCQLEGESGYAHLKIVTNKLRKRQQFMVSQVSFIYPLKIEAGPSQDQELESFPGGSRLGTKPLSQGSVRILGLPFSMAPFTKMSFFTDKKEVQKSATALGYVAHAVSLIAPYLRVPIRYPLCLGGSKTYIRDYAPYIEPSPSDMSPITTLSQNINFVEFPLFLDGQDTTRAAYAVFLLNKNIEQLLNFVGENSLGPRQVLANLKELIRIIQSPDYIDYL

SEQ ID NO: 97443 - DNA, 1530 bp, Arabidopsis thaliana
  misc_feature (1)..(1530): Ceres Seq. ID no. 12737567
  misc_feature (1)..(1530): Ortholog of  Ceres SEQ ID NO 14310024 as cited in SEQ ID NO 20634
  misc_feature (1)..(1530): Ortholog of  Ceres SEQ ID NO 15177184 as cited in SEQ ID NO 58157
atgatgaaaccagttccaaagctttgggttgtcatctcaagtgcctttgtgttctgtcttttagttctgtttcaaatcaataaatcagatttgatcgaagcaaatctccaaatcactcatcaagttaacaacttcctcatctccttcgttgcttcttcaaataatcaaatcctaaatcacaccaaacatgcgaatgagagtgatggaatcagagcgaaacagcttgaggaagaagaaacggatacttgcgccggaagatacatctacatgtacaatcttccaagcacattcaacgacgacatcatcaaagaatgtcgtccactcatcaaatggttcgatatgtgtccattcatggtcaattccgggctcggtccacagattttggtctccgataaaaccacagctcgagtcttaaccgtgaaaaccggttcttggtactcaacgaaccaattcttgctttcggttatcttccgagagaggatgaaacactacgagtgtttgaccaacaactcttctctagcctcagcgatctatgtcccatactacgcaggatttgatgtgagccgtcacctctggggatacaacgtgacggttagagacgaattggcgataaagctggcacaatggctgagagagagacctgaatgggggaagatgtacggccgagatcacttctttgtgaccggacggattggttgggatttcaggaggtttcacgatgaagattcagattggggaagcaaactgatgctattacctgaattctcgaatctgacaatgttaggtatcgaaacgactgcttgggctaacgaatttgcgattccttatcctacttatttccatccaaagagcttaacagagatttggagatggcagaagaaagtgaagagtgtgaagaggaagtatttgttttcgtttgttggaggtccaagacctaaattggatggatctattaggggagagattataaagcagtgccttgcatctcacggtaaatgcaactttcttaactgctttgttaatgactgcgataatccggttaagataatgaaggtgtttgaaaattctgtcttctgtttacaaccttcgggagattcgtacactcggagatcgatattcgattcgattctggcgggttgtataccggttttcttcagcccaggttcgggttacaaccaatatatttggtattttccaaaggattataccaagtactcggtttacataccagagaatgaaatgagaaatggaacggttagtctcaagaatattttgggtatgatcgctaaggagaggattttgaggatgagaaaagaggttgtgaagattataccaaaaatcatatataataaaccagggtttggaccggagaagattgaagatgcgtttgacattgcagtggataggatgcttgagagggtagcaatggttaagaggatgatggaagaagggaaagatgttcaaagtcagtattattcacagacaaaggatttgaaaaaacttgagattatacatgaaaaaactgcttaa

SEQ ID NO: 97444 - protein, 509 aa, Arabidopsis thaliana; identical to SEQ ID NO: 78653
  peptide (1)..(509): Ceres Seq. ID no. 12737568

SEQ ID NO: 97445 - protein, 508 aa, Arabidopsis thaliana; identical to SEQ ID NO: 78654
  peptide (1)..(508): Ceres Seq. ID no. 12737569

SEQ ID NO: 97446 - protein, 420 aa, Arabidopsis thaliana
  peptide (1)..(420): Ceres Seq. ID no. 12737570
MYNLPSTFNDDIIKECRPLIKWFDMCPFMVNSGLGPQILVSDKTTARVLTVKTGSWYSTNQFLLSVIFRERMKHYECLTNNSSLASAIYVPYYAGFDVSRHLWGYNVTVRDELAIKLAQWLRERPEWGKMYGRDHFFVTGRIGWDFRRFHDEDSDWGSKLMLLPEFSNLTMLGIETTAWANEFAIPYPTYFHPKSLTEIWRWQKKVKSVKRKYLFSFVGGPRPKLDGSIRGEIIKQCLASHGKCNFLNCFVNDCDNPVKIMKVFENSVFCLQPSGDSYTRRSIFDSILAGCIPVFFSPGSGYNQYIWYFPKDYTKYSVYIPENEMRNGTVSLKNILGMIAKERILRMRKEVVKIIPKIIYNKPGFGPEKIEDAFDIAVDRMLERVAMVKRMMEEGKDVQSQYYSQTKDLKKLEIIHEKTA

SEQ ID NO: 97447 - DNA, 2547 bp, Arabidopsis thaliana
  misc_feature (1)..(2547): Ceres Seq. ID no. 12737575
  misc_feature (1)..(2547): Ortholog of  Ceres SEQ ID NO 13654989 as cited in SEQ ID NO 63117
  misc_feature (1)..(2547): Ortholog of  Ceres SEQ ID NO 13655640 as cited in SEQ ID NO 63844
  misc_feature (1)..(2547): Ortholog of  Ceres SEQ ID NO 13584744 as cited in SEQ ID NO 69137
atggctatggatcatctctgtttcgtactaccgacagaatccggcgagttaaagccaccggtgatggtcgaggagaccacagaagaagaagaggagaagaagagtcgtgattgtggacgtcaagttgtgagtttaatcggagatttattccggcgattacacggctctaagttggtgaagagcttgaatctctgtagtatcaacgagagtaaagattcgatttcaatggagatcaataaatcattcactgacatggaaggtgttcagctttccagcaaagtcggttgcgagaatccaagaatctttggatactctgagctttatatcggaactaatggtttcagcgacgaactgatcctcggaagcggcggtttcggccgcgtttacaaggcgttgttaccgagcgacggaaccaccgtggctgttaaatgcttggcggagaagaaaggagaacaattcgagaaaactttcgcggcggagcttgttgcggtggctcagctccgccatcgaaatcttgtgaagttaagaggttggtgtctacacgaagacgagttgcttcttgtttacgattacatgcctaaccggagcttagatcgtgtgcttttccgacgaccggaagttaactccgattttaaaccgttggattgggatcggaggggtaaaatcgtcaaaggactcgccgccgcgttgttctacctccacgagcagttagagactcagatcattcacagagatgtgaagacgagtaacgttatgttggattctgagtttaacgctaaactcggagattttggtttagctcggtggttagaacacaagattgatgaaacagagcatgattcgagttacgactctgtttcttccttccgtaaccaccagttccgagtcgcggattcgactcggatcggtgggactatcgggtacttaccaccggagagtttccggaaaaaaaccgttgccaccgctaaaacagatgttttcagctttggtgttgtggttttagaggttgtctccggtagacgagccgttgatctttcgttctcggaagataaaatcattttacttgattgggttcggagattatccgataaccggaaattactcgacgccggggattctcggttagcaaaaggatcttatgatctctctgatatgaagagaatgattcatcttgctctgctctgttctttaaacaatccaacgcatcgtcccaacatgaaatgggttatcggagcactttccggcgagttttccggtaacttaccggcgttaccttcgtttaagagccatcctctttatattcctttatcttctttaaaatcaacctcaacttcggcgactacgactactacaagaacaacgatgaccaccaccacctccacaactagcttcaatgcgtcgtcggagtcaacgccgtcatcaaattacgttactgcccttgaggattctatttaccagacggcggagactggagaaaatccgtactttaattacaacagccggagagtgatgtcatcaaagtctttcgtattggacacgccaagagagatttcatacaacgaccttgttttagccactgataatttctctgatgcacgtcgcgttgctgaggttgattttggtacggcttattatggtttactaaatggagaccaacatattgtggtgaaacgtctcggtatgactaaatgtccggcgcttgttacccggttctccactgaactacttaacctaggccggcttcgacaccgtaacctagtaatgctccgtggttggtgcaccgaacacggagaaatgcttgtagtgtacgattattccgcgaatcgtaagctaagtcatcttcttttccataatcatatacctggaaactctgttttgcgatggaaaagtcggtacaacgtgatcaaatcgcttgcttgcgctgtacgttatctccacgaggaatgggacgaacaagtcattcaccgaaacattacttcttcaactatatttcttgatagagatatgaatccgcggctttgcggattcgcattggcagagtttttgtctagaaacgacaaggctcatcaagctgcaaaaaagaaaggatctgctcaagggatttttggttatatggcaccagaatacatggaatccggcgaggctacaaccatggcggatgtatacagctttggcgtggtagtgctcgagatggttacggggcagccagcagtggattacaagaggaaaaaagaagatgctcttatggtgttgcgaatccgcgaagtagttggtaaccgaaaaaaactcttggaggagattgcagatattcatttggatgatgaatacgagaatcgagaattggcaaggctattacggttagggttagtttgcacgagaaccgatccgaagttaaggcctagcattagccaagtggtgagtatattggatggaagcgagaggttcttcgaagaggaaggaggaaaggaaggtgacgttagccgcaagcaaatgtatgattcgtctatgttgatgattagacaaatgcaagcgcttgggatccattga

SEQ ID NO: 97448 - protein, 848 aa, Arabidopsis thaliana
  peptide (1)..(848): Ceres Seq. ID no. 12737576
MAMDHLCFVLPTESGELKPPVMVEETTEEEEEKKSRDCGRQVVSLIGDLFRRLHGSKLVKSLNLCSINESKDSISMEINKSFTDMEGVQLSSKVGCENPRIFGYSELYIGTNGFSDELILGSGGFGRVYKALLPSDGTTVAVKCLAEKKGEQFEKTFAAELVAVAQLRHRNLVKLRGWCLHEDELLLVYDYMPNRSLDRVLFRRPEVNSDFKPLDWDRRGKIVKGLAAALFYLHEQLETQIIHRDVKTSNVMLDSEFNAKLGDFGLARWLEHKIDETEHDSSYDSVSSFRNHQFRVADSTRIGGTIGYLPPESFRKKTVATAKTDVFSFGVVVLEVVSGRRAVDLSFSEDKIILLDWVRRLSDNRKLLDAGDSRLAKGSYDLSDMKRMIHLALLCSLNNPTHRPNMKWVIGALSGEFSGNLPALPSFKSHPLYIPLSSLKSTSTSATTTTTRTTMTTTTSTTSFNASSESTPSSNYVTALEDSIYQTAETGENPYFNYNSRRVMSSKSFVLDTPREISYNDLVLATDNFSDARRVAEVDFGTAYYGLLNGDQHIVVKRLGMTKCPALVTRFSTELLNLGRLRHRNLVMLRGWCTEHGEMLVVYDYSANRKLSHLLFHNHIPGNSVLRWKSRYNVIKSLACAVRYLHEEWDEQVIHRNITSSTIFLDRDMNPRLCGFALAEFLSRNDKAHQAAKKKGSAQGIFGYMAPEYMESGEATTMADVYSFGVVVLEMVTGQPAVDYKRKKEDALMVLRIREVVGNRKKLLEEIADIHLDDEYENRELARLLRLGLVCTRTDPKLRPSISQVVSILDGSERFFEEEGGKEGDVSRKQMYDSSMLMIRQMQALGIH

SEQ ID NO: 97449 - protein, 846 aa, Arabidopsis thaliana
  peptide (1)..(846): Ceres Seq. ID no. 12737577
MDHLCFVLPTESGELKPPVMVEETTEEEEEKKSRDCGRQVVSLIGDLFRRLHGSKLVKSLNLCSINESKDSISMEINKSFTDMEGVQLSSKVGCENPRIFGYSELYIGTNGFSDELILGSGGFGRVYKALLPSDGTTVAVKCLAEKKGEQFEKTFAAELVAVAQLRHRNLVKLRGWCLHEDELLLVYDYMPNRSLDRVLFRRPEVNSDFKPLDWDRRGKIVKGLAAALFYLHEQLETQIIHRDVKTSNVMLDSEFNAKLGDFGLARWLEHKIDETEHDSSYDSVSSFRNHQFRVADSTRIGGTIGYLPPESFRKKTVATAKTDVFSFGVVVLEVVSGRRAVDLSFSEDKIILLDWVRRLSDNRKLLDAGDSRLAKGSYDLSDMKRMIHLALLCSLNNPTHRPNMKWVIGALSGEFSGNLPALPSFKSHPLYIPLSSLKSTSTSATTTTTRTTMTTTTSTTSFNASSESTPSSNYVTALEDSIYQTAETGENPYFNYNSRRVMSSKSFVLDTPREISYNDLVLATDNFSDARRVAEVDFGTAYYGLLNGDQHIVVKRLGMTKCPALVTRFSTELLNLGRLRHRNLVMLRGWCTEHGEMLVVYDYSANRKLSHLLFHNHIPGNSVLRWKSRYNVIKSLACAVRYLHEEWDEQVIHRNITSSTIFLDRDMNPRLCGFALAEFLSRNDKAHQAAKKKGSAQGIFGYMAPEYMESGEATTMADVYSFGVVVLEMVTGQPAVDYKRKKEDALMVLRIREVVGNRKKLLEEIADIHLDDEYENRELARLLRLGLVCTRTDPKLRPSISQVVSILDGSERFFEEEGGKEGDVSRKQMYDSSMLMIRQMQALGIH

SEQ ID NO: 97450 - protein, 827 aa, Arabidopsis thaliana
  peptide (1)..(827): Ceres Seq. ID no. 12737578
MVEETTEEEEEKKSRDCGRQVVSLIGDLFRRLHGSKLVKSLNLCSINESKDSISMEINKSFTDMEGVQLSSKVGCENPRIFGYSELYIGTNGFSDELILGSGGFGRVYKALLPSDGTTVAVKCLAEKKGEQFEKTFAAELVAVAQLRHRNLVKLRGWCLHEDELLLVYDYMPNRSLDRVLFRRPEVNSDFKPLDWDRRGKIVKGLAAALFYLHEQLETQIIHRDVKTSNVMLDSEFNAKLGDFGLARWLEHKIDETEHDSSYDSVSSFRNHQFRVADSTRIGGTIGYLPPESFRKKTVATAKTDVFSFGVVVLEVVSGRRAVDLSFSEDKIILLDWVRRLSDNRKLLDAGDSRLAKGSYDLSDMKRMIHLALLCSLNNPTHRPNMKWVIGALSGEFSGNLPALPSFKSHPLYIPLSSLKSTSTSATTTTTRTTMTTTTSTTSFNASSESTPSSNYVTALEDSIYQTAETGENPYFNYNSRRVMSSKSFVLDTPREISYNDLVLATDNFSDARRVAEVDFGTAYYGLLNGDQHIVVKRLGMTKCPALVTRFSTELLNLGRLRHRNLVMLRGWCTEHGEMLVVYDYSANRKLSHLLFHNHIPGNSVLRWKSRYNVIKSLACAVRYLHEEWDEQVIHRNITSSTIFLDRDMNPRLCGFALAEFLSRNDKAHQAAKKKGSAQGIFGYMAPEYMESGEATTMADVYSFGVVVLEMVTGQPAVDYKRKKEDALMVLRIREVVGNRKKLLEEIADIHLDDEYENRELARLLRLGLVCTRTDPKLRPSISQVVSILDGSERFFEEEGGKEGDVSRKQMYDSSMLMIRQMQALGIH

SEQ ID NO: 97451 - DNA, 3111 bp, Arabidopsis thaliana
  misc_feature (1)..(3111): Ceres Seq. ID no. 12737624
  misc_feature (1)..(3111): Ortholog of  Ceres SEQ ID NO 13658778 as cited in SEQ ID NO 66511
atggcttcaagtccacccaagaagaccttaaattcacaatcttcttccttaagccggcctccacaagctgtcaagtttggtcgccggacgtccagtggtcgcattgttagcctctcccgtgacgatgacatggacgtctctggtgattactccggccaaaatgattacatcaactacaccgtcctcatgcctccaacacctgacaaccaacctgctggctcctctggctccacctcggagtctaaaggtgatgctaaccgaggtggaggaggaggagacgggcccaagatggggaataagctggagaggagattgtctgtcatgaaatcaaataacaaatcaatgttgttgaggagccagacgggagattttgatcataacaggtggttgtttgaatctaaaggaaaatacggtattggaaacgcgttttggtcagaagaggatgatacctatgatggtggcgttagcaagtccgatttcttagacaagccatggaaacctctcacgaggaaagttcagatcccggccaaaattcttagtccctacaggttattaatcgtgattcgtcttgtgatagtcttcttcttcctttggtggcgtattacgaaccctaatgaggatgcaatgtggttatggggactatcgatagtctgcgagatttggttcgctttctcttggattcttgacattcttccgaagctaaaccctataaatagagctactgaccttgctgccttgcatgacaagtttgagcagccctctccgtcaaatcccactggtcgctctgatcttcccggtgttgatgtgttcgtttccacggctgaccctgagaaggaaccgcctttagtcactgcaaacacccttctctcgatccttgctgtggattatccaattgagaagctttctgcttacatttctgacgatggtggtgcaattctcacctttgaagctatggctgaagctgttcgttttgctgagtattgggtgccattttgcagaaaacatgatatagagccacggaacccggatagttactttagcattaaaaaggacccaacaaaaaacaagaaaaggcaagatttcgtcaaagatcgtcgttggatcaagcgtgagtatgacgaattcaaggtcaggatcaatggtcttccagaacaaatcaagaaaagagctgaacagttcaacatgagagaagagctcaaggagaagcgaattgcccgagagaaaaatgggggtgtattgccgccagatggggttgaggtggtaaaagcaacgtggatggctgatggtacgcattggccagggacatggtttgaacctaaacctgatcattcaaaaggagatcacgccggaattctacagatcatgagcaaagtgcctgatcttgaaccggtgatgggcggaccgaatgaaggcgcgctagatttcacagggattgatattcgtgtacctatgtttgcttatgtctcgcgtgagaaacgtccaggttttgaccacaacaagaaagccggcgctatgaatggtatggttagagcttcagccatattatccaatggcgcgtttatcctcaatctggactgtgatcactacatctacaactccaaagctatcaaagaaggaatgtgtttcatgatggaccgaggtggtgacaggatctgttatattcagtttccacaacggttcgaaggaatcgacccatcagatcgatatgcaaatcacaatactgtcttcttcgatggtaacatgagagcattagatgggttacaaggtcctgtctatgttggaacagggtgtatgttccgaaggtatgctctctatggattcaacccacctcgagccaatgagtactcaggcgtgtttggtcaggaaaaggctccagctatgcatgtccggactcagtcccaagcatcccaaacgtcccaagcgtctgatttagagtctgatacacagcctcttaatgatgatccagatcttggtctgcccaaaaagtttggtaattcgaccatgttcacagacactattccagttgcagagtaccaaggacggcctctagcagatcacatgtcggttaaaaacggaagaccacctggtgctttgctcctgccacgacctccccttgatgctccaacagtggctgaagccatcgctgtcatttcttgctggtatgaagacaatactgaatggggagatagaatcggatggatttacgggtcggtcacggaagacgtggtgacaggttatcgtatgcataaccgtggttggcggtccgtttactgcatcacaaaacgtgatgctttccgtggcacagctccaatcaatctcactgaccgtctccatcaagttctccgttgggccacaggctctgtagaaatctttttctccaagaacaatgccatgttcgccaccagaaggctcaagtttctccagcgagtcgcctacctcaatgtcgggatctaccctttcacttccatcttcttggtcgtctattgcttcctccctgctctctgtctcttcagcggaaaattcatcgtccagagcctcgatatccacttcctctcctaccttctctgcatcaccgtaaccctaaccctaatctcactcctcgaggtcaaatggtcgggaatcggactggaagaatggtggagaaatgaacagttttggttaatcggaggcacaagcgctcatcttgcagcagtcgttcaaggtttgctcaaagttatagccggaatcgaaatctccttcaccctgacatcgaaagcctcaggagaagacgaagacgacatctttgcggatctttacattgtgaaatggacaggcttattcatcatgccgcttacaatcatcatagtcaaccttgttgcgatagtgattggagcttcgagaacaatatacagtgtgattccgcaatggggcaagttaatgggaggaatattctttagtttatgggtcttgactcatatgtatccgtttgctaaaggattgatgggtcgaagaggaaaggttccaacgattgtttatgtttggtccgggcttgtgtcgattaccgtctcgctgctttggatcaccattagtcctccagatgatgtttcaggcagtggaggaatctcagtgtaa

SEQ ID NO: 97452 - protein, 1036 aa, Arabidopsis thaliana
  peptide (1)..(1036): Ceres Seq. ID no. 12737625
MASSPPKKTLNSQSSSLSRPPQAVKFGRRTSSGRIVSLSRDDDMDVSGDYSGQNDYINYTVLMPPTPDNQPAGSSGSTSESKGDANRGGGGGDGPKMGNKLERRLSVMKSNNKSMLLRSQTGDFDHNRWLFESKGKYGIGNAFWSEEDDTYDGGVSKSDFLDKPWKPLTRKVQIPAKILSPYRLLIVIRLVIVFFFLWWRITNPNEDAMWLWGLSIVCEIWFAFSWILDILPKLNPINRATDLAALHDKFEQPSPSNPTGRSDLPGVDVFVSTADPEKEPPLVTANTLLSILAVDYPIEKLSAYISDDGGAILTFEAMAEAVRFAEYWVPFCRKHDIEPRNPDSYFSIKKDPTKNKKRQDFVKDRRWIKREYDEFKVRINGLPEQIKKRAEQFNMREELKEKRIAREKNGGVLPPDGVEVVKATWMADGTHWPGTWFEPKPDHSKGDHAGILQIMSKVPDLEPVMGGPNEGALDFTGIDIRVPMFAYVSREKRPGFDHNKKAGAMNGMVRASAILSNGAFILNLDCDHYIYNSKAIKEGMCFMMDRGGDRICYIQFPQRFEGIDPSDRYANHNTVFFDGNMRALDGLQGPVYVGTGCMFRRYALYGFNPPRANEYSGVFGQEKAPAMHVRTQSQASQTSQASDLESDTQPLNDDPDLGLPKKFGNSTMFTDTIPVAEYQGRPLADHMSVKNGRPPGALLLPRPPLDAPTVAEAIAVISCWYEDNTEWGDRIGWIYGSVTEDVVTGYRMHNRGWRSVYCITKRDAFRGTAPINLTDRLHQVLRWATGSVEIFFSKNNAMFATRRLKFLQRVAYLNVGIYPFTSIFLVVYCFLPALCLFSGKFIVQSLDIHFLSYLLCITVTLTLISLLEVKWSGIGLEEWWRNEQFWLIGGTSAHLAAVVQGLLKVIAGIEISFTLTSKASGEDEDDIFADLYIVKWTGLFIMPLTIIIVNLVAIVIGASRTIYSVIPQWGKLMGGIFFSLWVLTHMYPFAKGLMGRRGKVPTIVYVWSGLVSITVSLLWITISPPDDVSGSGGISV

SEQ ID NO: 97453 - protein, 993 aa, Arabidopsis thaliana
  peptide (1)..(993): Ceres Seq. ID no. 12737626
MDVSGDYSGQNDYINYTVLMPPTPDNQPAGSSGSTSESKGDANRGGGGGDGPKMGNKLERRLSVMKSNNKSMLLRSQTGDFDHNRWLFESKGKYGIGNAFWSEEDDTYDGGVSKSDFLDKPWKPLTRKVQIPAKILSPYRLLIVIRLVIVFFFLWWRITNPNEDAMWLWGLSIVCEIWFAFSWILDILPKLNPINRATDLAALHDKFEQPSPSNPTGRSDLPGVDVFVSTADPEKEPPLVTANTLLSILAVDYPIEKLSAYISDDGGAILTFEAMAEAVRFAEYWVPFCRKHDIEPRNPDSYFSIKKDPTKNKKRQDFVKDRRWIKREYDEFKVRINGLPEQIKKRAEQFNMREELKEKRIAREKNGGVLPPDGVEVVKATWMADGTHWPGTWFEPKPDHSKGDHAGILQIMSKVPDLEPVMGGPNEGALDFTGIDIRVPMFAYVSREKRPGFDHNKKAGAMNGMVRASAILSNGAFILNLDCDHYIYNSKAIKEGMCFMMDRGGDRICYIQFPQRFEGIDPSDRYANHNTVFFDGNMRALDGLQGPVYVGTGCMFRRYALYGFNPPRANEYSGVFGQEKAPAMHVRTQSQASQTSQASDLESDTQPLNDDPDLGLPKKFGNSTMFTDTIPVAEYQGRPLADHMSVKNGRPPGALLLPRPPLDAPTVAEAIAVISCWYEDNTEWGDRIGWIYGSVTEDVVTGYRMHNRGWRSVYCITKRDAFRGTAPINLTDRLHQVLRWATGSVEIFFSKNNAMFATRRLKFLQRVAYLNVGIYPFTSIFLVVYCFLPALCLFSGKFIVQSLDIHFLSYLLCITVTLTLISLLEVKWSGIGLEEWWRNEQFWLIGGTSAHLAAVVQGLLKVIAGIEISFTLTSKASGEDEDDIFADLYIVKWTGLFIMPLTIIIVNLVAIVIGASRTIYSVIPQWGKLMGGIFFSLWVLTHMYPFAKGLMGRRGKVPTIVYVWSGLVSITVSLLWITISPPDDVSGSGGISV

SEQ ID NO: 97454 - protein, 974 aa, Arabidopsis thaliana
  peptide (1)..(974): Ceres Seq. ID no. 12737627
MPPTPDNQPAGSSGSTSESKGDANRGGGGGDGPKMGNKLERRLSVMKSNNKSMLLRSQTGDFDHNRWLFESKGKYGIGNAFWSEEDDTYDGGVSKSDFLDKPWKPLTRKVQIPAKILSPYRLLIVIRLVIVFFFLWWRITNPNEDAMWLWGLSIVCEIWFAFSWILDILPKLNPINRATDLAALHDKFEQPSPSNPTGRSDLPGVDVFVSTADPEKEPPLVTANTLLSILAVDYPIEKLSAYISDDGGAILTFEAMAEAVRFAEYWVPFCRKHDIEPRNPDSYFSIKKDPTKNKKRQDFVKDRRWIKREYDEFKVRINGLPEQIKKRAEQFNMREELKEKRIAREKNGGVLPPDGVEVVKATWMADGTHWPGTWFEPKPDHSKGDHAGILQIMSKVPDLEPVMGGPNEGALDFTGIDIRVPMFAYVSREKRPGFDHNKKAGAMNGMVRASAILSNGAFILNLDCDHYIYNSKAIKEGMCFMMDRGGDRICYIQFPQRFEGIDPSDRYANHNTVFFDGNMRALDGLQGPVYVGTGCMFRRYALYGFNPPRANEYSGVFGQEKAPAMHVRTQSQASQTSQASDLESDTQPLNDDPDLGLPKKFGNSTMFTDTIPVAEYQGRPLADHMSVKNGRPPGALLLPRPPLDAPTVAEAIAVISCWYEDNTEWGDRIGWIYGSVTEDVVTGYRMHNRGWRSVYCITKRDAFRGTAPINLTDRLHQVLRWATGSVEIFFSKNNAMFATRRLKFLQRVAYLNVGIYPFTSIFLVVYCFLPALCLFSGKFIVQSLDIHFLSYLLCITVTLTLISLLEVKWSGIGLEEWWRNEQFWLIGGTSAHLAAVVQGLLKVIAGIEISFTLTSKASGEDEDDIFADLYIVKWTGLFIMPLTIIIVNLVAIVIGASRTIYSVIPQWGKLMGGIFFSLWVLTHMYPFAKGLMGRRGKVPTIVYVWSGLVSITVSLLWITISPPDDVSGSGGISV

SEQ ID NO: 97455 - DNA, 1981 bp, Arabidopsis thaliana
  misc_feature (1)..(1981): Ceres Seq. ID no. 12737634
  misc_feature (1)..(1981): Ortholog of  Ceres SEQ ID NO 12626078 as cited in SEQ ID NO 69113
aattgcaatcttctcggttgtgtgagagaatcaatcaccatgtatcggcttgtctccaacgttgcttccaaagctaggattgccagaaagtgtacaagccagattggaagcaggctcaattctactaggaattatgcagcaaaagacataaggttcggtgttgaagctcgggctttaatgcttaggggtgttgaggatcttgctgatgcagttaaagtcactatgggacccaagggtcgtaatgtcatcatcgaacaaagctggggtgcaccaaaggtgacaaaggatggtgtgactgttgccaagagcattgagttcaaggatagaattaagaacgttggtgccagtcttgtgaaacaggttgctaacgccacaaatgacgtagctggtgatggaacaacgtgtgccacagtccttactagagctatcttcacggaaggttgtaaatcagttgccgctggaatgaatgcaatggacctaagacgtggtatcaaattggcagttgatactgttgtgacgaacttgcagagccgagcacgcatgattagcacctctgaagaaatcgcccaagttggaacaatatcagctaatggagatagggaaattggtgaactgattgcaaaggctatggaaactgtcggcaaagagggagtgatcacaattcaagatggcaagaccttgtttaatgagctggaagttgttgagggtatgaagattgacaggggatacatctccccgtacttcataactaacccgaaaacacaaaaatgtgaactagaagatcctctcattcttatccacgagaagaaaatttccaatataaacgcaatggtgaaagtattagaactggccctcaagaagcaaaggccgctgctgatcgttgctgaggatgtggagagcgatgctcttgccaccctaattctgaacaaacttcgtgctaatatcaaggtctgtgctgtgaaggcccctggttttggagagaaccgaaaggccaatttacatgatctagctgccctcactggagcccaggtaataacagaagagttgggtatgaatctagacaacattgacctcagtatgtttggaaactgcaagaaggtaacggtatccaaagatgatactgttgttctcgatggggctggtgacaagcaagcaattggggaacgatgtgaacagatacgatccatggttgaagcaagcacttctgattatgacaaggagaagttgcaagaaaggttggctaagctttcgggtggtgttgctgtactaaagattggaggagcaagtgagacagaagttagtgaaaagaaagatagagtaacggatgctctaaatgccactaaagcagccgtagaggagggtattgttccaggtggtggtgttgctcttttgtatgcttcgaaagaacttgagaagctttccacagctaactttgatcagaaaattggtgttcaaatcattcaaaacgcactcaagacacctgtttacacgattgcttccaatgctggagtcgagggtgcagttgtcgtaggcaagcttttggaacaagataatcctgaccttggttatgatgctgctaaaggagaatatgtggacatgataaaggctggtattatcgatcctttgaaagtgatcagaaccgcattagttgatgctgcaagtgtttcgtctttgttgacaacgacggaagcagttgtgactgagattccaacgaaagaggtagcatctccgggtatgggcggtggtggcatgggcggcatgggtggcatgggcggtatgggaggaatgggtttctgaggagaactataaaccctgagtagggttctttggaatctgttgtgagagatgctacggttggttcatccacaagacactaatgtattctttaatcatgattggtagagagagaccttcagattttccgtgattttcaattcacaaacgatttataaactattttgaagaagatccttttccgatt

SEQ ID NO: 97456 - protein, 598 aa, Arabidopsis thaliana
  peptide (1)..(598): Ceres Seq. ID no. 12737635
NCNLLGCVRESITMYRLVSNVASKARIARKCTSQIGSRLNSTRNYAAKDIRFGVEARALMLRGVEDLADAVKVTMGPKGRNVIIEQSWGAPKVTKDGVTVAKSIEFKDRIKNVGASLVKQVANATNDVAGDGTTCATVLTRAIFTEGCKSVAAGMNAMDLRRGIKLAVDTVVTNLQSRARMISTSEEIAQVGTISANGDREIGELIAKAMETVGKEGVITIQDGKTLFNELEVVEGMKIDRGYISPYFITNPKTQKCELEDPLILIHEKKISNINAMVKVLELALKKQRPLLIVAEDVESDALATLILNKLRANIKVCAVKAPGFGENRKANLHDLAALTGAQVITEELGMNLDNIDLSMFGNCKKVTVSKDDTVVLDGAGDKQAIGERCEQIRSMVEASTSDYDKEKLQERLAKLSGGVAVLKIGGASETEVSEKKDRVTDALNATKAAVEEGIVPGGGVALLYASKELEKLSTANFDQKIGVQIIQNALKTPVYTIASNAGVEGAVVVGKLLEQDNPDLGYDAAKGEYVDMIKAGIIDPLKVIRTALVDAASVSSLLTTTEAVVTEIPTKEVASPGMGGGGMGGMGGMGGMGGMGF

SEQ ID NO: 97457 - protein, 585 aa, Arabidopsis thaliana
  peptide (1)..(585): Ceres Seq. ID no. 12737636
MYRLVSNVASKARIARKCTSQIGSRLNSTRNYAAKDIRFGVEARALMLRGVEDLADAVKVTMGPKGRNVIIEQSWGAPKVTKDGVTVAKSIEFKDRIKNVGASLVKQVANATNDVAGDGTTCATVLTRAIFTEGCKSVAAGMNAMDLRRGIKLAVDTVVTNLQSRARMISTSEEIAQVGTISANGDREIGELIAKAMETVGKEGVITIQDGKTLFNELEVVEGMKIDRGYISPYFITNPKTQKCELEDPLILIHEKKISNINAMVKVLELALKKQRPLLIVAEDVESDALATLILNKLRANIKVCAVKAPGFGENRKANLHDLAALTGAQVITEELGMNLDNIDLSMFGNCKKVTVSKDDTVVLDGAGDKQAIGERCEQIRSMVEASTSDYDKEKLQERLAKLSGGVAVLKIGGASETEVSEKKDRVTDALNATKAAVEEGIVPGGGVALLYASKELEKLSTANFDQKIGVQIIQNALKTPVYTIASNAGVEGAVVVGKLLEQDNPDLGYDAAKGEYVDMIKAGIIDPLKVIRTALVDAASVSSLLTTTEAVVTEIPTKEVASPGMGGGGMGGMGGMGGMGGMGF

SEQ ID NO: 97458 - protein, 539 aa, Arabidopsis thaliana
  peptide (1)..(539): Ceres Seq. ID no. 12737637
MLRGVEDLADAVKVTMGPKGRNVIIEQSWGAPKVTKDGVTVAKSIEFKDRIKNVGASLVKQVANATNDVAGDGTTCATVLTRAIFTEGCKSVAAGMNAMDLRRGIKLAVDTVVTNLQSRARMISTSEEIAQVGTISANGDREIGELIAKAMETVGKEGVITIQDGKTLFNELEVVEGMKIDRGYISPYFITNPKTQKCELEDPLILIHEKKISNINAMVKVLELALKKQRPLLIVAEDVESDALATLILNKLRANIKVCAVKAPGFGENRKANLHDLAALTGAQVITEELGMNLDNIDLSMFGNCKKVTVSKDDTVVLDGAGDKQAIGERCEQIRSMVEASTSDYDKEKLQERLAKLSGGVAVLKIGGASETEVSEKKDRVTDALNATKAAVEEGIVPGGGVALLYASKELEKLSTANFDQKIGVQIIQNALKTPVYTIASNAGVEGAVVVGKLLEQDNPDLGYDAAKGEYVDMIKAGIIDPLKVIRTALVDAASVSSLLTTTEAVVTEIPTKEVASPGMGGGGMGGMGGMGGMGGMGF

SEQ ID NO: 97459 - DNA, 1308 bp, Arabidopsis thaliana
  misc_feature (1)..(1308): Ceres Seq. ID no. 12737645
  misc_feature (1)..(1308): Ortholog of  Ceres SEQ ID NO 12593464 as cited in SEQ ID NO 69039
atgagtttctgcaaattggtttcttttgttttgatccttcacttactaaactcgtgtctgatttcatgttcctcgaatgatttgtctcaaattcctaaaaatttccttagtctagctaaaagagaagattttttcgattggatggttggaataagaaggaggatccacgagaacccagagttaggttacgaggaagtagagacatctaagctagtcaagacagaattggacaagatgggtgtgtcttataagaatccagttgctgtaactggtgttattggatatgttggaactggccatgccccctttgttgctttgagggctgatatggatgcacttcctattcaggaaatggtggaatgggaacacaagagtaagattccagggaagatgcacgcttgcggacatgacgctcacactacgatgctcctcggtgctgcaaagttgctcaaagaacaccaagaagagctacagggtacagtgattctggttttccaaccagctgaggaaggaggagcaggtgcaaagaaaatcgtggaggctggagtattggagaatgtgggtgcaatctttggattacatgtttcgaatctattgggattaggtcaactgagctcaagagagggtctattgatggctggtagtggacgtttcaaagctacgataagcgggaaaggaggtcatgcagctcttcctcaattcgccatagatccagtattggcagcttcaaatgttattctgagcttacaacacctcgtttcacgagaggcagatcctttagactcgcaggtggttacagttgctacatttgaaggcagtgatgcttttaatgtcattcccgactctgttactatcggtggcacattccgagcccttttacctaaaagttttgagcaactcaagcaaagaattgttcaggttatcacaacgcaagcaagcgtaaatatgtgtaatgcaacagttgactttcttgaagatgagactcctcctttcccgccgactgtgaacaataaaaccttgcacctgttttacaagaacgtttcagtggatatgttagggattgagaattatgttgagacgctaccagtgatggtatcagaggattttgctttctaccaacaagcaatcccgggacattttagctttgttgggatgcagaacaaatctcattcaccaatggcgaaccctcactctccgttttttgaagttaatgaagaattactcccttatggtgcttcccttcttgcttctttggccacaagatatcttcttgactcatcttcatcgccaaataaagatgaactttga

SEQ ID NO: 97460 - protein, 435 aa, Arabidopsis thaliana
  peptide (1)..(435): Ceres Seq. ID no. 12737646
MSFCKLVSFVLILHLLNSCLISCSSNDLSQIPKNFLSLAKREDFFDWMVGIRRRIHENPELGYEEVETSKLVKTELDKMGVSYKNPVAVTGVIGYVGTGHAPFVALRADMDALPIQEMVEWEHKSKIPGKMHACGHDAHTTMLLGAAKLLKEHQEELQGTVILVFQPAEEGGAGAKKIVEAGVLENVGAIFGLHVSNLLGLGQLSSREGLLMAGSGRFKATISGKGGHAALPQFAIDPVLAASNVILSLQHLVSREADPLDSQVVTVATFEGSDAFNVIPDSVTIGGTFRALLPKSFEQLKQRIVQVITTQASVNMCNATVDFLEDETPPFPPTVNNKTLHLFYKNVSVDMLGIENYVETLPVMVSEDFAFYQQAIPGHFSFVGMQNKSHSPMANPHSPFFEVNEELLPYGASLLASLATRYLLDSSSSPNKDEL

SEQ ID NO: 97461 - protein, 388 aa, Arabidopsis thaliana
  peptide (1)..(388): Ceres Seq. ID no. 12737647
MVGIRRRIHENPELGYEEVETSKLVKTELDKMGVSYKNPVAVTGVIGYVGTGHAPFVALRADMDALPIQEMVEWEHKSKIPGKMHACGHDAHTTMLLGAAKLLKEHQEELQGTVILVFQPAEEGGAGAKKIVEAGVLENVGAIFGLHVSNLLGLGQLSSREGLLMAGSGRFKATISGKGGHAALPQFAIDPVLAASNVILSLQHLVSREADPLDSQVVTVATFEGSDAFNVIPDSVTIGGTFRALLPKSFEQLKQRIVQVITTQASVNMCNATVDFLEDETPPFPPTVNNKTLHLFYKNVSVDMLGIENYVETLPVMVSEDFAFYQQAIPGHFSFVGMQNKSHSPMANPHSPFFEVNEELLPYGASLLASLATRYLLDSSSSPNKDEL

SEQ ID NO: 97462 - protein, 357 aa, Arabidopsis thaliana
  peptide (1)..(357): Ceres Seq. ID no. 12737648
MGVSYKNPVAVTGVIGYVGTGHAPFVALRADMDALPIQEMVEWEHKSKIPGKMHACGHDAHTTMLLGAAKLLKEHQEELQGTVILVFQPAEEGGAGAKKIVEAGVLENVGAIFGLHVSNLLGLGQLSSREGLLMAGSGRFKATISGKGGHAALPQFAIDPVLAASNVILSLQHLVSREADPLDSQVVTVATFEGSDAFNVIPDSVTIGGTFRALLPKSFEQLKQRIVQVITTQASVNMCNATVDFLEDETPPFPPTVNNKTLHLFYKNVSVDMLGIENYVETLPVMVSEDFAFYQQAIPGHFSFVGMQNKSHSPMANPHSPFFEVNEELLPYGASLLASLATRYLLDSSSSPNKDEL

SEQ ID NO: 97463 - DNA, 2888 bp, Arabidopsis thaliana
  misc_feature (1)..(2888): Ceres Seq. ID no. 12737649
  misc_feature (1)..(2888): Ortholog of  Ceres SEQ ID NO 13654989 as cited in SEQ ID NO 63117
  misc_feature (1)..(2888): Ortholog of  Ceres SEQ ID NO 13584744 as cited in SEQ ID NO 69137
aaaaaaaaaaacagatcccttctttgcatagtaaggaagatattaatggagagtcatcgtgtgttcgttgccacttttatgctgatacttcatcttgttcaagctcaagatcaacccggattcatcaatgtggattgcggtttactccctcgtgattctccttacaacgcactcggaaccggtttagtatatacatcagatgtcggtttagttagcagtgggaaaactggtaaaatcgccaaggaattcgaagagaacaacagtacaccgaatttgacattgagatactttccagacggagcacgaaactgctacaacttaaacgtgagccgtgacaccaactatatgatcaaggctacattcgtgtatggaaattacgatggtcataaagatgagccgaacttcgacctttacttgggtccaaatttatgggcaacggtaagccgcagtgaaactgttgaggagatcatccatgtgacgaaatccgattcgttacaggtttgtcttgctaagacgggagattttataccttttattaatatcttggagctacgaccattgaagaaaaatgtgtacgttacagaaagtggctcactcaagctcttatttaggaagtattttagtgactcaggtcaaacgataaggtatccagatgatatctatgaccgtgtatggcatgcatccttcctggaaaataattgggcacaagtatcgacgactttgggtgtaaacgttactgataattatgatttatcacaagatgtaatggcaacgggcgcaacacctctaaacgatagtgagacattgaacattacatggaacgtagagcctcctactacaaaggtttactcctacatgcactttgcagagcttgagacactaagggccaacgatacaagggaattcaatgtgatgctgaatggaaatgacttgtttggaccttacagtccaataccgctaaagaccgaaacagaaaccaacttaaaaccagaggaatgcgaagatggggcatgtattttgcagcttgtgaagacgtcaaaatcaactcttccgcctttacttaatgctatagaggctttcaccgtgattgatttcctacaagtggagacagatgaagatgacgctgctgctatcaagaatgttcaaaatgcttatggattgattaatagaagcagttggcaaggagatccatgtgtccccaaacagtattcgtgggacggtctaaagtgcagttactcagatagtactccaccaataattaatttcttagacttatctgcaagtggactaaccgggatcatcgcgcctgccattcaaaatcttactcacctagaaatattggccttgtcaaataacaatttgaccggagaagtacctgaatttctagctgacttaaaatcaatcatggtcatagacttaagaggcaataacctcagtggcccggttcctgcctcacttcttcagaagaaaggattgatgctacatcttgatgacaatccccatattctttgcacaactggttcatgtatgcacaaaggagaaggcgaaaaaaagagtatcattgtaccagtggttgcatcaattgtttcattggctgttattataggtgcactcattctgttccttgttttccgaaagaaaaaggcatcaaaagttgaagggacactaccatcttacatgcaagcatcagatggtagatcgccgagatcctctgaaccagcaatagtgacgaaaaacaaaaggtttacttactcacaagttgtgataatgacaaataacttccaaagaatccttgggaaaggagggtttggaatcgtttatcatggctttgtgaacggtgttgaacaagtagctgttaagatactctctcattcatcatctcaagggtataaacaattcaaagctgaggtagaacttcttcttagagttcatcacaagaatttggttggtcttgttgggtattgcgacgaaggagagaacatggctcttatctatgaatacatggccaatggagatttaaaagaacatatgtcaggaacaagaaaccgatttattttaaattgggaaactagactaaaaatagtcattgactctgcgcaagggcttgagtatttgcataatggatgcaaaccactaatggtacacagggacgtcaaaactacaaatatattgttaaatgaacactttgaagccaaacttgctgattttgggctttcaaggtcttttccgattggaggtgaaactcatgtgtcaacagttgttgctggaactcctggatatctcgatcctgaatattacaaaacaaatcggttgacagagaagagtgatgtatatagttttgggattgtattgttggagatgatcacaaatcggccagtgatagaccaaagccgtgaaaagccatatatttcagaatgggtggggataatgcttacgaaaggagacatcattagcattatggatccaagtctaaatggagactatgattctggttctgtgtggaaagctgttgaactagcaatgtcttgtctgaatccttcttcaacaagaagacctaccatgtctcaagttcttattgcattaaacgaatgtttggtatctgaaaattcaaggggaggagcgagtagggacatggactcaaagagttccctagaggtaagcttgacatttgatactgatgtgagcccaatggctaggtagattacatgaaatattatcatgcggtatcacataaatttgtttatatgtttttatttacagaactatcctcaaattagtatctctcttataggccacctttgttaatgaactctgaactttttgtcattgatacatgtgtgaataacagtccaaagtctattattgttccgccgtaatgtatcagtttc

SEQ ID NO: 97464 - protein, 899 aa, Arabidopsis thaliana
  peptide (1)..(899): Ceres Seq. ID no. 12737650
KKKNRSLLCIVRKILMESHRVFVATFMLILHLVQAQDQPGFINVDCGLLPRDSPYNALGTGLVYTSDVGLVSSGKTGKIAKEFEENNSTPNLTLRYFPDGARNCYNLNVSRDTNYMIKATFVYGNYDGHKDEPNFDLYLGPNLWATVSRSETVEEIIHVTKSDSLQVCLAKTGDFIPFINILELRPLKKNVYVTESGSLKLLFRKYFSDSGQTIRYPDDIYDRVWHASFLENNWAQVSTTLGVNVTDNYDLSQDVMATGATPLNDSETLNITWNVEPPTTKVYSYMHFAELETLRANDTREFNVMLNGNDLFGPYSPIPLKTETETNLKPEECEDGACILQLVKTSKSTLPPLLNAIEAFTVIDFLQVETDEDDAAAIKNVQNAYGLINRSSWQGDPCVPKQYSWDGLKCSYSDSTPPIINFLDLSASGLTGIIAPAIQNLTHLEILALSNNNLTGEVPEFLADLKSIMVIDLRGNNLSGPVPASLLQKKGLMLHLDDNPHILCTTGSCMHKGEGEKKSIIVPVVASIVSLAVIIGALILFLVFRKKKASKVEGTLPSYMQASDGRSPRSSEPAIVTKNKRFTYSQVVIMTNNFQRILGKGGFGIVYHGFVNGVEQVAVKILSHSSSQGYKQFKAEVELLLRVHHKNLVGLVGYCDEGENMALIYEYMANGDLKEHMSGTRNRFILNWETRLKIVIDSAQGLEYLHNGCKPLMVHRDVKTTNILLNEHFEAKLADFGLSRSFPIGGETHVSTVVAGTPGYLDPEYYKTNRLTEKSDVYSFGIVLLEMITNRPVIDQSREKPYISEWVGIMLTKGDIISIMDPSLNGDYDSGSVWKAVELAMSCLNPSSTRRPTMSQVLIALNECLVSENSRGGASRDMDSKSSLEVSLTFDTDVSPMAR

SEQ ID NO: 97465 - protein, 884 aa, Arabidopsis thaliana
  peptide (1)..(884): Ceres Seq. ID no. 12737651
MESHRVFVATFMLILHLVQAQDQPGFINVDCGLLPRDSPYNALGTGLVYTSDVGLVSSGKTGKIAKEFEENNSTPNLTLRYFPDGARNCYNLNVSRDTNYMIKATFVYGNYDGHKDEPNFDLYLGPNLWATVSRSETVEEIIHVTKSDSLQVCLAKTGDFIPFINILELRPLKKNVYVTESGSLKLLFRKYFSDSGQTIRYPDDIYDRVWHASFLENNWAQVSTTLGVNVTDNYDLSQDVMATGATPLNDSETLNITWNVEPPTTKVYSYMHFAELETLRANDTREFNVMLNGNDLFGPYSPIPLKTETETNLKPEECEDGACILQLVKTSKSTLPPLLNAIEAFTVIDFLQVETDEDDAAAIKNVQNAYGLINRSSWQGDPCVPKQYSWDGLKCSYSDSTPPIINFLDLSASGLTGIIAPAIQNLTHLEILALSNNNLTGEVPEFLADLKSIMVIDLRGNNLSGPVPASLLQKKGLMLHLDDNPHILCTTGSCMHKGEGEKKSIIVPVVASIVSLAVIIGALILFLVFRKKKASKVEGTLPSYMQASDGRSPRSSEPAIVTKNKRFTYSQVVIMTNNFQRILGKGGFGIVYHGFVNGVEQVAVKILSHSSSQGYKQFKAEVELLLRVHHKNLVGLVGYCDEGENMALIYEYMANGDLKEHMSGTRNRFILNWETRLKIVIDSAQGLEYLHNGCKPLMVHRDVKTTNILLNEHFEAKLADFGLSRSFPIGGETHVSTVVAGTPGYLDPEYYKTNRLTEKSDVYSFGIVLLEMITNRPVIDQSREKPYISEWVGIMLTKGDIISIMDPSLNGDYDSGSVWKAVELAMSCLNPSSTRRPTMSQVLIALNECLVSENSRGGASRDMDSKSSLEVSLTFDTDVSPMAR

SEQ ID NO: 97466 - protein, 873 aa, Arabidopsis thaliana
  peptide (1)..(873): Ceres Seq. ID no. 12737652
MLILHLVQAQDQPGFINVDCGLLPRDSPYNALGTGLVYTSDVGLVSSGKTGKIAKEFEENNSTPNLTLRYFPDGARNCYNLNVSRDTNYMIKATFVYGNYDGHKDEPNFDLYLGPNLWATVSRSETVEEIIHVTKSDSLQVCLAKTGDFIPFINILELRPLKKNVYVTESGSLKLLFRKYFSDSGQTIRYPDDIYDRVWHASFLENNWAQVSTTLGVNVTDNYDLSQDVMATGATPLNDSETLNITWNVEPPTTKVYSYMHFAELETLRANDTREFNVMLNGNDLFGPYSPIPLKTETETNLKPEECEDGACILQLVKTSKSTLPPLLNAIEAFTVIDFLQVETDEDDAAAIKNVQNAYGLINRSSWQGDPCVPKQYSWDGLKCSYSDSTPPIINFLDLSASGLTGIIAPAIQNLTHLEILALSNNNLTGEVPEFLADLKSIMVIDLRGNNLSGPVPASLLQKKGLMLHLDDNPHILCTTGSCMHKGEGEKKSIIVPVVASIVSLAVIIGALILFLVFRKKKASKVEGTLPSYMQASDGRSPRSSEPAIVTKNKRFTYSQVVIMTNNFQRILGKGGFGIVYHGFVNGVEQVAVKILSHSSSQGYKQFKAEVELLLRVHHKNLVGLVGYCDEGENMALIYEYMANGDLKEHMSGTRNRFILNWETRLKIVIDSAQGLEYLHNGCKPLMVHRDVKTTNILLNEHFEAKLADFGLSRSFPIGGETHVSTVVAGTPGYLDPEYYKTNRLTEKSDVYSFGIVLLEMITNRPVIDQSREKPYISEWVGIMLTKGDIISIMDPSLNGDYDSGSVWKAVELAMSCLNPSSTRRPTMSQVLIALNECLVSENSRGGASRDMDSKSSLEVSLTFDTDVSPMAR

SEQ ID NO: 97467 - DNA, 2514 bp, Arabidopsis thaliana
  misc_feature (1)..(2514): Ceres Seq. ID no. 12737653
  misc_feature (1)..(2514): Ortholog of  Ceres SEQ ID NO 13654989 as cited in SEQ ID NO 63117
  misc_feature (1)..(2514): Ortholog of  Ceres SEQ ID NO 13584744 as cited in SEQ ID NO 69137
atgaagtctcttcatttttgtttgctctttatgatcgtatcttttacagtttcgagacccgtcgaagctcaagatcaagcaggattcatcagcttggattgtgggttggtgcctaaggaaaccacttatgtggaaacgtcgacgaatataacatacaaatcagacgcaaattacaccgacagcggattggtcgggaagatcaatgatgcacacaagacactggttcaacaaccgctttgggccttgagaagcttccctgagggtgaaagaaactgttacaacttcaaccttaccgtgaacagcacatatttgatcagaggaacttttttgtatgggaattatgacggcttgaatcaatccccaagctttgaccttcacattggtgctagcaaatggacctctgttaacatagtaggagtaacagataccgtaatgcccgagataatccatgtcttaacacaaaaacgtcttcaagtctgtcttgttaagacaggaaagacgacaccgttcatttcgtcattggaattgcgtccgttgataaataacatttacatcgcggaaagtggatcaatggtcttgcaaaatagagtatattttccatctgattcaacatctatcgtcaggtacgatgaggacatacacgaccgagtatggaatccagtttcagatgatgattcctcatcgataagcacggacctccaggtccaaacaaataacttatatgacgtgcctcaattcgtaatgaagactgctgctatccctaaagatgctagtgcgccatggagcttagtgtggactatagataacaccactgctctgtcatatgtatatatgcatttcgcagaaattcaggatttaaaagccaatgaccttagagaattcgacattacttacaatggtggcaagctttggttttcccagtttaggcctaacaaactcagcattctaacgatgttcagtcaagtccccttgacttcatcaaatggcgagtataatttcactttcgaaatgactagtaactcaactcttccaccccttatcaacgccctcgagatatatacaggtctagaaattctacagcttcagacagacaaggatgaagtttctgctatgatgaacatcaaaacgacttatgatttgagcaaaaagataagctggcagggagatccatgtgctcctcagctgtatcggtgggaaggtctagattgtagttatccggacaccgaggcatcacggattatatccttgaacttgaatgcgagcgggttgaacggtaccataacatctgacataaccaagctaacacagttgagcgagcttttgggtgaaaaggttaaaatgaatcccacagccaaaaaagagagtaaaaaggttcccatagttcctatcgcagcatcagtggctggcgtgtttgctctgatagttatattggccatctttttcattgttaaaggaaaaaaagggaaaagtgctgaaggaccacccttatcagtcactagtggtacagctaaaagtgagacaagatcatccaatccatcaatcatgagaaaagatcgcaagatcacatatcctcaggtattgaagatgactaataacttcgagagagttcttggtaaaggagggtttggaacagtatatcatggaaacatggaagatgctcaagtagctgtgaaaatgctctcgcactcatcggctcaaggttataaagagttcaaagcagaggttgaacttcttttaagagttcaccacagacatttggtgggacttgtgggttactgtgatgatggagataacttggctctgatttatgaatatatggcaaatggagacctgagggagaatatgttaggaaaacgtggaggcaatgtccttacctgggaaaacaggatgcaaatagctgtagaggctgcacaaggactggagtatctgcacaatggatgtacgcctccaatggtccatagagatgttaaaactactaacatcttattgaatgcacagtgtggagcgaaactagccgactttgggctctctagatcttttccaatcgatggtgaatgtcatgtctcaacagtcgttgcgggtacacctgggtacctagaccctgagtattacagaacaaactggctaagcgagaagagtgacgtgtacagcttcggtgtagtgctattagagatagtcacaaaccagcctgttataaatcaaacaagagagagacctcacatcaatgaatgggttggcttcatgctcagtaaaggagacatcaagagcatcgtcgacccaaaactgatgggggactatgacacaaacggtgcatggaagattgtggagctgggtcttgcctgtgtgaacccgtcttcgaacctaagaccaacaatggcacacgttgtgattgagctaaacgagtgtgtggcctttgaaaatgcaaggcgacaaggtagtgaagagatgtacacaagaagttctactaactttagtcacacgtctgcttccgaattttcccccggggcaagataa

SEQ ID NO: 97468 - protein, 837 aa, Arabidopsis thaliana
  peptide (1)..(837): Ceres Seq. ID no. 12737654
MKSLHFCLLFMIVSFTVSRPVEAQDQAGFISLDCGLVPKETTYVETSTNITYKSDANYTDSGLVGKINDAHKTLVQQPLWALRSFPEGERNCYNFNLTVNSTYLIRGTFLYGNYDGLNQSPSFDLHIGASKWTSVNIVGVTDTVMPEIIHVLTQKRLQVCLVKTGKTTPFISSLELRPLINNIYIAESGSMVLQNRVYFPSDSTSIVRYDEDIHDRVWNPVSDDDSSSISTDLQVQTNNLYDVPQFVMKTAAIPKDASAPWSLVWTIDNTTALSYVYMHFAEIQDLKANDLREFDITYNGGKLWFSQFRPNKLSILTMFSQVPLTSSNGEYNFTFEMTSNSTLPPLINALEIYTGLEILQLQTDKDEVSAMMNIKTTYDLSKKISWQGDPCAPQLYRWEGLDCSYPDTEASRIISLNLNASGLNGTITSDITKLTQLSELLGEKVKMNPTAKKESKKVPIVPIAASVAGVFALIVILAIFFIVKGKKGKSAEGPPLSVTSGTAKSETRSSNPSIMRKDRKITYPQVLKMTNNFERVLGKGGFGTVYHGNMEDAQVAVKMLSHSSAQGYKEFKAEVELLLRVHHRHLVGLVGYCDDGDNLALIYEYMANGDLRENMLGKRGGNVLTWENRMQIAVEAAQGLEYLHNGCTPPMVHRDVKTTNILLNAQCGAKLADFGLSRSFPIDGECHVSTVVAGTPGYLDPEYYRTNWLSEKSDVYSFGVVLLEIVTNQPVINQTRERPHINEWVGFMLSKGDIKSIVDPKLMGDYDTNGAWKIVELGLACVNPSSNLRPTMAHVVIELNECVAFENARRQGSEEMYTRSSTNFSHTSASEFSPGAR

SEQ ID NO: 97469 - protein, 827 aa, Arabidopsis thaliana
  peptide (1)..(827): Ceres Seq. ID no. 12737655
MIVSFTVSRPVEAQDQAGFISLDCGLVPKETTYVETSTNITYKSDANYTDSGLVGKINDAHKTLVQQPLWALRSFPEGERNCYNFNLTVNSTYLIRGTFLYGNYDGLNQSPSFDLHIGASKWTSVNIVGVTDTVMPEIIHVLTQKRLQVCLVKTGKTTPFISSLELRPLINNIYIAESGSMVLQNRVYFPSDSTSIVRYDEDIHDRVWNPVSDDDSSSISTDLQVQTNNLYDVPQFVMKTAAIPKDASAPWSLVWTIDNTTALSYVYMHFAEIQDLKANDLREFDITYNGGKLWFSQFRPNKLSILTMFSQVPLTSSNGEYNFTFEMTSNSTLPPLINALEIYTGLEILQLQTDKDEVSAMMNIKTTYDLSKKISWQGDPCAPQLYRWEGLDCSYPDTEASRIISLNLNASGLNGTITSDITKLTQLSELLGEKVKMNPTAKKESKKVPIVPIAASVAGVFALIVILAIFFIVKGKKGKSAEGPPLSVTSGTAKSETRSSNPSIMRKDRKITYPQVLKMTNNFERVLGKGGFGTVYHGNMEDAQVAVKMLSHSSAQGYKEFKAEVELLLRVHHRHLVGLVGYCDDGDNLALIYEYMANGDLRENMLGKRGGNVLTWENRMQIAVEAAQGLEYLHNGCTPPMVHRDVKTTNILLNAQCGAKLADFGLSRSFPIDGECHVSTVVAGTPGYLDPEYYRTNWLSEKSDVYSFGVVLLEIVTNQPVINQTRERPHINEWVGFMLSKGDIKSIVDPKLMGDYDTNGAWKIVELGLACVNPSSNLRPTMAHVVIELNECVAFENARRQGSEEMYTRSSTNFSHTSASEFSPGAR

SEQ ID NO: 97470 - protein, 693 aa, Arabidopsis thaliana
  peptide (1)..(693): Ceres Seq. ID no. 12737656
MPEIIHVLTQKRLQVCLVKTGKTTPFISSLELRPLINNIYIAESGSMVLQNRVYFPSDSTSIVRYDEDIHDRVWNPVSDDDSSSISTDLQVQTNNLYDVPQFVMKTAAIPKDASAPWSLVWTIDNTTALSYVYMHFAEIQDLKANDLREFDITYNGGKLWFSQFRPNKLSILTMFSQVPLTSSNGEYNFTFEMTSNSTLPPLINALEIYTGLEILQLQTDKDEVSAMMNIKTTYDLSKKISWQGDPCAPQLYRWEGLDCSYPDTEASRIISLNLNASGLNGTITSDITKLTQLSELLGEKVKMNPTAKKESKKVPIVPIAASVAGVFALIVILAIFFIVKGKKGKSAEGPPLSVTSGTAKSETRSSNPSIMRKDRKITYPQVLKMTNNFERVLGKGGFGTVYHGNMEDAQVAVKMLSHSSAQGYKEFKAEVELLLRVHHRHLVGLVGYCDDGDNLALIYEYMANGDLRENMLGKRGGNVLTWENRMQIAVEAAQGLEYLHNGCTPPMVHRDVKTTNILLNAQCGAKLADFGLSRSFPIDGECHVSTVVAGTPGYLDPEYYRTNWLSEKSDVYSFGVVLLEIVTNQPVINQTRERPHINEWVGFMLSKGDIKSIVDPKLMGDYDTNGAWKIVELGLACVNPSSNLRPTMAHVVIELNECVAFENARRQGSEEMYTRSSTNFSHTSASEFSPGAR

SEQ ID NO: 97471 - DNA, 2595 bp, Arabidopsis thaliana
  misc_feature (1)..(2595): Ceres Seq. ID no. 12737657
  misc_feature (1)..(2595): Ortholog of  Ceres SEQ ID NO 13584744 as cited in SEQ ID NO 69137
atgaagtctattcatgggtttttgctcttcttgatcacagcttatgtcattttggaatcagttcaagctcaagatcaattaggattcatcagtttggattgtgggttagtccctaagaacgcaacttatacggagaagacgacaaatataacatacaaatcagatgcaaattacatcgatagtggattggtcgggaggatcagtgctgagtacaaagcgcagcttcagcaacaaacttggaccgtaagaagcttccctgagggtgaaagaaactgttacaacttcaaccttaccgctaaaagcagatatctcatcagagcaacctttacgtatgggaattacgatggtttgagacaagtccccaagtttgatattcacattggtcctagcaaatggacttctgttaagttggatggagtaggaaatggtgcagtcctcgagatgattcatgtcttaacacaagaccgtcttcaaatttgtcttgttaagacaggaaaagggataccatttatttcgtcgctggaacttcgtccgttgaacaataatacttacctcacgcaaagtggatcgttgattgggttcgcaagagttttcttttcagccactccaacattcataaggtatgatgaggatatccatgatcgagtctgggttcgacagtttggtaatggattgaaatcgataagcacagaccttttggtcgatacaagtaacccctatgatgtgccacaagctgtggcaaagactgcatgtgtaccttcaaatgctagtcagcctctgatctttgattggactcttgacaacatcacttcacaatcatatgtatacatgcatttcgctgaaatccagactcttaaggataatgacatcagagaattcaacattacttataatggtggtcagaatgtgtactcctatttgaggcctgaaaaattcgagatatcaactctattcgattcaaagcctttgagttctccggatggcagtttcagtttgtctttcacgaagaccggtaactcaactcttcctcctcttatcaacggcctcgagatttataaagtcttagaccttctagaactcgagacagatcaagatgaaggcaagtttagcatcaaaaaggttagctggcaaggagatccatgtgctcctaagtcttatcagtgggaaggtttaaactgcagttatccaaactctgatcaacctcggatcatatccttgaacttggcagagaacaagttgaccggtaccataacacctgaaatatccaagctaacacagttgatagagctagatttgtcaaaaaacgatttatcaggagagataccggagttttttgcagatatgaaaaagcttaatgttttcatttgcagaaacttaagtggaaatctaggtctcaacagcacaattccagactctattcaacaaagattagatagcaaatctctaatactaattaagactgttactaaaactgtcaccctgaaaggcaaaagtaaaaaggttccaatgattcctatcgtagcgtcagtggctggtgtgttcgctctgctagttatcttggccatctttttcgtcgttagaaggaaaaacggggaaagtaataagggtacgaatccatcaatcataacaaaggaacgcaggatcacgtatcccgaggtactaaagatgactaataactttgagagagttcttggtaaaggaggatttggaacagtgtaccatggaaacttggaggatactcaagtagctgtgaaaatgctctctcattcgtcagctcaagggtataaagagttcaaagcagaggttgaacttcttttaagagttcaccatagaaatttggtgggacttgtgggttactgtgatgatggagataacttggctttgatttatgaatacatggctaatggagatctcaaggagaatatgtcaggaaaacgtggaggcaatgtccttacctgggaaaacaggatgcaaatagctgtagaggctgcacaaggattggagtatcttcacaatggatgtacgcctcctatggtccatagagatgttaaaactaccaacatcttattgaatgagcggtatggagcaaaactagccgactttgggctctcaagatctttcccagttgatggcgaaagtcatgtctcgacagtggttgcgggcacacctggttaccttgaccctgagtactacagaacaaactggctaagcgagaagagtgatgtgtacagcttcggtgtagtcctattagagatagtcacaaaccagcctgtgacagataaaacaagagagagaactcacatcaatgaatgggttgggtccatgctcactaaaggggacatcaagagcatccttgacccaaaactgatgggggactatgacacaaacggtgcctggaagattgttgagctggctcttgcatgtgtgaacccgtcttcaaaccggagaccaacaatggcacacgtcgtgactgagctaaacgaatgtgtggccttagaaaatgcaaggcgacaaggtcgtgaagagatgcacacaagtggttatgttgactttagtcgctcttctgcttccgaattttcccctggagccagataa

SEQ ID NO: 97472 - protein, 864 aa, Arabidopsis thaliana
  peptide (1)..(864): Ceres Seq. ID no. 12737658
MKSIHGFLLFLITAYVILESVQAQDQLGFISLDCGLVPKNATYTEKTTNITYKSDANYIDSGLVGRISAEYKAQLQQQTWTVRSFPEGERNCYNFNLTAKSRYLIRATFTYGNYDGLRQVPKFDIHIGPSKWTSVKLDGVGNGAVLEMIHVLTQDRLQICLVKTGKGIPFISSLELRPLNNNTYLTQSGSLIGFARVFFSATPTFIRYDEDIHDRVWVRQFGNGLKSISTDLLVDTSNPYDVPQAVAKTACVPSNASQPLIFDWTLDNITSQSYVYMHFAEIQTLKDNDIREFNITYNGGQNVYSYLRPEKFEISTLFDSKPLSSPDGSFSLSFTKTGNSTLPPLINGLEIYKVLDLLELETDQDEGKFSIKKVSWQGDPCAPKSYQWEGLNCSYPNSDQPRIISLNLAENKLTGTITPEISKLTQLIELDLSKNDLSGEIPEFFADMKKLNVFICRNLSGNLGLNSTIPDSIQQRLDSKSLILIKTVTKTVTLKGKSKKVPMIPIVASVAGVFALLVILAIFFVVRRKNGESNKGTNPSIITKERRITYPEVLKMTNNFERVLGKGGFGTVYHGNLEDTQVAVKMLSHSSAQGYKEFKAEVELLLRVHHRNLVGLVGYCDDGDNLALIYEYMANGDLKENMSGKRGGNVLTWENRMQIAVEAAQGLEYLHNGCTPPMVHRDVKTTNILLNERYGAKLADFGLSRSFPVDGESHVSTVVAGTPGYLDPEYYRTNWLSEKSDVYSFGVVLLEIVTNQPVTDKTRERTHINEWVGSMLTKGDIKSILDPKLMGDYDTNGAWKIVELALACVNPSSNRRPTMAHVVTELNECVALENARRQGREEMHTSGYVDFSRSSASEFSPGAR

SEQ ID NO: 97473 - protein, 717 aa, Arabidopsis thaliana
  peptide (1)..(717): Ceres Seq. ID no. 12737659
MIHVLTQDRLQICLVKTGKGIPFISSLELRPLNNNTYLTQSGSLIGFARVFFSATPTFIRYDEDIHDRVWVRQFGNGLKSISTDLLVDTSNPYDVPQAVAKTACVPSNASQPLIFDWTLDNITSQSYVYMHFAEIQTLKDNDIREFNITYNGGQNVYSYLRPEKFEISTLFDSKPLSSPDGSFSLSFTKTGNSTLPPLINGLEIYKVLDLLELETDQDEGKFSIKKVSWQGDPCAPKSYQWEGLNCSYPNSDQPRIISLNLAENKLTGTITPEISKLTQLIELDLSKNDLSGEIPEFFADMKKLNVFICRNLSGNLGLNSTIPDSIQQRLDSKSLILIKTVTKTVTLKGKSKKVPMIPIVASVAGVFALLVILAIFFVVRRKNGESNKGTNPSIITKERRITYPEVLKMTNNFERVLGKGGFGTVYHGNLEDTQVAVKMLSHSSAQGYKEFKAEVELLLRVHHRNLVGLVGYCDDGDNLALIYEYMANGDLKENMSGKRGGNVLTWENRMQIAVEAAQGLEYLHNGCTPPMVHRDVKTTNILLNERYGAKLADFGLSRSFPVDGESHVSTVVAGTPGYLDPEYYRTNWLSEKSDVYSFGVVLLEIVTNQPVTDKTRERTHINEWVGSMLTKGDIKSILDPKLMGDYDTNGAWKIVELALACVNPSSNRRPTMAHVVTELNECVALENARRQGREEMHTSGYVDFSRSSASEFSPGAR

SEQ ID NO: 97474 - protein, 588 aa, Arabidopsis thaliana
  peptide (1)..(588): Ceres Seq. ID no. 12737660
MHFAEIQTLKDNDIREFNITYNGGQNVYSYLRPEKFEISTLFDSKPLSSPDGSFSLSFTKTGNSTLPPLINGLEIYKVLDLLELETDQDEGKFSIKKVSWQGDPCAPKSYQWEGLNCSYPNSDQPRIISLNLAENKLTGTITPEISKLTQLIELDLSKNDLSGEIPEFFADMKKLNVFICRNLSGNLGLNSTIPDSIQQRLDSKSLILIKTVTKTVTLKGKSKKVPMIPIVASVAGVFALLVILAIFFVVRRKNGESNKGTNPSIITKERRITYPEVLKMTNNFERVLGKGGFGTVYHGNLEDTQVAVKMLSHSSAQGYKEFKAEVELLLRVHHRNLVGLVGYCDDGDNLALIYEYMANGDLKENMSGKRGGNVLTWENRMQIAVEAAQGLEYLHNGCTPPMVHRDVKTTNILLNERYGAKLADFGLSRSFPVDGESHVSTVVAGTPGYLDPEYYRTNWLSEKSDVYSFGVVLLEIVTNQPVTDKTRERTHINEWVGSMLTKGDIKSILDPKLMGDYDTNGAWKIVELALACVNPSSNRRPTMAHVVTELNECVALENARRQGREEMHTSGYVDFSRSSASEFSPGAR

SEQ ID NO: 97475 - DNA, 2667 bp, Arabidopsis thaliana
  misc_feature (1)..(2667): Ceres Seq. ID no. 12737661
  misc_feature (1)..(2667): Ortholog of  Ceres SEQ ID NO 13584744 as cited in SEQ ID NO 69137
atgaggtttttgtctttcttgatcttcgttttcgcagttcttggattggttcaagctcaagaccaatcaggattcataagcttagattgtggtttggtgcctacggaaattacttatgtggaaaagtcgacgaatataacatacagatcagacgcaacttacatcgacagtggagttcccgggaagatcaatgaagtgtacagaacacagtttcagcaacaaatttgggccttgagaagcttccctgagggtcaaagaaattgttacaacttcagtctcaccgcaaaacgtaagtatctaatcagaggaacctttatctatgggaattatgacggtttgaatcaactcccgagctttgatctttacatcggtccaaacaaatggacctctgtttcgatccccggagtgagaaatggttcagtctccgagatgatccatgtcttaagacaagaccatcttcaaatttgtcttgtgaaaacaggagaaactacaccgtttatttcttcattggaacttcgtcctttgaacaataatacatacgtcacaaaaagtggatcgcttattgtggtcgcaagactttacttttcacccactccaccatttctcaggtatgatgaggacgtccatgaccgaatttggattccattcttagataacaaaaattccttgttaagcacggaactctctgttgatacaagtaacttctacaatgtgcctcaaactgtagcgaaaactgctgctgtccctttaaatgctactcagcctctgaaaataaattggagtctcgacgacatcacttcacagtcatatatatacatgcatttcgctgaaatcgagaatcttgaagctaatgagaccagagaattcaatattacttacaatggtggcgaaaattggttctcctattttagacctccaaagtttcgtataacaactgtatacaatccagcagctgtgagttctctagatgggaatttcaacttcactttctcgatgaccggtaactctactcatcctcctcttatcaacggccttgagatttatcaagttctagagcttccacagcttgatacataccaagatgaagtttccgctatgatgaatatcaagacaatatatggattgagcaaaaggtctagctggcaaggagatccatgtgctcctgagttatatagatgggaagttctaacttttggactctctattaggaacttgagtggaagcaatttgagtggtaccataacatctgatatatccaagctaacacatttgagagaactagatttatcaaacaatgacttatcaggagatattccatttgttttttctgatatgaagaatttgacactcataaacttgagtggaaacaagaatctaaatcgctcagttccagagactcttcagaagaggatagataacaaatctttaacactaattagagatgaaaccggaaaaaatagtacaaatgtagttgctatcgcagcatcagtggctagcgtgtttgctgtgctagttatcttggctatcgtttttgtcgtcataaggaaaaaacagagaactaatgaaggaccccgatcattcactactggcacggttaagagtgatgcaagatcatcgagttcatcaatcataacaaaggaacgcaagttcacttattcggaggtactaaagatgactaaaaactttgagagagttcttggtaaaggagggtttggaacagtgtatcatggtaacttggatgatactcaagtagctgtgaaaatgctttctcattcatcagctcaaggttataaagagttcaaagcagaggttgaacttcttttaagagttcatcacagacatttggtgggacttgttggttactgtgatgatggagacaacttagctctgatctatgaatatatggaaaaaggagacctgagggaaaatatgtcaggtaagcactttaatttagttgaatccatctccttagacagtttgaaacattcaaagcctggtacaggaaaacacagtgtcaatgtcctaagctgggaaacaagaatgcaaatagctgtagaggcagcacaaggattggagtatttgcataacggatgtaggcctcctatggtacatagagatgtgaaaccaaccaacattttattaaatgagcggtctcaagcaaaactagccgactttgggctatcgagatcttttcctgttgatggtgaatctcatgtcatgacagtcgttgcaggaacacctggttacttagatcctgagtattacagaacaaactggctaagcgagaagagtgatgtgtacagctttggtgtagtgcttttagagatagtcacaaaccagcctgtgatgaataaaaaccgagagagacctcatatcaatgaatgggttatgttcatgcttaccaatggggatatcaagagtattgtcgacccgaaactgaatgaagactatgacacaaacggtgtgtggaaggttgtagagttggctttagcttgtgtaaacccgtcttcaagccgtagaccgacaatgccacacgtggtgatggagctaaacgaatgtcttgctttggaaatagaaaggaaacaaggtagtcaagcgacgtacataaaggaatctgttgagtttagtccatcttctgcttctgatttttcccctttagctaggtaa

SEQ ID NO: 97476 - protein, 888 aa, Arabidopsis thaliana
  peptide (1)..(888): Ceres Seq. ID no. 12737662
MRFLSFLIFVFAVLGLVQAQDQSGFISLDCGLVPTEITYVEKSTNITYRSDATYIDSGVPGKINEVYRTQFQQQIWALRSFPEGQRNCYNFSLTAKRKYLIRGTFIYGNYDGLNQLPSFDLYIGPNKWTSVSIPGVRNGSVSEMIHVLRQDHLQICLVKTGETTPFISSLELRPLNNNTYVTKSGSLIVVARLYFSPTPPFLRYDEDVHDRIWIPFLDNKNSLLSTELSVDTSNFYNVPQTVAKTAAVPLNATQPLKINWSLDDITSQSYIYMHFAEIENLEANETREFNITYNGGENWFSYFRPPKFRITTVYNPAAVSSLDGNFNFTFSMTGNSTHPPLINGLEIYQVLELPQLDTYQDEVSAMMNIKTIYGLSKRSSWQGDPCAPELYRWEVLTFGLSIRNLSGSNLSGTITSDISKLTHLRELDLSNNDLSGDIPFVFSDMKNLTLINLSGNKNLNRSVPETLQKRIDNKSLTLIRDETGKNSTNVVAIAASVASVFAVLVILAIVFVVIRKKQRTNEGPRSFTTGTVKSDARSSSSSIITKERKFTYSEVLKMTKNFERVLGKGGFGTVYHGNLDDTQVAVKMLSHSSAQGYKEFKAEVELLLRVHHRHLVGLVGYCDDGDNLALIYEYMEKGDLRENMSGKHFNLVESISLDSLKHSKPGTGKHSVNVLSWETRMQIAVEAAQGLEYLHNGCRPPMVHRDVKPTNILLNERSQAKLADFGLSRSFPVDGESHVMTVVAGTPGYLDPEYYRTNWLSEKSDVYSFGVVLLEIVTNQPVMNKNRERPHINEWVMFMLTNGDIKSIVDPKLNEDYDTNGVWKVVELALACVNPSSSRRPTMPHVVMELNECLALEIERKQGSQATYIKESVEFSPSSASDFSPLAR

SEQ ID NO: 97477 - protein, 745 aa, Arabidopsis thaliana
  peptide (1)..(745): Ceres Seq. ID no. 12737663
MIHVLRQDHLQICLVKTGETTPFISSLELRPLNNNTYVTKSGSLIVVARLYFSPTPPFLRYDEDVHDRIWIPFLDNKNSLLSTELSVDTSNFYNVPQTVAKTAAVPLNATQPLKINWSLDDITSQSYIYMHFAEIENLEANETREFNITYNGGENWFSYFRPPKFRITTVYNPAAVSSLDGNFNFTFSMTGNSTHPPLINGLEIYQVLELPQLDTYQDEVSAMMNIKTIYGLSKRSSWQGDPCAPELYRWEVLTFGLSIRNLSGSNLSGTITSDISKLTHLRELDLSNNDLSGDIPFVFSDMKNLTLINLSGNKNLNRSVPETLQKRIDNKSLTLIRDETGKNSTNVVAIAASVASVFAVLVILAIVFVVIRKKQRTNEGPRSFTTGTVKSDARSSSSSIITKERKFTYSEVLKMTKNFERVLGKGGFGTVYHGNLDDTQVAVKMLSHSSAQGYKEFKAEVELLLRVHHRHLVGLVGYCDDGDNLALIYEYMEKGDLRENMSGKHFNLVESISLDSLKHSKPGTGKHSVNVLSWETRMQIAVEAAQGLEYLHNGCRPPMVHRDVKPTNILLNERSQAKLADFGLSRSFPVDGESHVMTVVAGTPGYLDPEYYRTNWLSEKSDVYSFGVVLLEIVTNQPVMNKNRERPHINEWVMFMLTNGDIKSIVDPKLNEDYDTNGVWKVVELALACVNPSSSRRPTMPHVVMELNECLALEIERKQGSQATYIKESVEFSPSSASDFSPLAR

SEQ ID NO: 97478 - protein, 616 aa, Arabidopsis thaliana
  peptide (1)..(616): Ceres Seq. ID no. 12737664
MHFAEIENLEANETREFNITYNGGENWFSYFRPPKFRITTVYNPAAVSSLDGNFNFTFSMTGNSTHPPLINGLEIYQVLELPQLDTYQDEVSAMMNIKTIYGLSKRSSWQGDPCAPELYRWEVLTFGLSIRNLSGSNLSGTITSDISKLTHLRELDLSNNDLSGDIPFVFSDMKNLTLINLSGNKNLNRSVPETLQKRIDNKSLTLIRDETGKNSTNVVAIAASVASVFAVLVILAIVFVVIRKKQRTNEGPRSFTTGTVKSDARSSSSSIITKERKFTYSEVLKMTKNFERVLGKGGFGTVYHGNLDDTQVAVKMLSHSSAQGYKEFKAEVELLLRVHHRHLVGLVGYCDDGDNLALIYEYMEKGDLRENMSGKHFNLVESISLDSLKHSKPGTGKHSVNVLSWETRMQIAVEAAQGLEYLHNGCRPPMVHRDVKPTNILLNERSQAKLADFGLSRSFPVDGESHVMTVVAGTPGYLDPEYYRTNWLSEKSDVYSFGVVLLEIVTNQPVMNKNRERPHINEWVMFMLTNGDIKSIVDPKLNEDYDTNGVWKVVELALACVNPSSSRRPTMPHVVMELNECLALEIERKQGSQATYIKESVEFSPSSASDFSPLAR

SEQ ID NO: 97479 - DNA, 1953 bp, Arabidopsis thaliana
  misc_feature (1)..(1953): Ceres Seq. ID no. 12737671
  misc_feature (1)..(1953): Ortholog of  Ceres SEQ ID NO 13657677 as cited in SEQ ID NO 66119
atgaagcttctccgccgccgtttcttcaactccgtcaatacaatcaccagacctaaccgacgtcactatgccacaaagtatgtcgccaaagtcacttcatcatctccctccggccgatctctctccgccgaagtttctcttcctaatcctcttcccgccgacgtacgtggctaccctctacctcgccgtcatctaatctgccgagccacaaatctcatcaccggagcctctaatctctccgatgctttctctgatctctctgattacctctcttctctctcactctcactcacacccgacgaagcttcagagattctcaaatccctaaattcacctctcctcgccgtggaatttttcaaattagtcccttctctttgcccttactcacaaaatgaccctttcctttacaatcgtatcatcttaatcctctcaaggtcaaatcttccagacagattcgatcgtgttcgttcgattctcgattccatggtgaaatcaaacgtccatggaaacatatcaactgtgaatatcttaataggtttctttggtaacacggaagatttacaaatgtgtttaagattggtgaagaaatgggatttaaagatgaactctttcacttacaagtgtctccttcaagcttacttaagatctcgtgattattctaaagcttttgatgtgtattgtgagattagaagaggaggacataaacttgacatctttgcttacaatatgttgcttgatgctttagctaaagatgaaaaggcttgtcaagtttttgaagatatgaagaagaggcattgtagaagagatgagtatacttacacgattatgatcaggactatggggaggattgggaagtgtgatgaagctgttggtttatttaatgagatgattactgaagggcttacgcttaatgttgttggttataatactttgatgcaagttcttgcgaaaggcaaaatggttgataaggcgattcaggttttctctagaatggtggaaacgggttgtcggccgaatgagtatacgtatagtcttcttttgaatcttttagttgctgaaggtcagcttgtgaggttagatggagttgtggagatttcgaaaaggtatatgactcaggggatatattcttatttggttagaacgttgagcaagttagggcatgtaagtgaggctcacaggctgttttgtgatatgtggagcttccctgtgaaaggagagagagatagttacatgtcgatgcttgagagtttgtgtggtgcgggtaaaaccattgaagcgatagagatgttgagcaagattcatgagaaaggtgtggtaactgatactatgatgtataacactgtgttctcggcgctcgggaagctaaagcaaatatctcatattcatgatctctttgagaaaatgaaaaaggacggtccttctccggatatattcacctataatatacttatcgctagttttggccgggtaggagaagttgatgaggctattaacatatttgaggagcttgagaggagtgattgtaaacccgacattatttcttacaactctttgattaattgtttggggaagaacggtgatgttgatgaagcccatgtgagattcaaggagatgcaagaaaaaggattaaaccctgatgtggtcacatacagcactctgatggaatgttttgggaaaacagagagagtcgaaatggcgtatagtttgttcgaagagatgcttgttaaagggtgtcaaccaaacattgtaacgtacaacattttgcttgattgtctagagaagaacgggagaaccgcagaagcagttgatctatactcaaagatgaaacagcaaggactcacaccggattccattacctacactgtgcttgaacggttgcagtctgtctctcatggaaaatctcgtatccgtaggaagaatccgataacggggtgggttgtcagccctttgtag

SEQ ID NO: 97480 - protein, 650 aa, Arabidopsis thaliana
  peptide (1)..(650): Ceres Seq. ID no. 12737672
MKLLRRRFFNSVNTITRPNRRHYATKYVAKVTSSSPSGRSLSAEVSLPNPLPADVRGYPLPRRHLICRATNLITGASNLSDAFSDLSDYLSSLSLSLTPDEASEILKSLNSPLLAVEFFKLVPSLCPYSQNDPFLYNRIILILSRSNLPDRFDRVRSILDSMVKSNVHGNISTVNILIGFFGNTEDLQMCLRLVKKWDLKMNSFTYKCLLQAYLRSRDYSKAFDVYCEIRRGGHKLDIFAYNMLLDALAKDEKACQVFEDMKKRHCRRDEYTYTIMIRTMGRIGKCDEAVGLFNEMITEGLTLNVVGYNTLMQVLAKGKMVDKAIQVFSRMVETGCRPNEYTYSLLLNLLVAEGQLVRLDGVVEISKRYMTQGIYSYLVRTLSKLGHVSEAHRLFCDMWSFPVKGERDSYMSMLESLCGAGKTIEAIEMLSKIHEKGVVTDTMMYNTVFSALGKLKQISHIHDLFEKMKKDGPSPDIFTYNILIASFGRVGEVDEAINIFEELERSDCKPDIISYNSLINCLGKNGDVDEAHVRFKEMQEKGLNPDVVTYSTLMECFGKTERVEMAYSLFEEMLVKGCQPNIVTYNILLDCLEKNGRTAEAVDLYSKMKQQGLTPDSITYTVLERLQSVSHGKSRIRRKNPITGWVVSPL

SEQ ID NO: 97481 - protein, 489 aa, Arabidopsis thaliana
  peptide (1)..(489): Ceres Seq. ID no. 12737673
MVKSNVHGNISTVNILIGFFGNTEDLQMCLRLVKKWDLKMNSFTYKCLLQAYLRSRDYSKAFDVYCEIRRGGHKLDIFAYNMLLDALAKDEKACQVFEDMKKRHCRRDEYTYTIMIRTMGRIGKCDEAVGLFNEMITEGLTLNVVGYNTLMQVLAKGKMVDKAIQVFSRMVETGCRPNEYTYSLLLNLLVAEGQLVRLDGVVEISKRYMTQGIYSYLVRTLSKLGHVSEAHRLFCDMWSFPVKGERDSYMSMLESLCGAGKTIEAIEMLSKIHEKGVVTDTMMYNTVFSALGKLKQISHIHDLFEKMKKDGPSPDIFTYNILIASFGRVGEVDEAINIFEELERSDCKPDIISYNSLINCLGKNGDVDEAHVRFKEMQEKGLNPDVVTYSTLMECFGKTERVEMAYSLFEEMLVKGCQPNIVTYNILLDCLEKNGRTAEAVDLYSKMKQQGLTPDSITYTVLERLQSVSHGKSRIRRKNPITGWVVSPL

SEQ ID NO: 97482 - protein, 462 aa, Arabidopsis thaliana
  peptide (1)..(462): Ceres Seq. ID no. 12737674
MCLRLVKKWDLKMNSFTYKCLLQAYLRSRDYSKAFDVYCEIRRGGHKLDIFAYNMLLDALAKDEKACQVFEDMKKRHCRRDEYTYTIMIRTMGRIGKCDEAVGLFNEMITEGLTLNVVGYNTLMQVLAKGKMVDKAIQVFSRMVETGCRPNEYTYSLLLNLLVAEGQLVRLDGVVEISKRYMTQGIYSYLVRTLSKLGHVSEAHRLFCDMWSFPVKGERDSYMSMLESLCGAGKTIEAIEMLSKIHEKGVVTDTMMYNTVFSALGKLKQISHIHDLFEKMKKDGPSPDIFTYNILIASFGRVGEVDEAINIFEELERSDCKPDIISYNSLINCLGKNGDVDEAHVRFKEMQEKGLNPDVVTYSTLMECFGKTERVEMAYSLFEEMLVKGCQPNIVTYNILLDCLEKNGRTAEAVDLYSKMKQQGLTPDSITYTVLERLQSVSHGKSRIRRKNPITGWVVSPL

SEQ ID NO: 97483 - DNA, 1620 bp, Arabidopsis thaliana
  misc_feature (1)..(1620): Ceres Seq. ID no. 12737701
  misc_feature (1)..(1620): Ortholog of  Ceres SEQ ID NO 13574398 as cited in SEQ ID NO 0
atggagcaagaacaagagacttacaaatcaagattgtttcatttcaagaacatgaacgaaaactcagcttcaagacatgttaaaagctggagctcagattgtgcaatgagaatggatggttctgacaatttggatgatgatgataatgacatgatgatgtttaggagtcaacccggaaaatgtggcagcgttgaccgaccttctttgcctataggcggagtaacgcctaatcgcaatgacaagcttccgagagtctcttcatcggattccatggaggcactaataatattgcaagcagcaatggagcaaatgaaagagaaattttcgaaattgcttcttggagaagatatgtcaggaggaggaaaaggtgtttcatcggctttggctttatctaacgccattaccaatctcgcagcgtctgcgtttggagaacaacggcgtttagagccaatggcggtggatagaaaaacgcgttggaggagagaaattggatggcttatctctgtggctgattatatagttgaattcgctccaacacaacaaacaaacaaagatggtacttcaatggaagtcatgtcaacaagacaaagaacagatcttctctgtaacatccctgcacttaagaaactcgatgctatgcttctcgattgtcttgataaattcaaggatcaggatgagttttattatgttaaaaaagattctcctgattcttgcgagacaaggaacgatgagaaatggtggttaccggcagtaaaagtcccacctaacggcctctcagagatatcaagaaggtttctacagagccagaaggaatgtgtgaatcaagtccttaaagctgcaatggcgataaacgctcaagttctgtctgaaatggagattcctgaaagctaccttgagtcacttcctaagaatgggagagctagcttgggagatgtgatatacagaatgataacagtagagatgtttgatgcagatcaattcctaattgaaatggatttatcatctgagcacaagattcttgatctaaagaacagaatcgaagcatcgattgtgatatggaagaggaaaatggtgcagaaggacacaaagtctccttggggatcaacagtgagtattgagaaaagagaacagtttgaagaaagagctgaaaccatcttgctactattaaaacaagggtttcccggaatctcacagtcctcgctcgatatcagcaagattcaattcaacagagatgtaggacttgcgatattggagagttattcaagagtgcttgagagtttagctcacaccgtgatgtcgagaatagaagacgtgctttacgctgatcagcttactcaagaacctacaaataatgcaccttctaagaacagatatagcttgaaggagaatgagaaactaagagaggaaagactaagtttcacagaggatatggcttcaggaacactttctgatgttatgcaatggggtaacaaaaacaatgaaatgaagaaagaaagctttttcggagatagagagaaaccgttgttgtcgaaagtcacaggtataatgactaacaacaagaagagttcttatcttgataatcttggagctatgaggagtccaaccgcaagatactcctga

SEQ ID NO: 97484 - protein, 539 aa, Arabidopsis thaliana
  peptide (1)..(539): Ceres Seq. ID no. 12737702
MEQEQETYKSRLFHFKNMNENSASRHVKSWSSDCAMRMDGSDNLDDDDNDMMMFRSQPGKCGSVDRPSLPIGGVTPNRNDKLPRVSSSDSMEALIILQAAMEQMKEKFSKLLLGEDMSGGGKGVSSALALSNAITNLAASAFGEQRRLEPMAVDRKTRWRREIGWLISVADYIVEFAPTQQTNKDGTSMEVMSTRQRTDLLCNIPALKKLDAMLLDCLDKFKDQDEFYYVKKDSPDSCETRNDEKWWLPAVKVPPNGLSEISRRFLQSQKECVNQVLKAAMAINAQVLSEMEIPESYLESLPKNGRASLGDVIYRMITVEMFDADQFLIEMDLSSEHKILDLKNRIEASIVIWKRKMVQKDTKSPWGSTVSIEKREQFEERAETILLLLKQGFPGISQSSLDISKIQFNRDVGLAILESYSRVLESLAHTVMSRIEDVLYADQLTQEPTNNAPSKNRYSLKENEKLREERLSFTEDMASGTLSDVMQWGNKNNEMKKESFFGDREKPLLSKVTGIMTNNKKSSYLDNLGAMRSPTARYS

SEQ ID NO: 97485 - protein, 522 aa, Arabidopsis thaliana
  peptide (1)..(522): Ceres Seq. ID no. 12737703
MNENSASRHVKSWSSDCAMRMDGSDNLDDDDNDMMMFRSQPGKCGSVDRPSLPIGGVTPNRNDKLPRVSSSDSMEALIILQAAMEQMKEKFSKLLLGEDMSGGGKGVSSALALSNAITNLAASAFGEQRRLEPMAVDRKTRWRREIGWLISVADYIVEFAPTQQTNKDGTSMEVMSTRQRTDLLCNIPALKKLDAMLLDCLDKFKDQDEFYYVKKDSPDSCETRNDEKWWLPAVKVPPNGLSEISRRFLQSQKECVNQVLKAAMAINAQVLSEMEIPESYLESLPKNGRASLGDVIYRMITVEMFDADQFLIEMDLSSEHKILDLKNRIEASIVIWKRKMVQKDTKSPWGSTVSIEKREQFEERAETILLLLKQGFPGISQSSLDISKIQFNRDVGLAILESYSRVLESLAHTVMSRIEDVLYADQLTQEPTNNAPSKNRYSLKENEKLREERLSFTEDMASGTLSDVMQWGNKNNEMKKESFFGDREKPLLSKVTGIMTNNKKSSYLDNLGAMRSPTARYS

SEQ ID NO: 97486 - protein, 504 aa, Arabidopsis thaliana
  peptide (1)..(504): Ceres Seq. ID no. 12737704
MRMDGSDNLDDDDNDMMMFRSQPGKCGSVDRPSLPIGGVTPNRNDKLPRVSSSDSMEALIILQAAMEQMKEKFSKLLLGEDMSGGGKGVSSALALSNAITNLAASAFGEQRRLEPMAVDRKTRWRREIGWLISVADYIVEFAPTQQTNKDGTSMEVMSTRQRTDLLCNIPALKKLDAMLLDCLDKFKDQDEFYYVKKDSPDSCETRNDEKWWLPAVKVPPNGLSEISRRFLQSQKECVNQVLKAAMAINAQVLSEMEIPESYLESLPKNGRASLGDVIYRMITVEMFDADQFLIEMDLSSEHKILDLKNRIEASIVIWKRKMVQKDTKSPWGSTVSIEKREQFEERAETILLLLKQGFPGISQSSLDISKIQFNRDVGLAILESYSRVLESLAHTVMSRIEDVLYADQLTQEPTNNAPSKNRYSLKENEKLREERLSFTEDMASGTLSDVMQWGNKNNEMKKESFFGDREKPLLSKVTGIMTNNKKSSYLDNLGAMRSPTARYS

SEQ ID NO: 97487 - DNA, 930 bp, Arabidopsis thaliana
  misc_feature (1)..(930): Ceres Seq. ID no. 12737781
  misc_feature (1)..(930): Ortholog of  Ceres SEQ ID NO 12615972 as cited in SEQ ID NO 62455
  misc_feature (1)..(930): Ortholog of  Ceres SEQ ID NO 13596229 as cited in SEQ ID NO 68800
atggggaagagaccgccgattccaccagatatcgaaaacggaccaccaccaccagcgcgaccacattttcgcccgcccattcccgtgccatgggttgcgtggcttgtgcctctcattttagcagccaacttcgtcacattcgctaccaccatgtatgtgaacgattgccctgcaagatcagatgagtgtctcttatttgatgtccttggaaggctttcgtttcaaccgattaaggagaatatgctactcggtccttctattcccacgctgagaaaactcggagctctcgaaaggagacttgtggaggaaggtgagagatggcgtctcatctcttgcatatggcttcatggtggtttccttcacttgatggctaacatgatcagcctcatgtgtatcggaatgcgccttgaacaagaatttggattcatgagaatcggagctttgtatgtgatctccgggcttggaggaagcctggtgtcttgcttaacagattcccaaggagaacgggtatcagtcggagcatctggtgctttgttcggattactcggtgcaatgctctcagagctcatcacaaactggacaatctatgaaaataagtgcaccgcacttatgacattaatcctgatcattgtactgaatctaagcgtcggattcttaccacgtgtggacaattctgctcattttggaggattcctagctggtttcttcctcgggttcgtccttcttctccgtccgcagtacggatacgtgaacccaaaatacattcctcctggttatgacatgaaacacaagaaatcaaaacacaagtgttatcaacacatcttcagatttacatctctagctatccttcttgcgggattcattgcgggatacactaagcttcttagagaacataccatacagagcatgccattcagagatttcaattag

SEQ ID NO: 97488 - protein, 309 aa, Arabidopsis thaliana
  peptide (1)..(309): Ceres Seq. ID no. 12737782
MGKRPPIPPDIENGPPPPARPHFRPPIPVPWVAWLVPLILAANFVTFATTMYVNDCPARSDECLLFDVLGRLSFQPIKENMLLGPSIPTLRKLGALERRLVEEGERWRLISCIWLHGGFLHLMANMISLMCIGMRLEQEFGFMRIGALYVISGLGGSLVSCLTDSQGERVSVGASGALFGLLGAMLSELITNWTIYENKCTALMTLILIIVLNLSVGFLPRVDNSAHFGGFLAGFFLGFVLLLRPQYGYVNPKYIPPGYDMKHKKSKHKCYQHIFRFTSLAILLAGFIAGYTKLLREHTIQSMPFRDFN

SEQ ID NO: 97489 - protein, 259 aa, Arabidopsis thaliana
  peptide (1)..(259): Ceres Seq. ID no. 12737783
MYVNDCPARSDECLLFDVLGRLSFQPIKENMLLGPSIPTLRKLGALERRLVEEGERWRLISCIWLHGGFLHLMANMISLMCIGMRLEQEFGFMRIGALYVISGLGGSLVSCLTDSQGERVSVGASGALFGLLGAMLSELITNWTIYENKCTALMTLILIIVLNLSVGFLPRVDNSAHFGGFLAGFFLGFVLLLRPQYGYVNPKYIPPGYDMKHKKSKHKCYQHIFRFTSLAILLAGFIAGYTKLLREHTIQSMPFRDFN

SEQ ID NO: 97490 - protein, 229 aa, Arabidopsis thaliana
  peptide (1)..(229): Ceres Seq. ID no. 12737784
MLLGPSIPTLRKLGALERRLVEEGERWRLISCIWLHGGFLHLMANMISLMCIGMRLEQEFGFMRIGALYVISGLGGSLVSCLTDSQGERVSVGASGALFGLLGAMLSELITNWTIYENKCTALMTLILIIVLNLSVGFLPRVDNSAHFGGFLAGFFLGFVLLLRPQYGYVNPKYIPPGYDMKHKKSKHKCYQHIFRFTSLAILLAGFIAGYTKLLREHTIQSMPFRDFN

SEQ ID NO: 97491 - DNA, 1961 bp, Arabidopsis thaliana
  misc_feature (1)..(1961): Ceres Seq. ID no. 12737805
  misc_feature (1)..(1961): Ortholog of  Ceres SEQ ID NO 14302351 as cited in SEQ ID NO 66690
attgaaacaggtctctcttggttatgtgaagacacaagattagcttatggtctgtatcttgaaacagtaatgttatcttcctttggagggattcttcttcttttggttaaaacttgtgttttcactgtgaattctactcttgaggaggctaaggtctatcacctcaagatctcatggggaatgccggttttgttactatcttctgcggttttcggtctagctcatgtcgtggtagcttatcgaaaaagctgtggagcaagaaggaagctaatgtaccacaagattgaccaagaagctgttctctcatgtaaatcgggtttttctggttacaagaaggctcatcgtcaatctttcactcgatcaaactgcaaaatattaacttttgccggtgaatttagacaaaaatctttcaggggaacatctttggatagagaagagctgctacaaccaagactacttgcaaatgcagacagtttattcatcaagattcaaggcttatatgtccattacaagcagcgtacctcaccgtctgtatcttccttcgttattataagcgattctgcagcggagatgaatgcgagaagatcaagactattagacaagcagatgtcaaacttaacctcccaaactcagaacagtcattttcatcgaagctacactattcagcccgatagatcatcgttatatgatcctctcttagctagtcacaacactacacccattagcttgtttgataaggatggtgtgaatcaaataaattctatcaaactcggggacgatatggaaaaggatgagaatactggtatagttctagtccatggatttggaggaggagttttctcatggaggcatgtaatgggagagttgtctcttcagctcggttgcagagtcgttgcttatgaccggcctggttggggattaacctctagacttatccggaaagattgggagaagagaaatctagctaacccttacaagcttgaaagccaagttgatctactactttcattttgttctgagatggggttttcttcggtgatactcgttggccatgacgatggtggtttacttgctctcaaggccgctgaaagaatgcaagcatctacctcgaaacacaatatcacaatcaaaggggtggttttgataaacgttagcttatcaagagaagtagttcctgcctttgcaaggatactacttcatacttcacttaggaagaagcacttggtccgtcctttattgcgaaccgagattacccaattggtgaaccggcgtgcatggtgtgacaccaccaagctaactactgatatcacaatgctgtacaaggctcctctgtgtttagaagcttgggatgaagcactcaatgagataagcaagttatcatatgagatgatactttcacctcaaaacgcatcagctcttgtaaaatccataggagatcttccagttttagttgttgccggagctgaagatgctcttgttcctttgaaatcttcacaagttctggcttcaaaactcactaattctagactagtagagatctctggttgcggccatctgccacacgaggagtgtcctacaacacttgtttccgctctcggctccttcatttgcagactgatacctaaactaccaaactcctaaaaccacacaagaccatctcaaagaagagtttgatggaaacatctgcgagaacatcaggagctctctacacaagaatacgatttttcgtggttccatccatcagcgtaaatcaggcatcagtgtattcttaaagggattaaaactcccaccagatttgctacaaagaactttgcttcagaatcacatcgacgtcaactaggccaagtgaatattatcagcctaattttcttaaacacaaacctgtgatttttacttatgtatgatgtatatatgaattctatttagagataatacaaatccttcccaatgaatttgctttc

SEQ ID NO: 97492 - protein, 546 aa, Arabidopsis thaliana
  peptide (1)..(546): Ceres Seq. ID no. 12737806
IETGLSWLCEDTRLAYGLYLETVMLSSFGGILLLLVKTCVFTVNSTLEEAKVYHLKISWGMPVLLLSSAVFGLAHVVVAYRKSCGARRKLMYHKIDQEAVLSCKSGFSGYKKAHRQSFTRSNCKILTFAGEFRQKSFRGTSLDREELLQPRLLANADSLFIKIQGLYVHYKQRTSPSVSSFVIISDSAAEMNARRSRLLDKQMSNLTSQTQNSHFHRSYTIQPDRSSLYDPLLASHNTTPISLFDKDGVNQINSIKLGDDMEKDENTGIVLVHGFGGGVFSWRHVMGELSLQLGCRVVAYDRPGWGLTSRLIRKDWEKRNLANPYKLESQVDLLLSFCSEMGFSSVILVGHDDGGLLALKAAERMQASTSKHNITIKGVVLINVSLSREVVPAFARILLHTSLRKKHLVRPLLRTEITQLVNRRAWCDTTKLTTDITMLYKAPLCLEAWDEALNEISKLSYEMILSPQNASALVKSIGDLPVLVVAGAEDALVPLKSSQVLASKLTNSRLVEISGCGHLPHEECPTTLVSALGSFICRLIPKLPNS

SEQ ID NO: 97493 - protein, 523 aa, Arabidopsis thaliana
  peptide (1)..(523): Ceres Seq. ID no. 12737807
MLSSFGGILLLLVKTCVFTVNSTLEEAKVYHLKISWGMPVLLLSSAVFGLAHVVVAYRKSCGARRKLMYHKIDQEAVLSCKSGFSGYKKAHRQSFTRSNCKILTFAGEFRQKSFRGTSLDREELLQPRLLANADSLFIKIQGLYVHYKQRTSPSVSSFVIISDSAAEMNARRSRLLDKQMSNLTSQTQNSHFHRSYTIQPDRSSLYDPLLASHNTTPISLFDKDGVNQINSIKLGDDMEKDENTGIVLVHGFGGGVFSWRHVMGELSLQLGCRVVAYDRPGWGLTSRLIRKDWEKRNLANPYKLESQVDLLLSFCSEMGFSSVILVGHDDGGLLALKAAERMQASTSKHNITIKGVVLINVSLSREVVPAFARILLHTSLRKKHLVRPLLRTEITQLVNRRAWCDTTKLTTDITMLYKAPLCLEAWDEALNEISKLSYEMILSPQNASALVKSIGDLPVLVVAGAEDALVPLKSSQVLASKLTNSRLVEISGCGHLPHEECPTTLVSALGSFICRLIPKLPNS

SEQ ID NO: 97494 - protein, 486 aa, Arabidopsis thaliana
  peptide (1)..(486): Ceres Seq. ID no. 12737808
MPVLLLSSAVFGLAHVVVAYRKSCGARRKLMYHKIDQEAVLSCKSGFSGYKKAHRQSFTRSNCKILTFAGEFRQKSFRGTSLDREELLQPRLLANADSLFIKIQGLYVHYKQRTSPSVSSFVIISDSAAEMNARRSRLLDKQMSNLTSQTQNSHFHRSYTIQPDRSSLYDPLLASHNTTPISLFDKDGVNQINSIKLGDDMEKDENTGIVLVHGFGGGVFSWRHVMGELSLQLGCRVVAYDRPGWGLTSRLIRKDWEKRNLANPYKLESQVDLLLSFCSEMGFSSVILVGHDDGGLLALKAAERMQASTSKHNITIKGVVLINVSLSREVVPAFARILLHTSLRKKHLVRPLLRTEITQLVNRRAWCDTTKLTTDITMLYKAPLCLEAWDEALNEISKLSYEMILSPQNASALVKSIGDLPVLVVAGAEDALVPLKSSQVLASKLTNSRLVEISGCGHLPHEECPTTLVSALGSFICRLIPKLPNS

SEQ ID NO: 97495 - DNA, 2640 bp, Arabidopsis thaliana
  misc_feature (1)..(2640): Ceres Seq. ID no. 12737864
  misc_feature (1)..(2640): Ortholog of  Ceres SEQ ID NO 15224874 as cited in SEQ ID NO 55015
ctcgtgtttgtctctttatgtaatcaaagggcttttgggctgggatcatgaaatgaagtattgcagaatccagaggagtttgtttggtaatcaatgaagggttcttcagaatctagttccagaggattaaacaacacctctggtgtttcagagttttgtacagatggttctaagtctttgtctcacattgattatgtcagaagcttacttggttcacataaagaagctaacttgggaggacttgatgatgactctattgtcagagctttggaatgtgaggatgttagcttgcgtcagtggttagacaatccagaccgatccgttgatgcctttgagtgttttcatgttttcagacagattgttgagattgttaatgcagctcactctcaaggcattgttgttcataatgttaggccttcttgtttcgttatgtcttcgtttaacaatgtttcgtttatcgaatccgcttcttgttcggattccgggtctgatgaggatgcaacaacaaagtctcgagagattggtagctcgagacaagaggagattctatcagagagacgaagcaaacaacaagaggaagtaaagaagcaacctttccctatgaaacagatattagcaatggagatgagttggtatacaagtcatgaagaagataatggttctctgtgtaattgtgcttctgatatttaccgtcttggtgttcttctctttgagctattctgccctgtctcctcaagagaagagaagtcaagaactatgtctagtttaagacatcgtgttcttccccctcagatattactcaattggcctaaagaagcttccttttgcttgtggttactgcatcctgagcctagctgtcgaccatcgatgagtgagttgctacaaagtgagtttatcaacgaacctagagagaatttggaagaacgtgaagctgcaatggagctacgggatagaatcgaggaacaagagttattactcgagttcttgtttctgattcaacagaggaaacaagaagctgcagacaaattgcaggatacaatatcgcttctctcttctgatatcgatcaagtcgtaaagcgacagttggttttacagcaaaaagggagagatgtccgttcgttcttagcctcaagaaaacggattagacaaggagctgagaccactgcagcagaggaagaaaatgatgataatagcattgatgaggaatctaagcttgatgatactctagaaagtacacttcttgaaagctctagattaatgagaaatttgaagaaactggaatcagtctactttgcaacacgatacagacaaatcaaggctgctactgctgctgaaaaaccgttggctagatattattcggcattgagttgtaacggtagaagttcagaaaagagttcaatgagccaaccatcaaaagatcctatcaatgattctagacaaggcgggtggatcgatccattcctcgagggtttgtgcaagtatttgtcttttagtaagctaagagtgaaagcagatttgaagcaaggagacttgttgaactcgtctaaccttgtttgcgcaattgggtttgatcgtgatggagagtttttcgccacggcaggcgtcaacaaaaagatcaagatattcgaatgcgagtcgataataaaagatggccgggacattcattaccctgttgtggaacttgctagccggtctaagcttagtggtatatgttggaacagttacattaagagccaagtcgcatcaagtaactttgaaggcgtggttcaagtttgggatgttgcaagaaaccagttggttacagagatgaaggagcatgagaagcgtgtatggtccatcgattattcatcagcagatccaacattgttagctagtggtagtgatgatggttcggttaagctctggagtatcaatcagggggttagtattggaaccatcaagacaaaggcaaacatatgttgtgttcagtttccatcagagacgggtcggtctttagcatttggctcagcagatcacaaagtttactactatgatctaaggaaccccaagcttcctctttgcacaatgattggtcaccacaagaccgtgagttatgttagatttgtagattcatcaacacttgtttcttcttcgacggataacacgctgaagctatgggacttatcaatgtctatttccggtattaatgaaacgcctcttcactcattcatgggacacactaatgttaagaactttgttggattatcagtctctgacgggtatatagcaacaggctctgagactaacgaggtttttgtgtaccacaaggcatttccaatgccggttttgtcgtacaagttcaaaactatagaccctgtgtcggaactcgaagtagacgatgcctcgcagttcatatcctcagtctgctggcggggacagtcgtcgaccttagttgctgcaaactccaccggcaatatcaagattttggagatggtatgaaccaatataaagtggctcagaagcaaaatggtaatattccagggtttggattggtataggaaacaatttttgggagagaaagtaggaaaagtgaaaacaatattgttgctactaaagaattgtgtatatagaaaaaatatatgatatctttctatttgttgt

SEQ ID NO: 97496 - protein, 794 aa, Arabidopsis thaliana
  peptide (1)..(794): Ceres Seq. ID no. 12737865
MKGSSESSSRGLNNTSGVSEFCTDGSKSLSHIDYVRSLLGSHKEANLGGLDDDSIVRALECEDVSLRQWLDNPDRSVDAFECFHVFRQIVEIVNAAHSQGIVVHNVRPSCFVMSSFNNVSFIESASCSDSGSDEDATTKSREIGSSRQEEILSERRSKQQEEVKKQPFPMKQILAMEMSWYTSHEEDNGSLCNCASDIYRLGVLLFELFCPVSSREEKSRTMSSLRHRVLPPQILLNWPKEASFCLWLLHPEPSCRPSMSELLQSEFINEPRENLEEREAAMELRDRIEEQELLLEFLFLIQQRKQEAADKLQDTISLLSSDIDQVVKRQLVLQQKGRDVRSFLASRKRIRQGAETTAAEEENDDNSIDEESKLDDTLESTLLESSRLMRNLKKLESVYFATRYRQIKAATAAEKPLARYYSALSCNGRSSEKSSMSQPSKDPINDSRQGGWIDPFLEGLCKYLSFSKLRVKADLKQGDLLNSSNLVCAIGFDRDGEFFATAGVNKKIKIFECESIIKDGRDIHYPVVELASRSKLSGICWNSYIKSQVASSNFEGVVQVWDVARNQLVTEMKEHEKRVWSIDYSSADPTLLASGSDDGSVKLWSINQGVSIGTIKTKANICCVQFPSETGRSLAFGSADHKVYYYDLRNPKLPLCTMIGHHKTVSYVRFVDSSTLVSSSTDNTLKLWDLSMSISGINETPLHSFMGHTNVKNFVGLSVSDGYIATGSETNEVFVYHKAFPMPVLSYKFKTIDPVSELEVDDASQFISSVCWRGQSSTLVAANSTGNIKILEMV

SEQ ID NO: 97497 - protein, 682 aa, Arabidopsis thaliana
  peptide (1)..(682): Ceres Seq. ID no. 12737866
MSSFNNVSFIESASCSDSGSDEDATTKSREIGSSRQEEILSERRSKQQEEVKKQPFPMKQILAMEMSWYTSHEEDNGSLCNCASDIYRLGVLLFELFCPVSSREEKSRTMSSLRHRVLPPQILLNWPKEASFCLWLLHPEPSCRPSMSELLQSEFINEPRENLEEREAAMELRDRIEEQELLLEFLFLIQQRKQEAADKLQDTISLLSSDIDQVVKRQLVLQQKGRDVRSFLASRKRIRQGAETTAAEEENDDNSIDEESKLDDTLESTLLESSRLMRNLKKLESVYFATRYRQIKAATAAEKPLARYYSALSCNGRSSEKSSMSQPSKDPINDSRQGGWIDPFLEGLCKYLSFSKLRVKADLKQGDLLNSSNLVCAIGFDRDGEFFATAGVNKKIKIFECESIIKDGRDIHYPVVELASRSKLSGICWNSYIKSQVASSNFEGVVQVWDVARNQLVTEMKEHEKRVWSIDYSSADPTLLASGSDDGSVKLWSINQGVSIGTIKTKANICCVQFPSETGRSLAFGSADHKVYYYDLRNPKLPLCTMIGHHKTVSYVRFVDSSTLVSSSTDNTLKLWDLSMSISGINETPLHSFMGHTNVKNFVGLSVSDGYIATGSETNEVFVYHKAFPMPVLSYKFKTIDPVSELEVDDASQFISSVCWRGQSSTLVAANSTGNIKILEMV

SEQ ID NO: 97498 - protein, 625 aa, Arabidopsis thaliana
  peptide (1)..(625): Ceres Seq. ID no. 12737867
MKQILAMEMSWYTSHEEDNGSLCNCASDIYRLGVLLFELFCPVSSREEKSRTMSSLRHRVLPPQILLNWPKEASFCLWLLHPEPSCRPSMSELLQSEFINEPRENLEEREAAMELRDRIEEQELLLEFLFLIQQRKQEAADKLQDTISLLSSDIDQVVKRQLVLQQKGRDVRSFLASRKRIRQGAETTAAEEENDDNSIDEESKLDDTLESTLLESSRLMRNLKKLESVYFATRYRQIKAATAAEKPLARYYSALSCNGRSSEKSSMSQPSKDPINDSRQGGWIDPFLEGLCKYLSFSKLRVKADLKQGDLLNSSNLVCAIGFDRDGEFFATAGVNKKIKIFECESIIKDGRDIHYPVVELASRSKLSGICWNSYIKSQVASSNFEGVVQVWDVARNQLVTEMKEHEKRVWSIDYSSADPTLLASGSDDGSVKLWSINQGVSIGTIKTKANICCVQFPSETGRSLAFGSADHKVYYYDLRNPKLPLCTMIGHHKTVSYVRFVDSSTLVSSSTDNTLKLWDLSMSISGINETPLHSFMGHTNVKNFVGLSVSDGYIATGSETNEVFVYHKAFPMPVLSYKFKTIDPVSELEVDDASQFISSVCWRGQSSTLVAANSTGNIKILEMV

SEQ ID NO: 97499 - DNA, 1221 bp, Arabidopsis thaliana
  misc_feature (1)..(1221): Ceres Seq. ID no. 12737868
  misc_feature (1)..(1221): Ortholog of  Ceres SEQ ID NO 13657789 as cited in SEQ ID NO 66154
atggagaagaaatatgtattttcatttgttatcacatctcttgtctgcgttgttctccttgcaacttccttcaacattggtttaatgtcttcacttcgaccaccgattaatggaactttatcaagtttccccaaaaatgattcgaacgttgtaggaaaacaacctcgtgaagacgacaagctcccacgtttcgcttaccttgtttcaggatctaaaggagatcttgaaagcctttggagaactcttagagcattgtaccatccaagaaaccaatacattgttcacttggatcttgaatcaccggttgatgagagatcagagttagcttctcgcatttcaaacgatcctatgtattcaaaagcaggaaatgtatatatgataactaaagctaatcttgtgacttataccggaccaacaatggtggcgaatacgcttcacgcatgtgcgattcttcttaaaagaaccccggattgggattggtttatcaatcttagtgcttcggattatcccctcgtgactcaagatgatctgattcatacattttcgacattggaccggaaccttaactttatcgagcacacaagttccttaggctggaaatacaagaagcgggcaatgccattaataattgatcctggactctatatgttaaacaaatcaaacgttttattggttagacctaatcgaagtttaccttctgctttcaagttatttaccggatcagcttggatggctctatcgcacgcattcgtggagtatatcatatacggttgggacaatttaccaagaactttactcatgtactacaccaatttcgtttcttctcctgaaggttacttccatacagtcatatgtaacgtgcctgagttctccaaaaccgcggtgaaccatgatcttcactacatcgcatgggacaagccaccgaggcagcatcctcgtatgttgtctcaaagagacatgggaaagatgatttcgagcggatctgcatttggtcggaagttcagaagaaatgatactgttttggataagattgataaggaactgcttatacggataaacgaagacggttttactccaggcggttggtgcggtgggaaaccagagtgctcggttgtcgaagatgtggctaggatcaggcctagctcaggggctgtgaggctcaaggagcttgtagataggttagttacagaggctaaattaggtaagaatcaatgtgtataa

SEQ ID NO: 97500 - protein, 406 aa, Arabidopsis thaliana
  peptide (1)..(406): Ceres Seq. ID no. 12737869
MEKKYVFSFVITSLVCVVLLATSFNIGLMSSLRPPINGTLSSFPKNDSNVVGKQPREDDKLPRFAYLVSGSKGDLESLWRTLRALYHPRNQYIVHLDLESPVDERSELASRISNDPMYSKAGNVYMITKANLVTYTGPTMVANTLHACAILLKRTPDWDWFINLSASDYPLVTQDDLIHTFSTLDRNLNFIEHTSSLGWKYKKRAMPLIIDPGLYMLNKSNVLLVRPNRSLPSAFKLFTGSAWMALSHAFVEYIIYGWDNLPRTLLMYYTNFVSSPEGYFHTVICNVPEFSKTAVNHDLHYIAWDKPPRQHPRMLSQRDMGKMISSGSAFGRKFRRNDTVLDKIDKELLIRINEDGFTPGGWCGGKPECSVVEDVARIRPSSGAVRLKELVDRLVTEAKLGKNQCV

SEQ ID NO: 97501 - protein, 378 aa, Arabidopsis thaliana
  peptide (1)..(378): Ceres Seq. ID no. 12737870
MSSLRPPINGTLSSFPKNDSNVVGKQPREDDKLPRFAYLVSGSKGDLESLWRTLRALYHPRNQYIVHLDLESPVDERSELASRISNDPMYSKAGNVYMITKANLVTYTGPTMVANTLHACAILLKRTPDWDWFINLSASDYPLVTQDDLIHTFSTLDRNLNFIEHTSSLGWKYKKRAMPLIIDPGLYMLNKSNVLLVRPNRSLPSAFKLFTGSAWMALSHAFVEYIIYGWDNLPRTLLMYYTNFVSSPEGYFHTVICNVPEFSKTAVNHDLHYIAWDKPPRQHPRMLSQRDMGKMISSGSAFGRKFRRNDTVLDKIDKELLIRINEDGFTPGGWCGGKPECSVVEDVARIRPSSGAVRLKELVDRLVTEAKLGKNQCV

SEQ ID NO: 97502 - protein, 290 aa, Arabidopsis thaliana
  peptide (1)..(290): Ceres Seq. ID no. 12737871
MYSKAGNVYMITKANLVTYTGPTMVANTLHACAILLKRTPDWDWFINLSASDYPLVTQDDLIHTFSTLDRNLNFIEHTSSLGWKYKKRAMPLIIDPGLYMLNKSNVLLVRPNRSLPSAFKLFTGSAWMALSHAFVEYIIYGWDNLPRTLLMYYTNFVSSPEGYFHTVICNVPEFSKTAVNHDLHYIAWDKPPRQHPRMLSQRDMGKMISSGSAFGRKFRRNDTVLDKIDKELLIRINEDGFTPGGWCGGKPECSVVEDVARIRPSSGAVRLKELVDRLVTEAKLGKNQCV

SEQ ID NO: 97503 - DNA, 2646 bp, Arabidopsis thaliana
  misc_feature (1)..(2646): Ceres Seq. ID no. 12737923
  misc_feature (1)..(2646): Ortholog of  Ceres SEQ ID NO 13593911 as cited in SEQ ID NO 52935
atggccgttgattcaactgatcaacggcgagattttgttgtaaggatcgacggtgaagacaatggtgactcagaaaagttttggagagagtcaagcattaacttctggcataatgataagagctctaaaccacccggaggtgaagaagacgacggaagctttgatttcatgcggcggagtagtgagaaatcggaggagccagatccaccgtcgaagcttataaatcaatttctcaacaagcaaaaagcttccggtgatgaaatctctctcgacatggaagctaacatgcctgagcttcaaaaaaatacggttcctcctctgtcgtcaacggcagtttccggttctgcttcaccagtaaccgcgccagtgacggcgagttatcgtaatggaaccggtgatgcgattagacggagacagaacagagtcacgctttctccgtctgttaaagatggtgatagtagtgaagatgaagaaaacagagtagatggatcagaggttgtgaagtgtacctctaatagatcgacgatgaggactaagactttgatgaagatgaagactagatctagattgatggatcctcctactccgacgtatccggatatggtttcgggtcggactccaaggtccgggaatctaaatcccgggtttagtgggagaaacactaaaccgggaactccaaaccaaggaggatccaaggatttggaagaagaggaagatcccttctcagaggaggatttacctgaaggtttaaggaaggagaagatttgtgtttgggttattatagaatggatatttctgattttgatcattgctagtttgatttgtagcctagtcataccttacttgcgtggcaagacactttgggacctagctctatggaaatgggaagtgatggttcttgtcttgatatgtgggagattggtttctagttggattgtgaagctattcgtttacttcgttgaaagcaattttctttggaggaaaaaggttttgtatttcgtttacgggattcgaaagccggtgcagaattgtctatggctagggcttgtgttgatcgcatggcatttcttgttcgacaagaaagttgaaagagagatgcgaagtactgtgcttaagtatgtgactaaagtattaatctgtttacttgttgctgttatcatctggctcataaagactttactggttaaagttcttgcttcctctttccatatgagtacttacttcgatcggattcaagaatcgttgtttactcaatacgtgattgagacgctctcgggacctcctcgtattgagattcatatagaagaggagaaagtagcaaatgatgttaaaaccttcgagatagttggacgtaagctatctcctctaggtccaaaggcggtttcttctccaccacaagtgactgttggaagcggaaggctgcagaagagtccaagcagagttgggaaaagtccggtgctttcgcggtctggttctaagaaagaaggaggggaagaagggatacggatcgatcatttgcagagaatgaacactaagaacgtttcagcttggaaaatgaagaaactgatgaatgttatcaaaaaaggaactctttctactttagatgaacagatacaagacacgacgactcaggaagatgataaggccacacagataagaagtgaattcgaagcaaaacttgcagcgaggaagatttttcagaatgttgctgagcctggatccaggtacatatatatggaagactttatgcgttttctgtccgaagatgagtctgaaagagcaatggatctatttgaaggagcttctgaatgtcacaaaatcagcaaatcttgtctgaagaattgggtggttaatgcctttagagaacgaagagcactagctttaacattaaacgatacaaaaacagcagtgaacaggcttcatcgaatcgttgatgtattggtcagcattgtgattttaatcatctggcttctcattctgggaatcgctacaaccaagttcttgcttgtcataagctctcagcttcttcttgtagtctttgtgtttggaaattcatgtaaaaccatctttgaagcggtcatcttcgtcttcgttatgcatccatttgatgtcggtgacaggtgtgaaatagacggtgtccagatgattgtggaagagatgaacattttgactactgtctttcttcgatttgataatcagaagattgtatatccaaacagtcttctcggaacaaaacctatcgctaactattaccgcagtcctgatatgcaagatgccattgaattctttgtccatatagcaactccacctgaaaagacaactgccttaagacagaggatactcagctatgtagataacaagaaggatcattggcatccatcgccgatgattgtgtttagagatatgtgtggattaaacagtgtgaagatcgcaatgtggccaacacataagatgaatcatcaaaatatgggagagagatatgtgaggagaggtcaattacttgaagagattggtagattatgcagagagttggatatcgaatatcggttatatcctcttaacatcaacgtaaaaagtcttcctgctgctactcccatcacttctgatcgcattcctcctagctggaatcaacaacgcagtgtttga

SEQ ID NO: 97504 - protein, 881 aa, Arabidopsis thaliana
  peptide (1)..(881): Ceres Seq. ID no. 12737924
MAVDSTDQRRDFVVRIDGEDNGDSEKFWRESSINFWHNDKSSKPPGGEEDDGSFDFMRRSSEKSEEPDPPSKLINQFLNKQKASGDEISLDMEANMPELQKNTVPPLSSTAVSGSASPVTAPVTASYRNGTGDAIRRRQNRVTLSPSVKDGDSSEDEENRVDGSEVVKCTSNRSTMRTKTLMKMKTRSRLMDPPTPTYPDMVSGRTPRSGNLNPGFSGRNTKPGTPNQGGSKDLEEEEDPFSEEDLPEGLRKEKICVWVIIEWIFLILIIASLICSLVIPYLRGKTLWDLALWKWEVMVLVLICGRLVSSWIVKLFVYFVESNFLWRKKVLYFVYGIRKPVQNCLWLGLVLIAWHFLFDKKVEREMRSTVLKYVTKVLICLLVAVIIWLIKTLLVKVLASSFHMSTYFDRIQESLFTQYVIETLSGPPRIEIHIEEEKVANDVKTFEIVGRKLSPLGPKAVSSPPQVTVGSGRLQKSPSRVGKSPVLSRSGSKKEGGEEGIRIDHLQRMNTKNVSAWKMKKLMNVIKKGTLSTLDEQIQDTTTQEDDKATQIRSEFEAKLAARKIFQNVAEPGSRYIYMEDFMRFLSEDESERAMDLFEGASECHKISKSCLKNWVVNAFRERRALALTLNDTKTAVNRLHRIVDVLVSIVILIIWLLILGIATTKFLLVISSQLLLVVFVFGNSCKTIFEAVIFVFVMHPFDVGDRCEIDGVQMIVEEMNILTTVFLRFDNQKIVYPNSLLGTKPIANYYRSPDMQDAIEFFVHIATPPEKTTALRQRILSYVDNKKDHWHPSPMIVFRDMCGLNSVKIAMWPTHKMNHQNMGERYVRRGQLLEEIGRLCRELDIEYRLYPLNINVKSLPAATPITSDRIPPSWNQQRSV

SEQ ID NO: 97505 - protein, 825 aa, Arabidopsis thaliana
  peptide (1)..(825): Ceres Seq. ID no. 12737925
MRRSSEKSEEPDPPSKLINQFLNKQKASGDEISLDMEANMPELQKNTVPPLSSTAVSGSASPVTAPVTASYRNGTGDAIRRRQNRVTLSPSVKDGDSSEDEENRVDGSEVVKCTSNRSTMRTKTLMKMKTRSRLMDPPTPTYPDMVSGRTPRSGNLNPGFSGRNTKPGTPNQGGSKDLEEEEDPFSEEDLPEGLRKEKICVWVIIEWIFLILIIASLICSLVIPYLRGKTLWDLALWKWEVMVLVLICGRLVSSWIVKLFVYFVESNFLWRKKVLYFVYGIRKPVQNCLWLGLVLIAWHFLFDKKVEREMRSTVLKYVTKVLICLLVAVIIWLIKTLLVKVLASSFHMSTYFDRIQESLFTQYVIETLSGPPRIEIHIEEEKVANDVKTFEIVGRKLSPLGPKAVSSPPQVTVGSGRLQKSPSRVGKSPVLSRSGSKKEGGEEGIRIDHLQRMNTKNVSAWKMKKLMNVIKKGTLSTLDEQIQDTTTQEDDKATQIRSEFEAKLAARKIFQNVAEPGSRYIYMEDFMRFLSEDESERAMDLFEGASECHKISKSCLKNWVVNAFRERRALALTLNDTKTAVNRLHRIVDVLVSIVILIIWLLILGIATTKFLLVISSQLLLVVFVFGNSCKTIFEAVIFVFVMHPFDVGDRCEIDGVQMIVEEMNILTTVFLRFDNQKIVYPNSLLGTKPIANYYRSPDMQDAIEFFVHIATPPEKTTALRQRILSYVDNKKDHWHPSPMIVFRDMCGLNSVKIAMWPTHKMNHQNMGERYVRRGQLLEEIGRLCRELDIEYRLYPLNINVKSLPAATPITSDRIPPSWNQQRSV

SEQ ID NO: 97506 - protein, 790 aa, Arabidopsis thaliana
  peptide (1)..(790): Ceres Seq. ID no. 12737926
MEANMPELQKNTVPPLSSTAVSGSASPVTAPVTASYRNGTGDAIRRRQNRVTLSPSVKDGDSSEDEENRVDGSEVVKCTSNRSTMRTKTLMKMKTRSRLMDPPTPTYPDMVSGRTPRSGNLNPGFSGRNTKPGTPNQGGSKDLEEEEDPFSEEDLPEGLRKEKICVWVIIEWIFLILIIASLICSLVIPYLRGKTLWDLALWKWEVMVLVLICGRLVSSWIVKLFVYFVESNFLWRKKVLYFVYGIRKPVQNCLWLGLVLIAWHFLFDKKVEREMRSTVLKYVTKVLICLLVAVIIWLIKTLLVKVLASSFHMSTYFDRIQESLFTQYVIETLSGPPRIEIHIEEEKVANDVKTFEIVGRKLSPLGPKAVSSPPQVTVGSGRLQKSPSRVGKSPVLSRSGSKKEGGEEGIRIDHLQRMNTKNVSAWKMKKLMNVIKKGTLSTLDEQIQDTTTQEDDKATQIRSEFEAKLAARKIFQNVAEPGSRYIYMEDFMRFLSEDESERAMDLFEGASECHKISKSCLKNWVVNAFRERRALALTLNDTKTAVNRLHRIVDVLVSIVILIIWLLILGIATTKFLLVISSQLLLVVFVFGNSCKTIFEAVIFVFVMHPFDVGDRCEIDGVQMIVEEMNILTTVFLRFDNQKIVYPNSLLGTKPIANYYRSPDMQDAIEFFVHIATPPEKTTALRQRILSYVDNKKDHWHPSPMIVFRDMCGLNSVKIAMWPTHKMNHQNMGERYVRRGQLLEEIGRLCRELDIEYRLYPLNINVKSLPAATPITSDRIPPSWNQQRSV

SEQ ID NO: 97507 - DNA, 1886 bp, Arabidopsis thaliana
  misc_feature (1)..(1886): Ceres Seq. ID no. 12737960
  misc_feature (1)..(1886): Ortholog of  Ceres SEQ ID NO 13594037 as cited in SEQ ID NO 55666
  misc_feature (1)..(1886): Ortholog of  Ceres SEQ ID NO 13657707 as cited in SEQ ID NO 66407
cacaaacaacaacattgttaagaataatggcaccaatcaaagaattcatatccaaattctcagatttcaaaaacaacaagaaactcattctctcctccgccgcaatagccttgctattattggcctccatagtcggaatcgccgccacaacaacaaaccaaaacaaaaaccaaaaaatcacaactctatcttcgacatcacacgccattctaaaatctgtttgcagctcaacactatacccggagctctgtttttccgccgtggcagccaccggaggaaaagagctgacgtcacagaaagaagtcatcgaagcgtcacttaacctaactaccaaagccgtgaaacacaactacttcgctgtcaagaagctgatcgcgaagagaaaaggtttgacaccgcgtgaggtcacggcgcttcacgactgtttggagacaatcgacgagacgttagatgagctccacgtggcggtggaggatcttcatcagtatcctaagcaaaaatctctgaggaaacatgccgatgatctcaaaacactaatcagctcagccattactaatcaagggacttgccttgacggtttctcttacgacgacgccgataggaaagttcgtaaggcgttattgaagggtcaggtacacgtggagcacatgtgtagcaacgcattagcaatgatcaagaacatgacagaaaccgacatagccaactttgagctaagagataagtcttcaaccttcaccaacaacaacaaccgcaagctcaaggaggttaccggcgacttagacagtgatggatggccaaagtggttatccgttggagacagaaggcttcttcaagggtcaacaattaaagcagacgctacggtggcggatgacggaagcggtgactttacaacggtagccgcggctgtggctgcggcgccagagaagagtaacaagaggtttgtgatacatataaaggcaggagtttatagagagaatgtggaagtgacgaagaagaagacgaatataatgttcttgggagatggccgtggcaaaactattatcactggaagtagaaatgtcgtcgatggaagcaccactttccactccgctactgttgctgccgtcggcgagaggtttctagcgcgtgacatcacattccaaaacaccgccggtccgtcgaagcatcaagcggtggctctccgagtcggatcagatttttccgctttttaccaatgcgacatgtttgcttatcaagacacactttatgtccactcaaatcgtcaattctttgtgaaatgtcacataaccggaaccgtcgatttcatcttcggaaacgcagccgcggttttacaagactgcgatataaatgcacgcagaccaaattccggtcagaaaaacatggttaccgcccaaggacggtctgatccgaatcaaaacacggggattgtgatccagaattgtcgtattggtggcacgtcggatcttttggccgtgaaaggaacgttcccgacgtatcttggtcgtccttggaaggaatattcacggacggtgataatgcaatcggatatatccgacgtgatccgacccgaaggatggcatgagtggagcgggagttttgcgttggacactctaacttatagagagtatttgaatagaggaggaggggcaggaactgcaaatagagtgaagtggaagggctataaggtaattacaagtgatacagaagctcagccatttacggctggtcagtttattggtggtggaggctggttagcgtcgaccggttttcctttctcgttaagtctttgaaattaaaagattgacttattattttaataaacattgtatttctctatctacatgtatcattaaatcgatgttcatatatgattctcaagttgaacc

SEQ ID NO: 97508 - protein, 595 aa, Arabidopsis thaliana
  peptide (1)..(595): Ceres Seq. ID no. 12737961
QTTTLLRIMAPIKEFISKFSDFKNNKKLILSSAAIALLLLASIVGIAATTTNQNKNQKITTLSSTSHAILKSVCSSTLYPELCFSAVAATGGKELTSQKEVIEASLNLTTKAVKHNYFAVKKLIAKRKGLTPREVTALHDCLETIDETLDELHVAVEDLHQYPKQKSLRKHADDLKTLISSAITNQGTCLDGFSYDDADRKVRKALLKGQVHVEHMCSNALAMIKNMTETDIANFELRDKSSTFTNNNNRKLKEVTGDLDSDGWPKWLSVGDRRLLQGSTIKADATVADDGSGDFTTVAAAVAAAPEKSNKRFVIHIKAGVYRENVEVTKKKTNIMFLGDGRGKTIITGSRNVVDGSTTFHSATVAAVGERFLARDITFQNTAGPSKHQAVALRVGSDFSAFYQCDMFAYQDTLYVHSNRQFFVKCHITGTVDFIFGNAAAVLQDCDINARRPNSGQKNMVTAQGRSDPNQNTGIVIQNCRIGGTSDLLAVKGTFPTYLGRPWKEYSRTVIMQSDISDVIRPEGWHEWSGSFALDTLTYREYLNRGGGAGTANRVKWKGYKVITSDTEAQPFTAGQFIGGGGWLASTGFPFSLSL

SEQ ID NO: 97509 - protein, 587 aa, Arabidopsis thaliana
  peptide (1)..(587): Ceres Seq. ID no. 12737962
MAPIKEFISKFSDFKNNKKLILSSAAIALLLLASIVGIAATTTNQNKNQKITTLSSTSHAILKSVCSSTLYPELCFSAVAATGGKELTSQKEVIEASLNLTTKAVKHNYFAVKKLIAKRKGLTPREVTALHDCLETIDETLDELHVAVEDLHQYPKQKSLRKHADDLKTLISSAITNQGTCLDGFSYDDADRKVRKALLKGQVHVEHMCSNALAMIKNMTETDIANFELRDKSSTFTNNNNRKLKEVTGDLDSDGWPKWLSVGDRRLLQGSTIKADATVADDGSGDFTTVAAAVAAAPEKSNKRFVIHIKAGVYRENVEVTKKKTNIMFLGDGRGKTIITGSRNVVDGSTTFHSATVAAVGERFLARDITFQNTAGPSKHQAVALRVGSDFSAFYQCDMFAYQDTLYVHSNRQFFVKCHITGTVDFIFGNAAAVLQDCDINARRPNSGQKNMVTAQGRSDPNQNTGIVIQNCRIGGTSDLLAVKGTFPTYLGRPWKEYSRTVIMQSDISDVIRPEGWHEWSGSFALDTLTYREYLNRGGGAGTANRVKWKGYKVITSDTEAQPFTAGQFIGGGGWLASTGFPFSLSL

SEQ ID NO: 97510 - protein, 380 aa, Arabidopsis thaliana
  peptide (1)..(380): Ceres Seq. ID no. 12737963
MCSNALAMIKNMTETDIANFELRDKSSTFTNNNNRKLKEVTGDLDSDGWPKWLSVGDRRLLQGSTIKADATVADDGSGDFTTVAAAVAAAPEKSNKRFVIHIKAGVYRENVEVTKKKTNIMFLGDGRGKTIITGSRNVVDGSTTFHSATVAAVGERFLARDITFQNTAGPSKHQAVALRVGSDFSAFYQCDMFAYQDTLYVHSNRQFFVKCHITGTVDFIFGNAAAVLQDCDINARRPNSGQKNMVTAQGRSDPNQNTGIVIQNCRIGGTSDLLAVKGTFPTYLGRPWKEYSRTVIMQSDISDVIRPEGWHEWSGSFALDTLTYREYLNRGGGAGTANRVKWKGYKVITSDTEAQPFTAGQFIGGGGWLASTGFPFSLSL

SEQ ID NO: 97511 - DNA, 939 bp, Arabidopsis thaliana
  misc_feature (1)..(939): Ceres Seq. ID no. 12737980
  misc_feature (1)..(939): Ortholog of  Ceres SEQ ID NO 13599448 as cited in SEQ ID NO 521
  misc_feature (1)..(939): Ortholog of  Ceres SEQ ID NO 14307472 as cited in SEQ ID NO 54559
  misc_feature (1)..(939): Ortholog of  Ceres SEQ ID NO 13596408 as cited in SEQ ID NO 62028
gttttggcataacgaagcatcttcttcttcttccttgtatttattatccatttccagagattctcccttgtgagataacaacgaagaacgaaagagagagagagagagagagatatgatggacggcgttgaaggcggcacggcgatgtacggtggtctcgagacggtgcaatacgtacggacgcatcatcaacatctgtgcagagaaaaccagtgtacctctgctcttgtcaaacacatcaaagctcctcttcatctcgtttggtcacttgtacggagatttgatcagccgcagaaatacaaaccgtttgtgagcagatgtacagtaatcggtgatcctgaaatcggcagtcttagagaagtcaatgttaaatctggtcttcctgcaacaacatctactgagagattagaacttcttgatgatgaagaacacatcctcggtatcaaaatcatcggtggtgatcacagacttaagaattactcgtcgattttgacggttcatccggagataatcgagggaagagcaggaacgatggtgattgaatcgtttgtagttgatgttcctcaaggtaacacaaaggatgagacttgctactttgttgaagcacttatcagatgtaatctcaagtcactagcagatgtttctgaaagattggcttctcaggacattactcagtgaactacataatcaatgaacaagggcattgaagtgaagtatcaattccagtttgtgatataatcaatattcttcaggatttttttggtttggcctagatatatatatagatatctatcctcggtaatgaccagtctaaaaagatgtacatattgtcccaatggtgaagttttgatgtaagatatctcctggtggtttgttatttgtagatatttttgtaaacaatgtaaatgtgaatggtttatgatgtataatatatagttc

SEQ ID NO: 97512 - protein, 187 aa, Arabidopsis thaliana
  peptide (1)..(187): Ceres Seq. ID no. 12737981
MMDGVEGGTAMYGGLETVQYVRTHHQHLCRENQCTSALVKHIKAPLHLVWSLVRRFDQPQKYKPFVSRCTVIGDPEIGSLREVNVKSGLPATTSTERLELLDDEEHILGIKIIGGDHRLKNYSSILTVHPEIIEGRAGTMVIESFVVDVPQGNTKDETCYFVEALIRCNLKSLADVSERLASQDITQ

SEQ ID NO: 97513 - protein, 186 aa, Arabidopsis thaliana
  peptide (1)..(186): Ceres Seq. ID no. 12737982
MDGVEGGTAMYGGLETVQYVRTHHQHLCRENQCTSALVKHIKAPLHLVWSLVRRFDQPQKYKPFVSRCTVIGDPEIGSLREVNVKSGLPATTSTERLELLDDEEHILGIKIIGGDHRLKNYSSILTVHPEIIEGRAGTMVIESFVVDVPQGNTKDETCYFVEALIRCNLKSLADVSERLASQDITQ

SEQ ID NO: 97514 - protein, 177 aa, Arabidopsis thaliana; identical to SEQ ID NO: 26833
  peptide (1)..(177): Ceres Seq. ID no. 12737983

SEQ ID NO: 97515 - DNA, 1418 bp, Arabidopsis thaliana
  misc_feature (1)..(1418): Ceres Seq. ID no. 12738006
  misc_feature (1)..(1418): Ortholog of  Ceres SEQ ID NO 14307273 as cited in SEQ ID NO 54302
  misc_feature (1)..(1418): Ortholog of  Ceres SEQ ID NO 13655375 as cited in SEQ ID NO 63347
  misc_feature (1)..(1418): Ortholog of  Ceres SEQ ID NO 12626166 as cited in SEQ ID NO 64505
  misc_feature (1)..(1418): Ortholog of  Ceres SEQ ID NO 14301978 as cited in SEQ ID NO 0
gtcagatatttttctcaacgtgaaagagagaaaagagaatctctcagaaggtgagcctccaacaaagcgtgaatctctctttctctctctatctctctatctccgagatcgcatcaccggaaatctccttctacggtggtggtggtgacagttgaccagagatggcggcggagaatgagagaaaatctccttcagcagtctccgatatgggagcttgggcaatgaatgtgataagctccgttggaatcatcatggcgaataaacaacttatgtcctcttctggattcgcatttagtttcgctacaactctcaccggtttccacttcgctttaaccgcattggtcggtatggtatcaaacgctaccggattctctgcttcgaagcatgtacctatgtgggagcttatttggttctccattgtcgctaatgtctctattgctgctatgaacttcagtctcatgctcaattccgttggcttctaccaaatctcgaagctgagcatgattcctgtggtatgtgtaatggaatggattctacatagcaagagatactcaagagaagtgaaaatatctgttgtggttgttgttgttggtgttggtatttgtactgtgactgatgttaaagttaatgccaaaggttttatctgtgcttgtgttgcgattttctcgtcatccttgcagcaaattttaataggttctctacagaagaaatattcaattgggtcctttgagttgttgagtaaaacagcgccgattcaagctttttcgcttcttgttgtcggtcctttagttgattatcttcttagtgggaagttcattatgaagtataatatgtcttccggttgctttctattcattcttctctcatgtggtctagctgtgttctgcaacataagccagtacctttgcatcgggcggttttcagcagtatcgttccaagttattggtcacatgaaaaccgtctgtatcctcacgcttggatggctcctatttgattctgcaatgactttcaaaaacgtagcggggatgattgttgcgattgttgggatggtaatctatagttgggcaatggaattggagaaacagtcgattattgcagcaaaggctttaaacagtgtgaaacatagcttaacagaggaagagtttgaacttttgaaggaaggtgtagaaactacacaatcaaaagatgttgaacttggccgcacaaaagattagagacagatggatagagaaagaaacatagtcttcaggtacaatttgttctgttataatttttgtatgttttgtgttatctaaaccaagagatcggatcctcggagattagtgtctaggcttcgatctaaagtttccttggttatacaaatgttttgtgttatttatatctttttacccaattccatggaaataacttcaatgacc

SEQ ID NO: 97516 - protein, 350 aa, Arabidopsis thaliana; identical to SEQ ID NO: 22526
  peptide (1)..(350): Ceres Seq. ID no. 12738007

SEQ ID NO: 97517 - protein, 335 aa, Arabidopsis thaliana; identical to SEQ ID NO: 22527
  peptide (1)..(335): Ceres Seq. ID no. 12738008

SEQ ID NO: 97518 - protein, 330 aa, Arabidopsis thaliana; identical to SEQ ID NO: 22528
  peptide (1)..(330): Ceres Seq. ID no. 12738009

SEQ ID NO: 97519 - DNA, 833 bp, Arabidopsis thaliana
  misc_feature (1)..(833): Ceres Seq. ID no. 12738010
  misc_feature (1)..(833): Ortholog of  Ceres SEQ ID NO 12626166 as cited in SEQ ID NO 64505
atttttctcaacgtgaaagagagaaaagagaatctctcagaaggtgagcctccaacaaagcgtgaatctctctttctctctctatctctctatctccgagatcgcatcaccggaaatctccttctacggtggtggtggtgacagttgaccagagatggcggcggagaatgagagaaaatctccttcagcagtctccgatatgggagcttgggcaatgaatgtgataagctccgttggaatcatcatggcgaataaacaacttatgtcctcttctggattcgcatttagtttcgctacaactctcaccggtttccacttcgctttaaccgcattggtcggtatggtatcaaacgctaccggattctctgcttcgaagcatgtacctatgtgggagcttatttggttctccattgttgggatggtaatctatagttgggcaatggaattggagaaacagtcgattattgcagcaaaggctttaaacagtgtgaaacatagcttaacagaggaagagtttgaacttttgaaggaaggtgtagaaactacacaatcaaaagatgttgaacttggccgcacaaaagattagagacagatggatagagaaagaaacatagtcttcaggtacaatttgttctgttataatttttgtatgttttgtgttatctaaaccaagagatcggatcctcggagattagtgtctaggcttcgatctaaagtttccttggttatacaaatgttttgtgttatttatatctttttacccaattccatggaaataacttcaatgaccacatgttcttgttttacgtagcactcaaagagtatattccttt

SEQ ID NO: 97520 - protein, 143 aa, Arabidopsis thaliana; identical to SEQ ID NO: 40923
  peptide (1)..(143): Ceres Seq. ID no. 12738011

SEQ ID NO: 97521 - protein, 128 aa, Arabidopsis thaliana; identical to SEQ ID NO: 40924
  peptide (1)..(128): Ceres Seq. ID no. 12738012

SEQ ID NO: 97522 - protein, 123 aa, Arabidopsis thaliana; identical to SEQ ID NO: 40925
  peptide (1)..(123): Ceres Seq. ID no. 12738013

SEQ ID NO: 97523 - DNA, 1400 bp, Arabidopsis thaliana
  misc_feature (1)..(1400): Ceres Seq. ID no. 12738066
  misc_feature (1)..(1400): Ortholog of  Ceres SEQ ID NO 13596392 as cited in SEQ ID NO 62136
  misc_feature (1)..(1400): Ortholog of  Ceres SEQ ID NO 13654360 as cited in SEQ ID NO 67980
  misc_feature (1)..(1400): Ortholog of  Ceres SEQ ID NO 13596394 as cited in SEQ ID NO 68561
accattctttttctcaaagagcaagcataaaagaacataaaagctccatactttttaaatttattccatattgtcaatagcttttgtatattataaagcttctaggcgttgttgttgttttgtctcattgttgctctgtttcttgaggttttataaatggatcctggtactttaaactcggtgatcaataggttgcttgaagctagagaaaaaccaggaaagattgttcagttgtctgaaacagagatcaaacagctctgtttcgtctctagagatatcttcttgagacaaccaaatctcttggaacttgaagctcctgttaaaatatgtggggacattcatggacaatatccggatctcttgagactattcgaacatggcggataccctcctaattcaaactacttgtttcttggagattatgtcgatcgcggcaagcaaagcctcgaaacgatttgtcttttacttgcttacaagattaagttccctgaaaacttcttccttctcagaggaaaccatgaaagtgcatcaatcaatcgtatttacggcttctatgacgagtgtaaacgtagattcagtgtcaagatttggcgaatcttcactgattgcttcaactgtctccccgtcgctgcactcatcgatgagcggattttttgtatgcatggtgggctctccccggagctgctaagcttgaggcagattagggatattcgtcgtccaacggatattcctgatcgtggtttactctgtgatctcttgtggtctgatcctgataaagatgttagaggttgggggcctaacgatcgcggagtttcttacacttttggatcagatatagtttctggatttcttaaaagactcgatcttgacctcatttgtagggctcaccaggttgttgaagatggattcgagttctttgcgaataagcagctcgtaacgatattctctgcgccgaattactgtggggaatttgacaatgcaggtgcgatgatgagtgtgtctgaggatttgacctgctcttttcagatcttaaaatctaatgacaagaaatcaaagttcagtttcggaagcagaggtggtgctaaaactagcttcccttatcctaaagtgaagtcgattctgagttcgcaaaattcgaaagaatacaactgatgaagatttaaaactccgcataataactattagaaaccatgccaacgtaactcgactactatatgatgagaaattaaagaggattttgaatttcggaattttgggaagcttctgtttttgttatgttttgtgttgtctgctgctatcacttgtgtgtatgtgtttttatttttggttgttgttgttgtaaatttggtttgtagttgttggtggttaaatttgataataaaacatgatttccttcggac

SEQ ID NO: 97524 - protein, 331 aa, Arabidopsis thaliana
  peptide (1)..(331): Ceres Seq. ID no. 12738067
MDPGTLNSVINRLLEAREKPGKIVQLSETEIKQLCFVSRDIFLRQPNLLELEAPVKICGDIHGQYPDLLRLFEHGGYPPNSNYLFLGDYVDRGKQSLETICLLLAYKIKFPENFFLLRGNHESASINRIYGFYDECKRRFSVKIWRIFTDCFNCLPVAALIDERIFCMHGGLSPELLSLRQIRDIRRPTDIPDRGLLCDLLWSDPDKDVRGWGPNDRGVSYTFGSDIVSGFLKRLDLDLICRAHQVVEDGFEFFANKQLVTIFSAPNYCGEFDNAGAMMSVSEDLTCSFQILKSNDKKSKFSFGSRGGAKTSFPYPKVKSILSSQNSKEYN

SEQ ID NO: 97525 - DNA, 1013 bp, Arabidopsis thaliana
  misc_feature (1)..(1013): Ceres Seq. ID no. 12738271
  misc_feature (1)..(1013): Ortholog of  Ceres SEQ ID NO 14315553 as cited in SEQ ID NO 60445
  misc_feature (1)..(1013): Ortholog of  Ceres SEQ ID NO 13598045 as cited in SEQ ID NO 66822
ccacgcgtccgcccacgcgtccgcaactccaccgaattcagaagatcgaagaagatgagtagaggaagcggcgctggttatgatcgtcacatcactatcttctcaccggaaggtcgtctctttcaagttgaatatgccttcaaggccgtgaaaacagctggtattacttcaatcggagttcgtgggaaagattcggtttgcgtcgttacccagaagaaagttcctgacaagcttttggatcagtctagtgttacacatctgttccctatcaccaagtacattggattggtagctactggcattacagctgatgcaaggtctttggttcaacaagcaaggaatcaagcagctgaatttcggttcacttatggatatgagatgcctgttgacattcttgctaaatggatagcggacaagtcacaggtttacactcaacatgcttacatgagaccccttggagttgtcgctatggtaatgggtgttgatgaagagaatggtcccttactttacaaatgtgacccagctggacatttttacggtcacaaggcaactagtgctggtatgaaggaacaagaagcagtcaatttcttggaggaggaaatgaaaggaaacccatctttcacatttgatgaaaccgtgcagactgccatatcggctttgcaatctgttcttcaagaagacttcaaggctactgagattgaggtaggtgtggtgagagcagagaacccggaattccgtgcattgacaacggaggagattgaggagcatttgacagccattagtgaacgagactgatcaacttagtgaaacaagtgtgagttacgttgcttcgcttctatcagacattcctctaaagtgaccactctccatcgatcttttgtttggtcttccttccataatttaatttacttagtcaacccagcaaacttgaaaaacaaaaatgcactgtaatgcttaaggctgtgagagtttccgagtcttttgactcttcagaaatgacaccaactttactc

SEQ ID NO: 97526 - protein, 264 aa, Arabidopsis thaliana
  peptide (1)..(264): Ceres Seq. ID no. 12738272
PRVRPRVRNSTEFRRSKKMSRGSGAGYDRHITIFSPEGRLFQVEYAFKAVKTAGITSIGVRGKDSVCVVTQKKVPDKLLDQSSVTHLFPITKYIGLVATGITADARSLVQQARNQAAEFRFTYGYEMPVDILAKWIADKSQVYTQHAYMRPLGVVAMVMGVDEENGPLLYKCDPAGHFYGHKATSAGMKEQEAVNFLEEEMKGNPSFTFDETVQTAISALQSVLQEDFKATEIEVGVVRAENPEFRALTTEEIEEHLTAISERD

SEQ ID NO: 97527 - protein, 246 aa, Arabidopsis thaliana
  peptide (1)..(246): Ceres Seq. ID no. 12738273
MSRGSGAGYDRHITIFSPEGRLFQVEYAFKAVKTAGITSIGVRGKDSVCVVTQKKVPDKLLDQSSVTHLFPITKYIGLVATGITADARSLVQQARNQAAEFRFTYGYEMPVDILAKWIADKSQVYTQHAYMRPLGVVAMVMGVDEENGPLLYKCDPAGHFYGHKATSAGMKEQEAVNFLEEEMKGNPSFTFDETVQTAISALQSVLQEDFKATEIEVGVVRAENPEFRALTTEEIEEHLTAISERD

SEQ ID NO: 97528 - protein, 138 aa, Arabidopsis thaliana
  peptide (1)..(138): Ceres Seq. ID no. 12738274
MPVDILAKWIADKSQVYTQHAYMRPLGVVAMVMGVDEENGPLLYKCDPAGHFYGHKATSAGMKEQEAVNFLEEEMKGNPSFTFDETVQTAISALQSVLQEDFKATEIEVGVVRAENPEFRALTTEEIEEHLTAISERD

SEQ ID NO: 97529 - DNA, 1722 bp, Arabidopsis thaliana
  misc_feature (1)..(1722): Ceres Seq. ID no. 12738307
  misc_feature (1)..(1722): Ortholog of  Ceres SEQ ID NO 13599324 as cited in SEQ ID NO 0
cggccgctttgctgagcgcaatgacgggaccttcagagttggactgaaaaaactcaagttggattcgaaaaatcggcttgcagcacgcgtcgaatccaagcaagaaaagcccctgagagcttacagacttggagattctggagatgctgatgttgttgtgcttaagaattatctagatgctcagtactatggtgagatcgccattggtactccacctcagaagttcactgtggtttttgacactgggagctctaacctctgggtgccatcatcaaaatgctatttctcacttgcatgtctcttgcatcccaaatacaagtcgtctcgttcaagcacatatgagaagaatggaaaagctgccgcaattcattacggcactggagcaattgctggtttttttagtaatgatgctgtcacagttggcgatttagttgtcaaggatcaggagtttatcgaggcaaccaaggagcctggtataacatttgttgtagctaaatttgatggtatccttggtcttggattccaagagatctctgttggaaaagctgctcctgtttggtacaacatgctcaagcaaggccttatcaaggagccggttttttcattttggcttaaccgtaatgcagatgaagaagaaggtggtgaacttgtatttggaggtgttgatccaaatcatttcaagggcaaacatacatatgttcctgtgacacaaaagggctactggcagtttgacatgggtgatgttcttattggcggtgcacccactgggttctgtgaaagtggctgttctgcgatagcagattctggtacatctttgcttgccggtccaacgactataatcaccatgataaaccatgctattggagcagctggagttgttagccagcagtgcaagactgttgtggatcaatacgggcagaccattttggatttacttttgtctgagacccaaccgaagaaaatctgctcgcagattggtctgtgtacttttgatggtacccgtggtgtcagtatgggcattgagtcggtggtggacaaggaaaacgccaaattgtctaatggtgttggagatgctgcgtgttctgcatgtgagatggctgttgtgtggatccagagccagttgaggcaaaacatgactcaagagcgcatattgaactacgtcaacgagctatgtgaacgcctccccagcccaatgggagagtctgcagttgactgtgcacaactgtcaacaatgcccactgtttcacttaccattggaggcaaagtatttgatcttgctccagaagagtatgttctgaaagttggtgagggacctgtggcacagtgcatcagtggttttattgctcttgacgttgctccacctcgtggacctctctggatcttgggagatgtgttcatgggcaaataccacaccgtatttgactttggtaacgaacaggtcgggtttgcagaggcagcctaaacacgatcgggttggtgtcgcgtatggttttagtatgaacaatctgcgtctcaagtgttgtttgtatgttttctggagttgaggactttgagtcgtagtagaaatggtggcgcagttccttttaagttgtttcctaacgaaaaaaggccttgtagttttgaaggcattggctttgtaaataccttctaagtaagttcgatggtgaaaaaactgaaaactttaataaagcctgcctcttttgtttaaaaaaagcggccgcg

SEQ ID NO: 97530 - protein, 486 aa, Arabidopsis thaliana
  peptide (1)..(486): Ceres Seq. ID no. 12738308
GRFAERNDGTFRVGLKKLKLDSKNRLAARVESKQEKPLRAYRLGDSGDADVVVLKNYLDAQYYGEIAIGTPPQKFTVVFDTGSSNLWVPSSKCYFSLACLLHPKYKSSRSSTYEKNGKAAAIHYGTGAIAGFFSNDAVTVGDLVVKDQEFIEATKEPGITFVVAKFDGILGLGFQEISVGKAAPVWYNMLKQGLIKEPVFSFWLNRNADEEEGGELVFGGVDPNHFKGKHTYVPVTQKGYWQFDMGDVLIGGAPTGFCESGCSAIADSGTSLLAGPTTIITMINHAIGAAGVVSQQCKTVVDQYGQTILDLLLSETQPKKICSQIGLCTFDGTRGVSMGIESVVDKENAKLSNGVGDAACSACEMAVVWIQSQLRQNMTQERILNYVNELCERLPSPMGESAVDCAQLSTMPTVSLTIGGKVFDLAPEEYVLKVGEGPVAQCISGFIALDVAPPRGPLWILGDVFMGKYHTVFDFGNEQVGFAEAA

SEQ ID NO: 97531 - protein, 298 aa, Arabidopsis thaliana; identical to SEQ ID NO: 28197
  peptide (1)..(298): Ceres Seq. ID no. 12738309

SEQ ID NO: 97532 - DNA, 984 bp, Arabidopsis thaliana
  misc_feature (1)..(984): Ceres Seq. ID no. 12738318
  misc_feature (1)..(984): Ortholog of  Ceres SEQ ID NO 14305357 as cited in SEQ ID NO 60046
  misc_feature (1)..(984): Ortholog of  Ceres SEQ ID NO 14313511 as cited in SEQ ID NO 64459
  misc_feature (1)..(984): Ortholog of  Ceres SEQ ID NO 14303006 as cited in SEQ ID NO 67498
  misc_feature (1)..(984): Ortholog of  Ceres SEQ ID NO 13599627 as cited in SEQ ID NO 0
  misc_feature (1)..(984): Ortholog of  Ceres SEQ ID NO 14305069 as cited in SEQ ID NO 0
gttcacacatctctcccaaagtaggtagaagaagatggggacgacgttagatgtatcaagagcagagctagcacttgtggtaatgtatttgaacaaagcagaggcaagagataagttatgcagagctatacagtatggttccaagttcttgagtggtggacaacctggtactgctcaaaatgttgacaaatctactagcttagcaagaaaagtcttccgtcttttcaagtttgtgaatgacttgcatggtcttatcagtcctgtgcctaaaggaactcctcttcctcttgttttacttggaaagtcgaagaacgcacttttatctacattcttgttcctggatcaaattgtctggcttgggagatcaggaatatataagaacaaagaacgagctgagttacttggacgtatatctctcttctgctggatgggatcttctgtctgcacaactttagtcgaggttggtgagatgggaaggctttcttcatcaatgaagaagatcgaaaagggactcaagaatggaaacaagtatcaggatgaggattatcgtgctaagctaaaaaaatcaaacgagaggtcacttgctttgatcaaatcagctatggacattgttgtagcagctggtcttcttcagttagctccaacgaagatcactcctcgtgtcaccggagcttttggattcatcacctccatcatttcttgttaccagttgcttccgacacgccccaagatcaaaacaccctgaagtcaatcgaggaagctggtgttaaggagaaagtcatttcagaaagtttctgttcttcttattattaaggaaattcactgctgttataaaacatcgtataaaatacttatttgcaggaattacggttattataaatttatgcctcagattcttgatacacaagtttcaatactcaatagtattgcattattatgagatgttgtttctgctacgcaataactagaggcaaaatccaactt

SEQ ID NO: 97533 - protein, 236 aa, Arabidopsis thaliana; identical to SEQ ID NO: 28883
  peptide (1)..(236): Ceres Seq. ID no. 12738319

SEQ ID NO: 97534 - protein, 220 aa, Arabidopsis thaliana; identical to SEQ ID NO: 28884
  peptide (1)..(220): Ceres Seq. ID no. 12738320

SEQ ID NO: 97535 - DNA, 1922 bp, Arabidopsis thaliana
  misc_feature (1)..(1922): Ceres Seq. ID no. 12738434
  misc_feature (1)..(1922): Ortholog of  Ceres SEQ ID NO 13582619 as cited in SEQ ID NO 56520
  misc_feature (1)..(1922): Ortholog of  Ceres SEQ ID NO 13660872 as cited in SEQ ID NO 60830
  misc_feature (1)..(1922): Ortholog of  Ceres SEQ ID NO 12616221 as cited in SEQ ID NO 63291
ttgatgggtcgtggctcagtggcgtcgcttgctcctgggttccgttttcacccgacggatgaggaacttgttcgctactaccttaagcgtaaggtctgcaacaaaccctttaagttcgatgctatttccgtcaccgacatatacaagtctgagccttgggatctaccagataagtcgaagttgaaaagtagagacttggaatggtacttctttagtatgctggataagaagtacagtaatggttccaagacgaatcgtgctacggagaaagggtattggaagacgactgggaaagatcgggagattcgtaatggttcaagaatccttgggatgaagaagacacttgtttatcacaagggtcgagctccccgtggtgaaaagaccaattgggttatgcaggagtatcggctttctgatgaggacttgaagaaagctggtgtgccacaagaagcatatgtgttatgtaggatattccagaaaagtggtacggttcctaagaatggggagcagtatggtgctccttatcttgaggaggagtgggaagaagatggaatgacttatgtacctgctcaagatgctttcagtgaaggattggctttgaatgatgatgtttatgtcgatattgatgacattgacgagaagcccgaaaatctggtggtctatgatgccgttcctattctacctaactattgtcatggggaatcaagtaacaatgttgaatcaggcaattactcagactctggaaattacattcaaccaggaaacaatgttgtcgactctggtgggtactttgaacaaccaattgaaacttttgaggaagatcggaagcctattatacgggagggtagcattcagccttgttctctgtttccagaggaacaaattggctgtggtgtgcaagacgaaaatgtggtgaatctggaatcttccaacaataatgtgtttgtagctgatacatgctacagtgacattcctattgatcataactatttacccgatgagccattcatggatcctaataacaatcttccactcaacgatggtctgtacctggaaacgaatgatctcagctgtgctcaacaagatgattttaacttcgaagattatctcagcttctttgatgatgaaggtttgacttttgacgagtctctattaatgggacctgaagattttcttcccaacccagaaacccttgaacagaaacctgcccctaaagaaatggaaaaagaaagaggtcgcaggaggcaaagaagcagtggaggaaaaggaaagtggcgaaagatcttcttccaaaacaagtacacagatttcaaggactttgattcagctccgaagtacccatttctcaaaaagacgagccacatgcttggagccattcctactccatcttcatttgcttcacagttccaaacaaaggacgcaatgcgtctacacgcagcacaatcttctggttcagttcacgtgactgcaggtatgatgagaatatcaaacatgactctagcagcggacagcggtatgggctggtcatatgacaagaacggtaacctcaacgtagtcctttcattcggggtagtccaacaggatgatgcgatgactgcctcgggaagcaagacaggaattacggcgacaagagcaatgttagtcttcatgtgtttatgggttctcctactctctgttagcttcaaaatagtaaccatggtgtctgctcggtaataggatcaaagttgaatcgtctcaaagactttttttggtgtttgtacctctccaatcatatagcctttaactttggcagtgctttgctgctcaatatttaaatttttattcgaagggtttggtgtagcttgaattctctatatggtttctagtttgagtttctagaaataagaacataaacaactttcttatgacgtcgacgcggccgc

SEQ ID NO: 97536 - protein, 570 aa, Arabidopsis thaliana
  peptide (1)..(570): Ceres Seq. ID no. 12738435
LMGRGSVASLAPGFRFHPTDEELVRYYLKRKVCNKPFKFDAISVTDIYKSEPWDLPDKSKLKSRDLEWYFFSMLDKKYSNGSKTNRATEKGYWKTTGKDREIRNGSRILGMKKTLVYHKGRAPRGEKTNWVMQEYRLSDEDLKKAGVPQEAYVLCRIFQKSGTVPKNGEQYGAPYLEEEWEEDGMTYVPAQDAFSEGLALNDDVYVDIDDIDEKPENLVVYDAVPILPNYCHGESSNNVESGNYSDSGNYIQPGNNVVDSGGYFEQPIETFEEDRKPIIREGSIQPCSLFPEEQIGCGVQDENVVNLESSNNNVFVADTCYSDIPIDHNYLPDEPFMDPNNNLPLNDGLYLETNDLSCAQQDDFNFEDYLSFFDDEGLTFDESLLMGPEDFLPNPETLEQKPAPKEMEKERGRRRQRSSGGKGKWRKIFFQNKYTDFKDFDSAPKYPFLKKTSHMLGAIPTPSSFASQFQTKDAMRLHAAQSSGSVHVTAGMMRISNMTLAADSGMGWSYDKNGNLNVVLSFGVVQQDDAMTASGSKTGITATRAMLVFMCLWVLLLSVSFKIVTMVSAR

SEQ ID NO: 97537 - protein, 569 aa, Arabidopsis thaliana
  peptide (1)..(569): Ceres Seq. ID no. 12738436
MGRGSVASLAPGFRFHPTDEELVRYYLKRKVCNKPFKFDAISVTDIYKSEPWDLPDKSKLKSRDLEWYFFSMLDKKYSNGSKTNRATEKGYWKTTGKDREIRNGSRILGMKKTLVYHKGRAPRGEKTNWVMQEYRLSDEDLKKAGVPQEAYVLCRIFQKSGTVPKNGEQYGAPYLEEEWEEDGMTYVPAQDAFSEGLALNDDVYVDIDDIDEKPENLVVYDAVPILPNYCHGESSNNVESGNYSDSGNYIQPGNNVVDSGGYFEQPIETFEEDRKPIIREGSIQPCSLFPEEQIGCGVQDENVVNLESSNNNVFVADTCYSDIPIDHNYLPDEPFMDPNNNLPLNDGLYLETNDLSCAQQDDFNFEDYLSFFDDEGLTFDESLLMGPEDFLPNPETLEQKPAPKEMEKERGRRRQRSSGGKGKWRKIFFQNKYTDFKDFDSAPKYPFLKKTSHMLGAIPTPSSFASQFQTKDAMRLHAAQSSGSVHVTAGMMRISNMTLAADSGMGWSYDKNGNLNVVLSFGVVQQDDAMTASGSKTGITATRAMLVFMCLWVLLLSVSFKIVTMVSAR

SEQ ID NO: 97538 - protein, 498 aa, Arabidopsis thaliana
  peptide (1)..(498): Ceres Seq. ID no. 12738437
MLDKKYSNGSKTNRATEKGYWKTTGKDREIRNGSRILGMKKTLVYHKGRAPRGEKTNWVMQEYRLSDEDLKKAGVPQEAYVLCRIFQKSGTVPKNGEQYGAPYLEEEWEEDGMTYVPAQDAFSEGLALNDDVYVDIDDIDEKPENLVVYDAVPILPNYCHGESSNNVESGNYSDSGNYIQPGNNVVDSGGYFEQPIETFEEDRKPIIREGSIQPCSLFPEEQIGCGVQDENVVNLESSNNNVFVADTCYSDIPIDHNYLPDEPFMDPNNNLPLNDGLYLETNDLSCAQQDDFNFEDYLSFFDDEGLTFDESLLMGPEDFLPNPETLEQKPAPKEMEKERGRRRQRSSGGKGKWRKIFFQNKYTDFKDFDSAPKYPFLKKTSHMLGAIPTPSSFASQFQTKDAMRLHAAQSSGSVHVTAGMMRISNMTLAADSGMGWSYDKNGNLNVVLSFGVVQQDDAMTASGSKTGITATRAMLVFMCLWVLLLSVSFKIVTMVSAR

SEQ ID NO: 97539 - DNA, 1593 bp, Arabidopsis thaliana
  misc_feature (1)..(1593): Ceres Seq. ID no. 12738509
  misc_feature (1)..(1593): Ortholog of  Ceres SEQ ID NO 14308803 as cited in SEQ ID NO 55038
  misc_feature (1)..(1593): Ortholog of  Ceres SEQ ID NO 13595437 as cited in SEQ ID NO 56562
attcacacttcatttctttgcttttggtgagagaatgaaacagagaagaagagatgaagaaaattaaagttctttccttttctcttttggatctaatttcatcttgagattttctcatagcttgatactaaagctacataaaaaacaattaggtgaaatgaaagtttgtgtgttttgataagttttcagagattttcggttgcatgttgttatcttgctcttgaagtctatcgaacccttttagattctgattttgttctcttcttatccctcctcctataagttagccatttagggtccccatcgaattttactaagttaaagtcagagtctttttggttaagctatggatcgaagagacgcaatggcgttatccgggtcgggttcttactatatccaaagaggaatccccggttctggtcctcctcctcctcaaactcaaccaacgtttcacggatcacaaggatttcatcatttcaccaattccatctctccttttgggtcaaacccaaacccaaatccaaaccctggaggtgtctctactggattcgtgtctcctcctttacccgttgactcttctccggctgattcgtcagcggcggcggcgggagctttggttgctcctccttcaggtgacacgtctgtgaagcggaagagaggacggcctagaaaatatggacaagatggtggttctgtttcgttggcattgtctccttctatctccaacgtttccccgaactctaacaaacgtggccgtggaagacctcctggctccggcaagaagcaacggctatcttccattggtgaaatgatgccttcatcaactgggatgagcttcacaccgcatgtaatcgtagtttccattggtgaagacattgcttcaaaggttatatcgttctcgcatcaaggtccacgagcgatatgtgtcttatccgcaagtggtgctgtctctactgcaactcttcttcagccagcaccttctcatggaactattatatacgagggtctattcgagctcatatctctctcaacttcttatctgaacacaactgacaatgactacccaaaccgcactggaagtctagcggtctcacttgctagccccgatggtcgtgtcattggtggtggaattggaggtcctctaatagcagcaagccaagtccaggtcattgttggcagcttcatttgggcaattccgaaagggaagattaaaaaacgtgaagaaacttctgaagatgtccaagatactgatgctttggaaaacaacaacgataacacagcagcaacgtcacctcctgttcctcagcaaagtcagaacattgttcagactcctgtaggcatttggtcaactggttcaaggtcaatggatatgcatcacccccatatggacattgatctaatgcgtggatgattcatgtatatataagcattgaatctaggagaagaagaagaaacttgagctaacctccctgaaacaaagtagtctattggtattgtttaggaaagaaaaagacaattagtaagtttaggaatttctgcgtgttttcgagcaaaaaaaaagttaatttggtctcataacatgttaagaaaggg

SEQ ID NO: 97540 - protein, 354 aa, Arabidopsis thaliana; identical to SEQ ID NO: 47286
  peptide (1)..(354): Ceres Seq. ID no. 12738510

SEQ ID NO: 97541 - protein, 348 aa, Arabidopsis thaliana; identical to SEQ ID NO: 47287
  peptide (1)..(348): Ceres Seq. ID no. 12738511

SEQ ID NO: 97542 - protein, 200 aa, Arabidopsis thaliana; identical to SEQ ID NO: 47288
  peptide (1)..(200): Ceres Seq. ID no. 12738512

SEQ ID NO: 97543 - DNA, 2931 bp, Arabidopsis thaliana
  misc_feature (1)..(2931): Ceres Seq. ID no. 12738620
  misc_feature (1)..(2931): Ortholog of  Ceres SEQ ID NO 15176851 as cited in SEQ ID NO 61348
  misc_feature (1)..(2931): Ortholog of  Ceres SEQ ID NO 14307871 as cited in SEQ ID NO 67222
cactttgaaccattggttggttttgatcaaaaccaaaggatgtgtgtatgtatgtatatattctaacgctcaaaactgatcactagcattcctagatttttccttcttgtgatcacttgcagctatggccacacatgcagctctcgccgtctcaagaatcccggtcacacagcgactgcagtctaagagtgccattcactctttccctgctcaatgctcctccaagaggctagaagtcgctgaattctccggtctgcgtatgagtagtatcggtggggaagcatctttcttcgatgctgtagctgcacaaatcatccctaaggctgtgacaacatcaactcctgttagaggagagacagtggcgaaactgaaagttgcgattaacggttttggaaggattggtaggaactttcttaggtgttggcatggtcgtaaagactctcctctcgaagttgttgtacttaacgacagtggtggtgtcaagaatgcatcccacttgcttaagtatgactccatgcttggaaccttcaaggctgaagtgaaaattgtggacaatgaaactattagtgttgatggtaagctcatcaaagttgtctccaacagagaccctcttaagcttccatgggctgagctcggcattgacattgttatcgagggaacaggagtgtttgttgatgggccaggagcagggaagcatatccaagccggagcctcgaaagttatcatcactgcaccagccaaaggtgctgatatccctacctatgttatgggagtcaatgagcaagactatggtcacgatgtcgctaacattattagcaatgcatcttgcaccaccaactgtttggcaccttttgctaaagtcttggatgaagaatttggaattgtcaaggggacaatgacaaccacacactcctacaccggagaccaaaggcttctagatgcatcacacagggacctaaggcgtgcaagagccgcagcactgaacatagtgcctaccagcacaggagcagccaaggcggtgtcattagtgttgccgcagctgaagggtaaacttaacggcattgcactccgtgtgccaacaccaaacgtctcagtggttgaccttgttataaacgttgagaagaaaggtttgacagcagaggatgtgaacgaggcctttagaaaagccgctaatggaccgatgaaaggcattttagacgtttgcgatgcgcctcttgtctctgttgacttcaggtgctctgatgtctctaccaccattgactcgtccctcactatggttatgggtgatgatatggtcaaggtggttgcttggtatgataacgagtggggttacagccaaagagtggtggatttggctcacctagtggctagcaagtggccgggagcggaagctgttggaagtggagatcctttggaggatttctgcaagacaaacccggctgatgaggaatgcaaagtctatgactgaacaactttgatcatttctttctttatttttcaccaaaacaatactttgtatcatgagttacttattcgaaatcgtactatgaaaaaaaaaaaaaaaagagctcttggatccaagctttagctgaaggtagaccatggaatgatccgccagttgttaaggaagcgaataagaagcctccgttggctcagggcggttacggaaacaacaataacaataacaatggaggatgggatagttgggataacgatgattcttacaaatctgatatgagaaggaatcagtcagcgaatgatttcagggcatcgggaaatagagaaggtgcacatgtgaagtcaaagtcgtcggaggatatctacacgcgatcgcagcttgaggcttctgccgctgggaaagagagtttcttcgcgaggagaatggcggagaatgagtctaagcctgaaggtcttcctccttcgcaaggtggcaagtatgtaggattcggatcaagctcggctccaccaccgagaaataatcaacaggatgatgttttctccgttgtttctcagggttttggaagactgtctctggttgctgcatctgcagctcagtcagctgctagtgttgttcaaacaggaaccaaggagttcacatccaaggtgaaggaaggtgggtatgatcacaaggtgagtgaaactgtaaatgtagttgctaataagacaacagagataggacataggacatggggaatcatgaaaggagtaatggcaatggcgacacagaaggtagaagagtttactaaagaaggatcaacaagctggaatcagcagagtgaaaatgagggcaatggttactaccagaactttggaaatgggaacaaagcagcgaattcatctgttggaggaggaaggccacaatcatcatcgacaagtggtcattacaacaactcgcagaattcaaattcttgggatagttggggagagaatgagaataagaagacagaagcagtagctccaaaggggtcatctgcttctaatgatgatgatggttggactggttgggatgatcatgatgccaaagatgatgggttcgatggtcattaccaaagtgcaggcgataagaaatctgctggtcacaacgggaaatcagacaccgcttggactggtggaggttttctctaaggaatgccggtgagaagtgtataattaattaaggctgggaccatcgtggtctgaatagaagataagaatggtcttcatcttaaaaccatgttcatccatacccacaggtctgcgtttttcttcataagttggcggtttcttgatatctcttcttcatgtgttaaggagtaacgtatttgtacaagatccatagccgattgtttgctaaagattttcggttttagtctttcacaatttaaatttatcttcaactgtaaccacaactgaacattctttttctcaaaattgccttgttccgttgttcgt

SEQ ID NO: 97544 - protein, 447 aa, Arabidopsis thaliana; identical to SEQ ID NO: 49987
  peptide (1)..(447): Ceres Seq. ID no. 12738621

SEQ ID NO: 97545 - protein, 402 aa, Arabidopsis thaliana; identical to SEQ ID NO: 49988
  peptide (1)..(402): Ceres Seq. ID no. 12738622

SEQ ID NO: 97546 - protein, 317 aa, Arabidopsis thaliana; identical to SEQ ID NO: 49989
  peptide (1)..(317): Ceres Seq. ID no. 12738623

SEQ ID NO: 97547 - DNA, 1529 bp, Arabidopsis thaliana
  misc_feature (1)..(1529): Ceres Seq. ID no. 12738724
  misc_feature (1)..(1529): Ortholog of  Ceres SEQ ID NO 13595164 as cited in SEQ ID NO 56222
  misc_feature (1)..(1529): Ortholog of  Ceres SEQ ID NO 13591068 as cited in SEQ ID NO 69043
  misc_feature (1)..(1529): Ortholog of  Ceres SEQ ID NO 13623041 as cited in SEQ ID NO 0
gaatcggcggccgcggatccaacctcgccggcgacggaaaatggctttcgcgtctccttcgctccgtcttcttcctcagtctccgttaggtcgaataacatctaaactacaccgtttcagtactgcgaaactctcactcttctcctttcaccatgattcttcatcttctttggctgtcagaactccggtatcttccttcgtcgtcggcgctatctccggaaaatcctctaccggaacgaaatcgaaatccaaaaccaaacggaaaccacctcctcctccgccagtcactactgtggctgaagagcaacacattgctgagtcagagacagtcaacattgccgaagatgtcactcaattgattggaagcacaccaatggtctatctcaatagagtcacagatggttgtttggctgacattgctgccaagctcgaatcaatggagccctgtagaagcgtcaaagataggatcggtctgagcatgatcaacgaggcagaaaacagcggagctataactccgaggaagactgtattagtagaaccaacaaccggaaacactggccttgggattgcatttgtggctgcagctaaaggctacaagcttatagtgacaatgccagcttctatcaatattgaaaggaggatgcttttacgtgcactaggagcagagattgtgctaacgaatccagagaagggtctcaaaggagcagtggataaagccaaagagattgttctcaagacaaagaacgcatatatgtttcagcaattcgacaatacagcaaatacaaagatccactttgaaactacaggaccagaaatctgggaagatacaatgggtaatgtcgatatattcgttgccggaataggaactggtggtactgtaactggtactggaggtttcttgaaaatgatgaacaaggatattaaggtagttggcgttgaaccatcagaaagaagtgtgatttctggagacaaccctggttacttaccgggaatcttggatgttaaattacttgatgaagtgtttaaggttagcaacggggaagcgattgagatggcgaggagactagctttagaggaaggattgctggttgggatttcatctggagctgctgcagtagcagcagtcagcttggctaaaagagcagagaatgccggtaaactaatcacggttctgtttccaagccatggcgagcggtatatcacaacggctctgtttagttccatcaacagagaagtccaagagatgagatattagtagcagccattagaaaagcccccaaagtttggtccttttggagagtgtaaacaacaaatctctttgcaatacagaaaagagaggtttcagaagactgtgaggttagagctcacacgagaactgagagataaacatgtctcgagcccaaccagttttattcaaagatttgtgaatgtatagaagatcatagaccttgttgcattattcttcttcttctcactcatatgtcagggaagtatgctgaacaaataaaagtttgatcatctaaaccctg

SEQ ID NO: 97548 - protein, 417 aa, Arabidopsis thaliana
  peptide (1)..(417): Ceres Seq. ID no. 12738725
NRRPRIQPRRRRKMAFASPSLRLLPQSPLGRITSKLHRFSTAKLSLFSFHHDSSSSLAVRTPVSSFVVGAISGKSSTGTKSKSKTKRKPPPPPPVTTVAEEQHIAESETVNIAEDVTQLIGSTPMVYLNRVTDGCLADIAAKLESMEPCRSVKDRIGLSMINEAENSGAITPRKTVLVEPTTGNTGLGIAFVAAAKGYKLIVTMPASINIERRMLLRALGAEIVLTNPEKGLKGAVDKAKEIVLKTKNAYMFQQFDNTANTKIHFETTGPEIWEDTMGNVDIFVAGIGTGGTVTGTGGFLKMMNKDIKVVGVEPSERSVISGDNPGYLPGILDVKLLDEVFKVSNGEAIEMARRLALEEGLLVGISSGAAAVAAVSLAKRAENAGKLITVLFPSHGERYITTALFSSINREVQEMRY

SEQ ID NO: 97549 - protein, 404 aa, Arabidopsis thaliana; identical to SEQ ID NO: 49383
  peptide (1)..(404): Ceres Seq. ID no. 12738726

SEQ ID NO: 97550 - protein, 293 aa, Arabidopsis thaliana; identical to SEQ ID NO: 49384
  peptide (1)..(293): Ceres Seq. ID no. 12738727

SEQ ID NO: 97551 - DNA, 1109 bp, Arabidopsis thaliana
  misc_feature (1)..(1109): Ceres Seq. ID no. 12738760
  misc_feature (1)..(1109): Ortholog of  Ceres SEQ ID NO 15172803 as cited in SEQ ID NO 52102
  misc_feature (1)..(1109): Ortholog of  Ceres SEQ ID NO 12593499 as cited in SEQ ID NO 68777
ggaacacggaaatattggcgcccagataatcttcttctgtgaagcattttaagtcgccgactccaatcaacagagcccagttattccattttatcgaattaattagggttcagagagatgggtaggaaaaagaaatctagggcttcgacaaccgaagaagatgagattgagatggataatgctggcccatcctctgagacaagtctttacgaggttcttggagttgaaagaagagccacttcacaggaaataagaaaagcgtaccataagttggcattgaagcttcaccctgataaaaatcaggatgataaggaagctaaagacaagttccagcagctgcaaaaagttatatcaattcttggtgatgaagagaaaagggcagtctatgatcaaactggctcaattgatgatgctgatattcctggagatgcgtttgagaatttgcgggatttcttccgggacatgtataagaaggtcaccgaagctgatattgaagagtttgaggcaacctacaggggatctgagtcagagaagaaagacttgcttgagcttttcaacaagtttaagggtaaaatgaacaggctattctgctcaatgctttgctcggaccccaagcttgattcacaccgtttcaaagacatgcttgatgaggccattgcagcaggagaagtgaagtcaagcaaggcatatgagaaatgggcaaataaaatttcagaaacgaaaccgcccaccagtccattgaggaagaggaagaagaagaagtcagcacccaaggattcagagacagatctttgcttgatgattgcgaaacgacaagaggagaggaaagggaaggtggactcgatgttttcatcacttatctctaggtatggtggtgatgcggaagcagagcccactgaagaagaatttgaagcttcccagagaaggattgaaacccaaagaaaaccatccaagaagtctagaggaaagtagaggtcttaaagcagagttgtcttctagtagtatttgtgatggaacaagaatgtttattttctttccaaatttcatcaatttccaaaatcagtaaatatttcgattattgctttataaattgaggaattatcttctcc

SEQ ID NO: 97552 - protein, 284 aa, Arabidopsis thaliana
  peptide (1)..(284): Ceres Seq. ID no. 12738761
MGRKKKSRASTTEEDEIEMDNAGPSSETSLYEVLGVERRATSQEIRKAYHKLALKLHPDKNQDDKEAKDKFQQLQKVISILGDEEKRAVYDQTGSIDDADIPGDAFENLRDFFRDMYKKVTEADIEEFEATYRGSESEKKDLLELFNKFKGKMNRLFCSMLCSDPKLDSHRFKDMLDEAIAAGEVKSSKAYEKWANKISETKPPTSPLRKRKKKKSAPKDSETDLCLMIAKRQEERKGKVDSMFSSLISRYGGDAEAEPTEEEFEASQRRIETQRKPSKKSRGK

SEQ ID NO: 97553 - protein, 266 aa, Arabidopsis thaliana
  peptide (1)..(266): Ceres Seq. ID no. 12738762
MDNAGPSSETSLYEVLGVERRATSQEIRKAYHKLALKLHPDKNQDDKEAKDKFQQLQKVISILGDEEKRAVYDQTGSIDDADIPGDAFENLRDFFRDMYKKVTEADIEEFEATYRGSESEKKDLLELFNKFKGKMNRLFCSMLCSDPKLDSHRFKDMLDEAIAAGEVKSSKAYEKWANKISETKPPTSPLRKRKKKKSAPKDSETDLCLMIAKRQEERKGKVDSMFSSLISRYGGDAEAEPTEEEFEASQRRIETQRKPSKKSRGK

SEQ ID NO: 97554 - protein, 169 aa, Arabidopsis thaliana
  peptide (1)..(169): Ceres Seq. ID no. 12738763
MYKKVTEADIEEFEATYRGSESEKKDLLELFNKFKGKMNRLFCSMLCSDPKLDSHRFKDMLDEAIAAGEVKSSKAYEKWANKISETKPPTSPLRKRKKKKSAPKDSETDLCLMIAKRQEERKGKVDSMFSSLISRYGGDAEAEPTEEEFEASQRRIETQRKPSKKSRGK

SEQ ID NO: 97555 - DNA, 1879 bp, Arabidopsis thaliana
  misc_feature (1)..(1879): Ceres Seq. ID no. 12738832
  misc_feature (1)..(1879): Ortholog of  Ceres SEQ ID NO 15169072 as cited in SEQ ID NO 53955
  misc_feature (1)..(1879): Ortholog of  Ceres SEQ ID NO 15224912 as cited in SEQ ID NO 63475
  misc_feature (1)..(1879): Ortholog of  Ceres SEQ ID NO 13657460 as cited in SEQ ID NO 66115
  misc_feature (1)..(1879): Ortholog of  Ceres SEQ ID NO 13659394 as cited in SEQ ID NO 67049
acttctcttttgattcgattctctctttaccttgaagcttcaatatcaaccaaatcttttttctcaaaatctcaaagaatctctcaaactcagtctcctatctgtctctctgcaaactattaccaaccagataatttagatatggaagctactcagaaacatatgattcaagaaggatcttcaatgttttaccatcaaccatcttcagtcaaacaaatggacctttctgttcagacatttgattcttactgcacacttgaatcctcttcaggcaccaagtctcatccttgtcttaacaacaaaaacaactcttcttcaaccacaagcttttcctctaatgaaagtcccatttctcaagccaacaacaacaacttatcaaggtttaacaatcattcccctgaagaaaacaataactctcccttgagcggttcttcagcgacaaacaccaacgagacagagcttagtctcatgcttaaagatttggagactgcaatgatggagcctgatgtagacaacagctataacaatcaaggcgggtttggacagcagcatggagttgtttcttcagctatgtatagatctatggagatgatctctaggggagatttaaaaggagtgctctatgaatgcgcaaaagctgttgaaaactatgatttggaaatgactgattggttgatctctcagttacagcaaatggtttctgtttctggtgagcctgttcagcgcttaggagcttatatgcttgaaggtctcgttgctaggttagcttcttcgggtagctccatctataaagcattgagatgcaaagacccaacgggtcctgagcttcttacttatatgcatatcttgtatgaagcctgcccttatttcaaattcggttatgaatctgctaatggagctatagctgaagctgtgaagaacgaaagttttgtgcacattatcgatttccagatttctcaaggtggtcaatgggtgagtttgatccgtgctcttggtgctagacctggtggacctccgaacgttaggataacgggaattgatgatccgagatcatcgtttgctcgtcaaggaggacttgagttagttggacaaagacttgggaagctagctgaaatgtgcggtgttccgtttgagttccatggagctgctttatgctgcacggaagtcgaaatcgagaagctaggagttagaaatggagaagcgctcgcggttaacttcccgcttgttcttcaccacatgcctgatgagagtgtaactgtggagaatcacagagatagattgttgagattggtcaaacacttgtcaccaaacgttgtgactctggttgagcaagaagcgaatacaaacactgcgccgtttcttccccggtttgtcgagacaatgaaccattacttggcagttttcgaatcaatagatgtgaaactcgctagagatcacaaggaaaggatcaatgttgagcagcattgtttggctagagaggttgtgaatcttatagcttgtgaaggtgttgaaagagaagagaggcacgagccactagggaaatggaggtctcggtttcacatggcgggatttaaaccgtatcctttgagctcgtatgtgaacgcaacaatcgaaggattgcttgagagttattcagagaagtatacacttgaagaaagagatggagcattgtatttaggatggaagaatcaacctcttatcacttcttgtgcttggaggtaactaataaaaaccttgttcggtttcagaagagattagaaacttcttttaaagtttgcagaatctgtttgtaaaagtaaaactcatgcatgatccgaaggaacaagttgtcaaatgttgtagtagtaagtgatatgttgatgaccccataaaaaaacag

SEQ ID NO: 97556 - protein, 573 aa, Arabidopsis thaliana
  peptide (1)..(573): Ceres Seq. ID no. 12738833
TSLLIRFSLYLEASISTKSFFSKSQRISQTQSPICLSANYYQPDNLDMEATQKHMIQEGSSMFYHQPSSVKQMDLSVQTFDSYCTLESSSGTKSHPCLNNKNNSSSTTSFSSNESPISQANNNNLSRFNNHSPEENNNSPLSGSSATNTNETELSLMLKDLETAMMEPDVDNSYNNQGGFGQQHGVVSSAMYRSMEMISRGDLKGVLYECAKAVENYDLEMTDWLISQLQQMVSVSGEPVQRLGAYMLEGLVARLASSGSSIYKALRCKDPTGPELLTYMHILYEACPYFKFGYESANGAIAEAVKNESFVHIIDFQISQGGQWVSLIRALGARPGGPPNVRITGIDDPRSSFARQGGLELVGQRLGKLAEMCGVPFEFHGAALCCTEVEIEKLGVRNGEALAVNFPLVLHHMPDESVTVENHRDRLLRLVKHLSPNVVTLVEQEANTNTAPFLPRFVETMNHYLAVFESIDVKLARDHKERINVEQHCLAREVVNLIACEGVEREERHEPLGKWRSRFHMAGFKPYPLSSYVNATIEGLLESYSEKYTLEERDGALYLGWKNQPLITSCAWR

SEQ ID NO: 97557 - protein, 526 aa, Arabidopsis thaliana
  peptide (1)..(526): Ceres Seq. ID no. 12738834
MEATQKHMIQEGSSMFYHQPSSVKQMDLSVQTFDSYCTLESSSGTKSHPCLNNKNNSSSTTSFSSNESPISQANNNNLSRFNNHSPEENNNSPLSGSSATNTNETELSLMLKDLETAMMEPDVDNSYNNQGGFGQQHGVVSSAMYRSMEMISRGDLKGVLYECAKAVENYDLEMTDWLISQLQQMVSVSGEPVQRLGAYMLEGLVARLASSGSSIYKALRCKDPTGPELLTYMHILYEACPYFKFGYESANGAIAEAVKNESFVHIIDFQISQGGQWVSLIRALGARPGGPPNVRITGIDDPRSSFARQGGLELVGQRLGKLAEMCGVPFEFHGAALCCTEVEIEKLGVRNGEALAVNFPLVLHHMPDESVTVENHRDRLLRLVKHLSPNVVTLVEQEANTNTAPFLPRFVETMNHYLAVFESIDVKLARDHKERINVEQHCLAREVVNLIACEGVEREERHEPLGKWRSRFHMAGFKPYPLSSYVNATIEGLLESYSEKYTLEERDGALYLGWKNQPLITSCAWR

SEQ ID NO: 97558 - protein, 519 aa, Arabidopsis thaliana
  peptide (1)..(519): Ceres Seq. ID no. 12738835
MIQEGSSMFYHQPSSVKQMDLSVQTFDSYCTLESSSGTKSHPCLNNKNNSSSTTSFSSNESPISQANNNNLSRFNNHSPEENNNSPLSGSSATNTNETELSLMLKDLETAMMEPDVDNSYNNQGGFGQQHGVVSSAMYRSMEMISRGDLKGVLYECAKAVENYDLEMTDWLISQLQQMVSVSGEPVQRLGAYMLEGLVARLASSGSSIYKALRCKDPTGPELLTYMHILYEACPYFKFGYESANGAIAEAVKNESFVHIIDFQISQGGQWVSLIRALGARPGGPPNVRITGIDDPRSSFARQGGLELVGQRLGKLAEMCGVPFEFHGAALCCTEVEIEKLGVRNGEALAVNFPLVLHHMPDESVTVENHRDRLLRLVKHLSPNVVTLVEQEANTNTAPFLPRFVETMNHYLAVFESIDVKLARDHKERINVEQHCLAREVVNLIACEGVEREERHEPLGKWRSRFHMAGFKPYPLSSYVNATIEGLLESYSEKYTLEERDGALYLGWKNQPLITSCAWR

SEQ ID NO: 97559 - DNA, 1057 bp, Arabidopsis thaliana
  misc_feature (1)..(1057): Ceres Seq. ID no. 12738854
  misc_feature (1)..(1057): Ortholog of  Ceres SEQ ID NO 13581804 as cited in SEQ ID NO 51424
  misc_feature (1)..(1057): Ortholog of  Ceres SEQ ID NO 14310890 as cited in SEQ ID NO 54290
  misc_feature (1)..(1057): Ortholog of  Ceres SEQ ID NO 13663874 as cited in SEQ ID NO 67003
gtttttgggattctcaaaaaactcaaaataaactttcctcattttttttttctttcttttgttttgttttctttataaaggagaaagaaagagaaagagagtttccgaaagctgaattgagttgggtgaagcaaattctcaggatgggaagaggaaagatagaaataaagaggatagagaactcaacaaatcgacaagtgacgttttgcaaaagaagaaatggacttctgaagaaagcctatgagctttcggtcctttgcgatgcagaagttgcgctcattgttttctccactcgtggccgtctctatgaatacgccaataacaacataagatcaaccattgagaggtacaagaaagcttgttctgatagcaccaacactagcactgtccaagaaatcaatgccgcgtactatcaacaagaatctgctaagctgagacaacagatccaaacgattcaaaactccaacaggaatctgatgggagactctttgagttccttaagtgtcaaggaactaaaacaagttgagaatcgccttgagaaagctatctctaggatcaggtccaagaagcatgagttgcttctagttgaaatcgaaaacgcgcagaaaagggagattgagcttgacaatgagaacatctatctaagaactaaggtagcagaagtggagaggtatcaacaacaccatcatcaaatggttagtggttcagagattaacgcaattgaagctttagcctcacgcaattactttgctcatagcattatgactgctggttctggatctggtaatggaggttcttactctgatcccgacaagaaaattcttcatctcggataatctcgtctgcgaaaaaccgagctgcaataactctctgcatgcatctggggattctttgctcagatttatctctacataaaatatgttttggtgcaaaataattcaaagtacaatgaaggtattggtccttcaagactcattgcaatttgtgttgtgtaatgattaagacatactctagtttttattgcttcgtatcatagtatctattctatggtatctcc

SEQ ID NO: 97560 - protein, 277 aa, Arabidopsis thaliana
  peptide (1)..(277): Ceres Seq. ID no. 12738855
FWDSQKTQNKLSSFFFSFFCFVFFIKEKEREREFPKAELSWVKQILRMGRGKIEIKRIENSTNRQVTFCKRRNGLLKKAYELSVLCDAEVALIVFSTRGRLYEYANNNIRSTIERYKKACSDSTNTSTVQEINAAYYQQESAKLRQQIQTIQNSNRNLMGDSLSSLSVKELKQVENRLEKAISRIRSKKHELLLVEIENAQKREIELDNENIYLRTKVAEVERYQQHHHQMVSGSEINAIEALASRNYFAHSIMTAGSGSGNGGSYSDPDKKILHLG

SEQ ID NO: 97561 - protein, 230 aa, Arabidopsis thaliana; identical to SEQ ID NO: 44274
  peptide (1)..(230): Ceres Seq. ID no. 12738856

SEQ ID NO: 97562 - DNA, 1424 bp, Arabidopsis thaliana
  misc_feature (1)..(1424): Ceres Seq. ID no. 12738861
  misc_feature (1)..(1424): Ortholog of  Ceres SEQ ID NO 13493536 as cited in SEQ ID NO 58515
  misc_feature (1)..(1424): Ortholog of  Ceres SEQ ID NO 15225741 as cited in SEQ ID NO 59606
  misc_feature (1)..(1424): Ortholog of  Ceres SEQ ID NO 12618461 as cited in SEQ ID NO 64349
ccacgcgtccgaattctgaaaaatgggattacctcaaaataagctcagttttttctgcttcttcttcctcgtctctgtactaactcttgccccattggctttctccgagatcttcttagaggagcatttcgaaggtggatggaaaagtaggtgggtcttgtctgattggaaaagaaacgaaggcaaagctggaacctttaagcacactgccggtaaatggcccggcgatcctgacaataaaggtattcagacttataatgatgccaagcattatgcgatttctgcaaagattcctgagtttagcaacaaaaaccggactcttgttgtccagtactcagtcaagattgaacaagacattgaatgtggtggtgcttacattaagctcctgtctggctatgttaaccagaagcagtttggtggtgatactccatacagtctaatgtttggaccagatatatgcggaacacagacgaagaagcttcatgttatagtttcatatcagggacagaattatccaatcaaaaaggatttgcaatgtgaaacagacaaattaaatcatttctacacatttattctgcgtcctgacgcttcttacagcgttctggtggataataaagagagagaatttggcagtatgtacacagactgggacatccttcctccaaggaagatcaaggtcaagaatgcaaagaagccagaggactgggatgatagagagtacatcgatgaccccaacgatgtcaaacccgagggttttgattctattccacgtgaaattccagatcgtaaagctaaagagcccgaggactgggacgaggaagaaaatggtttgtgggaacctccaaagatcccaaattttgcgtacaaaggtccttggaaagcaaagagaatcaagaacccgaactacaagggaaaatggaagaacccatggatagataatccagaatttgaagatgatccagatctttacgttctgaagtctatcaaatatgcaggcattgaagtatggcaggtgaaggctggctcaatctttgacaatatattgatctgcgatgacccggcatatgcaagaagcatcgtggatgactattttgcccaacacagggagtctgagaaggagttatttgcggaagcagagaaagaaagaaaagctagagaagatgaggaagctcggatagcacgggaagaaggtgaacgcaggcggaaagaaagggaccaccggtatggagacaggaggaggcgttacaaacggccgaatccacgtgattatatggatgattaccatgacgagctatgaggcgcagagtggtgggcatttggcaaagcattgggggaaattatctatattttgctttgaatgtgtgtttgtaatttcataatttgtaaccttttgtattcatattcttataatgtattttggcatg

SEQ ID NO: 97563 - protein, 424 aa, Arabidopsis thaliana
  peptide (1)..(424): Ceres Seq. ID no. 12738862
MGLPQNKLSFFCFFFLVSVLTLAPLAFSEIFLEEHFEGGWKSRWVLSDWKRNEGKAGTFKHTAGKWPGDPDNKGIQTYNDAKHYAISAKIPEFSNKNRTLVVQYSVKIEQDIECGGAYIKLLSGYVNQKQFGGDTPYSLMFGPDICGTQTKKLHVIVSYQGQNYPIKKDLQCETDKLNHFYTFILRPDASYSVLVDNKEREFGSMYTDWDILPPRKIKVKNAKKPEDWDDREYIDDPNDVKPEGFDSIPREIPDRKAKEPEDWDEEENGLWEPPKIPNFAYKGPWKAKRIKNPNYKGKWKNPWIDNPEFEDDPDLYVLKSIKYAGIEVWQVKAGSIFDNILICDDPAYARSIVDDYFAQHRESEKELFAEAEKERKAREDEEARIAREEGERRRKERDHRYGDRRRRYKRPNPRDYMDDYHDEL

SEQ ID NO: 97564 - protein, 285 aa, Arabidopsis thaliana
  peptide (1)..(285): Ceres Seq. ID no. 12738863
MFGPDICGTQTKKLHVIVSYQGQNYPIKKDLQCETDKLNHFYTFILRPDASYSVLVDNKEREFGSMYTDWDILPPRKIKVKNAKKPEDWDDREYIDDPNDVKPEGFDSIPREIPDRKAKEPEDWDEEENGLWEPPKIPNFAYKGPWKAKRIKNPNYKGKWKNPWIDNPEFEDDPDLYVLKSIKYAGIEVWQVKAGSIFDNILICDDPAYARSIVDDYFAQHRESEKELFAEAEKERKAREDEEARIAREEGERRRKERDHRYGDRRRRYKRPNPRDYMDDYHDEL

SEQ ID NO: 97565 - protein, 220 aa, Arabidopsis thaliana
  peptide (1)..(220): Ceres Seq. ID no. 12738864
MYTDWDILPPRKIKVKNAKKPEDWDDREYIDDPNDVKPEGFDSIPREIPDRKAKEPEDWDEEENGLWEPPKIPNFAYKGPWKAKRIKNPNYKGKWKNPWIDNPEFEDDPDLYVLKSIKYAGIEVWQVKAGSIFDNILICDDPAYARSIVDDYFAQHRESEKELFAEAEKERKAREDEEARIAREEGERRRKERDHRYGDRRRRYKRPNPRDYMDDYHDEL

SEQ ID NO: 97566 - DNA, 1504 bp, Arabidopsis thaliana
  misc_feature (1)..(1504): Ceres Seq. ID no. 12738900
  misc_feature (1)..(1504): Ortholog of  Ceres SEQ ID NO 14311938 as cited in SEQ ID NO 51615
  misc_feature (1)..(1504): Ortholog of  Ceres SEQ ID NO 14302059 as cited in SEQ ID NO 68322
ggcacgagctcgattctgtatgatctcttcgatctaatcgagtcttctaaacgttccgtgtagaatttcaaatctagggtttgctaaagcttgaacttttcttacccttttctctcgaagaggttttgattcctgggcatgaatttttccctaatcttgttaccttcgaagcataacaacaacgaaagatgtcagattcaatccaggaaagatacttagttggatacgcactcgcagccaagaaacagcatagtttcatccaaccttctttgatcgaacactcaaggcaacgaggcattgatctggtcaagcttgatccgacgaaatcgttgttggagcaagggaagcttgattgcataatccacaagctttacgatgtgtattggaaggagaatcttcatgagtttcgcgagaaatgtcctggtgttcctgtaatcgatttgcctgaggctatcgagcgattgcacaatagggtttcgatgcttgaggtgataactcaattgaggtttcctgtttcagatagcgagagatttggtgtcccggagcaagttgttgttatggattcgagcgtcttgagcggtggaggagctttaggggagcttaagtttccggtgattgctaagccgttggatgctgatgggagtgctaaatctcataagatgtttttgatttatgatcaagaagggatgaagattttgaaagctcctattgtgttgcaggagtttgtgaatcatggtggtgtgatctttaaggtctatgtggttggagatcatgtcaaatgtgtaaagagaagatctttacctgatatctctgaagagaagattgggacgtcgaaagggtctcttccgttttcgcagatatcgaatctgactgctcaagaggacaagaacattgagtatggtgaggataggagcttagagaaagtggaaatgcctccgttaagtttcttgacagatctagcaaaggccatgagggaatcaatgggactcaatctctttaacttcgacgtgattagggatgccaaagatgctaataggtaccttataattgatattaactactttcctggatatgctaagatgccctcttacgagcctgtgttgactgagttcttctgggacatggtcactaagaagaatcatgtctgagaaataatctgttggggagttagcaggaacattgttggggaggatttgtaccattgcaatgtgttgcaactgccattgcaattctggcctatggtgactagctgctttgctaattttcatttggattcttgaacttgtgctttttatatttttttagttgtttctcttttgtttacttccgagttttgcaaagccatgttcaaatgcataactgttgctactcttgaaaagcattgaatctctaaattcttggcaaaaaaaaaaaaaaaaaaaaaaaaaaaaaaaaaaaaaaaactcgagggggggcccggtacccaattcgccctatagtgagtcgtattacaattcactggccg

SEQ ID NO: 97567 - protein, 319 aa, Arabidopsis thaliana; identical to SEQ ID NO: 21613
  peptide (1)..(319): Ceres Seq. ID no. 12738901

SEQ ID NO: 97568 - protein, 222 aa, Arabidopsis thaliana; identical to SEQ ID NO: 21614
  peptide (1)..(222): Ceres Seq. ID no. 12738902

SEQ ID NO: 97569 - protein, 196 aa, Arabidopsis thaliana; identical to SEQ ID NO: 21615
  peptide (1)..(196): Ceres Seq. ID no. 12738903

SEQ ID NO: 97570 - DNA, 1657 bp, Arabidopsis thaliana
  misc_feature (1)..(1657): Ceres Seq. ID no. 12738919
  misc_feature (1)..(1657): Ortholog of  Ceres SEQ ID NO 13654409 as cited in SEQ ID NO 68534
ttcttctaatagacttcttcgtcactgatctcccacgacgatctcccaaactcatttctctacgttcatcgatctctctctttctcgtttgctctacgaaaatcagccatggatgaagagtacgaggttattgttctcggcaccggtctcaaggagtgtatcctcagcggtctcctttccgtcgatggtgtcaaggtgcttcacatggacaggaatgactactatggtggagaatcaacttcccttaatctcaatcagctttggaagaagttcaggggagaagagaaggctcctgagcatttaggcgctagccgggattacaatgttgacatgatgcctaagtttatgatgggaaatggcaagcttgttcgtacccttattcatacagatgttacaaagtatttgtccttcaaagctgttgatggaagctatgttttcgtcaaaggaaaggttcaaaaggtgccagctactcctatggaggccctgaaatcttctctcatgggcatatttgagaaacgtcgagccggcaagtttttcagttttgttcaagaatacgatgagaaggacccaaaaacacacgatggaatggatttgaccagagttacaacaaaggaactgattgcgaaatatggtcttgatggcaacactattgactttattggtcacgcagtggcacttcacacgaatgaccaacatctcgatcaacccgcctttgatactgtaatgagaatgaagctctatgcggaatctcttgcacgtttccaaggaacatctccatatatttatcctctctatgggttgggagaactaccccaggcatttgcacgacttagtgctgtctatggtggcacatatatgttgaacaaacctgagtgcaaggtagagtttgacgagggaggtaaggttattggtgtaacatctgagggagagactgctaaatgcaaaaagattgtgtgtgacccttcatacctgccgaacaaggttaggaagattggcagggttgctcgggccatcgccattatgagccacccgattccaaacaccaatgattctcactcagtgcaggtcatcataccccagaaacagttggcccgcaaatcggatatgtatgtcttctgttgttcgtactcccacaacgttgctcccaagggaaaattcattgcatttgtgtctacagatgcagagactgataaccctcaaaccgaactaaagcctggaactgatcttttgggtcctgttgatgagatattcttcgacatgtatgatagatacgagcctgtcaacgagccagagttggacaactgctttatatcaacgagctatgatgctacaacacactttgagacaactgttgcggatgtgttgaacatgtatactctaatcaccggaaagcaactggacctaagtgttgacctgagtgccgcaagtgctgcagaggaatgaagaatcaccagatcgcgctctctctctctctctctagttgattttctaaaagcttgttttgctcatttctctgtttccgactcttgctttcgtgttcttttttggtttgaactttgaatacaaaatcagaatgatccttcatgtttagcaactaacaaccatgtgtctccgtttgatgttggattcctcggttaaagacttataaatgctcttt

SEQ ID NO: 97571 - protein, 444 aa, Arabidopsis thaliana; identical to SEQ ID NO: 26953
  peptide (1)..(444): Ceres Seq. ID no. 12738920

SEQ ID NO: 97572 - protein, 412 aa, Arabidopsis thaliana; identical to SEQ ID NO: 26954
  peptide (1)..(412): Ceres Seq. ID no. 12738921

SEQ ID NO: 97573 - protein, 370 aa, Arabidopsis thaliana; identical to SEQ ID NO: 26955
  peptide (1)..(370): Ceres Seq. ID no. 12738922

SEQ ID NO: 97574 - DNA, 1302 bp, Arabidopsis thaliana
  misc_feature (1)..(1302): Ceres Seq. ID no. 12738937
  misc_feature (1)..(1302): Ortholog of  Ceres SEQ ID NO 14312293 as cited in SEQ ID NO 58744
  misc_feature (1)..(1302): Ortholog of  Ceres SEQ ID NO 15177596 as cited in SEQ ID NO 59731
cgaacacaatctgcttcaagaattagggttttgatcagacacaaaaagtatctctctccggtcttgtgtcaaggttatgcaagaagcggcactaggtatgatgggagccaccgtaggcggagacggagacaccgcggtcgtggcggagcagaatagacagttgaaaggtgagatagcgacacatccgatgtatgagcaattattagccgcacacgtggcgtgtttaagagtagctactccaatagatcaacttccgatcattgaagctcagctttctcaatctcatcatcttctccgttcttacgcttccacggccgttggataccatcatgatcgtcacgagctcgataatttcttggcacaatatgtaatggtgttgtgtagcttcaaagaacagctgcaacagcacgtgagggttcatgccgtcgaagctgttatggcttgccgtgaaattgagaacaaccttcattctcttacaggagcaactttaggagaagggtcgggtgcgactatgtcggaggatgaggatgatcttccgatggatttctcgtcagataattccggcgttgattttagcggcggccacgatatgacgggatttggtccgttgctaccgactgaatcggaaagatcccttatggaaagagtcagacaagaactcaaactagaactcaaacagggttttaaatcgagaatcgaagatgtaagagaagagataatgaggaagagaagggctgggaaattgccaggagacacaactactgtcttgaaaaattggtggcaacaacattgcaaatggccttaccctacggaagatgacaaggcaaaattggtggaggagacaggattgcagttgaagcaaatcaacaattggttcattaaccaacgcaagaggaattggcacaacaactctcactccctcacttccttgaagtccaagcgcaaacactaatctcttcttactatattagttactacctctacatatattcatactaattacactgctaagacatgcatgatacatacgtaattcatgttactgataataacgaggtgtgatcattaatatcatgtacttacttagcttattagatccaccgactactatatgatttgtgcgttgcgtgattactggttgttactagattgtaattcattttgtttgtattgtgcattcaaatttatctttttggtaagaacactgattttgtaacgtgttttgtaacgtgttttccgtggatgactagaccatcatttggaaatataaagtaatgatgccgacaaaaaaggcagtgtttt

SEQ ID NO: 97575 - protein, 291 aa, Arabidopsis thaliana; identical to SEQ ID NO: 86004
  peptide (1)..(291): Ceres Seq. ID no. 12738938

SEQ ID NO: 97576 - protein, 284 aa, Arabidopsis thaliana; identical to SEQ ID NO: 39455
  peptide (1)..(284): Ceres Seq. ID no. 12738939

SEQ ID NO: 97577 - protein, 283 aa, Arabidopsis thaliana; identical to SEQ ID NO: 39456
  peptide (1)..(283): Ceres Seq. ID no. 12738940

SEQ ID NO: 97578 - DNA, 1004 bp, Arabidopsis thaliana
  misc_feature (1)..(1004): Ceres Seq. ID no. 12738974
  misc_feature (1)..(1004): Ortholog of  Ceres SEQ ID NO 13647762 as cited in SEQ ID NO 20426
gaagatcataaagatcaaaaggagagaggtattaaaaaatgatgtgtagtcgaggccattggagacctgcagaagacgagaagctaagagaactcgtcgagcaatttggtcctcataattggaacgccatagctcagaagctctctggtcgatctggtaagagttgtagattgagatggtttaatcaattggatcctaggattaaccgaaaccctttcacggaggaagaagaagaaaggcttttagcgcctcatcggatccatgggaacagatggtctgtgatcgctagattttttcccggtcgaactgataacgctgttaaaaaccattggcacgtcatcatggctcgtcgtggccgagaacggtccaagctccgtccacgaggccttggccatgatggcacggtggctgcgactgggatgattggtaattataaagactgcgataaggagagaagattggcaaccacaaccgctatcaattttccttatcaattctctcatattaatcattttcaagtcctcaaagagtccttgaccggaaagatcgggttcagaaatagtactactccaatacaagaaggagcaatagaccaaactaaacgaccgatggagttctacaattttctccaagtaaacacggattcgaagatacacgaattgatagataattcaagaaaagacgaagaagaagatgtcgatcaaaacaaccgaattcgtaacgagaattgtgttccatttttcgactttttgtctgttggaaactctgcctctcagggtttatgttaatttgtccgtaccacatgtactataaggtggaccatatgttaactaaagataatgtagaaagtactaatcaattagagctcctgtttgagccaaatgtgaaaattagttaagacatcccaaacattttcttgtataacacatataaggttgtacttttatcaggtctaattttctatttttattttaaggatgtttaatcagacccataaccattcg

SEQ ID NO: 97579 - protein, 249 aa, Arabidopsis thaliana
  peptide (1)..(249): Ceres Seq. ID no. 12738975
MMCSRGHWRPAEDEKLRELVEQFGPHNWNAIAQKLSGRSGKSCRLRWFNQLDPRINRNPFTEEEEERLLAPHRIHGNRWSVIARFFPGRTDNAVKNHWHVIMARRGRERSKLRPRGLGHDGTVAATGMIGNYKDCDKERRLATTTAINFPYQFSHINHFQVLKESLTGKIGFRNSTTPIQEGAIDQTKRPMEFYNFLQVNTDSKIHELIDNSRKDEEEDVDQNNRIRNENCVPFFDFLSVGNSASQGLC

SEQ ID NO: 97580 - protein, 248 aa, Arabidopsis thaliana
  peptide (1)..(248): Ceres Seq. ID no. 12738976
MCSRGHWRPAEDEKLRELVEQFGPHNWNAIAQKLSGRSGKSCRLRWFNQLDPRINRNPFTEEEEERLLAPHRIHGNRWSVIARFFPGRTDNAVKNHWHVIMARRGRERSKLRPRGLGHDGTVAATGMIGNYKDCDKERRLATTTAINFPYQFSHINHFQVLKESLTGKIGFRNSTTPIQEGAIDQTKRPMEFYNFLQVNTDSKIHELIDNSRKDEEEDVDQNNRIRNENCVPFFDFLSVGNSASQGLC

SEQ ID NO: 97581 - protein, 148 aa, Arabidopsis thaliana
  peptide (1)..(148): Ceres Seq. ID no. 12738977
MARRGRERSKLRPRGLGHDGTVAATGMIGNYKDCDKERRLATTTAINFPYQFSHINHFQVLKESLTGKIGFRNSTTPIQEGAIDQTKRPMEFYNFLQVNTDSKIHELIDNSRKDEEEDVDQNNRIRNENCVPFFDFLSVGNSASQGLC

SEQ ID NO: 97582 - DNA, 1554 bp, Arabidopsis thaliana
  misc_feature (1)..(1554): Ceres Seq. ID no. 12738991
  misc_feature (1)..(1554): Ortholog of  Ceres SEQ ID NO 14315346 as cited in SEQ ID NO 53970
gggcgatctggtttgctagatccaaaacccttgtttctagcttgagacataatctaaatttgtcgacaattctcataaaacgtgattactctcatcgtcccatcttctatacaacttctcagttatcttcaacggcgtatttgagtcccttcggtagcctccgtcatgagtctacggccgtggagacacaggctgatcatttggttcagcagattgatgaagtcgatgcccaggaactggatttcccaggaggcaaagtcggttacacatcggagatgaaattcataccggaatcatcttcaaggaggattccatgttaccgggttcttgacgaagacggacgaatcatccccgatagcgattttattccggtgagtgagaaactcgctgttagaatgtacgaacaaatggcgacgctacaagtaatggatcacatcttctacgaagctcaacgtcaaggaagaatatctttttatcttacttccgtcggagaagaagccattaacatcgcttcagcagctgctctcagtcctgacgacgtcgttttacctcagtaccgagaacctggagttcttttgtggcgtggcttcacgttggaggagtttgctaatcagtgttttgggaacaaagctgattatggcaaaggcagacaaatgccaattcattacggttccaatcgtcttaattacttcactatctcctctccaattgccacgcaacttcctcaagctgctggagttggttattctttgaaaatggacaagaagaatgcttgtactgttacattcatcggagatggtggcacaagcgagggagattttcacgccggattgaattttgcggccgtaatggaagctccggttgtgtttatatgtcggaacaacggttgggcgattagtactcatatctcagaacagtttagaagtgatggaatagttgtgaaaggtcaagcttacggtatcccgaagcatcccgtgtgggacggtaccgatgcacttgcggtttatagtgctgtacgctcagctcgagaaatggctgtaacagaacaaagacctgttctcattgagatgatgacatatagagtaggacatcattctacatcagatgattcaactaagtacagggcggcggatgaaatccagtactggaaaatgtcgagaaaccctgtgaatagatttcggaaatgggtcgaagataacggatggtggagtgaggaagatgaatccaagctaagatctaacgcaagaaaacagcttctgcaagcgattcaggctgcggagaagtgggagaaacaaccattgacagagttgtttaacgatgtatatgatgttaaaccgaagaacctagaagagcaagaacttggtttgaaggaattagtaaagaaacaacctcaagattatcctcctggctttcatgtttgaatctagaggaactgtgtggttaaaatacctcgcggaccgcgaattcgatatcaagcttctcattgcagactatttatattgtccacgtatcgaatagtaatcaagtatcaatgtagagaccagcatttggagc

SEQ ID NO: 97583 - protein, 472 aa, Arabidopsis thaliana
  peptide (1)..(472): Ceres Seq. ID no. 12738992
AIWFARSKTLVSSLRHNLNLSTILIKRDYSHRPIFYTTSQLSSTAYLSPFGSLRHESTAVETQADHLVQQIDEVDAQELDFPGGKVGYTSEMKFIPESSSRRIPCYRVLDEDGRIIPDSDFIPVSEKLAVRMYEQMATLQVMDHIFYEAQRQGRISFYLTSVGEEAINIASAAALSPDDVVLPQYREPGVLLWRGFTLEEFANQCFGNKADYGKGRQMPIHYGSNRLNYFTISSPIATQLPQAAGVGYSLKMDKKNACTVTFIGDGGTSEGDFHAGLNFAAVMEAPVVFICRNNGWAISTHISEQFRSDGIVVKGQAYGIPKHPVWDGTDALAVYSAVRSAREMAVTEQRPVLIEMMTYRVGHHSTSDDSTKYRAADEIQYWKMSRNPVNRFRKWVEDNGWWSEEDESKLRSNARKQLLQAIQAAEKWEKQPLTELFNDVYDVKPKNLEEQELGLKELVKKQPQDYPPGFHV

SEQ ID NO: 97584 - protein, 381 aa, Arabidopsis thaliana
  peptide (1)..(381): Ceres Seq. ID no. 12738993
MKFIPESSSRRIPCYRVLDEDGRIIPDSDFIPVSEKLAVRMYEQMATLQVMDHIFYEAQRQGRISFYLTSVGEEAINIASAAALSPDDVVLPQYREPGVLLWRGFTLEEFANQCFGNKADYGKGRQMPIHYGSNRLNYFTISSPIATQLPQAAGVGYSLKMDKKNACTVTFIGDGGTSEGDFHAGLNFAAVMEAPVVFICRNNGWAISTHISEQFRSDGIVVKGQAYGIPKHPVWDGTDALAVYSAVRSAREMAVTEQRPVLIEMMTYRVGHHSTSDDSTKYRAADEIQYWKMSRNPVNRFRKWVEDNGWWSEEDESKLRSNARKQLLQAIQAAEKWEKQPLTELFNDVYDVKPKNLEEQELGLKELVKKQPQDYPPGFHV

SEQ ID NO: 97585 - protein, 341 aa, Arabidopsis thaliana
  peptide (1)..(341): Ceres Seq. ID no. 12738994
MYEQMATLQVMDHIFYEAQRQGRISFYLTSVGEEAINIASAAALSPDDVVLPQYREPGVLLWRGFTLEEFANQCFGNKADYGKGRQMPIHYGSNRLNYFTISSPIATQLPQAAGVGYSLKMDKKNACTVTFIGDGGTSEGDFHAGLNFAAVMEAPVVFICRNNGWAISTHISEQFRSDGIVVKGQAYGIPKHPVWDGTDALAVYSAVRSAREMAVTEQRPVLIEMMTYRVGHHSTSDDSTKYRAADEIQYWKMSRNPVNRFRKWVEDNGWWSEEDESKLRSNARKQLLQAIQAAEKWEKQPLTELFNDVYDVKPKNLEEQELGLKELVKKQPQDYPPGFHV

SEQ ID NO: 97586 - DNA, 2234 bp, Arabidopsis thaliana
  misc_feature (1)..(2234): Ceres Seq. ID no. 12738995
  misc_feature (1)..(2234): Ortholog of  Ceres SEQ ID NO 13590691 as cited in SEQ ID NO 66290
cggcacgagcttcatcgactcaaattcaaaaactcatctctctctatctctatttctctggttccatagctcaccgtcgcatcgcagatctactccttccgcaataaattttaccggcggaggtatcagatctcgccgatctgttgtagcagctactgtattttgggcttctcatttgatattggggaaacgaggagtagaggacgatggaaaatctgatctctctggttaacaagatacagagagcttgcacggctttaggagaccatggagactccagcgctttacctactctttgggattccttgcctgcgatcgccgtcgttggtggtcagagctcagggaagtcttcagtcctggagagcatcgtgggaaaggactttttaccccgtggatctggcattgttactcgaaggccccttgtcttacagttgcaaaagatcgatgatggaacccgggagtatgcagagtttcttcacctcccgaggaaaaagtttactgattttgctgctgtgaggaaggagattcaagatgagactgacagagagactggacgcagcaaggctatttctagtgttcccattcaccttagcatatactctcccaatgttgtcaacttgacactgatagatcttccagggcttacaaaagttgctgttgatggacaatctgatagtatagtgaaggacattgaaaacatggttcggtcctacattgaaaagcccaactgcatcattttggcaatctcacctgcaaaccaagatcttgctacctcagatgcaattaaaatttcccgtgaggttgatccatcgggggacagaacatttggtgtcttgacaaagattgatcttatggacaaggggacggatgcagtggaaattctggaagggagatcttttaaacttaaatatccgtgggttggtgtcgtcaaccgttcccaagcagatattaacaagaatgtcgacatgattgcggctcggaaaagagagagggagtacttttccaatactactgagtataggcaccttgctaataaaatgggttccgagcatttggcaaagatgctctccaagcatctagaacgtgtgatcaagtcgagaattcctggcattcagtcacttattaacaaaacagtattagagctggaaactgaactaagtcgccttggaaagcctattgcagctgatgcaggggggaagttgtactcaataatggagatatgtcggctttttgatcaaatattcaaagagcatcttgatggagtgcgtgctggtggtgaaaaagtgtacaacgtgtttgataaccagcttcctgcggctctgaagagactccaatttgacaagcagctagcgatggacaacatccggaagctggtcactgaggctgatggttaccagcctcacttgattgctcctgagcaaggttaccgtcgtctcattgagtcttctattgtctccatcagaggccctgctgaagcatctgttgacaccgttcatgctatcttaaaggatctggttcacaagtctgtgaatgaaactgtggaactaaaacaatacccagctctgagagtggaggtgacaaatgcggcgatagagtcgctggataaaatgcgggaaggaagtaagaaagcaacactgcagctggttgacatggagtgcagttacctcactgttgatttcttcaggaaacttccccaggatgttgagaagggtggtaaccccacacactccattttcgaccgctacaacgattcctatctcagacgaatcggatccaatgttttgtcttacgtgaacatggtctgtgctggcctgcggaattcaatccccaagtccatcgtatactgccaagtccgagaagcgaagcgcagtctcctcgaccatttctttgcggagctcggtaccatggatatgaagaggctctcgtcgctattgaacgaagatccagcaatcatggagagacgcagtgccatctcaaagcggctagaattgtatcgagcagcccaatccgagatcgatgctgttgcttggtccaagtgataccggcatgtcatgtccactgttttgctcggttctggtcggtgtggctcagactcggagcagagatttagggtctgtaatttgtataagatgatcttcccgataccatgcagtatcgttttatataacatccacattgtttgtcctacctctatgttttttgtccatcacccgatatgttacgtatcgttttat

SEQ ID NO: 97587 - protein, 610 aa, Arabidopsis thaliana
  peptide (1)..(610): Ceres Seq. ID no. 12738996
MENLISLVNKIQRACTALGDHGDSSALPTLWDSLPAIAVVGGQSSGKSSVLESIVGKDFLPRGSGIVTRRPLVLQLQKIDDGTREYAEFLHLPRKKFTDFAAVRKEIQDETDRETGRSKAISSVPIHLSIYSPNVVNLTLIDLPGLTKVAVDGQSDSIVKDIENMVRSYIEKPNCIILAISPANQDLATSDAIKISREVDPSGDRTFGVLTKIDLMDKGTDAVEILEGRSFKLKYPWVGVVNRSQADINKNVDMIAARKREREYFSNTTEYRHLANKMGSEHLAKMLSKHLERVIKSRIPGIQSLINKTVLELETELSRLGKPIAADAGGKLYSIMEICRLFDQIFKEHLDGVRAGGEKVYNVFDNQLPAALKRLQFDKQLAMDNIRKLVTEADGYQPHLIAPEQGYRRLIESSIVSIRGPAEASVDTVHAILKDLVHKSVNETVELKQYPALRVEVTNAAIESLDKMREGSKKATLQLVDMECSYLTVDFFRKLPQDVEKGGNPTHSIFDRYNDSYLRRIGSNVLSYVNMVCAGLRNSIPKSIVYCQVREAKRSLLDHFFAELGTMDMKRLSSLLNEDPAIMERRSAISKRLELYRAAQSEIDAVAWSK

SEQ ID NO: 97588 - protein, 446 aa, Arabidopsis thaliana
  peptide (1)..(446): Ceres Seq. ID no. 12738997
MVRSYIEKPNCIILAISPANQDLATSDAIKISREVDPSGDRTFGVLTKIDLMDKGTDAVEILEGRSFKLKYPWVGVVNRSQADINKNVDMIAARKREREYFSNTTEYRHLANKMGSEHLAKMLSKHLERVIKSRIPGIQSLINKTVLELETELSRLGKPIAADAGGKLYSIMEICRLFDQIFKEHLDGVRAGGEKVYNVFDNQLPAALKRLQFDKQLAMDNIRKLVTEADGYQPHLIAPEQGYRRLIESSIVSIRGPAEASVDTVHAILKDLVHKSVNETVELKQYPALRVEVTNAAIESLDKMREGSKKATLQLVDMECSYLTVDFFRKLPQDVEKGGNPTHSIFDRYNDSYLRRIGSNVLSYVNMVCAGLRNSIPKSIVYCQVREAKRSLLDHFFAELGTMDMKRLSSLLNEDPAIMERRSAISKRLELYRAAQSEIDAVAWSK

SEQ ID NO: 97589 - protein, 395 aa, Arabidopsis thaliana
  peptide (1)..(395): Ceres Seq. ID no. 12738998
MDKGTDAVEILEGRSFKLKYPWVGVVNRSQADINKNVDMIAARKREREYFSNTTEYRHLANKMGSEHLAKMLSKHLERVIKSRIPGIQSLINKTVLELETELSRLGKPIAADAGGKLYSIMEICRLFDQIFKEHLDGVRAGGEKVYNVFDNQLPAALKRLQFDKQLAMDNIRKLVTEADGYQPHLIAPEQGYRRLIESSIVSIRGPAEASVDTVHAILKDLVHKSVNETVELKQYPALRVEVTNAAIESLDKMREGSKKATLQLVDMECSYLTVDFFRKLPQDVEKGGNPTHSIFDRYNDSYLRRIGSNVLSYVNMVCAGLRNSIPKSIVYCQVREAKRSLLDHFFAELGTMDMKRLSSLLNEDPAIMERRSAISKRLELYRAAQSEIDAVAWSK

SEQ ID NO: 97590 - DNA, 585 bp, Arabidopsis thaliana
  misc_feature (1)..(585): Ceres Seq. ID no. 12739040
  misc_feature (1)..(585): Ortholog of  Ceres SEQ ID NO 14311557 as cited in SEQ ID NO 51432
  misc_feature (1)..(585): Ortholog of  Ceres SEQ ID NO 13598075 as cited in SEQ ID NO 67351
ttcatgggccatcataccaagatatgagaatcagagtcaatggaggcgaatgggaaatatatccccaggtcactgctytctgcgtaggaaacgcaaaatactttggtggtggaatgaaaatcacacccaacgccatccctggaaatggaaatcttgaggttgtggttcttcaaaacttcaaatggtatgatttcgtacttaaacttcataagctgtacaacgggactcatctttcggttaacaatgtgacttcaagaagtgtacaaagcatcgaagttgaagagattacagacaatggaagtatytatgtgcagtcagatggagaacatcttggattcctacctagaaagtttcaggtgttacccggtgccatagacataatcagctgatcaaaaccgcagatttcttaggataaacttgtcaagtaaagtgtagaatacttcaactttatattcttcctgtaatatgattcattgtttagcgaatcagatttatgctcgtgttacttgtgtaactcgttactatcactatttattgtgtggtctctgttaaccacaaatagatactttaaaacattttaaagct

SEQ ID NO: 97591 - protein, 128 aa, Arabidopsis thaliana
  peptide (1)..(128): Ceres Seq. ID no. 12739041
  misc_feature (26)..(26): Xaa is any aa, unknown or other
  misc_feature (101)..(101): Xaa is any aa, unknown or other
HGPSYQDMRIRVNGGEWEIYPQVTAXCVGNAKYFGGGMKITPNAIPGNGNLEVVVLQNFKWYDFVLKLHKLYNGTHLSVNNVTSRSVQSIEVEEITDNGSXYVQSDGEHLGFLPRKFQVLPGAIDIIS

SEQ ID NO: 97592 - protein, 121 aa, Arabidopsis thaliana
  peptide (1)..(121): Ceres Seq. ID no. 12739042
  misc_feature (19)..(19): Xaa is any aa, unknown or other
  misc_feature (94)..(94): Xaa is any aa, unknown or other
MRIRVNGGEWEIYPQVTAXCVGNAKYFGGGMKITPNAIPGNGNLEVVVLQNFKWYDFVLKLHKLYNGTHLSVNNVTSRSVQSIEVEEITDNGSXYVQSDGEHLGFLPRKFQVLPGAIDIIS

SEQ ID NO: 97593 - protein, 91 aa, Arabidopsis thaliana
  peptide (1)..(91): Ceres Seq. ID no. 12739043
  misc_feature (64)..(64): Xaa is any aa, unknown or other
MKITPNAIPGNGNLEVVVLQNFKWYDFVLKLHKLYNGTHLSVNNVTSRSVQSIEVEEITDNGSXYVQSDGEHLGFLPRKFQVLPGAIDIIS

SEQ ID NO: 97594 - DNA, 762 bp, Arabidopsis thaliana
  misc_feature (1)..(762): Ceres Seq. ID no. 12739174
  misc_feature (1)..(762): Ortholog of  Ceres SEQ ID NO 15179194 as cited in SEQ ID NO 0
aagtcagtaagtaaacgagcaaaagaagaagagaaacaacaagaagtagtaatggcttcctctatgctctcctccgccgctgtggttacatccccggctcaggccaccatggtcgctccattcaccggcttgaagtcatccgctgcattcccggtcacccgcaagaccaacaaggacatcacttccatcgcaagcaacgggggaagagttagctgcatgaaggtgtggccaccaattggaaagaagaagtttgagactctatcttacctccctgaccttagtgacgtcgaattggctaaggaagttgactaccttctccgcaacaagtggattccttgtgttgaattcgagttagagcacggatttgtgtaccgtgagcacggaaacactcccggatactacgatggacggtactggacaatgtggaagcttccattgttcggatgcaccgactccgctcaagtgttgaaggaagttgaagaatgcaagaaggagtacccgggcgccttcattaggatcatcggattcgacaacacccgtcaagtccaatgcatcagtttcattgcctacaagcccccaagcttcaccgaagcttaatttcttttctaaaacattcttatgaattatctctgctcatttcatttcctattgtctgtgttctttttctctttatgagacaatttctatcggattgtcaaatgtctgatttatgaatatgtaatttatatatccgtgcgtcttgattttttccgatggttaact

SEQ ID NO: 97595 - protein, 198 aa, Arabidopsis thaliana; identical to SEQ ID NO: 36038
  peptide (1)..(198): Ceres Seq. ID no. 12739175

SEQ ID NO: 97596 - protein, 181 aa, Arabidopsis thaliana; identical to SEQ ID NO: 36039
  peptide (1)..(181): Ceres Seq. ID no. 12739176

SEQ ID NO: 97597 - protein, 177 aa, Arabidopsis thaliana; identical to SEQ ID NO: 36040
  peptide (1)..(177): Ceres Seq. ID no. 12739177

SEQ ID NO: 97598 - DNA, 1027 bp, Arabidopsis thaliana
  misc_feature (1)..(1027): Ceres Seq. ID no. 12739208
  misc_feature (1)..(1027): Ortholog of  Ceres SEQ ID NO 13595072 as cited in SEQ ID NO 55971
actctcactcacaagttagtcataaaaaaaaaaaaaacacaaaaaagtttcaatggccgcctcaacaatggctctctcctcccctgctttcgccggaaaggctgtgaacctttcccctgcggcatcagaagtccttggaagcggccgtgtgacaatgaggaagactgttgccaagccaaagggtccatcaggcagcccatggtacggatccgaccgagtcaagtacttgggtccattctctggcgagtcacccagctaccttaccggagagttccctggagactacggatgggacacagctggtctatccgctgaccccgagacattcgcaaggaaccgtgagctagaagttatccacagcaggtgggccatgctcggagccctaggctgcgtcttccctgagcttttggccaggaacggagtcaagtttggagaggcagtttggttcaaggctggttcacagatcttcagcgatggagggctcgattacttgggaaaccctagcttggttcacgctcagagcattttggccatttgggccacacaagttattttgatgggagccgttgaaggttacagagtcgcaggaaatgggccattgggagaggccgaggacttgctttaccccggtggcagtttcgacccattgggtttggctaccgacccagaggccttcgctgagttgaaggtaaaggagctcaagaacggaagattggctatgttctctatgtttggattcttcgttcaagccatcgtcactggtaagggaccgatagagaaccttgctgaccatttggccgatccagtcaacaacaacgcttgggcctttgccaccaactttgttcccggaaagtgagccaagttctatctgtttgtaatttacttttctttcaatcttttgaattcgagtgagagacaggaggagaaagagtaggtttgtgtttgtggtggatggtagagactttcagatgtaaatttgcaaagactttgtatgatttgtcattaatcaaataactcattgttctct

SEQ ID NO: 97599 - protein, 267 aa, Arabidopsis thaliana; identical to SEQ ID NO: 21212
  peptide (1)..(267): Ceres Seq. ID no. 12739209

SEQ ID NO: 97600 - protein, 262 aa, Arabidopsis thaliana; identical to SEQ ID NO: 21213
  peptide (1)..(262): Ceres Seq. ID no. 12739210

SEQ ID NO: 97601 - protein, 233 aa, Arabidopsis thaliana; identical to SEQ ID NO: 21214
  peptide (1)..(233): Ceres Seq. ID no. 12739211

SEQ ID NO: 97602 - DNA, 2374 bp, Arabidopsis thaliana
  misc_feature (1)..(2374): Ceres Seq. ID no. 12739212
  misc_feature (1)..(2374): Ortholog of  Ceres SEQ ID NO 13663839 as cited in SEQ ID NO 60834
  misc_feature (1)..(2374): Ortholog of  Ceres SEQ ID NO 14313284 as cited in SEQ ID NO 67146
  misc_feature (1)..(2374): Ortholog of  Ceres SEQ ID NO 14308925 as cited in SEQ ID NO 0
gtatcaatcaacacttctctgctctctaaagaaaattttgctctctttatctctcgatttgattcataaaccctagctcttagattttttttccgatcaacgagaatggcggacgcagaaacctttgctttccaagctgagatcaaccagttgctctccctcatcatcaataccttttactctaacaaggagatcttccttcgtgaactcatcagtaactcttctgatgctttggacaagattaggtttgagtccttgacagacaagagcaagctcgatggtcagccagagctcttcattcacatcattcccgacaagactaacaacaccttgacgattatcgatagtggtattgggatgaccaaggctgatctggtgaacaaccttggaacaattgcaagatctggaaccaaagaattcatggaggcgttggctgctggagctgatgttagcatgattggacagtttggtgttggtttctactctgcttacttggttgctgacaaggttgttgttactaccaagcacaatgacgatgagcagtacgtgtgggagtctcaggccggtggatctttcaccgtcaccagagacacctctggtgaggctcttggtagaggaactaagatggtcctttacctcaaggaagaccagatggagtacattgaggagcgaaggcttaaggatttggtgaagaagcactctgagttcatcagctacccaatctctctctggattgagaagaccattgagaaggagatctctgatgatgaagaggaggaagagaagaaggatgaggaaggcaaggttgaggaagttgatgaggagaaagaaaaggaggagaagaaaaagaagaagattaaggaggtttctcatgagtgggatttggtgaacaagcagaaaccgatttggatgaggaagccagaggagatcaacaaggaggagtacgctgctttctacaagagtttgagcaatgactgggaagagcatttggctgtgaagcatttctcagttgaaggacagcttgagttcaaagctatcctctttgttcccaagagagctccttttgatctctttgacactaagaagaagcccaacaacatcaagctctatgtccgtcgtgtcttcatcatggacaactgtgaagacatcattcctgagtaccttgggtttgtcaagggtattgttgactctgaagatcttcctctcaacatctcaagagaaacattgcagcagaacaagatcctcaaggtcatccgcaagaaccttgtgaagaagtgtcttgagctcttctttgagattgctgagaacaaggaggactacaacaagttctatgaggctttctctaagaacctgaagctcggtatccatgaggactcccaaaacagaaccaagattgctgagttgctccgttaccactcaaccaagagcggtgatgaattgaccagtctcaaggactacgtgacaaggatgaaggaaggtcagaacgatatcttctatatcactggtgagagcaagaaggctgttgagaactctccattccttgagaagctcaagaagaagggtattgaagttctctacatggttgacgctatcgatgagtatgctattggtcagctcaaggaattcgaaggaaagaagcttgtctctgcaaccaaggaaggtctgaaactggatgagactgaagacgagaagaagaagaaagaagagctcaaggagaagtttgagggactctgcaaagtgatcaaggacgttttgggagacaaggttgagaaggttatcgtctctgaccgtgttgtggactcaccctgctgtcttgtaacaggcgagtatggctggactgcaaacatggagaggatcatgaaagctcaagccttgagagacagcagcatgggtggctacatgtcgagcaagaagacaatggagattaacccagagaactccatcatggatgagctgagaaagagagctgatgcagacaagaacgacaagtctgtgaaggaccttgtacttcttctctttgagaccgctcttctcacttctggtttcagcctcgatgagcccaacactttcgggagcaggattcacaggatgttgaagcttggattgagcattgatgacgatgatgttgttgaagccgatgctgacatgcctccacttgaagatgatgccgatgctgaaggtagcaagatggaggaagttgactaaattatcacacacagtcgacttaatcattaggggtgttgagacattggttatctttttatcttttttttttatgttttcgtttgaactaatattttggaactattttctggagtttatttcttctatcgcttgttttcgtgaagattttttctctgaattcggtttgatg

SEQ ID NO: 97603 - protein, 699 aa, Arabidopsis thaliana; identical to SEQ ID NO: 49702
  peptide (1)..(699): Ceres Seq. ID no. 12739213

SEQ ID NO: 97604 - protein, 615 aa, Arabidopsis thaliana; identical to SEQ ID NO: 49703
  peptide (1)..(615): Ceres Seq. ID no. 12739214

SEQ ID NO: 97605 - protein, 594 aa, Arabidopsis thaliana; identical to SEQ ID NO: 70018
  peptide (1)..(594): Ceres Seq. ID no. 12739215

SEQ ID NO: 97606 - DNA, 1601 bp, Arabidopsis thaliana
  misc_feature (1)..(1601): Ceres Seq. ID no. 12739224
  misc_feature (1)..(1601): Ortholog of  Ceres SEQ ID NO 14314896 as cited in SEQ ID NO 54010
  misc_feature (1)..(1601): Ortholog of  Ceres SEQ ID NO 14308813 as cited in SEQ ID NO 55485
  misc_feature (1)..(1601): Ortholog of  Ceres SEQ ID NO 13655744 as cited in SEQ ID NO 64032
gtgcgctctcatatttctcacattttcgtagccgcaagactcctttcagattcttacttgcagctatgggtaaagagaagtttcacattaacattgtggtcattggtcatgttgattctggaaaatcgaccacaactggtcacttgatctataagcttggtggtattgacaagcgtgtcatcgagaggttcgagaaggaggctgctgagatgaacaagaggtccttcaagtacgcatgggtgttggacaaacttaaggccgagcgtgagcgtggtattaccatcgatattgctctatggaagttcgagaccaccaagtactactgcacagtcattgatgccccaggacatcgtgatttcatcaagaacatgattactggtacctcccaggctgattgtgctgttcttatcattgactccaccactggaggttttgaggctggtatctctaaggatggtcagacccgtgagcacgctcttcttgctttcacccttggtgtcaagcagatgatttgctgttgtaacaagatggatgccaccacccccaaatactccaaggctaggtacgatgaaatcatcaaggaggtgtcttcatacctgaagaaggtcggatacaaccctgacaaaatcccatttgtgccaatctctggattcgagggagacaacatgattgagaggtcaaccaaccttgactggtacaagggaccaactcttcttgaggctcttgaccagatcaacgagcccaagaggccatcagacaagccccttcgtcttccacttcaggatgtctacaagattggtggtattggaacggtgccagtgggacgtgttgagactggtatgatcaagcctggtatggttgttacctttgctcccacagggttgaccactgaggttaagtctgttgagatgcaccacgagtctcttcttgaggcacttcccggtgacaatgttggattcaatgtcaagaatgttgctgtcaaggatcttaagagaggatacgttgcctctaactccaaggatgatccagctaagggtgccgccaacttcacctcccaggtcatcatcatgaaccaccctggtcagattggtaacggttacgccccagttctcgattgccacacctctcacattgcagtcaagttctctgagatcttgaccaagattgacaggcgttctggtaaggagattgagaaggagcccaagtttttgaagaatggtgacgctggtatggttaagatgaccccaaccaagcccatggttgttgagactttctccgagtacccacctttgggacgtttcgctgttagggacatgaggcagaccgttgctgttggtgttattaagagcgtggacaagaaggacccaactggagccaaggtcaccaaggctgcagtgaagaagggtgccaaatgatgagactttcgttatgatcgactctcttatggttttctttggttcttaaaactttgatggcgtttgagcctttttcttttttctctttatttctgtgactttctctctccctcctttttggatatctctgagactttttattatggttttcaattatgcagtttccggataattttgcttgaaact

SEQ ID NO: 97607 - protein, 470 aa, Arabidopsis thaliana; identical to SEQ ID NO: 40875
  peptide (1)..(470): Ceres Seq. ID no. 12739225

SEQ ID NO: 97608 - protein, 449 aa, Arabidopsis thaliana; identical to SEQ ID NO: 27284
  peptide (1)..(449): Ceres Seq. ID no. 12739226

SEQ ID NO: 97609 - protein, 401 aa, Arabidopsis thaliana; identical to SEQ ID NO: 21437
  peptide (1)..(401): Ceres Seq. ID no. 12739227

SEQ ID NO: 97610 - DNA, 1143 bp, Arabidopsis thaliana
  misc_feature (1)..(1143): Ceres Seq. ID no. 12782023
  misc_feature (1)..(1143): Ortholog of  Ceres SEQ ID NO 13593831 as cited in SEQ ID NO 53828
ctcgaccacacacttggtagctacacacgagaaagaaaaagctcacaactttaacctttctggagagagaggaacaaaagagggagagggagagaaatggaaggcaaagaagaagatgtacgagtgggagctaacaagttcccggagaggcaacccatcggtacatcggctcagtccaccgacaaggactacaaagagccacctcctgcgccactgttcgagcccggcgagctcagctcatggtctttctacagagccggaatagctgagtttatcgctactttcttgtttctctacatcactgttttgactgtaatgggagttaagagagcaccaaacatgtgtgcttctgttggaatccaaggtatcgcttgggcttttggtggcatgatctttgctcttgtctactgtactgctggaatttcaggtggacacatcaaccctgctgtaacatttggtctgttcttggctcggaagttgtctctgaccagagctgtgttctacatgattatgcaatgtcttggagccatctgtggtgccggagtcgtcaaaggtttccagccaacgccgtaccagactctcggtggtggtgctaacaccgttgctcatggctacaccaaaggttctggccttggtgctgaaatcatcggaacattcgttctcgtctacactgtcttctccgccaccgacgccaagagaagcgcccgtgactcacacgtcccgattttggcgccgctcccaatcggatttgcagtgttcttggtacacttggcaacaataccgatcaccgggaccggaatcaacccagctagaagtcttggagccgcaattatctacaacaaggaccactcttaggatgaccattggattttctgggttggaccattcattggagcagctctagcagcactatatcaccagattgtcatcagagcgattcctttcaagagcaagagttagagacacacagaaagattccacggtccagaatttgttctttagtagtttctttgcttatctatctaatgtagcttgtgttttgcaatgtaatgagcctttcaagaatatgtatttgggatttctaatcagcttttgtctatgtaaaaaccatggtttatctttaaatgttgtttgaggttggcc

SEQ ID NO: 97611 - protein, 252 aa, Arabidopsis thaliana
  peptide (1)..(252): Ceres Seq. ID no. 12782024
MEGKEEDVRVGANKFPERQPIGTSAQSTDKDYKEPPPAPLFEPGELSSWSFYRAGIAEFIATFLFLYITVLTVMGVKRAPNMCASVGIQGIAWAFGGMIFALVYCTAGISGGHINPAVTFGLFLARKLSLTRAVFYMIMQCLGAICGAGVVKGFQPTPYQTLGGGANTVAHGYTKGSGLGAEIIGTFVLVYTVFSATDAKRSARDSHVPILAPLPIGFAVFLVHLATIPITGTGINPARSLGAAIIYNKDHS

SEQ ID NO: 97612 - protein, 179 aa, Arabidopsis thaliana
  peptide (1)..(179): Ceres Seq. ID no. 12782025
MGVKRAPNMCASVGIQGIAWAFGGMIFALVYCTAGISGGHINPAVTFGLFLARKLSLTRAVFYMIMQCLGAICGAGVVKGFQPTPYQTLGGGANTVAHGYTKGSGLGAEIIGTFVLVYTVFSATDAKRSARDSHVPILAPLPIGFAVFLVHLATIPITGTGINPARSLGAAIIYNKDHS

SEQ ID NO: 97613 - protein, 171 aa, Arabidopsis thaliana
  peptide (1)..(171): Ceres Seq. ID no. 12782026
MCASVGIQGIAWAFGGMIFALVYCTAGISGGHINPAVTFGLFLARKLSLTRAVFYMIMQCLGAICGAGVVKGFQPTPYQTLGGGANTVAHGYTKGSGLGAEIIGTFVLVYTVFSATDAKRSARDSHVPILAPLPIGFAVFLVHLATIPITGTGINPARSLGAAIIYNKDHS

SEQ ID NO: 97614 - DNA, 1516 bp, Arabidopsis thaliana
  misc_feature (1)..(1516): Ceres Seq. ID no. 13486664
  misc_feature (1)..(1516): Ortholog of  Ceres SEQ ID NO 13599602 as cited in SEQ ID NO 0
tttgcatattgtctacttttagattttgatatctattggaactcttactagctcattcatccgtcggcctgtgaattgtgtttctgaagtttccccaatggctgcttttggagatgacattgtgattgtagcggcatatcgtaccgccatttgcaaagcgagacgtggaggtttcaaagacactcttcctgatgatcttcttgcttctgttcttaaggctgtagtggaaagaacatctttggatccaagtgaagttggtgatatcgttgttggtaccgtgatagcgcctggttctcagagagcaatggagtgtagagttgcagcttattttgctggttttcctgactccgtgccagttagaactgtcaatagacaatgctcatcaggactacaagcagttgctgatgttgctgcttccattagagctggttattacgacattggtattggtgctggagtggaatcaatgtcaactgatcatattcctggaggcggctttcatggctctaatccaagagcacaggatttcccaaaagcccgtgattgtttgcttccaatgggaattacttctgaaaacgttgcagaaaggttcggtgtcacaagagaagagcaagatatggctgcggtggagtctcacaaacgcgctgcagctgcaatcgcgtctggtaaactcaaggatgaaatcattcctgttgctactaagattgtggaccctgagactaaagcagagaaggcaatcgtcgtatctgttgatgacggtgtacgtccaaactcaaacatggcagatttggcaaagctgaagactgtctttaaacagaacggttccaccacagctggcaatgctagtcagatcagtgatggtgctggagcagtactgctaatgaagagaagtttggctatgaagaagggacttcccattcttggagtattcaggagttttgctgttactggtgtggaaccatctgtaatgggtattggtccagctgttgccattcccgctgcaactaagctcgcagggctcaacgtcagcgatattgatctattcgagatcaatgaggcatttgcatctcagtatgtgtactcttgcaagaagttagagctggatatggaaaaggtcaatgttaatggaggagccattgctattggccatcccctgggtgctacaggagctcgatgtgttgcgacattgttgcacgagatgaagcggagaggaaaagattgccgctttggagtaatctcaatgtgcataggcactggaatgggagctgcagctgtttttgagaggggagactctgttgataacttgtccaacgctcgtgtggctaacggggatagtcattagaacatcgaagagagcttgaataagtagaagtaatgatgcattgagtctaataaatatgatgctttagctctttcacattgctgaacaatgaaaacttttgtcattctgagtttaaaatcaactacttttctctgaacaaagtgttaaatctaaaaccaaaagttacatccttcc

SEQ ID NO: 97615 - protein, 414 aa, Arabidopsis thaliana; identical to SEQ ID NO: 29323
  peptide (1)..(414): Ceres Seq. ID no. 13486665

SEQ ID NO: 97616 - protein, 345 aa, Arabidopsis thaliana; identical to SEQ ID NO: 29324
  peptide (1)..(345): Ceres Seq. ID no. 13486666

SEQ ID NO: 97617 - protein, 291 aa, Arabidopsis thaliana; identical to SEQ ID NO: 29325
  peptide (1)..(291): Ceres Seq. ID no. 13486667

SEQ ID NO: 97618 - DNA, 1238 bp, Arabidopsis thaliana
  misc_feature (1)..(1238): Ceres Seq. ID no. 13486786
  misc_feature (1)..(1238): Ortholog of  Ceres SEQ ID NO 13595688 as cited in SEQ ID NO 54342
  misc_feature (1)..(1238): Ortholog of  Ceres SEQ ID NO 13595240 as cited in SEQ ID NO 56316
  misc_feature (1)..(1238): Ortholog of  Ceres SEQ ID NO 15168425 as cited in SEQ ID NO 57370
ctcctctgttcgtcaatcgccgatctcgttgcttcattttccttgagatcgattggtacaagtgttcatccaatggttggaggaggagttatccggcagcttcttagaaggaaacttcattcccaatcagtcgcaactccggtattgtcatggttgtcttcgaagaaagcgaatgaagatgctgggtctgctggtttaagagcatttgctctcatgggtgctggtattaccggattattgagtttttctactgttgcatctgctgatgaggctgaacatggtctggagtgtcctaactacccttggccacatgagggcattctcagctcatatgaccatgcttcgatccgtcgtggtcaccaagtttatcagcaagtttgtgcgtcttgccattcgatgtctctgatctcataccgagacttggtgggtgttgcctacacagaggaagaggcgaaggccatggcagctgaaatcgaggttgttgatggaccaaatgatgagggtgagatgttcacccgacctggtaaactcagtgatcggcttcctgaaccatactcaaatgaatcggctgctaggttcgccaatggaggagcgtatccaccggatctaagtcttgtaactaaggcacgtcacaatggccaaaattatgtctttgctctgttgactggttatcgtgatcctcctgctggaatttcgatcagagaggggctacactacaatccttatttccctggtggagcaatcgctatgccaaaaatgctcaacgatgaagctgtggaatatgaagatggaactcctgcaacagaagcacagatgggtaaagatgttgtatccttcttgtcctgggcagctgaaccagagatggaagagaggaaattgatggggttcaaatggatattcttactgtctttggctctgcttcaagctgcgtattacaggagactgaaatggtcagtactcaaatcccgtaagcttgttctcgacgttgttaactaatcccgtgaagatcaccttttctctgggtaataatcattaatcttgaaagggataaatggtgaatcccactttttgtctcaaaagacatgtttctttgtttattgtttagaaagtctaatgaggcaaagaagtaaagcttttttaacctcaagtcacacatgattttgagattatattatttctttttggtttgttgtctcctaaaccggactcggtttgtcttaataaaaatgtggttttac

SEQ ID NO: 97619 - protein, 331 aa, Arabidopsis thaliana
  peptide (1)..(331): Ceres Seq. ID no. 13486787
LLCSSIADLVASFSLRSIGTSVHPMVGGGVIRQLLRRKLHSQSVATPVLSWLSSKKANEDAGSAGLRAFALMGAGITGLLSFSTVASADEAEHGLECPNYPWPHEGILSSYDHASIRRGHQVYQQVCASCHSMSLISYRDLVGVAYTEEEAKAMAAEIEVVDGPNDEGEMFTRPGKLSDRLPEPYSNESAARFANGGAYPPDLSLVTKARHNGQNYVFALLTGYRDPPAGISIREGLHYNPYFPGGAIAMPKMLNDEAVEYEDGTPATEAQMGKDVVSFLSWAAEPEMEERKLMGFKWIFLLSLALLQAAYYRRLKWSVLKSRKLVLDVVN

SEQ ID NO: 97620 - protein, 307 aa, Arabidopsis thaliana; identical to SEQ ID NO: 40157
  peptide (1)..(307): Ceres Seq. ID no. 13486788

SEQ ID NO: 97621 - protein, 260 aa, Arabidopsis thaliana; identical to SEQ ID NO: 23964
  peptide (1)..(260): Ceres Seq. ID no. 13486789

SEQ ID NO: 97622 - DNA, 1302 bp, Arabidopsis thaliana
  misc_feature (1)..(1302): Ceres Seq. ID no. 13486884
  misc_feature (1)..(1302): Ortholog of  Ceres SEQ ID NO 13596780 as cited in SEQ ID NO 62360
aacgagagaagaacgttttaataaacagagagcagagcacttgttctaaagatcaaagcttaagtgagaagcagaaaaaaaaatggcgaaatctcagatctggtttggttttgcgttactcgcgttgcttctggtttcagccgtagctgacgatgtggttgttttgactgacgatagcttcgaaaaggaagttggtaaagataaaggagctctcgtcgagttttacgctccctggtgtggtcactgcaagaaacttgctccagagtatgaaaagctaggggcaagcttcaagaaggctaagtctgtgttgattgcaaaggttgattgtgatgagcaaaagagtgtctgtactaaatatggtgttagtggatacccaaccattcagtggtttcctaaaggatctcttgaacctcaaaagtatgagggtccacgcaatgctgaagctttggctgaatacgtgaacaaggaaggaggcaccaacgtaaaattagctgcagttccacaaaacgtggttgttttgacacctgacaatttcgatgagattgttctggatcaaaacaaagatgtcctagtcgaattttatgcaccatggtgtggccactgcaaatcactcgctcccacatacgaaaaggtagccacagtgtttaaacaggaagaaggtgtagtcatcgccaatttggatgctgatgcacacaaagcccttggcgagaaatatggagtgagtggattcccaacattgaaattcttcccaaaggacaacaaagctggtcacgattatgacggtggcagggatttagatgactttgtaagcttcatcaacgagaaatctgggaccagcagggacagtaaagggcagcttacttcaaaggctggtatagtcgaaagcttagatgctttggtaaaagagttagttgcagctagtgaagatgagaagaaggcagtgttgtctcgcatagaagaggaagcaagtacccttaagggctccaccacgaggtatggaaagctttacttgaaactcgcaaagagctacatagaaaaaggttcagactatgctagcaaagaaacggagaggcttggacgggtgcttgggaagtcgataagtccagtgaaagctgatgaactcactctcaagagaaatatcctaaccacgttcgttgcttcttcttaaaagtcatatagcttgaagctaagagaataggagtcgagagagtttataactgatactgttttgagattttatgtttgtcaagatcaagaacgtctgtggttatttctggttagttctgaaactcttttgaaccc

SEQ ID NO: 97623 - protein, 361 aa, Arabidopsis thaliana; identical to SEQ ID NO: 29321
  peptide (1)..(361): Ceres Seq. ID no. 13486885

SEQ ID NO: 97624 - DNA, 1012 bp, Arabidopsis thaliana
  misc_feature (1)..(1012): Ceres Seq. ID no. 13487008
  misc_feature (1)..(1012): Ortholog of  Ceres SEQ ID NO 14311713 as cited in SEQ ID NO 51356
  misc_feature (1)..(1012): Ortholog of  Ceres SEQ ID NO 14303126 as cited in SEQ ID NO 67219
ctgtttctttttgcttccttagacttctccgtcgattaacccttgccgagggtcattttttttttcttgaattttttcaccaagtgttcgttcacggcattgcttgtcctccagtatgagtatctccggtgctgcagttggttcaggcagaaatttaagaagagcggtagagtttgggaaaactcatgtggttaggcctaaagggaaacatcaagcaactattgtctggttacatgggcttggggacaatggctcgagctggtcccagcttttggagacccttccccttccaaatatcaaatggatttgcccgactgctccttctcaaccaataagtttatttggtggttttccctccacagcttggtttgatgttgtggacatcaatgaagatggacctgatgatatggaaggattggatgtggctgctgcacatgttgcaaatctgttgtcgaatgagcctgctgacattaaattaggtgttggaggattcagcatgggtgcggcgacatctctatattctgcaacttgttttgctctcggtaaatatggaaatggcaatccataccctatcaatttaagcgcaatcataggcttaagcggctggcttccttgtgcaaagacattggctggcaaactagaagaggaacagatcaagaaccgagctgcatcgttgcccattgttgtctgtcatggaaaagctgatgatgtggtaccgttcaagtttggggagaaatcttcacaggctttgctttcaaatgggtttaagaaggtgaccttcaaaccttacagtgcacttggtcaccacacaatcccacaggagttggatgagttgtgcgcatggttgacatccacgctcagcctcgaaggttgatacttcctatgatgtagctttctgatgaaaacccttcaactcttgagagtttgattgaattggatgtttcaggatttcacaatgttttcattggaatatttgtgtaagacacattcgtctagtagcaaatcttctcct

SEQ ID NO: 97625 - protein, 252 aa, Arabidopsis thaliana; identical to SEQ ID NO: 37738
  peptide (1)..(252): Ceres Seq. ID no. 13487009

SEQ ID NO: 97626 - protein, 155 aa, Arabidopsis thaliana; identical to SEQ ID NO: 37739
  peptide (1)..(155): Ceres Seq. ID no. 13487010

SEQ ID NO: 97627 - DNA, 1296 bp, Arabidopsis thaliana
  misc_feature (1)..(1296): Ceres Seq. ID no. 13487147
  misc_feature (1)..(1296): Ortholog of  Ceres SEQ ID NO 14311683 as cited in SEQ ID NO 51263
  misc_feature (1)..(1296): Ortholog of  Ceres SEQ ID NO 15177862 as cited in SEQ ID NO 56033
  misc_feature (1)..(1296): Ortholog of  Ceres SEQ ID NO 13661430 as cited in SEQ ID NO 61258
  misc_feature (1)..(1296): Ortholog of  Ceres SEQ ID NO 13590940 as cited in SEQ ID NO 68653
  misc_feature (1)..(1296): Ortholog of  Ceres SEQ ID NO 15179001 as cited in SEQ ID NO 0
  misc_feature (1)..(1296): Ortholog of  Ceres SEQ ID NO 15180040 as cited in SEQ ID NO 0
actgcatcttatctccactctcaaaatcatcttcttcacccaaaaacccctaaaagccttatcccttcttcttcccatggctgcttcagcttcgtctctcgctctctcttccttcaaccctaaatctcttcctttcggcgtctccagacctgcctccgtttccctcttatctccttccctctcctttaaactcaattccgactccgtttccttctccatcgccgccaaatggaactctcccgcttctcgcttcgcccgtaacgttgcgattacctcagagttcgaggtggaagaagatggtttcgctgacgtcgctccgccaaaagagcaatctttctctgctgaccttaaactcttcgttggtaaccttcctttcaacgttgacagtgctcagctcgctcagctctttgagagtgccggaaatgttgagatggttgaggtaatctatgacaaaattacaggaagaagcagaggttttggattcgtgactatgtcttcagtttctgaagttgaggcagctgctcagcagttcaatggctatgagttggatggtagacctttgagagtcaatgctggtcccccaccaccaaagagggaagatggtttctccagaggacctaggagcagctttggaagctcaggttctggatatggaggaggtggtggttctggtgctggttcaggaaaccgtgtttatgtgggtaacctctcttggggagttgatgacatggctcttgagagtttgttctcggagcaaggaaaggttgttgaggccagagtcatctacgacagggacagtggtcgatccaagggttttggatttgtgacatacgactcttctcaagaggtccaaaatgccatcaagtccttggatggtgctgatttggacggtagacaaattagagtctcggaagctgaggctaggcctccaaggcgccaatattgagcaccaatctatgacttcctattctcaaaaacgcatattctggagggcgcttcgaagtaaagagggtttgtgagatgatggcagtttcagacggtactaagctcttagcttcgcctatgtttgttgccttggatgcaagaaggtcgtaaaggaatggtctttttttttttgagaaacgtataattaagatagaaactggagagaccatgttcttgtctgtctgaatgctgccattgactgcttcgctttggttttgattcaatttttttttctctctatatcgtggtctcttcttcctaatgcttctctgtttatttgatcctctgctcaaatgaatatgaacacacttg

SEQ ID NO: 97628 - protein, 314 aa, Arabidopsis thaliana
  peptide (1)..(314): Ceres Seq. ID no. 13487148
LHLISTLKIIFFTQKPLKALSLLLPMAASASSLALSSFNPKSLPFGVSRPASVSLLSPSLSFKLNSDSVSFSIAAKWNSPASRFARNVAITSEFEVEEDGFADVAPPKEQSFSADLKLFVGNLPFNVDSAQLAQLFESAGNVEMVEVIYDKITGRSRGFGFVTMSSVSEVEAAAQQFNGYELDGRPLRVNAGPPPPKREDGFSRGPRSSFGSSGSGYGGGGGSGAGSGNRVYVGNLSWGVDDMALESLFSEQGKVVEARVIYDRDSGRSKGFGFVTYDSSQEVQNAIKSLDGADLDGRQIRVSEAEARPPRRQY

SEQ ID NO: 97629 - protein, 289 aa, Arabidopsis thaliana
  peptide (1)..(289): Ceres Seq. ID no. 13487149
MAASASSLALSSFNPKSLPFGVSRPASVSLLSPSLSFKLNSDSVSFSIAAKWNSPASRFARNVAITSEFEVEEDGFADVAPPKEQSFSADLKLFVGNLPFNVDSAQLAQLFESAGNVEMVEVIYDKITGRSRGFGFVTMSSVSEVEAAAQQFNGYELDGRPLRVNAGPPPPKREDGFSRGPRSSFGSSGSGYGGGGGSGAGSGNRVYVGNLSWGVDDMALESLFSEQGKVVEARVIYDRDSGRSKGFGFVTYDSSQEVQNAIKSLDGADLDGRQIRVSEAEARPPRRQY

SEQ ID NO: 97630 - protein, 171 aa, Arabidopsis thaliana; identical to SEQ ID NO: 28167
  peptide (1)..(171): Ceres Seq. ID no. 13487150

SEQ ID NO: 97631 - DNA, 1354 bp, Arabidopsis thaliana
  misc_feature (1)..(1354): Ceres Seq. ID no. 13487388
  misc_feature (1)..(1354): Ortholog of  Ceres SEQ ID NO 13596338 as cited in SEQ ID NO 68005
cagacaattatttgttcatcttgaatttgtgtcccaagaacatatctctctctctctctctcctcaccttggattctctgtttgatgattgctagttctttagaagagcaatgagttattctggagccggactcggaaagcctggctcaggtaaaaggagaataagggatcttttaactcaatctgataaccgagtctgcgctgattgtggcgctccagatcctaagtgggcgtcagctaatattggagtgtttatatgcttaaaatgttgtggtgtccacagaagccttggcagtcatatctcaaaggtcttatccgtgacattggatgaatggtcagatgaagaagtcgattcgatgattgaaattggaggaaatgcctctgcaaattcaatttacgaggcgtttattcctgaaggtagctctaagcctggacctgatgctagtcatgaccagcgtatgaggttcattaggtcgaaatatgagcaccaagagtttctgaaaccaagcttgcggatcacatccgtgaggggctctagtacaaagactccagcatttctttcatcgagtctatctaaaaagattgttgatagctttcgcactaattcatcatcgcaacagccgcaacttgaaggcatggttgagtttattggattgttgaaggtgactattaaaaagggtaccaatatggccatccgagatatgatgtcaagtgatccctatgttgtgttgactctaggacaacagaaggctcaatctactgtagtgaagagcaacttaaaccctgtctggaatgaggaactcatgctctctgttcctcataactatggctcagtgaaattgcaagtgtttgactatgacacattttctgctgatgacataatgggagaagctgagattgatatccagcctctgattacatctgcaatggcttttggagaccctgaaatgtttggagatatgcagattggaaaatggctgaaatcgcacgacaatgctcttatagaagatagcatcatcaacattgcagatggtaaagtgaagcaagaggttcaaatcaagcttcagaatgttgaatctggtgaactagaactagaaatggagtggctacctcttgagcaataaataatcaactatataatagggtcattatatataaccaaacaaattttattactgtattcattattttaacattcccccttggttcttgtttgacaaatttttgaaactttgatctcattgaaaactttctttcgtactttgttgttgtaatgttcttttggcagattagatatttgtataactcatatgattatatgttttgactcatgttcttcaaaagatttcatttg

SEQ ID NO: 97632 - protein, 337 aa, Arabidopsis thaliana; identical to SEQ ID NO: 27546
  peptide (1)..(337): Ceres Seq. ID no. 13487389

SEQ ID NO: 97633 - protein, 255 aa, Arabidopsis thaliana; identical to SEQ ID NO: 27547
  peptide (1)..(255): Ceres Seq. ID no. 13487390

SEQ ID NO: 97634 - protein, 221 aa, Arabidopsis thaliana; identical to SEQ ID NO: 27548
  peptide (1)..(221): Ceres Seq. ID no. 13487391

SEQ ID NO: 97635 - DNA, 1141 bp, Arabidopsis thaliana
  misc_feature (1)..(1141): Ceres Seq. ID no. 13487506
  misc_feature (1)..(1141): Ortholog of  Ceres SEQ ID NO 14313955 as cited in SEQ ID NO 54407
tttattttgttctttctctatatccttcaatcaatgtgaaaaaaaagctctcccttttggcagtttccgatgtttggtcgccattcgattatcccaaataaccagattggtaccgcctctgcttccgctggtgaagaccatgtctctgcctccgctacgtctggtcacattccttacgacgatatggaagaaatccctcatcctgactctatctatggtgctgcctccgatttgattcccgatggctctcaattggttgctcaccgatccgatggctctgaattacttgtttctcggccaccggaaggggcgaatcagcttacgatctcgttccgtggacaagtttacgtttttgatgccgttggtgctgacaaggtggatgctgtgttgtcgctgttgggtggttctactgagcttgctcctggtccgcaggtgatggaactagctcaacagcagaatcatatgcctgttgtagaatatcagagccgctgtagccttccgcaacgggcacaatccttggataggtttcggaagaagaggaatgctagatgtttcgagaagaaagtaagatacggtgttcgccaagaagttgccttaagaatggcacgtaataaaggtcaattcacctcttcaaagatgacagatggggcttataactctggcacagatcaagattctgcccaagatgatgcccatccagaaatatcgtgtactcattgcggcattagttccaaatgtacaccaatgatgcgacgtggcccttccggccccaggactctctgcaatgcctgtggacttttttgggctaacaggggtacattgagggatctctcaaagaaaacagaagagaatcagttggctttaatgaaaccggatgatggtgggagtgttgctgatgctgctaacaacttaaacactgaagctgcaagtgttgaagaacacacttccatggtttctcttgccaatggggataattctaatctgttaggtgatcactaaatactgtgataagaatcagaagatagaaatctttgtagaatcagatggtcttctctatgaatttatcttttcaccatcacatgtattatagaaaccgtaaccgaacctcaaatcaaataccatatcagatgtctttggtttc

SEQ ID NO: 97636 - protein, 309 aa, Arabidopsis thaliana; identical to SEQ ID NO: 34775
  peptide (1)..(309): Ceres Seq. ID no. 13487507

SEQ ID NO: 97637 - protein, 271 aa, Arabidopsis thaliana; identical to SEQ ID NO: 34776
  peptide (1)..(271): Ceres Seq. ID no. 13487508

SEQ ID NO: 97638 - protein, 187 aa, Arabidopsis thaliana; identical to SEQ ID NO: 34777
  peptide (1)..(187): Ceres Seq. ID no. 13487509

SEQ ID NO: 97639 - DNA, 1349 bp, Arabidopsis thaliana
  misc_feature (1)..(1349): Ceres Seq. ID no. 13487597
  misc_feature (1)..(1349): Ortholog of  Ceres SEQ ID NO 12784228 as cited in SEQ ID NO 66111
acttatcctgatcactagtgatcagtgataatctattaatcatctaggtggcagaagcagcatcgttgagaacgaagaagcttgaaaaagttgcgagctcagagaatctggaagtagcaaaatttggcggctttaactcagcaatttgttctgtacatggtattttgagaagagagcattcagctcacagttacgctctgcctatccagcttctaaatctactcactttggtcgagtcatggcttcttctggatctgaggcaaaagctaattacgcacccatatctaccaatgaacctgttgtgtctgttgattggctccactctaatcttggagatgctgatataaaggttttggatgcctcatggtacatggcacatgagcaaagaaatccaatccaagagtatcaagttgctcatattccaggtgctctcttctttgatttgaatggaatagcagatcgaaaaacaaatttacgacacatgctaccatctgaggaagcttttgctgctggttgttctgctcttggaatcgagaacaacgatggagtggttgtgtatgatggaatggggctctttagtgcagctcgtgtatggtggatgtttagagtctttggacatgacaaagtatgggtacttgatggaggcttgccgaaatggcgtgcttcaggctatgacgttgaatccagtgtttcaaatgatgccattttgaaagccagtgcagcaactgaggctatagagaagatctatcaaggacaaacaattagcccaataacttttcagacgaagttccggccacatcttgtattggcacttgatcaggtgaaggaaaacatcgaggataagacttatcagcacatcgatgcgcgttcaaaggctagatttgacggtattgctccagaaccttggaagggtttaccgagtggtcatatacccggtagcaagtgtgtcccttttcccctaatgtttgattcctctcaaacactgttaccagcagaggagctgaagaagcagtttgaacaggaagacatatctctggacagtccgattgcggcctcatgtggaaccggtgtaacagcttgtattttggcattgggactttatcgtctgggaaaaactaatgtggcaatctatgatgggtcttggactgaatgggcaactgcaccaaacttgcccatagtgggttcttcttcataagaaagtccaagaaaaagctacaagatcacaagccagtggatatatatttataagcttagcttggttcaatccatttctgtgttaaactttaacaaattgctgggagggttgtattagtattatacatcagtattcaggattcttgagtttggtc

SEQ ID NO: 97640 - protein, 318 aa, Arabidopsis thaliana; identical to SEQ ID NO: 24974
  peptide (1)..(318): Ceres Seq. ID no. 13487598

SEQ ID NO: 97641 - protein, 274 aa, Arabidopsis thaliana; identical to SEQ ID NO: 24975
  peptide (1)..(274): Ceres Seq. ID no. 13487599

SEQ ID NO: 97642 - protein, 237 aa, Arabidopsis thaliana; identical to SEQ ID NO: 24976
  peptide (1)..(237): Ceres Seq. ID no. 13487600

SEQ ID NO: 97643 - DNA, 1297 bp, Arabidopsis thaliana
  misc_feature (1)..(1297): Ceres Seq. ID no. 13487658
  misc_feature (1)..(1297): Ortholog of  Ceres SEQ ID NO 15177750 as cited in SEQ ID NO 57772
  misc_feature (1)..(1297): Ortholog of  Ceres SEQ ID NO 13596581 as cited in SEQ ID NO 62420
  misc_feature (1)..(1297): Ortholog of  Ceres SEQ ID NO 13591273 as cited in SEQ ID NO 65904
  misc_feature (1)..(1297): Ortholog of  Ceres SEQ ID NO 13623086 as cited in SEQ ID NO 0
cttcctgcgtcaatggcgactcaaggtcaggttatcacttgcaaagctgcggtggcttacgagccgaacaagcctctggtcatcgaagatgtgcaagtggctccacctcaagctggtgaggttcggatcaagatcctctacactgctctttgtcacaccgacgcttacacttggagcggcaaggatcctgaaggtctctttccttgtattctaggtcatgaggctgctgggattgttgagagtgttggtgaaggagtaactgaagttcaagctggagatcatgttatcccttgttatcaagctgagtgtcgtgaatgcaagttttgcaaatctgggaagactaacctttgtggcaaggtgagatctgctactggtgttgggattatgatgaatgaccgtaagtcgaggttctcggttaatgggaaacccatttatcacttcatgggtacttccacgtttagtcagtatactgttgttcatgatgttagcgtcgccaaaattgatcctactgctcctttggataaagtttgccttcttggatgtggtgttcccactggccttggagcagtttggaatactgcaaaagtagaaccagggtcaaatgttgccattttcggtcttggcactgttggacttgctgttgccgagggtgcgaaaacagctggtgcttcaaggatcattggcattgacatcgatagcaagaagtatgaaactgcaaagaagtttggtgttaacgaatttgtgaacccaaaggatcacgacaagccaattcaggaagtgattgtcgatctcactgatggcggtgttgactacagctttgagtgcatcgggaatgtctccgtgatgagagctgcattggagtgctgtcacaagggatggggaacttcggtcatagttggtgttgcagcatcaggacaagagatatcaactcgtccgttccaactcgtgactggccgtgtgtggaaaggaacagcttttggtggtttcaagagtcgaacccaagtgccttggcttgtagaaaagtacatgaacaaggagataaaagtggatgaatacataacacacaacttgaccttgggagaaatcaataaggctttcgatctattgcacgaaggtacttgccttcgttgtgtcctcgataccagcaaatgactatatgggtcctctctgctttaatctatgtgttcttgtgactttcgtcttttatcggtattgacatttcctaagagcaacagactactctactcgtgtgtgtctcgtttctatcttatgcttcaataaaatatcaattaagacc

SEQ ID NO: 97644 - protein, 383 aa, Arabidopsis thaliana
  peptide (1)..(383): Ceres Seq. ID no. 13487659
LPASMATQGQVITCKAAVAYEPNKPLVIEDVQVAPPQAGEVRIKILYTALCHTDAYTWSGKDPEGLFPCILGHEAAGIVESVGEGVTEVQAGDHVIPCYQAECRECKFCKSGKTNLCGKVRSATGVGIMMNDRKSRFSVNGKPIYHFMGTSTFSQYTVVHDVSVAKIDPTAPLDKVCLLGCGVPTGLGAVWNTAKVEPGSNVAIFGLGTVGLAVAEGAKTAGASRIIGIDIDSKKYETAKKFGVNEFVNPKDHDKPIQEVIVDLTDGGVDYSFECIGNVSVMRAALECCHKGWGTSVIVGVAASGQEISTRPFQLVTGRVWKGTAFGGFKSRTQVPWLVEKYMNKEIKVDEYITHNLTLGEINKAFDLLHEGTCLRCVLDTSK

SEQ ID NO: 97645 - protein, 379 aa, Arabidopsis thaliana; identical to SEQ ID NO: 22337
  peptide (1)..(379): Ceres Seq. ID no. 13487660

SEQ ID NO: 97646 - protein, 255 aa, Arabidopsis thaliana; identical to SEQ ID NO: 22338
  peptide (1)..(255): Ceres Seq. ID no. 13487661

SEQ ID NO: 97647 - DNA, 1788 bp, Arabidopsis thaliana
  misc_feature (1)..(1788): Ceres Seq. ID no. 13488442
  misc_feature (1)..(1788): Ortholog of  Ceres SEQ ID NO 15226950 as cited in SEQ ID NO 68649
  misc_feature (1)..(1788): Ortholog of  Ceres SEQ ID NO 13502947 as cited in SEQ ID NO 69257
atcattgtccctcagacaaatttcactcgctcatctctgtctgaatctcacaagaagaagtgaaagatggtgaagatatgttgtattggagctgggtatgttggtggaccaacaatggcagtgattgcattgaaatgtccagacgttgaagtagcggttgttgatatctctgtaccacgtatcaacgcttggaacagtgacacgcttccgatttacgagcctggtcttgatgatgttgtgaagcaatgccgtggcaagaaccttttctttagtactgatgttgagaaacatgttagggaagctgatattgtgtttgtttctgtcaacacaccgactaagactagaggtcttggtgctggtaaagctgcggatcttacgtactgggagagcgctgcgcgtatgatcgctgatgtttcggtatcggataagattgtcgttgagaaatcgactgttccggttaaaacagctgaagctattgagaagattttgacacataacagtaaagggattaagtttcagattctttcgaatcccgagtttttggcggaaggaaccgcgattaaggacctatttaatccggaccgtgttcttatcggagggcgggaaaccccagaagggtttaaagcggtgcagactctcaagaatgtgtatgcacactgggttcctgaaggccaaatcataacaaccaatctctggtctgctgagctgtccaagcttgcggcaaacgctttcttggctcaaaggatttcatcagtgaatgctatgtcggctctgtgtgaagccacaggcgcagatgtcacgcaagtgtcttacgcggttggtacagactcaaggattggtcccaagttcttgaactcgagtgttggattcggtggttcgtgtttccagaaggacattctgaatcttgtctacatctgtgagtgcaacggactcccggaagtggcagagtactggaagcaagtcatcaagatcaatgactaccagaagagccggttcgtgaaccgtgttgtttcctccatgttcaactctgtatcaaacaagaagattgcggttctcggtttcgcattcaagaaagacaccggtgacacaagggagactccagccatcgatgtgtgcaagggtcttttagaagacaaagcaaggctaagcatttacgacccacaagtgactgaggatcagatccagagggatttatccatgaacaagttcgactgggaccatcctctacatttgcagccaatgagcccaacaacagtgaaacaagtgaccgttacttgggacgcatacgaagcaactaaggacgctcacggtatctgcatcatgaccgagtgggatgagttcaagaaccttgatttccagaagatctttgacaacatgcagaaaccagctttcgtgttcgatggaagaaacattatgaatctgcaaaagctaagggagattggtttcattgtttactccattgcctctcgacgactggctcaaggacatgcctgccgttgcctaatgatgttcattgctgactctttcgtcctccatcatttgtgcttttcttcttcttgtggtttgtctttaagacttgttatatttcttacaatatgtttgttatgttctctggtgtgtgttttgttttttttggtattactttcatatttttttggtcgaagaggacttgtattcgacaatgtcgcttcaattttgttgtttccttagaaactaaataaatattggtttatattggagtaaaatgtgtttgtactttgtagttaatcgttgaaagttttgccactt

SEQ ID NO: 97648 - protein, 547 aa, Arabidopsis thaliana
  peptide (1)..(547): Ceres Seq. ID no. 13488443
MVKICCIGAGYVGGPTMAVIALKCPDVEVAVVDISVPRINAWNSDTLPIYEPGLDDVVKQCRGKNLFFSTDVEKHVREADIVFVSVNTPTKTRGLGAGKAADLTYWESAARMIADVSVSDKIVVEKSTVPVKTAEAIEKILTHNSKGIKFQILSNPEFLAEGTAIKDLFNPDRVLIGGRETPEGFKAVQTLKNVYAHWVPEGQIITTNLWSAELSKLAANAFLAQRISSVNAMSALCEATGADVTQVSYAVGTDSRIGPKFLNSSVGFGGSCFQKDILNLVYICECNGLPEVAEYWKQVIKINDYQKSRFVNRVVSSMFNSVSNKKIAVLGFAFKKDTGDTRETPAIDVCKGLLEDKARLSIYDPQVTEDQIQRDLSMNKFDWDHPLHLQPMSPTTVKQVTVTWDAYEATKDAHGICIMTEWDEFKNLDFQKIFDNMQKPAFVFDGRNIMNLQKLREIGFIVYSIASRRLAQGHACRCLMMFIADSFVLHHLCFSSSCGLSLRLVIFLTICLLCSLVCVLFFLVLLSYFFGRRGLVFDNVASILLFP

SEQ ID NO: 97649 - protein, 531 aa, Arabidopsis thaliana
  peptide (1)..(531): Ceres Seq. ID no. 13488444
MAVIALKCPDVEVAVVDISVPRINAWNSDTLPIYEPGLDDVVKQCRGKNLFFSTDVEKHVREADIVFVSVNTPTKTRGLGAGKAADLTYWESAARMIADVSVSDKIVVEKSTVPVKTAEAIEKILTHNSKGIKFQILSNPEFLAEGTAIKDLFNPDRVLIGGRETPEGFKAVQTLKNVYAHWVPEGQIITTNLWSAELSKLAANAFLAQRISSVNAMSALCEATGADVTQVSYAVGTDSRIGPKFLNSSVGFGGSCFQKDILNLVYICECNGLPEVAEYWKQVIKINDYQKSRFVNRVVSSMFNSVSNKKIAVLGFAFKKDTGDTRETPAIDVCKGLLEDKARLSIYDPQVTEDQIQRDLSMNKFDWDHPLHLQPMSPTTVKQVTVTWDAYEATKDAHGICIMTEWDEFKNLDFQKIFDNMQKPAFVFDGRNIMNLQKLREIGFIVYSIASRRLAQGHACRCLMMFIADSFVLHHLCFSSSCGLSLRLVIFLTICLLCSLVCVLFFLVLLSYFFGRRGLVFDNVASILLFP

SEQ ID NO: 97650 - protein, 436 aa, Arabidopsis thaliana
  peptide (1)..(436): Ceres Seq. ID no. 13488445
MIADVSVSDKIVVEKSTVPVKTAEAIEKILTHNSKGIKFQILSNPEFLAEGTAIKDLFNPDRVLIGGRETPEGFKAVQTLKNVYAHWVPEGQIITTNLWSAELSKLAANAFLAQRISSVNAMSALCEATGADVTQVSYAVGTDSRIGPKFLNSSVGFGGSCFQKDILNLVYICECNGLPEVAEYWKQVIKINDYQKSRFVNRVVSSMFNSVSNKKIAVLGFAFKKDTGDTRETPAIDVCKGLLEDKARLSIYDPQVTEDQIQRDLSMNKFDWDHPLHLQPMSPTTVKQVTVTWDAYEATKDAHGICIMTEWDEFKNLDFQKIFDNMQKPAFVFDGRNIMNLQKLREIGFIVYSIASRRLAQGHACRCLMMFIADSFVLHHLCFSSSCGLSLRLVIFLTICLLCSLVCVLFFLVLLSYFFGRRGLVFDNVASILLFP

SEQ ID NO: 97651 - DNA, 1055 bp, Arabidopsis thaliana
  misc_feature (1)..(1055): Ceres Seq. ID no. 13488494
  misc_feature (1)..(1055): Ortholog of  Ceres SEQ ID NO 13581804 as cited in SEQ ID NO 51424
  misc_feature (1)..(1055): Ortholog of  Ceres SEQ ID NO 13663874 as cited in SEQ ID NO 67003
gtttttgggattctcaaaaaactcaaaataaactttcctcattttttttttctttcttttgttttgttttctttataaaggagaaagaaagagaaagagagtttccgaaagctgaattgagttgggtgaagcaaattctcaggatgggaagaggaaagatagaaataaagaggatagagaactcaacaaatcgacaagtgacgttttgcaaaagaagaaatggacttctgaagaaagcctatgagctttcggtcctttgcgatgcagaagttgcgctcattgttttctccactcgtggccgtctctatgaatacgccaataacaacataagatcaaccattgagaggtacaagaaagcttgttctgatagcaccaacactagcactgtccaagaaatcaatgccgcgtactatcaacaagaatctgctaagctgagacaacagatccaaacgattcaaaactccaacaggaatctgatgggagactctttgagttccttaagtgtcaaggaactaaaacaagttgagaatcgccttgagaaagctatctctaggatcaggtccaagaagcatgagttgcttttagttgaaatcgaaaacgcgcagaaaagggagattgagcttgacaatgagaacatctatctaagaactaaggtagcagaagtggagaggtatcaacaacaccatcatcaaatggttagtggttcagagattaatgcaattgaagctttagcctcacgcaattactttgctcatagcattatgactgctggttctggatctggtaatggaggttcttactctgatcccgacaagaaaattcttcatctcggataatctcgtctgcgaaaaaccgagctgcaataactctctgcatgcatctggggattctttgctcagatttatctctacataaaatatgttttggtgcaaaataattcaaagtacaatgaaggtattggtccttcaagactcattgcaatttgtgttgtgtaatgattaagacatactctagtttttattgcttcgtatcatagtatctattctatggtatct

SEQ ID NO: 97652 - protein, 277 aa, Arabidopsis thaliana; identical to SEQ ID NO: 97560
  peptide (1)..(277): Ceres Seq. ID no. 13488495

SEQ ID NO: 97653 - protein, 230 aa, Arabidopsis thaliana; identical to SEQ ID NO: 44274
  peptide (1)..(230): Ceres Seq. ID no. 13488496

SEQ ID NO: 97654 - DNA, 928 bp, Arabidopsis thaliana
  misc_feature (1)..(928): Ceres Seq. ID no. 13489155
  misc_feature (1)..(928): Ortholog of  Ceres SEQ ID NO 13638849 as cited in SEQ ID NO 52046
  misc_feature (1)..(928): Ortholog of  Ceres SEQ ID NO 13599613 as cited in SEQ ID NO 0
atcacataccaaaaaaaggcaaaacactcacgaaagaagaaacggagaggatgaagcattatgtgctagttcacggaggctgccacggtgcgtggtgttggtacaaggtgaagccgatgcttgaacattccggccaccgtgtcacggtttttgatcttacggcgcatggtgtgaacatgagcagagtagaagatattcagactttggaggatttcgctaagccgttgcttgaggttcttgagtcttttggctcggatgataaagtagtcctcgtcgcgcatagcctcggtggaataccggctgctcttgcagccgacatgtttcctagtaaaatctctgttgctgtcttcgttacttcttttatgcccgacacaacgaatccaccttcttacgtgttcgaaaagtttctcggaagcattacagaagaagaacgtatggacttcgagttagggagctatggaacagatgaccatccactaaagactgcttttcttggacctaactacttgaagaatatgtatctactttctcctatcgaagattatgaattggccaaaatgttgatgagagtcacaccggctattactagtaatctgacggggactaaaagcttaacggcacaaggatatggatcgattagtcgtgtgtatatcgtatgcggagaagataagggtatacgtgtagatttccaacgatggatgattgagaactctccggttaaagaagtgatggagatcaaagatgcagatcatatgcctatgttttccaagcctcatgaactctgtgatcgtcttctaaagattgctgataaatatccctaagcaagaatatctatgacaatatcaataattttcatgggaataagtttttttattgttctgttcacaaaatatgtggaaaaaaaaaaagacaacaatagaatttacgc

SEQ ID NO: 97655 - protein, 272 aa, Arabidopsis thaliana
  peptide (1)..(272): Ceres Seq. ID no. 13489156
HIPKKGKTLTKEETERMKHYVLVHGGCHGAWCWYKVKPMLEHSGHRVTVFDLTAHGVNMSRVEDIQTLEDFAKPLLEVLESFGSDDKVVLVAHSLGGIPAALAADMFPSKISVAVFVTSFMPDTTNPPSYVFEKFLGSITEEERMDFELGSYGTDDHPLKTAFLGPNYLKNMYLLSPIEDYELAKMLMRVTPAITSNLTGTKSLTAQGYGSISRVYIVCGEDKGIRVDFQRWMIENSPVKEVMEIKDADHMPMFSKPHELCDRLLKIADKYP

SEQ ID NO: 97656 - protein, 256 aa, Arabidopsis thaliana; identical to SEQ ID NO: 37348
  peptide (1)..(256): Ceres Seq. ID no. 13489157

SEQ ID NO: 97657 - protein, 234 aa, Arabidopsis thaliana; identical to SEQ ID NO: 37349
  peptide (1)..(234): Ceres Seq. ID no. 13489158

SEQ ID NO: 97658 - DNA, 1025 bp, Arabidopsis thaliana
  misc_feature (1)..(1025): Ceres Seq. ID no. 13489889
  misc_feature (1)..(1025): Ortholog of  Ceres SEQ ID NO 13656436 as cited in SEQ ID NO 69154
aaaaaaacttctgaatctccgaaaaaagccaatcgggggaagaaaaaaattcaacggccgtctggttactgtcttgcttgcttccgacgatctatcttccccgagtagatttgaaatggctgctcctcctgctagagctcgtgctgattacgattacctcattaaacttctgctgatcggagacagcggtgttggtaagagttgccttctcttacgtttctcagatggctcgtttaccaccagtttcattacaactattgggattgattttaagatacggactattgagctcgatgggaagagaattaagctgcaaatctgggatactgccggacaggagcggttccgcacaatcacaactgcgtactaccgtggagccatggggattttgcttgtgtatgatgtgactgatgaatcatctttcaacaacatcaggaattggatccgtaacattgagcagcatgcttctgatagtgtcaacaagattctagttgggaacaaagcagatatggatgaaagcaaaagagctgtgccaaaatctaagggccaagctcttgcagatgaatatggaatgaagtttttcgagactagtgccaagactaacttaaacgttgaggaagttttcttctctattgctaaagacattaagcaaagacttgcagataccgatgcacgagctgagccgcaaacaatcaaaatcaaccaatccgaccaaggtgcgggaacatctcaagctactcagaaatcagcatgttgcggcacataaaaattgggtccacgacgcctgtcaaaggagagaatctggctagtgaaagagaaatggtatttggaaagaaaaaatgaaaaaggaaatcaatcttcttttgcttttcttctatatgagatggtgtttctacgtattcttttaagattctctctttccctaatggtatagtgtgactgtgaaggacacaattcgtattccatatttctggaatggattctctgacatcagattatgacttatgataatatcagtttatctc

SEQ ID NO: 97659 - protein, 254 aa, Arabidopsis thaliana; identical to SEQ ID NO: 20797
  peptide (1)..(254): Ceres Seq. ID no. 13489890

SEQ ID NO: 97660 - protein, 216 aa, Arabidopsis thaliana; identical to SEQ ID NO: 20798
  peptide (1)..(216): Ceres Seq. ID no. 13489891

SEQ ID NO: 97661 - protein, 128 aa, Arabidopsis thaliana; identical to SEQ ID NO: 20799
  peptide (1)..(128): Ceres Seq. ID no. 13489892

SEQ ID NO: 97662 - DNA, 991 bp, Arabidopsis thaliana
  misc_feature (1)..(991): Ceres Seq. ID no. 13490309
  misc_feature (1)..(991): Ortholog of  Ceres SEQ ID NO 12557432 as cited in SEQ ID NO 92
  misc_feature (1)..(991): Ortholog of  Ceres SEQ ID NO 14315553 as cited in SEQ ID NO 60445
  misc_feature (1)..(991): Ortholog of  Ceres SEQ ID NO 15224319 as cited in SEQ ID NO 66044
  misc_feature (1)..(991): Ortholog of  Ceres SEQ ID NO 13598045 as cited in SEQ ID NO 66822
cttctctgcaagaaacctaaaagcctatttatttcacctctctctctctctctctgcaactaatcacttgttcgatctcgaagctgaagctaaagctttcgctaatttgcttaaggagctatgggagatagtcagtactcgttttctctcaccactttcagcccatctggtaagctggtgcagatagaacatgcccttacagctgttggatctggccaaacatctttagggattaaagcttctaatggagttgtcattgcaactgaaaagaagttgccttctattctggttgatgaagcatctgttcaaaaaattcagcatttgactcctaatattggagttgtttacagtggcatgggtcctgattttcgagttcttgttaggaagagtaggaaacaggctgagcaatatcttcgtctgtacaaagaacccatccctgttacccaacttgtaagggaaaccgctactgttatgcaagagtttactcaatcgggaggtgttaggcctttcggggtttccttgctggtggctggatatgatgacaagggtccacaattgtatcaggtggatccatctggctcttatttctcctggaaagcttcagccatggggaagaacgtttctaatgcaaaaaccttccttgagaaaaggtacacagaagacatggaacttgacgatgccattcacacagcgatactgacattgaaagaaggctttgagggagagatctcaagcaaaaatattgaaattggcaaaatcggtgctgacaaagttttcagggtactaacaccagcagagatcgatgattaccttgctgaagtcgagtaactcccagcatagtctagcaacaaagtttaagaccggaatttcgtggcatttacagtcttaaagagttgttttttctgtaaaactttggatctttaaatagtttgttgctgaacacaagctgagtgtctctcaataactaatgaaatctgtttctttttttctc

SEQ ID NO: 97663 - protein, 235 aa, Arabidopsis thaliana; identical to SEQ ID NO: 28105
  peptide (1)..(235): Ceres Seq. ID no. 13490310

SEQ ID NO: 97664 - protein, 157 aa, Arabidopsis thaliana; identical to SEQ ID NO: 28106
  peptide (1)..(157): Ceres Seq. ID no. 13490311

SEQ ID NO: 97665 - protein, 118 aa, Arabidopsis thaliana; identical to SEQ ID NO: 28107
  peptide (1)..(118): Ceres Seq. ID no. 13490312

SEQ ID NO: 97666 - DNA, 1708 bp, Arabidopsis thaliana
  misc_feature (1)..(1708): Ceres Seq. ID no. 13490417
  misc_feature (1)..(1708): Ortholog of  Ceres SEQ ID NO 15177320 as cited in SEQ ID NO 52645
  misc_feature (1)..(1708): Ortholog of  Ceres SEQ ID NO 15171359 as cited in SEQ ID NO 57279
  misc_feature (1)..(1708): Ortholog of  Ceres SEQ ID NO 14313840 as cited in SEQ ID NO 59568
  misc_feature (1)..(1708): Ortholog of  Ceres SEQ ID NO 15168502 as cited in SEQ ID NO 60095
  misc_feature (1)..(1708): Ortholog of  Ceres SEQ ID NO 13662245 as cited in SEQ ID NO 62708
  misc_feature (1)..(1708): Ortholog of  Ceres SEQ ID NO 14314084 as cited in SEQ ID NO 63256
  misc_feature (1)..(1708): Ortholog of  Ceres SEQ ID NO 15169466 as cited in SEQ ID NO 66135
  misc_feature (1)..(1708): Ortholog of  Ceres SEQ ID NO 14303091 as cited in SEQ ID NO 66369
actcgccactttcctcgagaaaacgaaaaaaaaagatggtaggaagaagaaaagctttactcttttctctctgtttcttcttcctctctcttccttccttctcttcccttccatccttccaaaccctattccccaattctcattcccttccttgtgcttctcccgtctcattccaacccgactccgactccgagtcactgctagaatccgaatttgaatccggatccgactccgagtcttcttcttccattactctaaacctcgaccacatcgatgctctctcctccaacaaaacacccgacgagctattcagctcccgtctccaacgtgactcccggcgcgtgaaatctatcgccacactcgccgctcaaatccccggaagaaacgtgactcacgcgccacgacccggtggattcagcagctcagtcgtctctggtctctctcaaggaagcggtgaatacttcacgcgcctcggtgtcggcactccggcgagatatgtttacatggtgctcgacaccggcagcgacatcgtctggctacaatgcgctccttgtcggagatgctactctcaatccgacccgatattcgacccgagaaaatccaagacctatgccacaatcccctgttcttcacctcactgccgccgattagactccgccggatgcaacacccgtcgtaagacttgtctctaccaagtctcttacggagatggttctttcaccgtcggcgatttctccaccgaaacgctaactttccggcgaaatcgcgttaaaggcgttgctctcggatgtggccacgacaacgaaggtctcttcgtcggagccgccggtttattaggactcggtaaaggtaaattatcgttccccggtcaaaccggtcaccggtttaatcagaaattctcttactgtttagtcgacagatccgcttcttcgaaaccttcctcggtcgtcttcggaaacgccgccgtatcacgaatcgcgagattcacgccacttttgtcaaacccaaaactcgacactttctactacgtcgggcttctgggaattagcgtcggagggacacgtgtccccggcgtaacggcttctctttttaaacttgaccagatcggtaacggtggagttattatcgattcgggtacgtctgtgacccggttgatccgaccagcttatattgctatgagagacgcgttccgggtcggagctaagacattgaaaagagctccggatttctcactcttcgacacgtgtttcgatctctccaatatgaacgaggttaaagtaccgacggtggttttacatttccgtggagctgacgtatcacttccggcgacgaattacctgatccctgtggataccaacggcaagttctgttttgcgtttgccggtacgatgggcggactatccataattgggaatatccagcaacagggtttccgggttgtatacgacttagcgagttcccgggtcgggtttgctccaggaggatgcgcttaataattagatctgaccggagccggtacggataatgtacttttgttttctcaatttaatgcttagacttgttttttttttttttataaatcggacaagtgaatctttaagcggtggagttgaatacgtgttgataaaatcttcacgtgttgtcggctgtattattagtatcgtctttattttacatctcggaccaaagagagcgtgtatgattttct

SEQ ID NO: 97667 - protein, 496 aa, Arabidopsis thaliana
  peptide (1)..(496): Ceres Seq. ID no. 13490418
SPLSSRKRKKKMVGRRKALLFSLCFFFLSLPSFSSLPSFQTLFPNSHSLPCASPVSFQPDSDSESLLESEFESGSDSESSSSITLNLDHIDALSSNKTPDELFSSRLQRDSRRVKSIATLAAQIPGRNVTHAPRPGGFSSSVVSGLSQGSGEYFTRLGVGTPARYVYMVLDTGSDIVWLQCAPCRRCYSQSDPIFDPRKSKTYATIPCSSPHCRRLDSAGCNTRRKTCLYQVSYGDGSFTVGDFSTETLTFRRNRVKGVALGCGHDNEGLFVGAAGLLGLGKGKLSFPGQTGHRFNQKFSYCLVDRSASSKPSSVVFGNAAVSRIARFTPLLSNPKLDTFYYVGLLGISVGGTRVPGVTASLFKLDQIGNGGVIIDSGTSVTRLIRPAYIAMRDAFRVGAKTLKRAPDFSLFDTCFDLSNMNEVKVPTVVLHFRGADVSLPATNYLIPVDTNGKFCFAFAGTMGGLSIIGNIQQQGFRVVYDLASSRVGFAPGGCA

SEQ ID NO: 97668 - protein, 485 aa, Arabidopsis thaliana
  peptide (1)..(485): Ceres Seq. ID no. 13490419
MVGRRKALLFSLCFFFLSLPSFSSLPSFQTLFPNSHSLPCASPVSFQPDSDSESLLESEFESGSDSESSSSITLNLDHIDALSSNKTPDELFSSRLQRDSRRVKSIATLAAQIPGRNVTHAPRPGGFSSSVVSGLSQGSGEYFTRLGVGTPARYVYMVLDTGSDIVWLQCAPCRRCYSQSDPIFDPRKSKTYATIPCSSPHCRRLDSAGCNTRRKTCLYQVSYGDGSFTVGDFSTETLTFRRNRVKGVALGCGHDNEGLFVGAAGLLGLGKGKLSFPGQTGHRFNQKFSYCLVDRSASSKPSSVVFGNAAVSRIARFTPLLSNPKLDTFYYVGLLGISVGGTRVPGVTASLFKLDQIGNGGVIIDSGTSVTRLIRPAYIAMRDAFRVGAKTLKRAPDFSLFDTCFDLSNMNEVKVPTVVLHFRGADVSLPATNYLIPVDTNGKFCFAFAGTMGGLSIIGNIQQQGFRVVYDLASSRVGFAPGGCA

SEQ ID NO: 97669 - protein, 329 aa, Arabidopsis thaliana
  peptide (1)..(329): Ceres Seq. ID no. 13490420
MVLDTGSDIVWLQCAPCRRCYSQSDPIFDPRKSKTYATIPCSSPHCRRLDSAGCNTRRKTCLYQVSYGDGSFTVGDFSTETLTFRRNRVKGVALGCGHDNEGLFVGAAGLLGLGKGKLSFPGQTGHRFNQKFSYCLVDRSASSKPSSVVFGNAAVSRIARFTPLLSNPKLDTFYYVGLLGISVGGTRVPGVTASLFKLDQIGNGGVIIDSGTSVTRLIRPAYIAMRDAFRVGAKTLKRAPDFSLFDTCFDLSNMNEVKVPTVVLHFRGADVSLPATNYLIPVDTNGKFCFAFAGTMGGLSIIGNIQQQGFRVVYDLASSRVGFAPGGCA

SEQ ID NO: 97670 - DNA, 1225 bp, Arabidopsis thaliana
  misc_feature (1)..(1225): Ceres Seq. ID no. 13490440
  misc_feature (1)..(1225): Ortholog of  Ceres SEQ ID NO 13593831 as cited in SEQ ID NO 53828
agaaaacattactgataaaactacaaaaatagctggaatggagcattcaaaactctgtccaaagtccaaacggttaaattatcactgacccaatccaataattagatttatttaagaagaagaagaagaaaaaaaacagagctttacaatttctctctacagagatcgaagatatggaaggcaaggaagaagacgttagagttggagctaacaagttcccggagagacaaccaatcggaacatcagctcagagtgacaaggactacaaggaaccaccaccagctccgtttttcgaacctggtgagctttcttcatggtctttttggagagctgggatcgctgagttcatcgctacttttctctttctctacatcactgtcttgactgttatgggagtgaaaaggtcaccgaacatgtgtgcttccgtcggaatccaaggaatcgcttgggctttcggtggtatgatatttgccttagtctactgtaccgctggtatctccggtggacacatcaacccagcggttacttttggtctgttcttagcccggaagctgtcgcttactagagctctgtactacatagtgatgcagtgcttgggagctatctgtggtgctggagtggttaaagggttccagcctaagcaataccaggctctaggaggaggagctaacactgtggctcatggttacaccaagggaagtggtcttggagctgagatcattggcacattcgttcttgtatacacagtcttctcagcaactgacgccaagagaaatgctcgtgactctcatgtccctattcttgcaccactcccaatcgggtttgcggttttcttggttcacttggcaaccatcccaatcactggcacaggcatcaacccagctagaagccttggagctgcaatcatctacaacaaagaccattcctgggatgaccactgggtgttttgggttggccccttcattggagctgcacttgctgctctttaccatgtggttgtcatcagagccatccccttcaagtccagaagctaagtaaaaacaagacatcaagtcctctggtttctggccttgtccttagttgcttctatagttctattgttgatctactacatgtatgtgtgcaatgtgtttatctatgtgccctcttaatgcaatatttgtaaacaaggaagaagttccaaaggagaattatttgcaaattatgatgtttaacatgtttatta

SEQ ID NO: 97671 - protein, 286 aa, Arabidopsis thaliana
  peptide (1)..(286): Ceres Seq. ID no. 13490441
MEGKEEDVRVGANKFPERQPIGTSAQSDKDYKEPPPAPFFEPGELSSWSFWRAGIAEFIATFLFLYITVLTVMGVKRSPNMCASVGIQGIAWAFGGMIFALVYCTAGISGGHINPAVTFGLFLARKLSLTRALYYIVMQCLGAICGAGVVKGFQPKQYQALGGGANTVAHGYTKGSGLGAEIIGTFVLVYTVFSATDAKRNARDSHVPILAPLPIGFAVFLVHLATIPITGTGINPARSLGAAIIYNKDHSWDDHWVFWVGPFIGAALAALYHVVVIRAIPFKSRS

SEQ ID NO: 97672 - protein, 214 aa, Arabidopsis thaliana; identical to SEQ ID NO: 27567
  peptide (1)..(214): Ceres Seq. ID no. 13490442

SEQ ID NO: 97673 - protein, 206 aa, Arabidopsis thaliana; identical to SEQ ID NO: 27568
  peptide (1)..(206): Ceres Seq. ID no. 13490443

SEQ ID NO: 97674 - DNA, 1624 bp, Arabidopsis thaliana
  misc_feature (1)..(1624): Ceres Seq. ID no. 13490713
  misc_feature (1)..(1624): Ortholog of  Ceres SEQ ID NO 13595999 as cited in SEQ ID NO 68173
gagtaacatcgagacaaagaagaaaaactaaaaaagagaaccccaaagaatcgaatatttattatttcgccccgaagattctatttctgatcatttacacccctaaaaagagtagagctttcgtgaagccaccatgtgtggaggagctataatctccgatttcatacctccgccgaggtccctccgcgtcactaacgagtttatctggccggatctgaaaaacaaagtgaaagcttcaaagaagagatcgaataagcgatccgatttcttcgatcttgacgatgatttcgaagctgatttccaagggtttaaggatgactcggcttttgactgcgaagacgatgatgatgtcttcgtcaatgttaagcctttcgtcttcaccgcaactactaagcccgtagcttccgctttcgtctccactgtaggttcagcatatgccaagaaaactgtagagtccgctgagcaagctgagaaatcttctaagaggaagaggaagaatcaataccgagggattaggcagcgtccttggggaaaatgggctgcggagatccgtgatccgagaaaaggctcccgagaatggcttggaacattcgacactgctgaggaagcagcaagagcttatgatgctgcagcacgcagaatccgtggcacgaaagctaaggtgaattttcccgaggagaagaaccctagcgtcgtatcccagaaacgtcctagtgctaagactaataatcttcagaaatcagtggctaaaccaaacaaaagcgtaactttggttcagcagccaacacatctgagtcagcagtactgcaacaactcctttgacaactcttttggtgatatgagtttcatggaagagaagcctcagatgtacaacaatcagtttgggttaacaaactcgttcgatgctggaggtaacaatggataccagtatttcagttccgatcagggcagtaactccttcgactgttctgagttcgggtggagtgatcacggccctaaaacacccgagatctcttcaatgcttgtcaataacaacgaagcatcatttgttgaagaaaccaatgcagccaagaagctcaaaccaaactctgatgagtcagacgatctgatggcataccttgacaacgccttgtgggacaccccactagaagtggaagccatgcttggcgcagatgctggtgctgtgactcaggaagaggaaaacccagtggagctatggagcttagatgagatcaatttcatgctggaaggagacttttgaagtgatcgatggttccttagtttgtaaataaagctgtgttggattttgctgttgggggatggtacaagtcacacctcaagctctatgcattggtatctcatgagcctctcttccatagagagtttctcttttaattttgtcgaaataaaaaaggtgtgatgaagtaaatagaggtataataatatctatctattaagtcttgttttgttctttcatttttgtatttcttttctatttaaaagacagtttattagtcttctgagctctctttttgatctttgttatagcgtatcatcaccctcgaaagtgtaatgttttgtacccccaaacttgtttagcattataataaagtctctttggaac

SEQ ID NO: 97675 - protein, 375 aa, Arabidopsis thaliana
  peptide (1)..(375): Ceres Seq. ID no. 13490714
MCGGAIISDFIPPPRSLRVTNEFIWPDLKNKVKASKKRSNKRSDFFDLDDDFEADFQGFKDDSAFDCEDDDDVFVNVKPFVFTATTKPVASAFVSTVGSAYAKKTVESAEQAEKSSKRKRKNQYRGIRQRPWGKWAAEIRDPRKGSREWLGTFDTAEEAARAYDAAARRIRGTKAKVNFPEEKNPSVVSQKRPSAKTNNLQKSVAKPNKSVTLVQQPTHLSQQYCNNSFDNSFGDMSFMEEKPQMYNNQFGLTNSFDAGGNNGYQYFSSDQGSNSFDCSEFGWSDHGPKTPEISSMLVNNNEASFVEETNAAKKLKPNSDESDDLMAYLDNALWDTPLEVEAMLGADAGAVTQEEENPVELWSLDEINFMLEGDF

SEQ ID NO: 97676 - DNA, 1523 bp, Arabidopsis thaliana
  misc_feature (1)..(1523): Ceres Seq. ID no. 13490795
  misc_feature (1)..(1523): Ortholog of  Ceres SEQ ID NO 13662745 as cited in SEQ ID NO 66320
  misc_feature (1)..(1523): Ortholog of  Ceres SEQ ID NO 13660029 as cited in SEQ ID NO 67353
tcgaatcttcttcttcttatttcttctataccgtcgtcgaaaagctttaccaaaatctcacgcccccgacgattcatcgggatttgagtttgcactaaacccacaatggtttcctatcgtgctaccacagagacgatttccctggctttagaagccaacagctcggaggctattacgatactgtaccaggttttggaagacccttcttcatctcctgaggctatacggatcaaggagcaagcgattacaaacctttgtgatcgattgactgaagagaagagaggtgaggatctccggaaactgttgaccaagttgaggcctttcttttccttaatccccaaggcgaaaactgcgaaaatcgtcagaggaatcattgatgctgtggcaaagattcctggaacaactgatctccagatcactctctgcaaagagatggtcgaatggacccgcgctgagaagcgtactttcctcaggcagcgagtagaggctaggcttgcagctcttttgatggagaacaaggagtatgttgaagctttggcgttgttgagtactttggtaaaagaggttaggagattagatgataagctccttctggtcgacatagacttgctggagagcaaacttcacttctcattgagaaacttacccaaggcaaaagctgcactcactgcagctaggacagctgctaacgctatatatgtcccaccagctcaacaaggcacgatagatctgcagagtgggattcttcatgctgaagagaaagactacaaaaccggatacagttacttctttgaagcctttgagtccttcaacgctctcggagatccgagagcggttttcagtttgaagtacatgttactgtgcaagatcatggttagccaagctgatgatgttgcaggaataatctcctcaaaggctggactacagtacgttggccctgacctggatgccatgaaagcagtcgctgatgctcactcgaagaggtccttgaagttgtttgagaacgcactccgtgactacaaagcacagcttgaagatgacccaattgtccacaggcatctctcttctctctatgacacgcttctggagcaaaatctgtgtcgtttgatcgagcccttctcaagagttgagatagctcacattgctgagctcattggattgccgctcgaccatgtggaaaagaagctatctcagatgatactcgacaagaaatttgcaggtaccttggatcaaggagctggatgcctcatcatcttcgaagacccaaaggcagatgctatctactcggctaccctcgaaaccattgcaaacatggggaaggtcgtcgacagcctttatgtccggtctgccaaaatcatgtcctgagagagtgagtgagttggtcgtatgaatctcattctatcgttctttctttctggttttagatatcgtttggactcaaagaaactgatgtttctcaatggagaaagtaaacttgtctgaattgttcacattactcgttttgcttatgatcttattatgtc

SEQ ID NO: 97677 - protein, 419 aa, Arabidopsis thaliana; identical to SEQ ID NO: 84568
  peptide (1)..(419): Ceres Seq. ID no. 13490796

SEQ ID NO: 97678 - protein, 310 aa, Arabidopsis thaliana; identical to SEQ ID NO: 84569
  peptide (1)..(310): Ceres Seq. ID no. 13490797

SEQ ID NO: 97679 - protein, 285 aa, Arabidopsis thaliana; identical to SEQ ID NO: 84570
  peptide (1)..(285): Ceres Seq. ID no. 13490798

SEQ ID NO: 97680 - DNA, 1359 bp, Arabidopsis thaliana
  misc_feature (1)..(1359): Ceres Seq. ID no. 13490986
  misc_feature (1)..(1359): Ortholog of  Ceres SEQ ID NO 15176835 as cited in SEQ ID NO 1046
  misc_feature (1)..(1359): Ortholog of  Ceres SEQ ID NO 14315403 as cited in SEQ ID NO 59259
ggattagggagactcgcactcttcttcttcttctttgtacccagaaagaaagagagctccaacaatggctgcttgcgctactcactcctctctcatgctagcatacgccgccgcatccactcgttcccaggaccttacccctactccatctcttttctcttttgccagctccagacccaaccacttgagcttcccgcttcttctccttgggggttccagggaccggagatgtgctgctattgacagagcttccaaccacaagtttattgtctccgccgtggccgctgaggctgacctcgacacggaggaggacctggagcagaccgccaccgccgtccttgatccgcccaagcctaagaaaggaaaagccgctttggttctcaagagagatagaacaaggtctaagaggtttttggaaatccaaaagctaagggaaaccaaaaaggagtatgatgtcaacactgctatctctttgcttaaacaaactgccaacacaaggtttgttgagtctgttgaagcccatttccgtctcaacatcgatcctaagtacaatgaccagcagctgcgtgcaacggtgagcctgcctaagggaactggccagactgttatagtcgctgttcttgcacaaggtgagaaggttgatgaagccaaaagtgcaggggcagatattgtgggcagtgatgatttaatcgaacagattaaaggaggcttcatggagtttgacaagctgattgcatccccggatatgatggtcaaggttgctggcctgggaaagattcttggaccacgggggctcatgccaaatcccaaggctggtacagtcacagcgaacattccccaggctattgaagagttcaagaaggggaaagttgaattcagagcagacaaaactgggattgttcacattccatttgggaaagttaattttacagaggaagaccttctcataaacttccttgcagcagtgaaatcggtggagacaaacaagccaaagggagctaaaggagtgtactggaaaagcgctcacatatgctcgtcaatggggccttccatcaagttgaacataagagagatgatagacttcaagcctcccactgcgaactaatcgacaacgccatttgtaaatggggtccttttgggagacgggcaatgccagtgtagacagagaagagaaacaccaagtctagtctgttagtaatcttttcacgcctcactgctttgtatcactttgatggccatttgcttcttgtcgttatttatttactattgcctattaaaatttggcaaggggctgtacatgtcaggacgcagaactctttagtactctctaaaagaaaagaccttacattgatctttagg

SEQ ID NO: 97681 - protein, 346 aa, Arabidopsis thaliana; identical to SEQ ID NO: 22142
  peptide (1)..(346): Ceres Seq. ID no. 13490987

SEQ ID NO: 97682 - protein, 336 aa, Arabidopsis thaliana; identical to SEQ ID NO: 22143
  peptide (1)..(336): Ceres Seq. ID no. 13490988

SEQ ID NO: 97683 - DNA, 1854 bp, Arabidopsis thaliana
  misc_feature (1)..(1854): Ceres Seq. ID no. 13491356
  misc_feature (1)..(1854): Ortholog of  Ceres SEQ ID NO 15178131 as cited in SEQ ID NO 52639
aaggaggggaaaatcagctttttggagaagaaaccaaagaaaacattcgaaaccctaaaatctccattagaattcgaaaatgacaaagaagagaaagctcgaaggagaagaatctaacgaagctgaagaaccgtcgcagaagctgaagcagacgccggaggaggagcagcagcttgtaattaaaaatcaggataatcaaggagacgttgaagaagttgaatacgaggaagtagaggaagagcaagaagaagaagtagaagatgatgacgatgaagatgatggtgatgagaatgaggatcagacggatgggaatcgtatagaggcggcggcgacgtctggatctggcaatcaagaagatgatgacgatgaaccaattcaggatctgttggaaccattttcaaaggagcaagttttgagtcttcttaaggaagcagcggagaagcatgttgatgtagccaatcgaattagggaagtagctgatgaggaccctgttcatcggaagatctttgtgcacggtcttggttgggatacgaaaacagagacgcttattgaagcttttaagcagtacggagagatcgaagattgcaaggctgtgtttgataagatctcagggaaatctaaaggttatggctttattctgtacaagtctcgttcaggtgctcgcaacgcactcaagcagcctcagaagaagattggtagtcgtatgacggcatgccaattggcttctaaaggacctgtctttggtggagctcctatcgctgctgcagctgtttcagcgcctgctcagcattcgaactcggagcatactcagaaaaagatttatgttagtaatgtcggagcagagcttgatccacagaagttgctgatgtttttctcaaagtttggagaaattgaagaaggtcctttgggtcttgataagtatactgggagacctaaaggtttctgtctctttgtttataagtcgtctgaaagcgccaagagggctttggaggagccacacaagacttttgaaggccatatcttgcattgccagaaagctatcgatggtcccaaaccgggcaagcagcagcagcatcaccataacccacacgcctataacaatcctcgttaccaaaggaatgataacaatggttatggtccgcctggaggtcatggacatctcatggctggtaacccagctgggatgggtggtccaacggcacaggtgataaacccggccattggacaggccttgacagctttattggcatctcagggagctggtttggcttttaatccggcaattggacaggctttgttgggttccttggggacagctgctggtgtaaacccagggaatggagttggaatgccaactggttacggtactcaagctatggcaccggggacaatgcctgggtacggtacacaacctgggttgcaaggcggttatcagactccgcaacctggtcaaggcggtacaagtagagggcaacatggtgtcgggccatacggtactccttacatgggtcactaaatgtatcatgtatccatccactcagatatcagaaatcagtgttttaatattggcctggtgattcttctcaagtttataaggagctgatgctaaatgaagtctttatgaaatgttactctttggtcactcctaaggccaaactcataaaaaaccttttaaggagttttagttttcatctacttgtttttcccaaactctctttatgaaattcctaaaaaaaactttgtactactattttcagtgtttatgtctctattttttcagttttctgaatatcccccttagactttcatttgtaaaactaaaaaagcgcaactacgctccatgtgggtctttgc

SEQ ID NO: 97684 - protein, 478 aa, Arabidopsis thaliana
  peptide (1)..(478): Ceres Seq. ID no. 13491357
MTKKRKLEGEESNEAEEPSQKLKQTPEEEQQLVIKNQDNQGDVEEVEYEEVEEEQEEEVEDDDDEDDGDENEDQTDGNRIEAAATSGSGNQEDDDDEPIQDLLEPFSKEQVLSLLKEAAEKHVDVANRIREVADEDPVHRKIFVHGLGWDTKTETLIEAFKQYGEIEDCKAVFDKISGKSKGYGFILYKSRSGARNALKQPQKKIGSRMTACQLASKGPVFGGAPIAAAAVSAPAQHSNSEHTQKKIYVSNVGAELDPQKLLMFFSKFGEIEEGPLGLDKYTGRPKGFCLFVYKSSESAKRALEEPHKTFEGHILHCQKAIDGPKPGKQQQHHHNPHAYNNPRYQRNDNNGYGPPGGHGHLMAGNPAGMGGPTAQVINPAIGQALTALLASQGAGLAFNPAIGQALLGSLGTAAGVNPGNGVGMPTGYGTQAMAPGTMPGYGTQPGLQGGYQTPQPGQGGTSRGQHGVGPYGTPYMGH

SEQ ID NO: 97685 - protein, 270 aa, Arabidopsis thaliana; identical to SEQ ID NO: 38381
  peptide (1)..(270): Ceres Seq. ID no. 13491358

SEQ ID NO: 97686 - DNA, 666 bp, Arabidopsis thaliana
  misc_feature (1)..(666): Ceres Seq. ID no. 13491394
  misc_feature (1)..(666): Ortholog of  Ceres SEQ ID NO 12610954 as cited in SEQ ID NO 55930
  misc_feature (1)..(666): Ortholog of  Ceres SEQ ID NO 12625335 as cited in SEQ ID NO 63326
  misc_feature (1)..(666): Ortholog of  Ceres SEQ ID NO 12566590 as cited in SEQ ID NO 0
  misc_feature (1)..(666): Ortholog of  Ceres SEQ ID NO 14305152 as cited in SEQ ID NO 0
  misc_feature (1)..(666): Ortholog of  Ceres SEQ ID NO 15179949 as cited in SEQ ID NO 0
gtctcgcattaagtccaaacactttcatttgtctcctttcgtcaactccacagagatctcctcatggctccaattgctgtcggcgatgtcgtaccagacggaactatctccttcttcgatgagaatgatcaacttcagaccgcctccgttcactctctcgccgccggtaaaaaagtcattctctttggtgttcctggtgctttcactcccacttgcagcatgaagcatgttcctgggttcattgagaaagcagaggagctgaagtcaaagggtgttgatgagatcatttgctttagcgtgaacgatccgtttgtgatgaaagcatggggaaaaacatacccagagaacaaacatgtgaagtttgtagctgatgggtctggagaatacacacaccttctcggacttgagcttgaccttaaagacaagggtcttggtgttaggtcaaggagatttgctctgttacttgatgatctcaaagtgactgtagccaatgtcgaatctggtggcgaattcacagtttccagcgccgatgatatcctcaaggctctctaagaaatgtaccacttgtgttgtctatgtaaaccgctgtatgtgtagtagaggattctatagcttgttctcagacattaaccaaggttgtaataaagcggtttcattgtggaaaag

SEQ ID NO: 97687 - protein, 162 aa, Arabidopsis thaliana; identical to SEQ ID NO: 81388
  peptide (1)..(162): Ceres Seq. ID no. 13491395

SEQ ID NO: 97688 - protein, 110 aa, Arabidopsis thaliana; identical to SEQ ID NO: 81389
  peptide (1)..(110): Ceres Seq. ID no. 13491396

SEQ ID NO: 97689 - DNA, 1209 bp, Arabidopsis thaliana
  misc_feature (1)..(1209): Ceres Seq. ID no. 13491420
  misc_feature (1)..(1209): Ortholog of  Ceres SEQ ID NO 12484482 as cited in SEQ ID NO 53324
  misc_feature (1)..(1209): Ortholog of  Ceres SEQ ID NO 15176234 as cited in SEQ ID NO 54949
  misc_feature (1)..(1209): Ortholog of  Ceres SEQ ID NO 14314507 as cited in SEQ ID NO 59337
caacatacacaaaacactaaaagtagaagaaaaatggcgactcttaaggtttctgattctgttcctgctccttctgatgatgctgagcaattgagaaccgcttttgaaggatggggtacgaacgaggacttgatcatatcaatcttggctcacagaagtgctgaacagaggaaagtcatcaggcaagcataccacgaaacctacggcgaagaccttctcaagactcttgacaaggagctctctaacgatttcgagagagctatcttgttgtggactcttgaacccggtgagcgtgatgctttattggctaatgaagctacaaaaagatggacttcaagcaaccaagttcttatggaagttgcttgcacaaggacatcaacgcagctgcttcacgctaggcaagcttaccatgctcgctacaagaagtctcttgaagaggacgttgctcaccacactaccggtgacttcagaaagcttttggtttctcttgttacctcatacaggtacgaaggagatgaagtgaacatgacattggctaagcaagaagctaagctggtccatgagaaaatcaaggacaagcactacaatgatgaggatgttattagaatcttgtccacaagaagcaaagctcagatcaatgctacttttaaccgttaccaagatgatcatggcgaggaaattctcaagagtcttgaggaaggagatgatgatgacaagttccttgcacttttgaggtcaaccattcagtgcttgacaagaccagagctttactttgtcgatgttcttcgttcagcaatcaacaaaactggaactgatgaaggagcactcactagaattgtgaccacaagagctgagattgacttgaaggtcattggagaggagtaccagcgcaggaacagcattcctttggagaaagctattaccaaagacactcgtggagattacgagaagatgctcgtcgcacttctcggtgaagatgatgcttaatcaatcaatcctccacagagaaacataagctgctctacagcttctgttatctcttatctccctctctctctctttgatgagtttcaaatcgtttgattttgtttctacaaaaaccttgtttgtttctgttgtgtgttttgagttcctaaataatgcaaaagagagagacagagagaaccagtgtggtctcttaagttatatatatatgaagagcattggcct

SEQ ID NO: 97690 - protein, 328 aa, Arabidopsis thaliana; identical to SEQ ID NO: 36034
  peptide (1)..(328): Ceres Seq. ID no. 13491421

SEQ ID NO: 97691 - protein, 317 aa, Arabidopsis thaliana; identical to SEQ ID NO: 35542
  peptide (1)..(317): Ceres Seq. ID no. 13491422

SEQ ID NO: 97692 - protein, 211 aa, Arabidopsis thaliana; identical to SEQ ID NO: 24550
  peptide (1)..(211): Ceres Seq. ID no. 13491423

SEQ ID NO: 97693 - DNA, 1105 bp, Arabidopsis thaliana
  misc_feature (1)..(1105): Ceres Seq. ID no. 13492456
  misc_feature (1)..(1105): Ortholog of  Ceres SEQ ID NO 13593831 as cited in SEQ ID NO 53828
attacccattgtagaaaagaagaaaaaaagcaaagaacacttgaacgttttctagatagagatggaagggaaagaagaggatgttcgagtgggagctaacaagttcccggagaggcaaccgataggtacatcggctcagacggacaaagactacaaggagccaccaccagctccatttttcgagccaggcgagctgagttcgtggtccttctacagagccggaatcgccgagttcatagccaccttcctgtttctatacataacagtattgacagtgatgggagtgaagagagcaccaaacatgtgtgcctctgttggaatccaaggcattgcttgggctttcggtggcatgatctttgcccttgtctactgtactgctggaatctctggtgggcacataaacccagcggtgacatttggtctgttcttggctcgtaagctgtcattgacgagagctgtcttttacatcgtgatgcaatgtctcggagccatctgcggcgccggagttgtcaaaggcttccagccaaatccttaccaaactctcggcggaggagccaacacagtcgctcacggctacactaagggctctggtttgggtgctgagataatcggaaccttcgtccttgtctacacggtcttctccgccactgacgccaagagaagcgctcgtgactcccacgttccgattttggcaccactcccaatcggattcgctgtgttcttggttcacttggcgacgattccaatcaccggaacaggaattaacccagctaggagtcttggagctgcaatcatctacaacaaggaccacgcttgggacgaccactggatattctgggtcggaccattcattggagcagctcttgcggctctttaccaccaacttgtcatcagagccattccattcaagtccagatcctgatttgatttctttctttataaaacttcattgttgcatcttggtttgtaattgagcttgaaaatatttgagagatctggatcatgtgtttattttaattaatggacttgtctttttcttatttgctgtggatgatctggttttatcgttaaatggagtttgatattatgattgatttggtacgat

SEQ ID NO: 97694 - protein, 286 aa, Arabidopsis thaliana
  peptide (1)..(286): Ceres Seq. ID no. 13492457
MEGKEEDVRVGANKFPERQPIGTSAQTDKDYKEPPPAPFFEPGELSSWSFYRAGIAEFIATFLFLYITVLTVMGVKRAPNMCASVGIQGIAWAFGGMIFALVYCTAGISGGHINPAVTFGLFLARKLSLTRAVFYIVMQCLGAICGAGVVKGFQPNPYQTLGGGANTVAHGYTKGSGLGAEIIGTFVLVYTVFSATDAKRSARDSHVPILAPLPIGFAVFLVHLATIPITGTGINPARSLGAAIIYNKDHAWDDHWIFWVGPFIGAALAALYHQLVIRAIPFKSRS

SEQ ID NO: 97695 - protein, 214 aa, Arabidopsis thaliana
  peptide (1)..(214): Ceres Seq. ID no. 13492458
MGVKRAPNMCASVGIQGIAWAFGGMIFALVYCTAGISGGHINPAVTFGLFLARKLSLTRAVFYIVMQCLGAICGAGVVKGFQPNPYQTLGGGANTVAHGYTKGSGLGAEIIGTFVLVYTVFSATDAKRSARDSHVPILAPLPIGFAVFLVHLATIPITGTGINPARSLGAAIIYNKDHAWDDHWIFWVGPFIGAALAALYHQLVIRAIPFKSRS

SEQ ID NO: 97696 - protein, 206 aa, Arabidopsis thaliana
  peptide (1)..(206): Ceres Seq. ID no. 13492459
MCASVGIQGIAWAFGGMIFALVYCTAGISGGHINPAVTFGLFLARKLSLTRAVFYIVMQCLGAICGAGVVKGFQPNPYQTLGGGANTVAHGYTKGSGLGAEIIGTFVLVYTVFSATDAKRSARDSHVPILAPLPIGFAVFLVHLATIPITGTGINPARSLGAAIIYNKDHAWDDHWIFWVGPFIGAALAALYHQLVIRAIPFKSRS

SEQ ID NO: 97697 - DNA, 817 bp, Arabidopsis thaliana
  misc_feature (1)..(817): Ceres Seq. ID no. 13492627
  misc_feature (1)..(817): Ortholog of  Ceres SEQ ID NO 15173567 as cited in SEQ ID NO 57612
  misc_feature (1)..(817): Ortholog of  Ceres SEQ ID NO 12611396 as cited in SEQ ID NO 59809
  misc_feature (1)..(817): Ortholog of  Ceres SEQ ID NO 15178140 as cited in SEQ ID NO 0
atcccctcgtcgctgcgtctctctcccgcaaccttcgattttcgtttattcgcatccatcggagagagaaaacaatcaataagcgaccatgttggtgtaccaagatcttctcaccggtgatgagcttctgtctgactctttcccttacaaggagattgagaatggaatcctctgggaagtagaaggaaagtgggttactgtgggagctgtagatgttaacattggtgccaatccatctgctgaagaaggtggtgaggatgaaggtgttgatgactctactcaaaaggttgttgacattgtcgacaccttcagacttcaggagcaaccaacttatgacaagaagggattcatcgcttacattaagaaatacattaagcttttgacacccaagctcagcgaagaagatcaagctgtcttcaagaagggtattgagggagctaccaagtttttgctccccaggctcagtgacttccaattctttgttggggagggtatgcatgatgacagcactttggtctttgcttactacaaggagggttcaactaacccaacatttttgtacttcgctcatggtttgaaggaggtcaagtgctgagagagaagctctcgttgggttactgtggtcggtcgcagcgactctctaagtttatgtttctttatattgtcctgtgtttcgtcgtcgtcccctattaaaattacctgccagtttacttttctctcttcttgttttctgtgttggaagattctcaagttatttattccgcaaaaaacggtttatcatttacaattagttgaattttggtcgttactttttgtg

SEQ ID NO: 97698 - protein, 168 aa, Arabidopsis thaliana; identical to SEQ ID NO: 28030
  peptide (1)..(168): Ceres Seq. ID no. 13492628

SEQ ID NO: 97699 - DNA, 1084 bp, Arabidopsis thaliana
  misc_feature (1)..(1084): Ceres Seq. ID no. 13492779
  misc_feature (1)..(1084): Ortholog of  Ceres SEQ ID NO 13658282 as cited in SEQ ID NO 66701
aatatccgtattccctctctctctccctttctatctgagcttctctctcttactctctccagagcaacaatggctgcgactgcttcttctcttacaatcgcgtcgtcattctccgaaccacggactcagatccattcctcgagacgtttgaatctccctcttcaatattcaatcccgtacaaggtgttacggagtaggagtagaagattaggactcgtcgtcagttctgtttcagctcccaacgttgagctccgtactggacctgatgatctcatttctaccctcctctctaaggttgcgaatagtgatggaggtgtgacgctaagccctgagcagcacaaggaggtggcacaagtggccggagagcttcaaaagtactgtgtcaaggagcctgtcaaaaatcctctcatttttggagattgggaagtggtgtactgttctagaccaacctctcctggtggaggctacagaagcgtgataggccgtctcttcttcaaaacgaaagagatgatacaagccatcgatgctcctgatatcgttaggaacaaagtttccattaatgcttttggttttctagacggagacgtctccttgacagggaagctgaaagcgttggacagtgagtgggtgcaggtgatatttgagcctccggaaatcaaggttggatctttggagttcaaatacgggttcgaaagcgaagtgaagcttcggatcacatacgttgatgagaaacttaggttgggattgggatctaaaggatcattgttcgtctttagaaggcgtcaataatatatacgtttctccctcgtgcatcaaccaatgcaaatcactacagaaaaaaaggaaacaacatatggggtcctgcgagagtatgatggtcaatatccacaatgctgtgtacacaaatggtgttttagatataactttgttgtaatgtaaacttcattttaagagtgtctcacttcagatgagttgttgaggaagctactggtgaacttcaacatcttttcgcaaagaattactatagcaacaaagaaagataaatgacttagcagcctttatgttcaaattcaaaacctctcac

SEQ ID NO: 97700 - protein, 262 aa, Arabidopsis thaliana; identical to SEQ ID NO: 21933
  peptide (1)..(262): Ceres Seq. ID no. 13492780

SEQ ID NO: 97701 - protein, 239 aa, Arabidopsis thaliana; identical to SEQ ID NO: 21934
  peptide (1)..(239): Ceres Seq. ID no. 13492781

SEQ ID NO: 97702 - DNA, 836 bp, Arabidopsis thaliana
  misc_feature (1)..(836): Ceres Seq. ID no. 13493726
  misc_feature (1)..(836): Ortholog of  Ceres SEQ ID NO 15172913 as cited in SEQ ID NO 51824
  misc_feature (1)..(836): Ortholog of  Ceres SEQ ID NO 13654659 as cited in SEQ ID NO 61998
aagctctcatcttcttcagctcaaaaagccatctcaaaggtatattttgaatcaaaaacaatggcagggactaatgattcttgtcctttggtaaagaacattcttcttctagactctgaaggaaagcgtgtggctgtcaagtattactccgatgattgggcaactaatgcttccaagttagcttttgaaaaatatgtcttctcgaaaacctccaagaccaatgctcgcacagaagctgagatcacactgttggagagtaatattgttgtctataagtttgcccaggacctgcatttctttgttactggaggtgaaaatgaaaacgagctcgtcttatcatctgttcttcaaggcttttttgatgctgttgcgttacttctgaggaacaatgttgaaaagatggaagcccttgaaaacttggatctcatctttttgtgccttgatgagatggttgatcaagggatggtacttgaaacagacgcgaatgttattgcggggaaagtagcaatgcaaagcgcagaagcaagtggttcactctctgaacagacattaactcaagcattggcaacagctcgggagcaccttgcgagaagtcttcttacataaattttcatcgtgggagcgaaatgatatattcataagcccttgtaaccaaccatatctgaaatggttacccgttcactagaaatcaacccctattgacttaactatctcatgactttgttttcttatggttttttggtggaacttagatcttttattcgcctgttcttgcggaaccatctttttaaatgtgaggatcaacattgcactagtgattgattgctttacatatc

SEQ ID NO: 97703 - protein, 201 aa, Arabidopsis thaliana
  peptide (1)..(201): Ceres Seq. ID no. 13493727
KLSSSSAQKAISKVYFESKTMAGTNDSCPLVKNILLLDSEGKRVAVKYYSDDWATNASKLAFEKYVFSKTSKTNARTEAEITLLESNIVVYKFAQDLHFFVTGGENENELVLSSVLQGFFDAVALLLRNNVEKMEALENLDLIFLCLDEMVDQGMVLETDANVIAGKVAMQSAEASGSLSEQTLTQALATAREHLARSLLT

SEQ ID NO: 97704 - protein, 181 aa, Arabidopsis thaliana
  peptide (1)..(181): Ceres Seq. ID no. 13493728
MAGTNDSCPLVKNILLLDSEGKRVAVKYYSDDWATNASKLAFEKYVFSKTSKTNARTEAEITLLESNIVVYKFAQDLHFFVTGGENENELVLSSVLQGFFDAVALLLRNNVEKMEALENLDLIFLCLDEMVDQGMVLETDANVIAGKVAMQSAEASGSLSEQTLTQALATAREHLARSLLT

SEQ ID NO: 97705 - DNA, 1130 bp, Arabidopsis thaliana
  misc_feature (1)..(1130): Ceres Seq. ID no. 13494035
  misc_feature (1)..(1130): Ortholog of  Ceres SEQ ID NO 12609146 as cited in SEQ ID NO 52118
  misc_feature (1)..(1130): Ortholog of  Ceres SEQ ID NO 14303397 as cited in SEQ ID NO 54614
  misc_feature (1)..(1130): Ortholog of  Ceres SEQ ID NO 13594056 as cited in SEQ ID NO 55691
  misc_feature (1)..(1130): Ortholog of  Ceres SEQ ID NO 14314186 as cited in SEQ ID NO 57457
  misc_feature (1)..(1130): Ortholog of  Ceres SEQ ID NO 13638136 as cited in SEQ ID NO 58644
  misc_feature (1)..(1130): Ortholog of  Ceres SEQ ID NO 13596868 as cited in SEQ ID NO 62806
  misc_feature (1)..(1130): Ortholog of  Ceres SEQ ID NO 13595885 as cited in SEQ ID NO 69265
  misc_feature (1)..(1130): Ortholog of  Ceres SEQ ID NO 12566239 as cited in SEQ ID NO 0
  misc_feature (1)..(1130): Ortholog of  Ceres SEQ ID NO 13599119 as cited in SEQ ID NO 0
  misc_feature (1)..(1130): Ortholog of  Ceres SEQ ID NO 14308987 as cited in SEQ ID NO 0
gcgaagccgcaaagaaagcggcggtggaagctgagacatgcaacaatggcgttcgtgtcattctcttcttctccttctctctctcttacactcgcgattcaacattaatttcgttcttcttcatacacatatatagatagtgtcttcattttccaaccatgaccggtagagaaatcctccacaagatgaaggaatccgtcaaggagaaagttgggcttggtgcatctgcttcatctgcagattcagggaaaggtaagagcaagatgttgaagcagatcacacatggttttcatttggtgaaagggaaagcttttcacgagatggaagattatgtggttgccaaattcaaggaagttgatgataatgagcttggtctgtttgctatcttcgatggccatcttagccacgagattccggactacttgtgctcccatttgtttgagaacatcttgaaagagccgaatttctggcaagaacctgagaaagcgataaagaaagcttactatataacggatacaacgattctagacaaggcagatgatttgggaaaaggaggttctactgctgtgactgcgatattgatcaattgccagaagctggtggttgctaatgttggtgactctcgagctgttatttgccaaaatggtgttgcgaagccactctcagttgatcatgagccgaacatggagaaggatgaaatcgagaacagaggaggattcgtttctaactttcctggggatgttcctcgagttgatggtcaactggctgtggcaagggcatttggtgataagagtttaaagatgcatttgagttcagaaccatatgttacggtggagataattgatgatgatgcagaatttcttatcctagcaagtgatggactatggaaggtcatgtcaaaccaagaagccgttgactcaatcaagggaataaaagatgcgaaggctgcagcaaagcaccttgcagaggaggctgttgcaaggaaaagctcagacgatatctcagtcgtcgtcgtgaaatttcagtgacattagctttcggttagtcttttcttcttcttttgagcgactctaacactttacttgaatctgtattataagccttttcaattaagacgttacgcaaataag

SEQ ID NO: 97706 - protein, 289 aa, Arabidopsis thaliana; identical to SEQ ID NO: 40326
  peptide (1)..(289): Ceres Seq. ID no. 13494036

SEQ ID NO: 97707 - protein, 280 aa, Arabidopsis thaliana; identical to SEQ ID NO: 40327
  peptide (1)..(280): Ceres Seq. ID no. 13494037

SEQ ID NO: 97708 - protein, 254 aa, Arabidopsis thaliana; identical to SEQ ID NO: 40328
  peptide (1)..(254): Ceres Seq. ID no. 13494038

SEQ ID NO: 97709 - DNA, 1423 bp, Arabidopsis thaliana
  misc_feature (1)..(1423): Ceres Seq. ID no. 13494233
  misc_feature (1)..(1423): Ortholog of  Ceres SEQ ID NO 15168521 as cited in SEQ ID NO 58180
attgataatttgttacactagttgtgaattgagtttcttggttctttcattaattttgatttggttttgtagcctacgaattcgaatcatcagcatcatcttcaacaccagcttaacgaaaatggaagtataataagtggccacggactagtactctctcaccaacttccacctctccaagcaaaccctaaccctaaccaccaccatgtcgctacctctgctggtcttccgtcaaggatgggtggatcgatggcggagagagcaaggcaggccaacattcctccactagcgggacccctaaagtgtcctcgatgcgactccagcaacactaagttctgttactacaacaactataacctcactcagcctcgtcacttctgcaaaggttgccgtcgctactggacacaagggggcgccctgagaaacgtccctgtaggtggaggctgccggaggaataacaagaagggcaaaaatggaaatttaaaatcttcttcttcttcgtccaaacagtcttcctcggtcaacgctcaaagtcctagctcaggacagctaaggacaaatcatcagttccctttttcaccaactctttacaatctcactcaactcggaggtattggtttgaacttagccgctactaatggcaacaaccaagctcaccagatcggttccagtttgatgatgagcgatctagggtttctccatggacgaaatacttcaactccgatgacgggaaacattcatgaaaacaacaacaataataacaatgaaaacaacctaatggcatccgttggatctttgagcccctttgctctcttcgatccaacgacggggctatacgctttccagaacgacggtaatatcgggaacaacgttgggatatctggttcttctacttccatggttgattctagggtttatcagacgcctccggtgaagatggaagaacaacctaatttggctaacttgtctagaccggtctccggtttgacgtctcctgggaatcaaacaaatcagtacttttggcctggttcggatttctcgggtccttctaatgatctcttgtgagatttttgtgtgttttgtcggatcattaacgtatgttacgacttacgacgtggagattgattaaaaggactaccaacggtcaggattaactgcatgcatagtctgtgctcaagacgatgatcgtggagaagtacaaggacaaactaaaaggtatcttaattagagattgtggttttacaacttaaattcgatacttatttatataatcaggtgtgtcatataatttgtttgtattgcgtgatttcatggttgatctgatttctcaagttgctatatatgcctcaatacatgtgtgtaacagtccaatttgtatactctttagactgaattttatcgaatatataatatttttcagttt

SEQ ID NO: 97710 - protein, 275 aa, Arabidopsis thaliana; identical to SEQ ID NO: 20921
  peptide (1)..(275): Ceres Seq. ID no. 13494234

SEQ ID NO: 97711 - protein, 271 aa, Arabidopsis thaliana; identical to SEQ ID NO: 20922
  peptide (1)..(271): Ceres Seq. ID no. 13494235

SEQ ID NO: 97712 - DNA, 1423 bp, Arabidopsis thaliana
  misc_feature (1)..(1423): Ceres Seq. ID no. 13494365
  misc_feature (1)..(1423): Ortholog of  Ceres SEQ ID NO 13654557 as cited in SEQ ID NO 68444
acagcctcacttccaaacccttcgtttacagcaaaaaatcgaaaatggttgcctcagccgccgcacgacctcttgtcaccgtccaaggacttgacggtgacatgagcaccgatcaatccaccaccgtcactttaccagacgtcatgactgctccagttcgacctgacattgtcaacttcgtccacgcccaaatctccaacaacagccgtcagccttacgcagtctccaaaaaggccggtcaccaaacctccgccgagtcctggggaaccggaagagccgtgtcacgtatccctcgtgttcctggtggtggaactcaccgtgccggtcaagcagcgttcggaaacatgtgtcgtggtggtcgtatgtttgctccgactaagatctggagacgctggcaccgtcgtgtcaatgtcaacatgaagaggcacgcgattgtttctgcaatcgctgctactgctgttccagctcttgtgatggctcgtggtcacaagatcgagaatgttcctgagatgcctcttgttgttagcgactcagctgaagctgtggagaagacatcagctgcgatcaaggtattgaagcagatcggtgcttacgacgatgcggagaaagctaagaacagtattggaattcgtcctggtaaaggtaaaatgaggaatcgtcgttacatttctaggaaaggtcctcttgttgtgtttggaactgaaggagccaagattgtgaaagcttttaggaatcttcctggtgttgagctttgtcacgttgagaggcttaacttgttgaaattagcccctggtggtcaccttggtaggtttgtgatttggactaagtctgcttttgagaagcttgaatctatctatggctcgtttgagaaaccatcagagaagaagaagggttacgtcttgcctcgtgcgaagatggtgaatgctgatcttgctaggattattaactccgatgaggtacagagtgtggtgaacccgattaaggatggttccaagagagcggttctgaagaagaatccattgaagaaccttaatgtgatgttcaagttgaatccttatgctaagaccgcaaagagaatgtctctgttggctgaagcttcaagggttaaggctaagaaggagaagctcgagaagaagaggaaagtcgtcactaaggaggaggcccaagcgatcaaagcagcaggcaaggcttggtatcagactatgatttcagacagtgactacaccgagttcgataacttcaccaagtggcttggcgctagtcagtaatgatgctctcgtcatcgcaaagtctcttatatctaggcaaagattttggttttctgatttatgttcttcgtttgtattggatttatctgggattttatgttgttgagttggtaagacgatttttaagaactatgatggtgtttttcaaactcttt

SEQ ID NO: 97713 - protein, 421 aa, Arabidopsis thaliana; identical to SEQ ID NO: 36165
  peptide (1)..(421): Ceres Seq. ID no. 13494366

SEQ ID NO: 97714 - protein, 407 aa, Arabidopsis thaliana; identical to SEQ ID NO: 36166
  peptide (1)..(407): Ceres Seq. ID no. 13494367

SEQ ID NO: 97715 - protein, 388 aa, Arabidopsis thaliana; identical to SEQ ID NO: 36167
  peptide (1)..(388): Ceres Seq. ID no. 13494368

SEQ ID NO: 97716 - DNA, 584 bp, Arabidopsis thaliana
  misc_feature (1)..(584): Ceres Seq. ID no. 13496727
  misc_feature (1)..(584): Ortholog of  Ceres SEQ ID NO 15169443 as cited in SEQ ID NO 58785
cacttcttcatcgccgtctgcacaaaaccctaatctcacaatctcctacgagatctatcagtctccacgaagatgaaggttgttgccgcatacttgctcgctgttttgagcggaaaagcttcaccaaccagtgccgatatcaagactatccttggatcagttggtgctgagacagaggattctcagattgagcttttgttgaaggaagtgaaaggaaaagatttggctgagttgattgctgctggaagggagaagttagcttcagtgccgtctggtggcggaggtggtgttgcggttgcttctgctacatctggaggtggaggaggtggtggtgcttctgctgctgagtccaagaaagaagagaagaaggaagaaaaggaagaatccgatgatgacatgggtttcagtctattcgagtaagctggtagtagcatgaaaagtccggttttgttgtcctcttttaatattgtaaccttttgaaatctatatgttgttgttgtttagtttgtattcgatcatcttttttagacattgctgaaattctcaagagtttttgacccgaatgtcatttgcactttgttgtt

SEQ ID NO: 97717 - protein, 115 aa, Arabidopsis thaliana; identical to SEQ ID NO: 23308
  peptide (1)..(115): Ceres Seq. ID no. 13496728

SEQ ID NO: 97718 - DNA, 1067 bp, Arabidopsis thaliana
  misc_feature (1)..(1067): Ceres Seq. ID no. 13496733
  misc_feature (1)..(1067): Ortholog of  Ceres SEQ ID NO 15226473 as cited in SEQ ID NO 50919
  misc_feature (1)..(1067): Ortholog of  Ceres SEQ ID NO 13639704 as cited in SEQ ID NO 51325
  misc_feature (1)..(1067): Ortholog of  Ceres SEQ ID NO 13661747 as cited in SEQ ID NO 60578
  misc_feature (1)..(1067): Ortholog of  Ceres SEQ ID NO 13661672 as cited in SEQ ID NO 61462
  misc_feature (1)..(1067): Ortholog of  Ceres SEQ ID NO 13599646 as cited in SEQ ID NO 0
tttcataacttaatcacacacaaggagagaagagagaaagagagaaagagagacagagataatggcgtacagtgcgtgtttcctacaccagagcgcattggcttcatcagccgcacgatcatcatcttcctcctcatcccagcgtcacgtgtcgctctccaaacctgttcagatcatctgtaaagctcaacagtctcatgaagacgataactccgccgtctcccgccgtcttgctctcactctcctcgtcggcgccgctgctgttggttccaaagtatctcctgctgatgccgcctacggtgaagctgcaaacgtgtttgggaagccaaagacgaacacagacttcttgccatacaatggagatgggttcaaagtgcaggttccagcaaaatggaacccaagcaaagagattgagtatccaggacaagtccttaggttcgaagacaacttcgatgctactagcaatctcaatgtcatggtcactcctaccgacaagaagtccatcactgattacggttctcccgaagagttcctctctcaggttaattacctcctagggaaacaagcttacttcggtgagactgcctctgagggaggctttgacaacaatgcagtggcaacagcaaacattctggagtcatcatctcaggaagttggtgggaaaccctactattacttgtctgtgttgacaagaacggctgatggagacgaaggtgggaagcatcagctgatcacagcaaccgtgaatggagggaagctttacatctgcaaagcacaagctggagacaagaggtggttcaagggagccaggaaatttgtcgagagcgcagccacttctttcagtgttgcttgagtgaaagcaacacaacgtaacaatgctctgcttgctttcttcatttgtctcttgtaaaaaatggaaaatgaaactgagcttttgagaactatcaagatgatgttaccttttcggcatcacttgtgtacctatgataacagactcgttttccaagttttcttaaaaaacaactatattcaatagatattttctcaaattaataagatattgactc

SEQ ID NO: 97719 - protein, 263 aa, Arabidopsis thaliana; identical to SEQ ID NO: 22602
  peptide (1)..(263): Ceres Seq. ID no. 13496734

SEQ ID NO: 97720 - DNA, 1038 bp, Arabidopsis thaliana
  misc_feature (1)..(1038): Ceres Seq. ID no. 13496750
  misc_feature (1)..(1038): Ortholog of  Ceres SEQ ID NO 15177067 as cited in SEQ ID NO 52085
  misc_feature (1)..(1038): Ortholog of  Ceres SEQ ID NO 14309480 as cited in SEQ ID NO 0
  misc_feature (1)..(1038): Ortholog of  Ceres SEQ ID NO 14312472 as cited in SEQ ID NO 0
actgtttgatttctgaggagaatccattgtttccatttgaagaaaactctaactttctcgttgaagctttgagctctctacctctttatctccggagatgtataataacatgggacctcaaccggggatgccaagacctccaggaaaccctgagcctggtccatttggtaatcctttcactggagctggctcgggttttatccgtggtggtttgggagcgtatggggagagaattttaggatcgagctctgagtatgttcagagcaatataagccggtacttctctgatccgcaatactatttccaagtgaatgatcaatatgtgaggaataaactgaaggttgttctgtttcctttcctacaccggggacactggaccagaatatctgaaccagttggtggtaggctctcatacaagcctccaatatatgatatcaatgctccagacttgtacattccctttatggcatttggtacctacgttgttcttgctggtctttcattgggacttaatggaaagtttacaccggaagctttgaattggctgtttgtgaaaggattggttggttggtttttgcaagtaatgctcctgaaagtaacacttctatcacttggtagtggagaggcaccattactagatattgtggcatacggagggtatgcttttgctggtctgtgtcttgcgggctttgccaaaataatgtggggatactcgtactacgcgttgatgccatggacttgtctatgcactgggattttcttggtgaagacgatgaaacgtgttctgtttgctgaagtaagaagttacgattcgagcaaacatcactaccttcttctgtttttagccttggtccagttcccacttttgatatggcttggtaacattagtgttaattggcttctttgaaatgaaaaagacgtttttgtgaattcttattggtatttgtagcgtaatttgaacgttcttggcatttggcaatgtatgtttgttgtctattctattcatttgcatgacgtgaagaaaaagttattttgaac

SEQ ID NO: 97721 - protein, 269 aa, Arabidopsis thaliana; identical to SEQ ID NO: 36555
  peptide (1)..(269): Ceres Seq. ID no. 13496751

SEQ ID NO: 97722 - protein, 265 aa, Arabidopsis thaliana; identical to SEQ ID NO: 36556
  peptide (1)..(265): Ceres Seq. ID no. 13496752

SEQ ID NO: 97723 - protein, 259 aa, Arabidopsis thaliana; identical to SEQ ID NO: 36557
  peptide (1)..(259): Ceres Seq. ID no. 13496753

SEQ ID NO: 97724 - DNA, 880 bp, Arabidopsis thaliana
  misc_feature (1)..(880): Ceres Seq. ID no. 13499590
  misc_feature (1)..(880): Ortholog of  Ceres SEQ ID NO 12619999 as cited in SEQ ID NO 66123
  misc_feature (1)..(880): Ortholog of  Ceres SEQ ID NO 13656436 as cited in SEQ ID NO 69154
acgagttttctcttcggctttccactttttcctctgttcgtgtcattcttctcgtagatctcgagagagagccttaaggaaattaaaaaaggttggattttgatcgatgggttcttcgtcaggacaacccgaatttgattacttgtttaaggttttattgatcggagattctggtgttggaaagagctctcttttgttgagtttcacatctaatacctttgatgatctttctccaacgattggtgtggattttaaggttaagtatctgacaattggagaaaagaaactcaagcttgcgatttgggatacagctgggcaagagagatttaggacgctaacaagttcgtattacagaggagctcagggtataattatggtatatgatgtgacacgaagagacacgttcacaaacctatcagacatatgggctaaggaaatcgacctctattcgactaatcaggattgcattaagatgcttgtcgggaataaagttgataaggagagtgaaagagctgtttctaaaaaagaaggcatagactttgctcgggagtacggatgtttgtttctggagtgtagtgcaaagactcgagtcaacgttgagcaatgttttgaagagcttgttcttaagatattggaaacgccgagtcttactgctgaaggttcgtctggcggaaagaagaacatcttcaaacaaaaccccgcacagaccaccagtacctcgtcgagctactgctgctcgtcttagacatggttttacagtttatgacaaattacactcttgctcatcatcttgttcttgattgtctctttgttttcctaaaccgcagcatcttggatgtaaatctcaaccctgatttgaaagttgtgttcactagtttcg

SEQ ID NO: 97725 - protein, 212 aa, Arabidopsis thaliana [sequence omitted]

SEQ ID NO: 97726 - protein, 123 aa, Arabidopsis thaliana; identical to SEQ ID NO: 26494
  peptide (1)..(123): Ceres Seq. ID no. 13499592

SEQ ID NO: 97727 - DNA, 1365 bp, Arabidopsis thaliana
  misc_feature (1)..(1365): Ceres Seq. ID no. 13503905
  misc_feature (1)..(1365): Ortholog of  Ceres SEQ ID NO 13598579 as cited in SEQ ID NO 65523
acatactttcttctctctatttctcattctctcttcttcatcatattactcattttatagaacagcaaaaccctagatttcctgttcaagctcaagaccgtacaaaactttggaactcatatataaagatctcgagaatagcattatgaatatcgtctcttggaaagatgcaaacgacgaagttgcaggcggcgctacgacaagacgtgaaagagaagtaaaagaggatcaagaagaaaccgaagtcagagccaccagtggcaaaaccgtaattaaaaagcagcctacatcgatctcttcttcttcttcttcgtggatgaaatccaaggatccgaggattgttagggtttcacgcgcctttggaggcaaagaccgtcacagcaaagtgtgtacgttacgtggactacgtgacagacgcgtgagattatcagtcccaacggctattcagctctacgatcttcaagaacggctcggtgttgaccagcctagcaaagccgttgactggttgcttgatgcagctaaagaggagatcgacgagctacctccgttacctatctcgccggaaaatttcagcatcttcaaccatcatcagtccttcttgaatcttggtcaacggcccggtcaagatccgacccaactcgggtttaaaatcaatggatgtgtacaaaagtctactactactagccgcgaagaaaacgatagagagaaaggagaaaacgatgtcgtttacacaaacaatcatcatgttgggtcttatggaacttatcacaacctggaacatcatcatcatcatcaccaacatttgagtttacaggcagattatcatagtcatcaactacatagtcttgtcccatttccatcacaaattttggtatgtccaatgacgacatcaccaacaactacaactatacaatctttgtttccatcatcatcgtcagctggttcagggactatggagacattagatccgaggcaaatggtaagccattttcaaatgccattaatgggtaattcttcatcttcgtcttcccaaaacatttcgacattatattcgttgttacatggtagtagtagcaacaatggtggtagagacattgataatcggatgtcgtcggtccaattcaaccgaactaatagcactacaacggctaacatgtcgaggcatctaggctcggagcgttgtacaagtagaggaagtgatcaccatatgtgaagttagattattgaaacgatataattgttgtttgatgtgttcagaaataaggggacacaaaacaaaatataaggtaattactattgtactatgttttgctgatatattttttaatagacaaattaatgttataaattgatttattaatttac

SEQ ID NO: 97728 - protein, 355 aa, Arabidopsis thaliana
  peptide (1)..(355): Ceres Seq. ID no. 13503906
MNIVSWKDANDEVAGGATTRREREVKEDQEETEVRATSGKTVIKKQPTSISSSSSSWMKSKDPRIVRVSRAFGGKDRHSKVCTLRGLRDRRVRLSVPTAIQLYDLQERLGVDQPSKAVDWLLDAAKEEIDELPPLPISPENFSIFNHHQSFLNLGQRPGQDPTQLGFKINGCVQKSTTTSREENDREKGENDVVYTNNHHVGSYGTYHNLEHHHHHHQHLSLQADYHSHQLHSLVPFPSQILVCPMTTSPTTTTIQSLFPSSSSAGSGTMETLDPRQMVSHFQMPLMGNSSSSSSQNISTLYSLLHGSSSNNGGRDIDNRMSSVQFNRTNSTTTANMSRHLGSERCTSRGSDHHM

SEQ ID NO: 97729 - protein, 298 aa, Arabidopsis thaliana
  peptide (1)..(298): Ceres Seq. ID no. 13503907
MKSKDPRIVRVSRAFGGKDRHSKVCTLRGLRDRRVRLSVPTAIQLYDLQERLGVDQPSKAVDWLLDAAKEEIDELPPLPISPENFSIFNHHQSFLNLGQRPGQDPTQLGFKINGCVQKSTTTSREENDREKGENDVVYTNNHHVGSYGTYHNLEHHHHHHQHLSLQADYHSHQLHSLVPFPSQILVCPMTTSPTTTTIQSLFPSSSSAGSGTMETLDPRQMVSHFQMPLMGNSSSSSSQNISTLYSLLHGSSSNNGGRDIDNRMSSVQFNRTNSTTTANMSRHLGSERCTSRGSDHHM

SEQ ID NO: 97730 - DNA, 1173 bp, Arabidopsis thaliana
  misc_feature (1)..(1173): Ceres Seq. ID no. 13504705
  misc_feature (1)..(1173): Ortholog of  Ceres SEQ ID NO 13582332 as cited in SEQ ID NO 59890
  misc_feature (1)..(1173): Ortholog of  Ceres SEQ ID NO 13598278 as cited in SEQ ID NO 68456
atgaagggggatcaagaagtacaagtcattgttcagcagggaaaagaaccaattccaacagatcaagacgaaagaagttcggtcagtggcagccaaacaaaactatctcactctaatacatacaaacggtggctccgggttgctatctatacattctttgtcatttcaggccaatcagttgctacaattctgggcagactatactatgaaaatggaggaaacagcaaatggctagcaacggtagttcagcttgtaggctttcctattctacttccatatcatctcttgtcagtcaaaacacatacaacaactcagagagatggcaaattaacctcacttaggaaccgtgcattagtttacatagtgcttggacttcttgtaggagcagcttgctacctatattccattggactgctttacctacctgtttctaccctttccctgatctgtgcatcacagttagccttcaccgctttcttctcttatttactcaactcacaaaaacttactcctatcattttgaattctcttttcctcctcactatatcttccaccctccttgcatttaataacgaggaatcagattccaaaaaagttacaaaaggagagtatgtcaaaggtttcgtatgcaccgttggtgcatctgctgggtttggtctactcttatccctacaacagctagcctttcgtaaagttttaaagaagcaaactttctcagaagttataaatatgataatctacatgagtctagtggccagttgtgttagcgtggtggggctttttgctagtagcgagtggaaaactttgagcagtgaaatggaaaactacaaacttgggaaggtatcctatgtcatgaacctagtgtggacagctgttacctggcaggtattctccatcggttgcacaggactgatcttcgagctttcctccctattctcaaatgcaataagcgctttgggactccccgtggttcctatcctggctgtcatcattttccatgacaaaatgaacggcttaaaggtgatttctatgattctagctatttggggtttcgtatcctatgtctaccaacaatatcttgatgaaacaaacttgaagaaaagtaatgaaataccaacaacagaatcccctgaccgaccagaagcagaagggtcaagtgagcaatcaaaataa

SEQ ID NO: 97731 - protein, 390 aa, Arabidopsis thaliana
  peptide (1)..(390): Ceres Seq. ID no. 15222821
MKGDQEVQVIVQQGKEPIPTDQDERSSVSGSQTKLSHSNTYKRWLRVAIYTFFVISGQSVATILGRLYYENGGNSKWLATVVQLVGFPILLPYHLLSVKTHTTTQRDGKLTSLRNRALVYIVLGLLVGAACYLYSIGLLYLPVSTLSLICASQLAFTAFFSYLLNSQKLTPIILNSLFLLTISSTLLAFNNEESDSKKVTKGEYVKGFVCTVGASAGFGLLLSLQQLAFRKVLKKQTFSEVINMIIYMSLVASCVSVVGLFASSEWKTLSSEMENYKLGKVSYVMNLVWTAVTWQVFSIGCTGLIFELSSLFSNAISALGLPVVPILAVIIFHDKMNGLKVISMILAIWGFVSYVYQQYLDETNLKKSNEIPTTESPDRPEAEGSSEQSK

SEQ ID NO: 97732 - DNA, 2550 bp, Arabidopsis thaliana
  misc_feature (1)..(2550): Ceres Seq. ID no. 13504808
  misc_feature (1)..(2550): Ortholog of  Ceres SEQ ID NO 13593855 as cited in SEQ ID NO 53838
  misc_feature (1)..(2550): Ortholog of  Ceres SEQ ID NO 14302247 as cited in SEQ ID NO 62154
  misc_feature (1)..(2550): Ortholog of  Ceres SEQ ID NO 13539874 as cited in SEQ ID NO 64069
  misc_feature (1)..(2550): Ortholog of  Ceres SEQ ID NO 15224896 as cited in SEQ ID NO 0
aaaagaatttcctcgctctaccgccgccgtctctcttctctcagcaaggttgaatcatcagagaagaaagggttttacactgcggcgtaaaggatgaagcttgacgtgaatgtgttgagatatttatccaaagatgattttcgagttctcactgctgtcgagatgggaatgcgaaaccatgagattgttccttctgagcttgtggagcgcattgcttgtctaaaacatggaggcacctacaaggtcctgaagaacttgctcaagtataagcttttgcaccacgattcctctaaatatgatggattccgactcacctatctgggttatgactttcttgccattaaaacattggtcaaccggggtatatttaccggtgtcggtcgtcagattggtgttggtaaagagtcagacatatttgaggtcgctcaggaagatggaactattctagcaatgaagttacatagactagggagaacctcctttagggctgtcaaatctaagcgtgactacttgaggcatcgcagtagtttcagctggttgtatctctcccgacttgcagctctcaaggagtttgcttttatgaaggtgaagcaattacagaaccctgagacaattttcgagaagatcattggtattgttgttcgtttggctgagcatggtctaattcattgtgacttcaatgaattcaacatcatgattgatgatgaagagaaaataacgatgattgattttccacaaatggtatctgtttcacaccgaaatgcacaaatgtactttgaccgtgatatcgaatgcatcttcaagtttttcagaaaaaggtttaatatgtctttccatgaagataaaggtgaatcagaggagacggaggtggatgagaacagcagaccatcttttttcgatattactaaagatgctaatgctctggataaagatctagaagctagtgggttcacaagaaaggagcagactgacctcgataaatttattgaaggtggggtggagaagagtgaagattctgatgaggatgaggaatctgatgatgaagagcagacttgtgaatcaaacgaagaaggaaacctaaatgaaataaaatcattacagttgcaagacaaggagcaaaaaagttcagatggtgttgaggcagaagttgagttggataataccgagaacggtgaaagcaatggagatgaagatgaagtcggaagtaatgaggaggaggaagagaaagaggcagagctggagaaaaatttgggcaagatgatgagagatgttttcaggccgactaaatcagccccttgttctcctgcaaagccacttggtatctctcgcactcaatctgaatcatttcatgctattcacaaagttcctgtcggagacagtccttatgtcagagcaaagaatgttcagttagtggagaaggatccagagagagcaattcctctgttttggaaggctattaatgctggagatagagtggacagtgctttgaaagacatggctattgtgatgaagcaacaaaaccgcgctgaagaagccattgaagctattaaatcactcagagttagatgttcagatcaagctcaggaatctctcgacaatatcctcttagatctctacaagagatgtgggagattagatgaccagattggacttttgaaacataagctcttcttgatacagaaaggactcgctttcaatggtaaacgaaccaaaacagctagatctcaaggcaagaagtttcaagtctctgtggagcaagaagctactcggttactgggaaacttgggatgggctctgatgcaacgagacaactttgtggaagctgaagatgcatacagaagagctttatcaatagcaccagacaacaacaaaatgtgtaaccttggtatctgccttatgaagcaaggaaggatcgatgaggccaaagagactttacgacgtgtgaaacccgcggttgttgatggccctagaggcgtggattcacatctaaaagcttacgagagagcgcaacagatgctgaatgatcttggatctgagatgatgagaagaggaggagatgataaggttgaacaaagaaggctctttgatgcaatctttggatcttcctctatatggcaacctcagccttgtagtgagcagactgtgaaggctaaaccaaagcctggtttaagcaatggtgatggatacggtgatgagaacgtgaagatgagtgtgaatccagtagtagtaaacccattaagggttgatgcaaaaccgttcttctcttcgaagttggtcatcagtaacaacgagaagctgaagagaacgagatcgtcgagccaagggatggggatgttgagtggtattggtggtgatcatgagggagagacaaacacaagcacgagaaggagattgtcaatggagaagaaagcaacggagtgtggattaccagacaataaagactttgaagatgcgatcatggctgctgttttaggaacagaaaccaaagtggacaagaagaggctcaaggtgttccaggatatcactttgtgtctcaatcagagtctctaa

SEQ ID NO: 97733 - protein, 818 aa, Arabidopsis thaliana
  peptide (1)..(818): Ceres Seq. ID no. 13504809
MKLDVNVLRYLSKDDFRVLTAVEMGMRNHEIVPSELVERIACLKHGGTYKVLKNLLKYKLLHHDSSKYDGFRLTYLGYDFLAIKTLVNRGIFTGVGRQIGVGKESDIFEVAQEDGTILAMKLHRLGRTSFRAVKSKRDYLRHRSSFSWLYLSRLAALKEFAFMKVKQLQNPETIFEKIIGIVVRLAEHGLIHCDFNEFNIMIDDEEKITMIDFPQMVSVSHRNAQMYFDRDIECIFKFFRKRFNMSFHEDKGESEETEVDENSRPSFFDITKDANALDKDLEASGFTRKEQTDLDKFIEGGVEKSEDSDEDEESDDEEQTCESNEEGNLNEIKSLQLQDKEQKSSDGVEAEVELDNTENGESNGDEDEVGSNEEEEEKEAELEKNLGKMMRDVFRPTKSAPCSPAKPLGISRTQSESFHAIHKVPVGDSPYVRAKNVQLVEKDPERAIPLFWKAINAGDRVDSALKDMAIVMKQQNRAEEAIEAIKSLRVRCSDQAQESLDNILLDLYKRCGRLDDQIGLLKHKLFLIQKGLAFNGKRTKTARSQGKKFQVSVEQEATRLLGNLGWALMQRDNFVEAEDAYRRALSIAPDNNKMCNLGICLMKQGRIDEAKETLRRVKPAVVDGPRGVDSHLKAYERAQQMLNDLGSEMMRRGGDDKVEQRRLFDAIFGSSSIWQPQPCSEQTVKAKPKPGLSNGDGYGDENVKMSVNPVVVNPLRVDAKPFFSSKLVISNNEKLKRTRSSSQGMGMLSGIGGDHEGETNTSTRRRLSMEKKATECGLPDNKDFEDAIMAAVLGTETKVDKKRLKVFQDITLCLNQSL

SEQ ID NO: 97734 - protein, 795 aa, Arabidopsis thaliana
  peptide (1)..(795): Ceres Seq. ID no. 13504810
MGMRNHEIVPSELVERIACLKHGGTYKVLKNLLKYKLLHHDSSKYDGFRLTYLGYDFLAIKTLVNRGIFTGVGRQIGVGKESDIFEVAQEDGTILAMKLHRLGRTSFRAVKSKRDYLRHRSSFSWLYLSRLAALKEFAFMKVKQLQNPETIFEKIIGIVVRLAEHGLIHCDFNEFNIMIDDEEKITMIDFPQMVSVSHRNAQMYFDRDIECIFKFFRKRFNMSFHEDKGESEETEVDENSRPSFFDITKDANALDKDLEASGFTRKEQTDLDKFIEGGVEKSEDSDEDEESDDEEQTCESNEEGNLNEIKSLQLQDKEQKSSDGVEAEVELDNTENGESNGDEDEVGSNEEEEEKEAELEKNLGKMMRDVFRPTKSAPCSPAKPLGISRTQSESFHAIHKVPVGDSPYVRAKNVQLVEKDPERAIPLFWKAINAGDRVDSALKDMAIVMKQQNRAEEAIEAIKSLRVRCSDQAQESLDNILLDLYKRCGRLDDQIGLLKHKLFLIQKGLAFNGKRTKTARSQGKKFQVSVEQEATRLLGNLGWALMQRDNFVEAEDAYRRALSIAPDNNKMCNLGICLMKQGRIDEAKETLRRVKPAVVDGPRGVDSHLKAYERAQQMLNDLGSEMMRRGGDDKVEQRRLFDAIFGSSSIWQPQPCSEQTVKAKPKPGLSNGDGYGDENVKMSVNPVVVNPLRVDAKPFFSSKLVISNNEKLKRTRSSSQGMGMLSGIGGDHEGETNTSTRRRLSMEKKATECGLPDNKDFEDAIMAAVLGTETKVDKKRLKVFQDITLCLNQSL

SEQ ID NO: 97735 - protein, 793 aa, Arabidopsis thaliana
  peptide (1)..(793): Ceres Seq. ID no. 13504811
MRNHEIVPSELVERIACLKHGGTYKVLKNLLKYKLLHHDSSKYDGFRLTYLGYDFLAIKTLVNRGIFTGVGRQIGVGKESDIFEVAQEDGTILAMKLHRLGRTSFRAVKSKRDYLRHRSSFSWLYLSRLAALKEFAFMKVKQLQNPETIFEKIIGIVVRLAEHGLIHCDFNEFNIMIDDEEKITMIDFPQMVSVSHRNAQMYFDRDIECIFKFFRKRFNMSFHEDKGESEETEVDENSRPSFFDITKDANALDKDLEASGFTRKEQTDLDKFIEGGVEKSEDSDEDEESDDEEQTCESNEEGNLNEIKSLQLQDKEQKSSDGVEAEVELDNTENGESNGDEDEVGSNEEEEEKEAELEKNLGKMMRDVFRPTKSAPCSPAKPLGISRTQSESFHAIHKVPVGDSPYVRAKNVQLVEKDPERAIPLFWKAINAGDRVDSALKDMAIVMKQQNRAEEAIEAIKSLRVRCSDQAQESLDNILLDLYKRCGRLDDQIGLLKHKLFLIQKGLAFNGKRTKTARSQGKKFQVSVEQEATRLLGNLGWALMQRDNFVEAEDAYRRALSIAPDNNKMCNLGICLMKQGRIDEAKETLRRVKPAVVDGPRGVDSHLKAYERAQQMLNDLGSEMMRRGGDDKVEQRRLFDAIFGSSSIWQPQPCSEQTVKAKPKPGLSNGDGYGDENVKMSVNPVVVNPLRVDAKPFFSSKLVISNNEKLKRTRSSSQGMGMLSGIGGDHEGETNTSTRRRLSMEKKATECGLPDNKDFEDAIMAAVLGTETKVDKKRLKVFQDITLCLNQSL

SEQ ID NO: 97736 - DNA, 1821 bp, Arabidopsis thaliana
  misc_feature (1)..(1821): Ceres Seq. ID no. 13504843
  misc_feature (1)..(1821): Ortholog of  Ceres SEQ ID NO 13582619 as cited in SEQ ID NO 56520
  misc_feature (1)..(1821): Ortholog of  Ceres SEQ ID NO 13660872 as cited in SEQ ID NO 60830
atctccttcttctccactttaccaaatcgtgtcaaattttagggttttttcttttcgtacttcatcaaattctggaatctggttttttcttagttttcttctatatacctttgaatcgcatctttgatccaaattcattttagatatcaccttgaagtcgaatttgtgattttttcttttcctctcgaattctcaaagtctcacgcaactatgaaagaagacatggaagtactatcgctcgcttcactaccggttgggttcagatttagtccaacggacgaagagttagtccggtactatctccggctcaagatcaacggtcacgataacgacgttagagtaattcgtgagatcgatatctgcaaatgggagccttgggatttgcctgatttttctgtggtgaagacaacagactcagagtggctcttcttttgtcctttggaccggaaatatccgagtggaagtcgaatgaatagagctactgtggctggatactggaaggcgacgggaaaagaccgtaagatcaaatcaggaaagactaagattataggtgttaagaggactctagtgttttatacaggtcgtgctcctaaagggacacgaacttgttggattatgcatgagtatcgtgctactgagaaggatcttgatggaacaaagtctggccagaatccgtttgttgtttgtaagttgtttaagaagcaagatattgtgaacggagctgctgaaccagaagagtcaaagtcatgtgaagttgaaccagcggtatcgtctccaactgttgtggacgaggttgaaatgtctgaggtatctcctgttttccctaaaacagaagagactaatccttgtgacgtcgcagagtcttctcttgtaatccccagcgaatgtcgtagtggatactctgtccctgaggttacaaccaccgggcttgacgatatcgattggctctcgtttatggagtttgattccccgaagctgttctctccgttgcactctcaggtgcaatctgagctcggttcctctttcaatggcttacaatctgagtctagtgaattgttcaaaaaccacaatgaggattacattcagactcagtacggtacaaatgatgcggatgaatatatgtccaagttcttggattcttttcttgacattccctatgagccagaacagatcccatatgagccacagaatcttagctcatgcaacaagatcaatgatgaatctaagagaggaattaagattagagctcgacgagcacaagccccgggttgtgctgagcagtttgtaatgcagggcgatgcctcaagaaggctgcgtcttcaggttaaccttaacagccacaagtcagaaactgacagtacacaacttcaatttatcaagaaagaggttaaggacacaacaacggaaactatgacgaaaggatgtggaaatttcacaagatcaaagagcaggactagtttcatattcaagaaaattgcagccatgggatgttcatacagagggcttttcagagtcggtgtggtagcggttgtgtgtgtgatgtcggtctgcagtctagtcgcataaatccgctgaatgtgatgtttgttccgatcaattcatatagtaagaataaagaaagtggtttttacgggtggagagagcgcggatttgtgtgtataacaggggttttggcctggttctgcatctgttgttattgttgttgtttttgtcggcttaagcttaaccatggtcggtttaggagtgtagtagacttgtagttaacatgtacgacgactcataatattcagatggtaatgtttggaaatttttttattcctg

SEQ ID NO: 97737 - protein, 451 aa, Arabidopsis thaliana
  peptide (1)..(451): Ceres Seq. ID no. 13504844
MKEDMEVLSLASLPVGFRFSPTDEELVRYYLRLKINGHDNDVRVIREIDICKWEPWDLPDFSVVKTTDSEWLFFCPLDRKYPSGSRMNRATVAGYWKATGKDRKIKSGKTKIIGVKRTLVFYTGRAPKGTRTCWIMHEYRATEKDLDGTKSGQNPFVVCKLFKKQDIVNGAAEPEESKSCEVEPAVSSPTVVDEVEMSEVSPVFPKTEETNPCDVAESSLVIPSECRSGYSVPEVTTTGLDDIDWLSFMEFDSPKLFSPLHSQVQSELGSSFNGLQSESSELFKNHNEDYIQTQYGTNDADEYMSKFLDSFLDIPYEPEQIPYEPQNLSSCNKINDESKRGIKIRARRAQAPGCAEQFVMQGDASRRLRLQVNLNSHKSETDSTQLQFIKKEVKDTTTETMTKGCGNFTRSKSRTSFIFKKIAAMGCSYRGLFRVGVVAVVCVMSVCSLVA

SEQ ID NO: 97738 - protein, 447 aa, Arabidopsis thaliana
  peptide (1)..(447): Ceres Seq. ID no. 13504845
MEVLSLASLPVGFRFSPTDEELVRYYLRLKINGHDNDVRVIREIDICKWEPWDLPDFSVVKTTDSEWLFFCPLDRKYPSGSRMNRATVAGYWKATGKDRKIKSGKTKIIGVKRTLVFYTGRAPKGTRTCWIMHEYRATEKDLDGTKSGQNPFVVCKLFKKQDIVNGAAEPEESKSCEVEPAVSSPTVVDEVEMSEVSPVFPKTEETNPCDVAESSLVIPSECRSGYSVPEVTTTGLDDIDWLSFMEFDSPKLFSPLHSQVQSELGSSFNGLQSESSELFKNHNEDYIQTQYGTNDADEYMSKFLDSFLDIPYEPEQIPYEPQNLSSCNKINDESKRGIKIRARRAQAPGCAEQFVMQGDASRRLRLQVNLNSHKSETDSTQLQFIKKEVKDTTTETMTKGCGNFTRSKSRTSFIFKKIAAMGCSYRGLFRVGVVAVVCVMSVCSLVA

SEQ ID NO: 97739 - protein, 365 aa, Arabidopsis thaliana
  peptide (1)..(365): Ceres Seq. ID no. 13504846
MNRATVAGYWKATGKDRKIKSGKTKIIGVKRTLVFYTGRAPKGTRTCWIMHEYRATEKDLDGTKSGQNPFVVCKLFKKQDIVNGAAEPEESKSCEVEPAVSSPTVVDEVEMSEVSPVFPKTEETNPCDVAESSLVIPSECRSGYSVPEVTTTGLDDIDWLSFMEFDSPKLFSPLHSQVQSELGSSFNGLQSESSELFKNHNEDYIQTQYGTNDADEYMSKFLDSFLDIPYEPEQIPYEPQNLSSCNKINDESKRGIKIRARRAQAPGCAEQFVMQGDASRRLRLQVNLNSHKSETDSTQLQFIKKEVKDTTTETMTKGCGNFTRSKSRTSFIFKKIAAMGCSYRGLFRVGVVAVVCVMSVCSLVA

SEQ ID NO: 97740 - DNA, 1568 bp, Arabidopsis thaliana
  misc_feature (1)..(1568): Ceres Seq. ID no. 13504989
  misc_feature (1)..(1568): Ortholog of  Ceres SEQ ID NO 14302287 as cited in SEQ ID NO 68134
  misc_feature (1)..(1568): Ortholog of  Ceres SEQ ID NO 14309328 as cited in SEQ ID NO 0
tttctgtcattttgatcagatccaagaaaccaaaagagtaaaacaaacacagagaagcttcttcttaaacgatgccgtactataccagagatgacaacgacgtcgacgatttcgatgagtttgatccaacgccgtacagtggtggttacgacatcacggtgatctacggccgtccgattccaccttccgatgagacttgttatcctctctcatctggtgtcgatgatgatttcgaatacgagagacctgaatttactcagatccatgagccttctgcttacggtgatgaagctcttaacacagagtacagtagctattctcgacccaagccacgacccgcatttcgacccgattcaggtggtggtggtcatgttcaaggtgaaagaccaaatcctggttatggatctgaatccggttatgggaggaaaccggaatctgagtacggatctggctatggtggacaaacggaggtggagtatggtcggagacctgagcagagttatggatctggttatggtggaaggacggagactgaatcggagtatggatctggtggtggtggaagaactgaggttgagtatggtaggagacctgaatcagggcttggatctggttatggtgggagatcggagtctgagtatgagcgtaagcctagctatggaaggtctgaggaacaagaagaaggttataggaagcctagctatggaagatctgaagaacaagaggaaggttacaggaagccaagttatggaagatctgaggagcaggaagaaggatatagaaagcctagctatggaagatctgaggaggaacaagaggaaggttataggaagcctagctatggaagatctgaggaacaagaggaaggaagttacaggaaacctagttatgggaggtctgatgatcaggtggagagttacattaagcctagctatggaagatctgaggaacaggaggagggaagttacaggaagcctagttatgggaggtctgaggaacaggaagaggggagttacaggaagcagcctagctatggccgtggcaatgacgatgatgatgatgagcagcgtaggaaccgttctggttctggtgatgatgaggaagggagctatggccgcaagaaatatggtggcaatgactctgatgaggatgaggagaagaagaagcaccgtcacaagcatcaccaccagaagcgtcgtgacgaagacgatgagtaaactaaaccctctctgtgctagagagtgtaatgagaatgtgtgtttgcttagcctcaaaaatctactaaataaagagctaagtcacatacctttctacataatatcttccgacgttggtgttgtgtttgtttgaatctctgtattattactacagagtcttcgtactggttcataataagacctttaagtggtattgggtcaccatgtaactgttgctactctgtttcgttttctatctatcgttttgtgttatgatttacttttctatccttatataattatgatgatcatttcgtgtaatatcagaatgttttttgcatgaattggaattagatggaaactttgtttaag

SEQ ID NO: 97741 - protein, 386 aa, Arabidopsis thaliana; identical to SEQ ID NO: 25082
  peptide (1)..(386): Ceres Seq. ID no. 13504990

SEQ ID NO: 97742 - protein, 381 aa, Arabidopsis thaliana; identical to SEQ ID NO: 25083
  peptide (1)..(381): Ceres Seq. ID no. 13504991

SEQ ID NO: 97743 - protein, 375 aa, Arabidopsis thaliana; identical to SEQ ID NO: 25084
  peptide (1)..(375): Ceres Seq. ID no. 13504992

SEQ ID NO: 97744 - DNA, 1051 bp, Arabidopsis thaliana
  misc_feature (1)..(1051): Ceres Seq. ID no. 13505015
  misc_feature (1)..(1051): Ortholog of  Ceres SEQ ID NO 13595072 as cited in SEQ ID NO 55971
atcaataccaaaccacccatttcttggcttacaacaacaaatcttaaacgttttactttgtgctgcactactcaacctcaatggccgcctcaacaatggctctctcctcccctgccttcgccggtaaggccgtcaagctttcccccgcggcatctgaagtccttggaagcggccgtgtgacaatgaggaagactgttgccaagccaaagggcccatcaggcagcccatggtacggatctgaccgtgtcaagtacttgggtccattctctggcgaatcaccgagctaccttaccggagagttccccggagactacggatgggacaccgccggactttcagctgaccccgagacattcgcaaggaaccgtgaactagaagttatccacagcaggtgggccatgctcggagccctaggctgcgtcttccctgagcttttggctagaaacggagtcaagttcggagaggcggtttggttcaaggccggttcacagatcttcagcgatggagggctcgattacttgggaaaccctagcttggttcacgctcagagcattttggccatttgggccacacaagttattttgatgggagccgttgaaggctacagagtcgcaggaaatgggccattgggagaggccgaggacttgctttaccccggtggcagcttcgacccattgggtttggctaccgacccagaggcattcgctgagttgaaggtgaaggagctcaagaacggaagattggctatgttctctatgtttggattcttcgttcaagccatcgtcactggtaagggaccgatagagaaccttgctgaccatttggccgatccagttaacaacaacgcatgggccttcgccaccaactttgttcccggaaagtgagccaagttttatctgtattttgcttcagtctttgcttcgtgagtgtgagaggagaaagagagcttgtttagatgtaaaatttgcaagactttgtatttttttcattaatcaaataactcgtttttctctcaaattatctggcaattaccaaattggattcgttttat

SEQ ID NO: 97745 - protein, 267 aa, Arabidopsis thaliana; identical to SEQ ID NO: 22639
  peptide (1)..(267): Ceres Seq. ID no. 13505016

SEQ ID NO: 97746 - protein, 262 aa, Arabidopsis thaliana; identical to SEQ ID NO: 22640
  peptide (1)..(262): Ceres Seq. ID no. 13505017

SEQ ID NO: 97747 - protein, 233 aa, Arabidopsis thaliana; identical to SEQ ID NO: 21214
  peptide (1)..(233): Ceres Seq. ID no. 13505018

SEQ ID NO: 97748 - DNA, 1597 bp, Arabidopsis thaliana
  misc_feature (1)..(1597): Ceres Seq. ID no. 13508963
  misc_feature (1)..(1597): Ortholog of  Ceres SEQ ID NO 13597334 as cited in SEQ ID NO 64244
  misc_feature (1)..(1597): Ortholog of  Ceres SEQ ID NO 14303165 as cited in SEQ ID NO 65181
  misc_feature (1)..(1597): Ortholog of  Ceres SEQ ID NO 15224550 as cited in SEQ ID NO 0
acccagtctggagtctggccattgggattaaactaacttctcattctcattccaccttcttcttctttgttcttgtgtgctactaaaaatcaagaaagcacaaggagacaaataaacctatccatttcattaccaaacaagccgtacattctctagttatggcttcttcttcttcttcttcttcaactacttcaaccatcacatccaaatttattgggcttatgcttcttctctctcttcaactagacttattactcggatcagctattcatcttaaaaaccaaacttcattcagacccaacagggagattcagaagcttagaagagtggaagcatatctcagcaaaatcaacaaaccttccatcaaaacaatccacagcccagacggagatgtaatagaatgtgtaccgtctcatttacaacccgcatttgatcatcctcagctacaaggccagaaaccacttgactcaccttacaggccaagtaaaggaaatgaaacaacatatgaggaaagttttaatcagttatggagtatgtccggtgaaagttgtccaattgggtcaataccaattagaaaaacaacaaagaatgatgttttaagggcaaattcagttcgacggtttggtcggaaattaagaagacccattagacgagattcatccggaggtggtcacgagcatgcggtggtgtttgtaaatggagaacaatactatggagctaaagcaagcattaacgtgtgggcgccacgtgtcactgatgcttatgagtttagtttatctcagatttggctcatctctggatcctttggtcatgacctaaacaccattgaagctggttggcaggttagtcctgaactatacggagataattatccaagattcttcacatattggacgactgatgcataccaagcaactgggtgctacaatttactctgctctggattcgtacaaaccaacaataaaattgcaattggtgcagcgatttccccgaggtcctcttataatggaagacagtttgatatcggtttaatgatttggaaggatccaaaacatgggcactggtggcttgaactagggaatggacttcttgtgggatactggccagctttcttgttcagtcacttgaggagtcatgcaagtatggtacaatttggcggcgaagttgtgaacagccgatcaagcggtgctcacaccggaacacagatgggaagcggccatttcgcagatgaagggtttgagaaagctgcctactttaggaatttacaagttgttgactgggacaacaatctcttgcctctgaagaatctccatgtcttggccgatcaccccgcttgttatgacatcagacaaggcaaaaacaatgtatgggggacttatttttactatggagggcctggtcggaacccaaggtgtccttgactcacccaaacagaaatataaaaaatatttgatgtgaatttatgttatttttctgttactagattttttatttcttcttagatttttttttttttggtgtttgtaaggctgttactaataaaacagtttgtggttctactgtatttttttgacgtgatgaaatagataacttttat

SEQ ID NO: 97749 - protein, 420 aa, Arabidopsis thaliana
  peptide (1)..(420): Ceres Seq. ID no. 13508964
MASSSSSSSTTSTITSKFIGLMLLLSLQLDLLLGSAIHLKNQTSFRPNREIQKLRRVEAYLSKINKPSIKTIHSPDGDVIECVPSHLQPAFDHPQLQGQKPLDSPYRPSKGNETTYEESFNQLWSMSGESCPIGSIPIRKTTKNDVLRANSVRRFGRKLRRPIRRDSSGGGHEHAVVFVNGEQYYGAKASINVWAPRVTDAYEFSLSQIWLISGSFGHDLNTIEAGWQVSPELYGDNYPRFFTYWTTDAYQATGCYNLLCSGFVQTNNKIAIGAAISPRSSYNGRQFDIGLMIWKDPKHGHWWLELGNGLLVGYWPAFLFSHLRSHASMVQFGGEVVNSRSSGAHTGTQMGSGHFADEGFEKAAYFRNLQVVDWDNNLLPLKNLHVLADHPACYDIRQGKNNVWGTYFYYGGPGRNPRCP

SEQ ID NO: 97750 - protein, 399 aa, Arabidopsis thaliana
  peptide (1)..(399): Ceres Seq. ID no. 13508965
MLLLSLQLDLLLGSAIHLKNQTSFRPNREIQKLRRVEAYLSKINKPSIKTIHSPDGDVIECVPSHLQPAFDHPQLQGQKPLDSPYRPSKGNETTYEESFNQLWSMSGESCPIGSIPIRKTTKNDVLRANSVRRFGRKLRRPIRRDSSGGGHEHAVVFVNGEQYYGAKASINVWAPRVTDAYEFSLSQIWLISGSFGHDLNTIEAGWQVSPELYGDNYPRFFTYWTTDAYQATGCYNLLCSGFVQTNNKIAIGAAISPRSSYNGRQFDIGLMIWKDPKHGHWWLELGNGLLVGYWPAFLFSHLRSHASMVQFGGEVVNSRSSGAHTGTQMGSGHFADEGFEKAAYFRNLQVVDWDNNLLPLKNLHVLADHPACYDIRQGKNNVWGTYFYYGGPGRNPRCP

SEQ ID NO: 97751 - protein, 295 aa, Arabidopsis thaliana
  peptide (1)..(295): Ceres Seq. ID no. 13508966
MSGESCPIGSIPIRKTTKNDVLRANSVRRFGRKLRRPIRRDSSGGGHEHAVVFVNGEQYYGAKASINVWAPRVTDAYEFSLSQIWLISGSFGHDLNTIEAGWQVSPELYGDNYPRFFTYWTTDAYQATGCYNLLCSGFVQTNNKIAIGAAISPRSSYNGRQFDIGLMIWKDPKHGHWWLELGNGLLVGYWPAFLFSHLRSHASMVQFGGEVVNSRSSGAHTGTQMGSGHFADEGFEKAAYFRNLQVVDWDNNLLPLKNLHVLADHPACYDIRQGKNNVWGTYFYYGGPGRNPRCP

SEQ ID NO: 97752 - DNA, 1291 bp, Arabidopsis thaliana
  misc_feature (1)..(1291): Ceres Seq. ID no. 13509025
  misc_feature (1)..(1291): Ortholog of  Ceres SEQ ID NO 14312208 as cited in SEQ ID NO 54845
  misc_feature (1)..(1291): Ortholog of  Ceres SEQ ID NO 13597613 as cited in SEQ ID NO 65334
  misc_feature (1)..(1291): Ortholog of  Ceres SEQ ID NO 14303664 as cited in SEQ ID NO 65892
  misc_feature (1)..(1291): Ortholog of  Ceres SEQ ID NO 15178832 as cited in SEQ ID NO 0
cagacacttacccacaaaatattcctctcggcgatgatccctttctgctgaatttttagtcctttgtcgctcgactgttttcttcgtctactatttgttccttttggatattcttcggacttttcgttgatttgattttcaagagagagagtttgaacaaggaaggattgaactatggaagatgcatcagagactagctactggtgtcacatgtgctcccgatcggtgattccattgattcaagacgaaatcatcaaatgcaatttctgtcaaagtggttttgttgaagaaatggataataatgatgaccatcaggctgctgattctctctggactcctatcttgatggagatgatgaacaacaatcacgaccaacattctaccaatcaggaagactcagaatctattcttgaagatgaagacgaagacgaagatgatggtgatgatggtgatcagaacaatgatggagaaattgatataactcatcaacttgaagagattaggaggataaggactagacattcaactgctattgttaatctgcttcaggggattcgagctggattattgatcgaatccgagaacaacgaggataatcccgataatagcgagcttgtcgtcttgatcaactcatttaaccaaaggatcagggttcatcaagattctgtagacaccacttctgttccttctggatctttgggtgactatttcattggacctggattcgagacgttgcttcagcgtttggctgagaatgatctgaacaacaggtatgggacacctccagctacaaaagaagcggttgaggcattggcgatggtgaaaatcgaagatagtttgttgcagtgtagtgtgtgtttggatgattttgagattggaatggaggctaaagagatgccgtgtaagcataagtttcatagtgactgcttgttgccatggcttgagcttcatagctcatgccctgtttgcagatatctgcttcctacaggagatgatgatgagccaaagactgatgcagaaacatcgagaaacgatgataacaatgaagatatcagtaatgcttctatggctagtaatggatcatcaccagactcaagttcgaacaattcatcggttaactaaactaaggctcactatctgagacaggtttacttgaacagaggagaactgatgggatcgtttgagatcagtctttagtgtttaatgttatttggtttgcacatagtttctcagatttggtggaaaatgtattctttggaattaattaacagtcttttttttttttgacttt

SEQ ID NO: 97753 - protein, 315 aa, Arabidopsis thaliana; identical to SEQ ID NO: 42008
  peptide (1)..(315): Ceres Seq. ID no. 13509026

SEQ ID NO: 97754 - protein, 303 aa, Arabidopsis thaliana; identical to SEQ ID NO: 42009
  peptide (1)..(303): Ceres Seq. ID no. 13509027

SEQ ID NO: 97755 - protein, 276 aa, Arabidopsis thaliana; identical to SEQ ID NO: 42010
  peptide (1)..(276): Ceres Seq. ID no. 13509028

SEQ ID NO: 97756 - DNA, 1037 bp, Arabidopsis thaliana
  misc_feature (1)..(1037): Ceres Seq. ID no. 13509334
  misc_feature (1)..(1037): Ortholog of  Ceres SEQ ID NO 13595497 as cited in SEQ ID NO 51127
  misc_feature (1031)..(1031): n is a, c, t, g, unknown, or other
ctcctttgtctcgcttttttcttttgttctttcacatgtgtatatacacacagaacacacacttacatttctattatcatataaatcttcaactttaccttttatcttccaaaaaaaacactatcttcttcatcaaattctcttgattctgtttctttttatcctcctccatggccctctcacctaattcaagctctttagatttaacaatctcaattccgagcttctctccatctccttcacttggtgatcatcacgggatgagagattttgacataaaccaaacaccaaagacggaagaagatcgtgagtggatgatcggtgcaacaccacatgtcaacgaagatgatagcaactcgggtggccggcggcgcaaaaagctccgtctaacgaaagaacaatcacatcttcttgaagagagtttcatacaaaaccataccttaacccctaagcaaaaaaaagatttggccacctttttgaagcttagtcaaaggcaagttgaggtgtggtttcaaaatcgaagagctcggagtaagctaaagcacacggaaatggaatgtgagtatctaaaaagatggttcggatcgttgaaggaacaaaatcgacggctacaaatagaagttgaagaactacgagcgctaaagccatcatcgacctcggctttaaccatgtgtcctcggtgtgaacgtgtgactgatgcagtagataatgactctaatgccgttcaagagggggcagttcttagcagccggtcacggatgacaatttcctcttcctcttccctctgttgactggtttggtcgaagtcaaaagtcaaaagataaacgcctgtttcggggtaaaaagcaaagatttgatgatgattaggaggattttgtgtatagtttgctaattatttattacaaatttacaaaccagtgaggaaaaaagataatttaattctcgatctttaattagctttttgtgttatttattcataattttatttttcgtgtttaaccaaaaaatagacaaaacaaatattgcttttngtgttc

SEQ ID NO: 97757 - protein, 206 aa, Arabidopsis thaliana; identical to SEQ ID NO: 44156
  peptide (1)..(206): Ceres Seq. ID no. 13509335

SEQ ID NO: 97758 - protein, 176 aa, Arabidopsis thaliana; identical to SEQ ID NO: 44157
  peptide (1)..(176): Ceres Seq. ID no. 13509336

SEQ ID NO: 97759 - protein, 158 aa, Arabidopsis thaliana; identical to SEQ ID NO: 44158
  peptide (1)..(158): Ceres Seq. ID no. 13509337

SEQ ID NO: 97760 - DNA, 3067 bp, Arabidopsis thaliana
  misc_feature (1)..(3067): Ceres Seq. ID no. 13509389
  misc_feature (1)..(3067): Ortholog of  Ceres SEQ ID NO 14303366 as cited in SEQ ID NO 54418
  misc_feature (1)..(3067): Ortholog of  Ceres SEQ ID NO 13503610 as cited in SEQ ID NO 62416
  misc_feature (1)..(3067): Ortholog of  Ceres SEQ ID NO 13657610 as cited in SEQ ID NO 66165
  misc_feature (1)..(3067): Ortholog of  Ceres SEQ ID NO 13598312 as cited in SEQ ID NO 68448
  misc_feature (1)..(3067): Ortholog of  Ceres SEQ ID NO 13596100 as cited in SEQ ID NO 68573
aatcataggcatagcaaaactcttccaaaatgtctgatttctcgagctccgtgaagcttaaatatgttaaactcggttaccaataccttatcaacaacttccttactcttcttttgattccagtcatagcaaccgtcgccatcgagcttctccgaatgggtcctcgagcgatcaggtctaggagaagagacttgtctccatccagctattcattacatccctccaactccaaccatggaatccgcaagaaacgaggcccaaatggttatcttcaccgccatggaagatctcttcaagaatacaggtcttaaacctaaagacatcgacatcctcattgttaattgctctctgttctcaccaacgccgtctctctccgctatgattatcaacaagtacaagcttaggagtaacatcaaaagctataacctttccgggatgggatgcagcgctagtcttatctcagttgatgtagcacgtgatttgttacaagtccatcctaactccaacgcaatcataattagcactgagatcattactcctaattactataagggtaatgagagagccatgttgctcccaaactgcctcttccgtatgggaggcgccgccattctcctctctaaccgcagatccgacaggtggcgagctaagtacaagttatgccaccttgttaggacccatcgcggtgcggatgacaaatcctacaactgtgttatggaacaggaagacaaaaatggtaacgtgggaatcaacttgtctaaagatctcatgaccattgccggagaagccttgaaagctaatatcactaccataggtcctttggtccttccggcatcggagcagcttctcttcctctcatcccttatcggacgtaaaatcttcaatccaaagtggaagccgtacataccagatttcaagcaggccttcgagcatttctgcatccacgcaggaggaagagcggtgattgatgagctgcaaaagaatctacagctgtcgggagaacacgtggaagcttcaagaatgacactacataggtttggtaatacatcgtcgtcatcattatggtatgagcttagctacatagaggctcaagggagaatgaagagaaacgatagggtttggcagatcgctttcggaagtggattcaagtgtaactccgccgtttggaaatgtaaccgtacgatcaagacaccaacggatggagcgtggtcggattgtatcgaacgataccctgtctttatccctgaagttgttaaactatgaaaatactttttttttatccttgaagttgttgaactatgaaaacacttttaaaagattgggaaaatagagaaaactgcaaaagacgataagatacaacacatgttctaataactgcgtcaactttttcatttggtgtattttattctttatactttctaatgatgtgatttgtgatgtatgaaatactaaaattttatttctaaaaaaaaaaaaaaactctccagggttggatcctctctggtctctgtaacttgcaagcttcccatcaatggcttctcctttgtcttcttccaccgtcgtctctcaccgccttttttttctccatccttcacctctcaatcgcaaattcctcttcgtaaaacccaaattaccctttaatcgaaccaattccggagatttccgcatgcgtctgcattctacatccagtaaaactggcactaaggaacttatacattcctgcaattcttcaattgattcgaagttgaacacttttgaagctggatctaaaaacctcgagaaattggttgcaacgatattgatatttgttcaagtatggtctccattgcccttgtttggtctagactctgcttacatttcacctgcagaggcagttctttactctccggacactaaagttccaagaactggagaacttgctctaagaagggctatacctgctaatccaagcatgaagataatacaggcttcgttggaagatatatcatatcttctcagaattcctcaaaggaagccttacggtaccatggagagcaatgtaaagaaagctttaaaggtggctatagatgataaggataagatcttggctagtataccagtagacttaaaagacaagggctcagaactgtatacaactctgattgatggaaagggtggactacaagcacttataacgtctattaagaaacaagatcctgataaagtgtcccttgggctggcagcatcactagatactgttgcggatctggagttattacaggcatctgggttgtcatttctacttcctcagcagtacttaaactatcccaggttagcaggaagaggaactgtggaaatcaccattgagaaagctgatggttcgactttttcagctgaagctggaggtgatcaaagaaagagtgctacagtacagatcgttatagatggatattcagcacctctaaccgcagggaattttgcaaaactggtaactagcggtgcatatgatggagccaaactcaatactgtaaaccaggctgttatcacagaggatgggagtggtaaggtggagagtgttagtgttccattggaagtaatgccttctggacaattcgaacctctctacagaacgccattgagtgtccaggatggggagttaccagtgcttcctttatcggtttatggagctgtagcaatggcgcacagcgaaaactcagaagaatactcttctccttaccaattcttcttctacctatacgataaaagaaactctggcttaggaggattatcctttgacgaaggacagttctcggtcttcggatacacaatagcaggaaaagatattctcgggcagatcaagactggagatatcatcaaatctgcaaaactaattgaaggccaagaccgccttagtttgcctgttcaaaacaacaacatcaacgaatccacttgattctttttctttctttacatccaaaacgttctaagactttcttgtccataaacagagtgctaagagtttcaactctctgcaattgggtatgattcttattggatttccaacattacaagaaaaagaaaagctttg

SEQ ID NO: 97761 - protein, 466 aa, Arabidopsis thaliana
  peptide (1)..(466): Ceres Seq. ID no. 13509390
MASPLSSSTVVSHRLFFLHPSPLNRKFLFVKPKLPFNRTNSGDFRMRLHSTSSKTGTKELIHSCNSSIDSKLNTFEAGSKNLEKLVATILIFVQVWSPLPLFGLDSAYISPAEAVLYSPDTKVPRTGELALRRAIPANPSMKIIQASLEDISYLLRIPQRKPYGTMESNVKKALKVAIDDKDKILASIPVDLKDKGSELYTTLIDGKGGLQALITSIKKQDPDKVSLGLAASLDTVADLELLQASGLSFLLPQQYLNYPRLAGRGTVEITIEKADGSTFSAEAGGDQRKSATVQIVIDGYSAPLTAGNFAKLVTSGAYDGAKLNTVNQAVITEDGSGKVESVSVPLEVMPSGQFEPLYRTPLSVQDGELPVLPLSVYGAVAMAHSENSEEYSSPYQFFFYLYDKRNSGLGGLSFDEGQFSVFGYTIAGKDILGQIKTGDIIKSAKLIEGQDRLSLPVQNNNINEST

SEQ ID NO: 97762 - protein, 421 aa, Arabidopsis thaliana
  peptide (1)..(421): Ceres Seq. ID no. 13509391
MRLHSTSSKTGTKELIHSCNSSIDSKLNTFEAGSKNLEKLVATILIFVQVWSPLPLFGLDSAYISPAEAVLYSPDTKVPRTGELALRRAIPANPSMKIIQASLEDISYLLRIPQRKPYGTMESNVKKALKVAIDDKDKILASIPVDLKDKGSELYTTLIDGKGGLQALITSIKKQDPDKVSLGLAASLDTVADLELLQASGLSFLLPQQYLNYPRLAGRGTVEITIEKADGSTFSAEAGGDQRKSATVQIVIDGYSAPLTAGNFAKLVTSGAYDGAKLNTVNQAVITEDGSGKVESVSVPLEVMPSGQFEPLYRTPLSVQDGELPVLPLSVYGAVAMAHSENSEEYSSPYQFFFYLYDKRNSGLGGLSFDEGQFSVFGYTIAGKDILGQIKTGDIIKSAKLIEGQDRLSLPVQNNNINEST

SEQ ID NO: 97763 - protein, 342 aa, Arabidopsis thaliana
  peptide (1)..(342): Ceres Seq. ID no. 13509392
MESARNEAQMVIFTAMEDLFKNTGLKPKDIDILIVNCSLFSPTPSLSAMIINKYKLRSNIKSYNLSGMGCSASLISVDVARDLLQVHPNSNAIIISTEIITPNYYKGNERAMLLPNCLFRMGGAAILLSNRRSDRWRAKYKLCHLVRTHRGADDKSYNCVMEQEDKNGNVGINLSKDLMTIAGEALKANITTIGPLVLPASEQLLFLSSLIGRKIFNPKWKPYIPDFKQAFEHFCIHAGGRAVIDELQKNLQLSGEHVEASRMTLHRFGNTSSSSLWYELSYIEAQGRMKRNDRVWQIAFGSGFKCNSAVWKCNRTIKTPTDGAWSDCIERYPVFIPEVVKL

SEQ ID NO: 97764 - DNA, 1423 bp, Arabidopsis thaliana
  misc_feature (1)..(1423): Ceres Seq. ID no. 13509490
  misc_feature (1)..(1423): Ortholog of  Ceres SEQ ID NO 15171386 as cited in SEQ ID NO 51479
atgggttttatgtttactagttgtttttgctgtttgttcttaaatttagagtaacaatatcaaaaaggacaaatcttgatattgctttgattgctgttgtgtatgtatgtgtttttatagtgagagaagaaaaaaaagcacaatctttgaatggactggaatttcaaacttagctctggttatttatctggattcgatcaagaaccagatttatcaccaatggatggttcgatctcgtttggtgggtcgtcacagtcaaaagcggatttttcatttgatctaaaacttggaagaaacattggaaactcttcctctgtttttggtgatacagagcaagtgattagtcttagtaagtggaaagatagtgctttagctaaaccagaaggttcaagaagctcgagttcaaagagaacaagagggaatggtgttggaaccaaccagatgccgatttgtcttgttgatggatgtgattctgattttagtaattgtagagagtatcataagagacataaagtttgtgatgttcattcaaaaactcctgtggttactattaatggtcataaacagaggttttgtcaacaatgcagcaggtttcatgctttggaggagtttgatgaagggaagagaagttgtaggaaacgtcttgatggacataatcgaagacgacggaagccgcagcctgaacatatcggtcgtcctgccaacttctttacgggttttcaaggtagcaaattgctagagttttctggtggttcacatgtgtttccaactacatctgtgttgaacccgagctggggaaatagtcttgtaagcgttgctgtagccgccaatggttcgagttatgggcagagccagagctatgttgttggttcttctcctgcaaagacagggataatgtttccaatctcttcttctccaaacagtaccagaagcatagcaaaacaattccctttcttgcaagaagaagaaagctcgagaaccgcatcgttgtgtgagagaatgacgagttgcatccatgactctgattgtgctctctctcttctgtcatcctcctcgtcgtcagtccctcatttgcttcaaccaccactttctttgtcccaagaagcagttgagacagttttttacgggtcgggattgtttgagaatgcgagtgcagtctctgatggatcggttatatccggtaacgaggctgtccgtcttccgcagacattcccgtttcattgggagtagtagaagaagaagtaggtagatagatagaatcagaaagatctatttgtgtctcttctcttctccctcatttttcaatgttctttatcatcatcattgttcttgttaacactacaagaaatatggacattcttaacacaccgaaaacgctataataacgtttacatagcggattcataaacgctgtgtttgccgg

SEQ ID NO: 97765 - protein, 359 aa, Arabidopsis thaliana; identical to SEQ ID NO: 74454
  peptide (1)..(359): Ceres Seq. ID no. 13509491

SEQ ID NO: 97766 - protein, 336 aa, Arabidopsis thaliana; identical to SEQ ID NO: 74455
  peptide (1)..(336): Ceres Seq. ID no. 13509492

SEQ ID NO: 97767 - protein, 262 aa, Arabidopsis thaliana; identical to SEQ ID NO: 74456
  peptide (1)..(262): Ceres Seq. ID no. 13509493

SEQ ID NO: 97768 - DNA, 1416 bp, Arabidopsis thaliana
  misc_feature (1)..(1416): Ceres Seq. ID no. 13509655
  misc_feature (1)..(1416): Ortholog of  Ceres SEQ ID NO 13596244 as cited in SEQ ID NO 69307
agaaaccaaatgtcgttgataataatagaacactttctttctctctctaaaaagcaaaagtagtctagtcactgatttcttctaatcctccggtggagtgagagatgatatctccgacgttgtttcctctcctctgcgctttatttctatgtcttccagtggctgttatcttcacagtccagcgagaactcacctgcgttatctcgccggagtttggtttccgctctctttccgtcttctctctttactctcgaaatgtccccgactcttcttcttcttctccggcggttcggattcgacagccgattcccaaagaagacgaccctcttcttcgactatcttctcgggttaacccgaatctacctcccggttcgacccggaaaatagcttttatgtacttaacgacgtcgcctcttccgttcgcgcctctttgggagatgttcttcgacggaatctccaagaatctttacaatgtctacgttcacgcggatccgacccgagaatacgacccgccgttctccggcgtgttcttgaaccgggtcattcactctaaaccctcgctgagacacactcccactctaactgcggcggcgcgtagactactagcacacgcgcttctcgacgatccattgaattacatgtttgcggttatatcaccttcatgcgtaccaattcgctcctttgacttcacttacaagacattagtctcgtcgcgcaagagcttcatcgagatacttaaagacgagccgtggcagttcgataggtggacggcgattgggagacacgcgatgcttccggaggtgaagctcgaggagtttcggatcgggtctcagttttgggttttgaaacggagacacgcgcgtgtggtggcgcgtgatcggcgtatatgggtgaagtttaaccagacgtgcgtgcgggaagactcgtgttatcctgaagaaagttactttcctacccttcttaatatgcgggatccacgtggatgtgtccccgccacgcttactcacgtggactggactgttaacgacggtggtcacccgaggatgtacgagccggaggaagtcgtgcctgagctggtcttgcggcttagaaagactagaccaagatatggtgaggatggaatcaacggttcggagtggtctaaggttgagcggatggatccgtttctgtttgctaggaagttttcaccgcaggctcttgagccgttgctgggtatggctcgaaccgtcttgttcaatgactcagccggtggtgtgtgaatggtttctctaatggtattgttgtaaattcagttttagttttagtttttttttttttcttttttgtggggaaataataattgtaatttaaatgggtagctgggaaaaacaaaaacccgagtataccattatcgtgagtaaaaaagtaaactcgtcc

SEQ ID NO: 97769 - protein, 384 aa, Arabidopsis thaliana
  peptide (1)..(384): Ceres Seq. ID no. 13509656
MISPTLFPLLCALFLCLPVAVIFTVQRELTCVISPEFGFRSLSVFSLYSRNVPDSSSSSPAVRIRQPIPKEDDPLLRLSSRVNPNLPPGSTRKIAFMYLTTSPLPFAPLWEMFFDGISKNLYNVYVHADPTREYDPPFSGVFLNRVIHSKPSLRHTPTLTAAARRLLAHALLDDPLNYMFAVISPSCVPIRSFDFTYKTLVSSRKSFIEILKDEPWQFDRWTAIGRHAMLPEVKLEEFRIGSQFWVLKRRHARVVARDRRIWVKFNQTCVREDSCYPEESYFPTLLNMRDPRGCVPATLTHVDWTVNDGGHPRMYEPEEVVPELVLRLRKTRPRYGEDGINGSEWSKVERMDPFLFARKFSPQALEPLLGMARTVLFNDSAGGV

SEQ ID NO: 97770 - protein, 288 aa, Arabidopsis thaliana; identical to SEQ ID NO: 44477
  peptide (1)..(288): Ceres Seq. ID no. 13509657

SEQ ID NO: 97771 - protein, 273 aa, Arabidopsis thaliana; identical to SEQ ID NO: 44478
  peptide (1)..(273): Ceres Seq. ID no. 13509658

SEQ ID NO: 97772 - DNA, 1581 bp, Arabidopsis thaliana
  misc_feature (1)..(1581): Ceres Seq. ID no. 13509924
  misc_feature (1)..(1581): Ortholog of  Ceres SEQ ID NO 14307156 as cited in SEQ ID NO 54069
  misc_feature (1)..(1581): Ortholog of  Ceres SEQ ID NO 13599044 as cited in SEQ ID NO 0
atgcatccgattaatgcggtggttgcggcgaggatgttagccggaatcagtcaatctaacgccttacaaagcgaggcgattccgtttggatcgcttgagtggatcacttacgccggaatctcttgtttccttgttctcttcgccggaattatgtctggtctcactttagggcttatgtctctcggtctcgttgagctcgagattctccaacggagtggtactccaaaagagaagaaacaatctgctgcgatttttccggttgttcagaaacagcatcagcttttagtgactctgcttctgtttaatgctcttgctatggaggggcttcctatatacttggataagatattcaatgagtatgttgctattattctatccgtcactttcgttctattcgttggagaggttattcctcaagctatatgtactagatatggactagcagtgggagctaatttggtctggcttatgttggattgggtgttgggacacaatgaccctttatttaggcgagctcagttaaaagctcttgtgtccattcacggtgaagctgctggaaagggaggtgaacttacacatgatgagactacaattataagtggagcacttgatttgactgaaaagaccgctcaagaagccatgacaccaattgaatcaacgttttccttggatgtaaattcaaagttggaccgggaagctatggataagattcaagcacgaggtcatagccgcgttcctgtctactccgataatccaaaaaatgttattggacttctcttggtgaagagtctccttacagttcgccctgaaacagggactcttgtcagcgcagttggtatacgccgaattccaagggttccggctaatatgcctctgtatgatattctgaatgagtttcaaaaagggagcagtcacatggctgcagttgtgaaggttaaggggaaaagcaaaggtcatccttcaactttgcatgaagaaaatagcggtgaaagcaacgtctcaagtaacaactccgagttgactgcacctcttttactaaagcgagaaggaaaccacgacagtgtcattgtccgcatcgacaaggctaatggacaatcgttcatcagcgaggccggcagacaggggttctcacatacttcagaggagattgaggatggagacgtaattggtatcatcacattagaagatgtgtttgaagaacttttgcaggaggagattgtggatgaaacagatgagtatatagacgtgcataaaaggattcgtgtggcaactgtagcagcagtggccatttcatcattagcgagagcaccttcaggccggaggttacttggcccaaaaggaagtggaggaccaaaaacgccaaaggcatcttctactcccaaaccggatgataaactgatgggaaccatgaccggtcctcctcaaggaaacaactgattaggtgagtgttgagtttttgcttgagatgtgaaaaataaataaggttttgaaacttcgatcagtttagagcaccttctctctttcactgcttaactacatatgtataatacatgtcgatataatctacaattctttcaactt

SEQ ID NO: 97773 - protein, 478 aa, Arabidopsis thaliana
  peptide (1)..(478): Ceres Seq. ID no. 13509925
MHPINAVVAARMLAGISQSNALQSEAIPFGSLEWITYAGISCFLVLFAGIMSGLTLGLMSLGLVELEILQRSGTPKEKKQSAAIFPVVQKQHQLLVTLLLFNALAMEGLPIYLDKIFNEYVAIILSVTFVLFVGEVIPQAICTRYGLAVGANLVWLMLDWVLGHNDPLFRRAQLKALVSIHGEAAGKGGELTHDETTIISGALDLTEKTAQEAMTPIESTFSLDVNSKLDREAMDKIQARGHSRVPVYSDNPKNVIGLLLVKSLLTVRPETGTLVSAVGIRRIPRVPANMPLYDILNEFQKGSSHMAAVVKVKGKSKGHPSTLHEENSGESNVSSNNSELTAPLLLKREGNHDSVIVRIDKANGQSFISEAGRQGFSHTSEEIEDGDVIGIITLEDVFEELLQEEIVDETDEYIDVHKRIRVATVAAVAISSLARAPSGRRLLGPKGSGGPKTPKASSTPKPDDKLMGTMTGPPQGNN

SEQ ID NO: 97774 - protein, 467 aa, Arabidopsis thaliana
  peptide (1)..(467): Ceres Seq. ID no. 13509926
MLAGISQSNALQSEAIPFGSLEWITYAGISCFLVLFAGIMSGLTLGLMSLGLVELEILQRSGTPKEKKQSAAIFPVVQKQHQLLVTLLLFNALAMEGLPIYLDKIFNEYVAIILSVTFVLFVGEVIPQAICTRYGLAVGANLVWLMLDWVLGHNDPLFRRAQLKALVSIHGEAAGKGGELTHDETTIISGALDLTEKTAQEAMTPIESTFSLDVNSKLDREAMDKIQARGHSRVPVYSDNPKNVIGLLLVKSLLTVRPETGTLVSAVGIRRIPRVPANMPLYDILNEFQKGSSHMAAVVKVKGKSKGHPSTLHEENSGESNVSSNNSELTAPLLLKREGNHDSVIVRIDKANGQSFISEAGRQGFSHTSEEIEDGDVIGIITLEDVFEELLQEEIVDETDEYIDVHKRIRVATVAAVAISSLARAPSGRRLLGPKGSGGPKTPKASSTPKPDDKLMGTMTGPPQGNN

SEQ ID NO: 97775 - protein, 428 aa, Arabidopsis thaliana
  peptide (1)..(428): Ceres Seq. ID no. 13509927
MSGLTLGLMSLGLVELEILQRSGTPKEKKQSAAIFPVVQKQHQLLVTLLLFNALAMEGLPIYLDKIFNEYVAIILSVTFVLFVGEVIPQAICTRYGLAVGANLVWLMLDWVLGHNDPLFRRAQLKALVSIHGEAAGKGGELTHDETTIISGALDLTEKTAQEAMTPIESTFSLDVNSKLDREAMDKIQARGHSRVPVYSDNPKNVIGLLLVKSLLTVRPETGTLVSAVGIRRIPRVPANMPLYDILNEFQKGSSHMAAVVKVKGKSKGHPSTLHEENSGESNVSSNNSELTAPLLLKREGNHDSVIVRIDKANGQSFISEAGRQGFSHTSEEIEDGDVIGIITLEDVFEELLQEEIVDETDEYIDVHKRIRVATVAAVAISSLARAPSGRRLLGPKGSGGPKTPKASSTPKPDDKLMGTMTGPPQGNN

SEQ ID NO: 97776 - DNA, 1168 bp, Arabidopsis thaliana
  misc_feature (1)..(1168): Ceres Seq. ID no. 13575737
  misc_feature (1)..(1168): Ortholog of  Ceres SEQ ID NO 13594604 as cited in SEQ ID NO 52106
ggtttttctgaagatccaaggcacacaaaaaaacagctttttttgtttcttcaatcaaggattttccagggttttgataaccccatgggttcagggttctctctgtttcaaaagaatttatcgtcttgttatggagatcgagatctgttgcagcctggtttaggagatttgcctgaaagttgtgtggctttgattctccagaatttggatcccgttgagatctgtagattctccaagctaaacacggcttttcatggcgcttcttgggctgatttcgtttgggaatcgaaacttcctccagattataaattgattctcgagaaaatccttggtagtttccctgataatttgcgtaaaagagacatctttacttttctctctcgagttaattccttcgacgagggcaacaagaaagcttgggtagataaacgaacaggtgggctctgtttatgcacatcagccaagggcttatccataaccggaattgatgatcggagatactggagtcatattccgtctgatgattctcgatttgcttcagtagcttatgttcaacagatctggtggtttcaagttgatggagaaattgatttcccatttccagctggaacctacagtgtttacttcaggcttcagctaggcaaaccaggcaagcggtttggttggaaggttgttgacaccgaacaggttcatggctggaacattaaacctgttcgttttcaactctcgactgaagatggtcaacattcttcatctcaatgtatgttaaccgaagcaggaaactggagtcattaccatgctggagactttgtggtcggtaaatcgaaaagttcatcgacgaagattaagttctcgatgactcagattgattgcacgcatactaaaggcgggttatgtgtagattctgtagttgtgtatccgagctcgtgtaaggaccggttgatgcagatttaagttgcaaaccggagtttgggtgtagtttagaggtttaaaaaagctgttttttttttttaaagtggttttaaaaccttttgtagaatctttgagggggtaattagaaaactcagtgtaaagagaaaaagagggtaattactaattagggttgttgttttattgtttaggtcaaatgtaaactttaagtttgaagttattaaagagttcttgagtt

SEQ ID NO: 97777 - protein, 317 aa, Arabidopsis thaliana
  peptide (1)..(317): Ceres Seq. ID no. 13575738
GFSEDPRHTKKQLFLFLQSRIFQGFDNPMGSGFSLFQKNLSSCYGDRDLLQPGLGDLPESCVALILQNLDPVEICRFSKLNTAFHGASWADFVWESKLPPDYKLILEKILGSFPDNLRKRDIFTFLSRVNSFDEGNKKAWVDKRTGGLCLCTSAKGLSITGIDDRRYWSHIPSDDSRFASVAYVQQIWWFQVDGEIDFPFPAGTYSVYFRLQLGKPGKRFGWKVVDTEQVHGWNIKPVRFQLSTEDGQHSSSQCMLTEAGNWSHYHAGDFVVGKSKSSSTKIKFSMTQIDCTHTKGGLCVDSVVVYPSSCKDRLMQI

SEQ ID NO: 97778 - protein, 289 aa, Arabidopsis thaliana
  peptide (1)..(289): Ceres Seq. ID no. 13575739
MGSGFSLFQKNLSSCYGDRDLLQPGLGDLPESCVALILQNLDPVEICRFSKLNTAFHGASWADFVWESKLPPDYKLILEKILGSFPDNLRKRDIFTFLSRVNSFDEGNKKAWVDKRTGGLCLCTSAKGLSITGIDDRRYWSHIPSDDSRFASVAYVQQIWWFQVDGEIDFPFPAGTYSVYFRLQLGKPGKRFGWKVVDTEQVHGWNIKPVRFQLSTEDGQHSSSQCMLTEAGNWSHYHAGDFVVGKSKSSSTKIKFSMTQIDCTHTKGGLCVDSVVVYPSSCKDRLMQI

SEQ ID NO: 97779 - DNA, 2823 bp, Arabidopsis thaliana
  misc_feature (1)..(2823): Ceres Seq. ID no. 13575926
  misc_feature (1)..(2823): Ortholog of  Ceres SEQ ID NO 13656177 as cited in SEQ ID NO 64997
aaaatcgtggaaggttacaaagcctttcaaaaacctcactctctcaactctcaaaccttatctccttccttctcttctcctctcctctccgtcgagcttactatctccacaaaatggcgtcgacggtaggagttccatcactataccaagttcctcaccttgaaatctccaaacccaattccaaaaagaggtctaattgtttatctttatctctcgataagcctttcttcactcccttatctcttgttcgtagaactcgtcgtatccattcctcttctcttcttgttccttctgctgttgctactcctaattctgttctcagtgaagaagctttcaaaagtcttggtctttctgaccatgacgaatatgaccttgacggcgacaacaacaacgttgaagctgatgatggtgaagaactcgctatctctaaacttagtttgcctcaacgtcttgaagagtctcttgagaaacgtggtatcactcatctcttccccattcagagagctgtgttggtacctgcactgcaaggaagagatattatagctcgtgcaaagacaggaactggaaagactttggcttttggtattcctatcattaaacgtctcactgaagaagctggagactacactgctttcaggaggtctggtcgtcttcctaagttccttgtccttgcgccgacccgagagctggctaagcaagtggagaaggagattaaggagtctgcaccttatttgagcactgtttgtgtgtatgggggagtttcttataccattcagcagagtgctttaactcgtggtgttgatgttgttgttggaactcctggaagaatcattgatttgattgaaggaaggagtcttaaattgggagaagttgagtatttggtacttgatgaagctgatcagatgcttgctgttgggtttgaggaggccgtggaatcgattcttgagaatcttccaactaagcgacaaagtatgcttttctcagcaactatgcctacttgggttaagaagttggcgaggaagtaccttgacaatcccttgaatattgatctggttggagaccaagatgagaagctcgcagagggtatcaaactttatgcaatcgcaaccacatcgacatcaaaacgcactattctaagcgaccttattacagtgtatgcgaagggtggcaagaccattgtttttacccaaactaaaagagatgcagacgaagtttctcttgcattgtcaaacagtatagctaccgaagcacttcatggagatatatctcagcatcaaagagagagaacactcaatgctttccgtcaagggaaattcaccgtattagttgccactgatgttgcatctcgtggacttgacatcccgaacgtagatctagttatccactatgaacttcctaatgacccagaaacttttgtgcaccgttctggtcgtactgggcgtgcagggaaagaaggctctgccattctcatgcacaccagcagccaaaagagaacagtgaggtctctggagcgtgacgtaggctgccattttgaattcattagcccaccaactgttggagacttgttggaatcgtcagcagaccaagtggtggccactctaaatggtgttcaccctgactccataaagtttttctcagcaactgctcaaaaactatatgaggagaaaggaacagatgctttagctgcagctctagctcacctgagtggtttctctcagccgccttcatcaagatctctcctcagccatgagaagggatgggtgactttgcaattgatccgagatccaacgaacgctagaggctttctgtctgcgaggtctgttactggttttctttccgatctttaccgtacagctgcagatgaagttggaaaaatcttcttgatcgccgatgacaggatccaaggagctgtatttgatctaccagaggagatcgcgaaagagctcctagagaaagatgtccccgaaggcaacagtttatccatgataacaaagttacctccacttcaagatgacggaccatctagtgataactacggacggttctctagcagagacaggatgcctagaggaggaggaggttctagagggtcaagaggcggtagaggaggatcatcacgaggccgtgatagttggggaggtgatgatgacagaggtagtagaaggagcagtggtggaggaagcagctggtcccgaggtggtagtagttccagaggaagttctgatgattggttgatcggtggcagaagttcatcaagcagcagagctccttcgcgggagagaagttttggaggttcatgcttcatttgtgggaaatctggacacagggcaacagattgtcctgataagagaggattttagagttatcgtagcaaatggtttctgctcttgggagaaagatccttgtcctttttggtgttcttaatgcgaatcttttcgtgcttgcttcaacggtttgtttcagacggtagagaagcaatcagggaggaggatacatgcttcggacaaggtagagcagaaataaataagagagaggcaatagcaaaagtaaaggagaaggttttcctcaaattggcattttcagagtttgcgtgagaaacaagggaaagctgatggatctttttatgttagggttattataatagtcttaatgatcagtttccatgtttctaaggttttgtttgatttaagtggttattagtcagtctacttacactacttttattttcatttttgtacgttttctattgttatatgtgaattcggatcacatgtgtttggacagaagtaactatgtcattataatagaatcttatgccaagag

SEQ ID NO: 97780 - protein, 785 aa, Arabidopsis thaliana
  peptide (1)..(785): Ceres Seq. ID no. 13575927
NRGRLQSLSKTSLSQLSNLISFLLFSSPLRRAYYLHKMASTVGVPSLYQVPHLEISKPNSKKRSNCLSLSLDKPFFTPLSLVRRTRRIHSSSLLVPSAVATPNSVLSEEAFKSLGLSDHDEYDLDGDNNNVEADDGEELAISKLSLPQRLEESLEKRGITHLFPIQRAVLVPALQGRDIIARAKTGTGKTLAFGIPIIKRLTEEAGDYTAFRRSGRLPKFLVLAPTRELAKQVEKEIKESAPYLSTVCVYGGVSYTIQQSALTRGVDVVVGTPGRIIDLIEGRSLKLGEVEYLVLDEADQMLAVGFEEAVESILENLPTKRQSMLFSATMPTWVKKLARKYLDNPLNIDLVGDQDEKLAEGIKLYAIATTSTSKRTILSDLITVYAKGGKTIVFTQTKRDADEVSLALSNSIATEALHGDISQHQRERTLNAFRQGKFTVLVATDVASRGLDIPNVDLVIHYELPNDPETFVHRSGRTGRAGKEGSAILMHTSSQKRTVRSLERDVGCHFEFISPPTVGDLLESSADQVVATLNGVHPDSIKFFSATAQKLYEEKGTDALAAALAHLSGFSQPPSSRSLLSHEKGWVTLQLIRDPTNARGFLSARSVTGFLSDLYRTAADEVGKIFLIADDRIQGAVFDLPEEIAKELLEKDVPEGNSLSMITKLPPLQDDGPSSDNYGRFSSRDRMPRGGGGSRGSRGGRGGSSRGRDSWGGDDDRGSRRSSGGGSSWSRGGSSSRGSSDDWLIGGRSSSSSRAPSRERSFGGSCFICGKSGHRATDCPDKRGF

SEQ ID NO: 97781 - protein, 748 aa, Arabidopsis thaliana
  peptide (1)..(748): Ceres Seq. ID no. 13575928
MASTVGVPSLYQVPHLEISKPNSKKRSNCLSLSLDKPFFTPLSLVRRTRRIHSSSLLVPSAVATPNSVLSEEAFKSLGLSDHDEYDLDGDNNNVEADDGEELAISKLSLPQRLEESLEKRGITHLFPIQRAVLVPALQGRDIIARAKTGTGKTLAFGIPIIKRLTEEAGDYTAFRRSGRLPKFLVLAPTRELAKQVEKEIKESAPYLSTVCVYGGVSYTIQQSALTRGVDVVVGTPGRIIDLIEGRSLKLGEVEYLVLDEADQMLAVGFEEAVESILENLPTKRQSMLFSATMPTWVKKLARKYLDNPLNIDLVGDQDEKLAEGIKLYAIATTSTSKRTILSDLITVYAKGGKTIVFTQTKRDADEVSLALSNSIATEALHGDISQHQRERTLNAFRQGKFTVLVATDVASRGLDIPNVDLVIHYELPNDPETFVHRSGRTGRAGKEGSAILMHTSSQKRTVRSLERDVGCHFEFISPPTVGDLLESSADQVVATLNGVHPDSIKFFSATAQKLYEEKGTDALAAALAHLSGFSQPPSSRSLLSHEKGWVTLQLIRDPTNARGFLSARSVTGFLSDLYRTAADEVGKIFLIADDRIQGAVFDLPEEIAKELLEKDVPEGNSLSMITKLPPLQDDGPSSDNYGRFSSRDRMPRGGGGSRGSRGGRGGSSRGRDSWGGDDDRGSRRSSGGGSSWSRGGSSSRGSSDDWLIGGRSSSSSRAPSRERSFGGSCFICGKSGHRATDCPDKRGF

SEQ ID NO: 97782 - protein, 485 aa, Arabidopsis thaliana
  peptide (1)..(485): Ceres Seq. ID no. 13575929
MLAVGFEEAVESILENLPTKRQSMLFSATMPTWVKKLARKYLDNPLNIDLVGDQDEKLAEGIKLYAIATTSTSKRTILSDLITVYAKGGKTIVFTQTKRDADEVSLALSNSIATEALHGDISQHQRERTLNAFRQGKFTVLVATDVASRGLDIPNVDLVIHYELPNDPETFVHRSGRTGRAGKEGSAILMHTSSQKRTVRSLERDVGCHFEFISPPTVGDLLESSADQVVATLNGVHPDSIKFFSATAQKLYEEKGTDALAAALAHLSGFSQPPSSRSLLSHEKGWVTLQLIRDPTNARGFLSARSVTGFLSDLYRTAADEVGKIFLIADDRIQGAVFDLPEEIAKELLEKDVPEGNSLSMITKLPPLQDDGPSSDNYGRFSSRDRMPRGGGGSRGSRGGRGGSSRGRDSWGGDDDRGSRRSSGGGSSWSRGGSSSRGSSDDWLIGGRSSSSSRAPSRERSFGGSCFICGKSGHRATDCPDKRGF

SEQ ID NO: 97783 - DNA, 1521 bp, Arabidopsis thaliana
  misc_feature (1)..(1521): Ceres Seq. ID no. 13576051
  misc_feature (1)..(1521): Ortholog of  Ceres SEQ ID NO 14309870 as cited in SEQ ID NO 20595
ggtcggacttgtaaattttcgctcagcgatctgcttccaatggcgatctacttcattctctatacacttctcacgatcatcttcgccgtatctctgagtttatttctttccgtgatcaatgcaagaaagagcagaaaacgtgcggtaggattcttccatccgtacacgaacgacggtggcggcggcgagagagtgctctggtgcgccgttaaagccattcaagaggaaaatcccgatcttgactgtgtcatcttcaccggagatcatgactcttcttctgatagcttagctcgtcgcgccgttgatcgattcggtgttcaccttcagtctcctcctaaggtgattcatctaaacaaaaggaaatggattgaagagagtacttacccacattttacaatgataggtcagagtcttggttcggtttacttagcgtgggaagcattacgcatgttcactcctttgtatttccttgacactagtggatatgcgtttacatatcctcttgctcggatctttggttgcaaagttgtttgctatactcattatccaactattagtttggatatgatttctcgtgttcgtcagaggaactctatgtataacaatgatgcttccattgctaagagcaattggttatctacttgcaaattagtctattacagagcttttagctggatgtatgggatggttgggtcatgtactcatttagctatggttaactcttcgtggactaagtcccatatcgaagtgctttggagaattccagaacggattacacgggtctacccgccctgtgatacttcaggacttcaggtgataaccttcagacagctcgaatcttatgatttttgtctgttttctggttacatctcagtatttgctgacatcttgggcttattgcaggcgtttcctcttgaacgatcatctgatcctcctaaaatcatatcagttgctcaatttcgtcctgagaaggctcatatgcttcagcttgaggccttttcactagccttagagaagctagatgcagacgtccctagacccaagctccaatttgtgggaagttgtagaaacaattcagatgaagaacgtctgcagaaattgaaagacagagcagtggaactaaaagtagatggagacgtgcaattctataaaaatgccatgtacagagaactagtggaactgttaggaaatgcagttgcaggactgcatgggatgatagatgaacactttggtataagtgttgttgagtacatggctgctggtgcaatcccaatagctcacaactcagctggacctaaaatggacattgtgttggaagaagacggacaaaaaaccgggtttcttgctgagactgtggaggaatacgctgaagcgatccttgagattgtgaagatgaatgaaacagagaggcttaaaatggctgaatctgctagaaaacgagcggcaaggttctctgaacaacggttttgtgaggacttcaaaactgcgattcgacccattttcacaggtcctcttaaatga

SEQ ID NO: 97784 - protein, 506 aa, Arabidopsis thaliana
  peptide (1)..(506): Ceres Seq. ID no. 13576052
GRTCKFSLSDLLPMAIYFILYTLLTIIFAVSLSLFLSVINARKSRKRAVGFFHPYTNDGGGGERVLWCAVKAIQEENPDLDCVIFTGDHDSSSDSLARRAVDRFGVHLQSPPKVIHLNKRKWIEESTYPHFTMIGQSLGSVYLAWEALRMFTPLYFLDTSGYAFTYPLARIFGCKVVCYTHYPTISLDMISRVRQRNSMYNNDASIAKSNWLSTCKLVYYRAFSWMYGMVGSCTHLAMVNSSWTKSHIEVLWRIPERITRVYPPCDTSGLQVITFRQLESYDFCLFSGYISVFADILGLLQAFPLERSSDPPKIISVAQFRPEKAHMLQLEAFSLALEKLDADVPRPKLQFVGSCRNNSDEERLQKLKDRAVELKVDGDVQFYKNAMYRELVELLGNAVAGLHGMIDEHFGISVVEYMAAGAIPIAHNSAGPKMDIVLEEDGQKTGFLAETVEEYAEAILEIVKMNETERLKMAESARKRAARFSEQRFCEDFKTAIRPIFTGPLK

SEQ ID NO: 97785 - protein, 493 aa, Arabidopsis thaliana
  peptide (1)..(493): Ceres Seq. ID no. 13576053
MAIYFILYTLLTIIFAVSLSLFLSVINARKSRKRAVGFFHPYTNDGGGGERVLWCAVKAIQEENPDLDCVIFTGDHDSSSDSLARRAVDRFGVHLQSPPKVIHLNKRKWIEESTYPHFTMIGQSLGSVYLAWEALRMFTPLYFLDTSGYAFTYPLARIFGCKVVCYTHYPTISLDMISRVRQRNSMYNNDASIAKSNWLSTCKLVYYRAFSWMYGMVGSCTHLAMVNSSWTKSHIEVLWRIPERITRVYPPCDTSGLQVITFRQLESYDFCLFSGYISVFADILGLLQAFPLERSSDPPKIISVAQFRPEKAHMLQLEAFSLALEKLDADVPRPKLQFVGSCRNNSDEERLQKLKDRAVELKVDGDVQFYKNAMYRELVELLGNAVAGLHGMIDEHFGISVVEYMAAGAIPIAHNSAGPKMDIVLEEDGQKTGFLAETVEEYAEAILEIVKMNETERLKMAESARKRAARFSEQRFCEDFKTAIRPIFTGPLK

SEQ ID NO: 97786 - protein, 374 aa, Arabidopsis thaliana
  peptide (1)..(374): Ceres Seq. ID no. 13576054
MIGQSLGSVYLAWEALRMFTPLYFLDTSGYAFTYPLARIFGCKVVCYTHYPTISLDMISRVRQRNSMYNNDASIAKSNWLSTCKLVYYRAFSWMYGMVGSCTHLAMVNSSWTKSHIEVLWRIPERITRVYPPCDTSGLQVITFRQLESYDFCLFSGYISVFADILGLLQAFPLERSSDPPKIISVAQFRPEKAHMLQLEAFSLALEKLDADVPRPKLQFVGSCRNNSDEERLQKLKDRAVELKVDGDVQFYKNAMYRELVELLGNAVAGLHGMIDEHFGISVVEYMAAGAIPIAHNSAGPKMDIVLEEDGQKTGFLAETVEEYAEAILEIVKMNETERLKMAESARKRAARFSEQRFCEDFKTAIRPIFTGPLK

SEQ ID NO: 97787 - DNA, 1597 bp, Arabidopsis thaliana
  misc_feature (1)..(1597): Ceres Seq. ID no. 13576067
  misc_feature (1)..(1597): Ortholog of  Ceres SEQ ID NO 13654989 as cited in SEQ ID NO 63117
  misc_feature (1)..(1597): Ortholog of  Ceres SEQ ID NO 13584744 as cited in SEQ ID NO 69137
ttccgccatgagaaaaacctgcacacacgcctgaaaaaccaaatcatcctcatcatcttctgatctaatgtctaccgacactatcccttccctctcatctccaccggcgccggagtttccttccaccacaccagacacggcgacgtcaccagctccgtctcagccatccatcatcggaccttcttcgttggctccgtttccggagacaacaacaaacattgatggaggctcgagaaatgtagcattaactggacttattactggagtagttctcggagctacgtttgtcctactcggagtttgtatctttgtctgtttctataaaagaaagaagaggaagttaaagaagaagaagaaagaagatatcgaagcttctattaacagagactcactagatcccaaagatgatagcaataatcttcagcaatggagttcatcagagattggacaaaacttgtttacatatgaagatttgtctaaagcaactagtaacttctccaacactaaccttcttggacaaggtgggtttggttatgttcatagaggagttcttgttgatggaactttggttgctattaagcagcttaaatctggaagtggacaaggtgaacgagagtttcaagctgagatacagactattagtagagttcatcataggcatcttgtttctcttcttggttattgtatcactggtgctcaaagattgcttgtttatgagtttgtgcctaataagactctcgaatttcatttacacgagaaagagagaccggtaatggagtggtcaaagaggatgaagattgctttgggtgcagctaaaggattggcatacttacatgaagattgtaatcctaagacaatacaccgcgatgtcaaggctgcaaatattctaattgacgatagctatgaggcgaagttagcagattttggacttgccaggtcttctttagacactgatactcatgtctccactcggattatgggaaccttcggttacttggctcctgaatatgcttcttcagggaaacttactgagaaatcagatgtcttctcaattggagtggtgcttcttgaactgataaccggacgccgtcctgttgataaatcacagccttttgctgatgatgatagcatcgttgattgggcaaaacctctgatgatacaagcgttaaacgatggaaactttgacggtcttgttgacccgcggttagagaatgattttgatatcaacgaaatgacgagaatggttgcttgcgctgctgctagtgtccgtcattcagctaaacgtcgcccaaaaatgagccagatagttcgagcattcgaaggaaatatatctatagatgacctaacagaaggagctgccccaggacaaagtactatttacagcttagacgggagctcagattatagctcaacacaatacaaagaagacttgaagaaattcaagaaaatggcgttcgaaagcaaaacatttggtagcagcgaatgcagtggtttgactagcgacaatggtcagaacccatcaggctcgtctagtatcaccgaaggccaacgtacaacgcaggagatcgaaccggagaagaataccaaggacacatga

SEQ ID NO: 97788 - protein, 509 aa, Arabidopsis thaliana
  peptide (1)..(509): Ceres Seq. ID no. 13576068
MSTDTIPSLSSPPAPEFPSTTPDTATSPAPSQPSIIGPSSLAPFPETTTNIDGGSRNVALTGLITGVVLGATFVLLGVCIFVCFYKRKKRKLKKKKKEDIEASINRDSLDPKDDSNNLQQWSSSEIGQNLFTYEDLSKATSNFSNTNLLGQGGFGYVHRGVLVDGTLVAIKQLKSGSGQGEREFQAEIQTISRVHHRHLVSLLGYCITGAQRLLVYEFVPNKTLEFHLHEKERPVMEWSKRMKIALGAAKGLAYLHEDCNPKTIHRDVKAANILIDDSYEAKLADFGLARSSLDTDTHVSTRIMGTFGYLAPEYASSGKLTEKSDVFSIGVVLLELITGRRPVDKSQPFADDDSIVDWAKPLMIQALNDGNFDGLVDPRLENDFDINEMTRMVACAAASVRHSAKRRPKMSQIVRAFEGNISIDDLTEGAAPGQSTIYSLDGSSDYSSTQYKEDLKKFKKMAFESKTFGSSECSGLTSDNGQNPSGSSSITEGQRTTQEIEPEKNTKDT

SEQ ID NO: 97789 - protein, 274 aa, Arabidopsis thaliana
  peptide (1)..(274): Ceres Seq. ID no. 13576069
MEWSKRMKIALGAAKGLAYLHEDCNPKTIHRDVKAANILIDDSYEAKLADFGLARSSLDTDTHVSTRIMGTFGYLAPEYASSGKLTEKSDVFSIGVVLLELITGRRPVDKSQPFADDDSIVDWAKPLMIQALNDGNFDGLVDPRLENDFDINEMTRMVACAAASVRHSAKRRPKMSQIVRAFEGNISIDDLTEGAAPGQSTIYSLDGSSDYSSTQYKEDLKKFKKMAFESKTFGSSECSGLTSDNGQNPSGSSSITEGQRTTQEIEPEKNTKDT

SEQ ID NO: 97790 - protein, 268 aa, Arabidopsis thaliana
  peptide (1)..(268): Ceres Seq. ID no. 13576070
MKIALGAAKGLAYLHEDCNPKTIHRDVKAANILIDDSYEAKLADFGLARSSLDTDTHVSTRIMGTFGYLAPEYASSGKLTEKSDVFSIGVVLLELITGRRPVDKSQPFADDDSIVDWAKPLMIQALNDGNFDGLVDPRLENDFDINEMTRMVACAAASVRHSAKRRPKMSQIVRAFEGNISIDDLTEGAAPGQSTIYSLDGSSDYSSTQYKEDLKKFKKMAFESKTFGSSECSGLTSDNGQNPSGSSSITEGQRTTQEIEPEKNTKDT

SEQ ID NO: 97791 - DNA, 1789 bp, Arabidopsis thaliana
  misc_feature (1)..(1789): Ceres Seq. ID no. 13576087
  misc_feature (1)..(1789): Ortholog of  Ceres SEQ ID NO 14310016 as cited in SEQ ID NO 20753
gggaggatcctgcgaagaccaaccagtctgttaattttgtataaacaatgaaacgaagaagatcttccgagaatattctctccttctcacgcataccctagaatattgtttcgtctctcttccttctacgtttgcttatttgccccaactcgacgcgaatcatcagcttttataaattctgtcaactcaaagattgtttctgaattggaatcttacagaggtttagcttgagatgatatgactaatcagcaggagcaacacattgcgatatttacaacagctagtattccatggcttacgggaactgctgttaatcctctcttccgtgctgcctaccttgcaaatgatggggaaagacgggtcacgttggtgattccatggctgactttgaagcaccaaaagcttgtctacccaaatagcatcacttttagttccccgtcagagcaagaagcttatgtccgccagtggcttgaggagagagtctcttttcgtttagcctttgagatacgtttctatcctggaaagtttgctattgacaaaaggagtattcttcctgttggggatatatctgatgccattcctgatgaagaggcagacattgctgtcctcgaggagcctgagcatctcacatggtttcatcatggccaaaaatggaaaactaagttcaactacgtcataggaatcgtacacactaactacttggaatacgttaaaagagagaaacaaggccgtgtcaaagcatttttcctcaaatacttaaatagttgggttgttggcatttactgccacaaggtaatcaggttatctgctgcgactcaagaataccctaaatctatagtctgcaatgttcatggcgtcaaccctaaatttctcgaaattgggttgagaaaactagaacagcagaagctccaggagcagcccttcactaaaggcgcatactacattggtaagatggtctggagcaaagggtacaaggagcttcttaaactacttgagaaacaccaaaaggaacttgccgagttagaggttgatttatacggtgatggagaggactctgaagagatcaaagaagcagcccgaaaactcgacttgacggttaatgtttacccaggacgtgatcacgctgactcgctatttcacaactataaagtgtttctcaaccccagcacgacagacgttgtgtgtacaacaactgcagaagccttggcgatgggaaaaatagtagtatgcgcgaatcacatatcgaacaagttcttcaaacagtttcccaactgcagaacctatgacgatggacaaggttttgtaagagccacgctcaaggctcttggggaacaaccatcgcaacttacagagcaacaaaggcatgaactatcatgggaagctgctacacaacggtttataaaagtctctgatctgaaccggttatcaagagctgattcgaacttgtcaaagagaagtgtgtttgcgtcatcttcgattagtgtggggaaaaacttggaggatatgtcagcgtatattcatttcttggcgtctggatttgaagcttccagaacagcttttggtgctatacctggaagcttgcagcccgatgaagagttatgtagagatcttggtttgtctctcaacactccttccccaaatactcgcaagcaagattgacctgttttttaatttatctttgtctgcatatcattgggatatttttgtgtataaatcaatgtatactatctgaatcattctatagcagctttggtgtaatattgatgatgaaagttagatttttcatctt

SEQ ID NO: 97792 - protein, 473 aa, Arabidopsis thaliana; identical to SEQ ID NO: 76118
  peptide (1)..(473): Ceres Seq. ID no. 13576088

SEQ ID NO: 97793 - DNA, 2040 bp, Arabidopsis thaliana
  misc_feature (1)..(2040): Ceres Seq. ID no. 13576137
  misc_feature (1)..(2040): Ortholog of  Ceres SEQ ID NO 13596392 as cited in SEQ ID NO 62136
  misc_feature (1)..(2040): Ortholog of  Ceres SEQ ID NO 15226223 as cited in SEQ ID NO 65500
  misc_feature (1)..(2040): Ortholog of  Ceres SEQ ID NO 13596394 as cited in SEQ ID NO 68561
gatagattgaagcgtatactctaatttgaccaatctagggtttctagtcacttgaagcttctcttaaaaaacctgtctcactcctcgtcaacctcttcctctcccgctgtcgccaagattgaatcttttttcagttgtggcttcaccggataataaggaattcagtaagagataagttcatcctgacaacatggagaccaagaatgagaattctgatgtttcacgggcagaggagtttaaaagtcaggccaacgaagcttttaaaggtcacaaatactccagtgctattgatctatatacaaaagctattgaactcaacagcaacaacgctgtgtattgggcaaatcgtgcatttgctcacacaaaactggaggaatatggcagtgcaatacaggatgcatcgaaggccattgaagttgattcaagatactctaagggctattacaggcgtggtgctgcgtatcttgccatgggaaaatttaaggatgccttgaaggacttccaacaggtaaaaaggctttctcctaatgaccctgatgccacaagaaagctaaaggaatgtgagaaagcagtgatgaaactcaaatttgaagaagcaatctctgtgccagtatctgaaaggcgttcagtagctgagtccattgacttccatacaatagaggttgagccacaatattctggtgctagaattgagggagaggaagttaccttagattttgtgaaaacgatgatggaggattttaagaaccaaaaaacattgcataaacggtatgcctatcaaatcgtcttacagactaggcaaatcttgctagcactgccttctcttgttgatataagtgttccacatggcaaacatatcactgtttgcggtgacgttcatggtcagttctacgatcttctcaatatctttgagcttaatggcctcccttcggaggagaacccatacctatttaatggcgactttgtggacagaggctcattctccgttgagatcatcctcactttgtttgctttcaagtgcatgtgcccatcatccatatatctagccagaggaaaccatgaaagcaagagcatgaacaaaatttatggttttgagggtgaggttcggtccaagttgagtgaaaaattcgtggatctctttgctgaagttttctgttacctcccgttggctcatgttataaatgggaaggtcttcgtggtacatggaggtcttttcagtgttgacggcgtgaaactctcagacatcagagccattgacagattctgtgagccaccagaggaaggactaatgtgtgaactattgtggagtgatcctcaacctctccctggaagaggcccaagcaagcgaggagttggtctatcatttggtggagatgtgacaaagaggtttttgcaagataacaatttagatttgttggtccggtcacatgaagtaaaagatgaaggttatgaggttgaacatgacggtaaactcataactgtcttctctgcgccaaattactgtgatcagatgggtaataagggagccttcattcgttttgaagctcctgatatgaagccaaacattgttacattctcagcagtgcctcatccggatgtgaagcctatggcatatgcaaacaactttctcaggatgttcaactaaccagcaaaaagcttcttctactcaaaatgctattctaaagactcaagaccagaagtggttcagaaacataatgatataagtttttttttccctttatcttctgcagttttttcatgttgttccagaaaagggaggccatgataattaaaggtacagtatccggatttgatcgttttttttcttcttccttcttttctgataaagattttcactcttcctttaagcttatccagcaacttttgtcccttttgtcttatgttgtaagagggggtaatgtatcattcttattttagatgaaaatcttgtgattactcaacaaaagagtgaccaaatgaccccccaaaactttgtacttaaaatggtttcttgaatcaaaaatcaaaaggtgtttcttt

SEQ ID NO: 97794 - protein, 484 aa, Arabidopsis thaliana; identical to SEQ ID NO: 76043
  peptide (1)..(484): Ceres Seq. ID no. 13576138

SEQ ID NO: 97795 - protein, 391 aa, Arabidopsis thaliana; identical to SEQ ID NO: 76044
  peptide (1)..(391): Ceres Seq. ID no. 13576139

SEQ ID NO: 97796 - protein, 356 aa, Arabidopsis thaliana; identical to SEQ ID NO: 76045
  peptide (1)..(356): Ceres Seq. ID no. 13576140

SEQ ID NO: 97797 - DNA, 3545 bp, Arabidopsis thaliana
  misc_feature (1)..(3545): Ceres Seq. ID no. 13576172
  misc_feature (1)..(3545): Ortholog of  Ceres SEQ ID NO 13593889 as cited in SEQ ID NO 53305
  misc_feature (1)..(3545): Ortholog of  Ceres SEQ ID NO 13581959 as cited in SEQ ID NO 56156
gcaggagagagtcaaagagaaggaagaggcttcgcttacttgctgagaaaaaagctccaaactttctcttattgggtttttgatcagctccggagataaaaaaaaaaagtattttcttgaaatcgaaatctgatctccattgagagtcttgctacttgatttggattccgatttaaggttttctcgagaattcttttgctgcagttattagattttgacgagccgttgatctggacggagttccagatctccgggtcgtggtaccaaggaattagggttttagcacaaagttctcgtttttctgtgtattcgagggatgaaggagttttcgggtcgatgttcgctgctctaacatttggagtatgaagatgaacatgaagaaatttctcaaaaagcttcgtatcacgcccaatcaacgagacgatggtgaaggttcagtctctaacagaagcaataagtctagtgatgcagaaccatctccttctgattcattgaggtctcaagataactctgaattcaaaccctttttgggtttatcaaattggttaagctctgttactcacaggaaaagcccttcttcttccaatgccaccaatagcaaagaggatgacactaccatggaacatggtggtcccgttgggtcggaatctgggatgcagggtttgggttctagtagtaattccaaggatccagaagttgaagaagaatatcagatacagttggctctagagttaagtgctagggaggatcctgaagctgctcagattgaggctatgaagcagttcagcttaggttctcgtccttctgctcccgagaatactccagctgaactcatggcatatagatattggaattataactgtcttggctatgatgacaagattgtggatggtttctatgacctgtgtggagtaatgaatgaatcttccttaaaaagaatacctcccttagttgatcttcaggggacacttgtgtcagatggtgtaacttgggatgctgttctagtgaacagcagcaaagattctaatctgttgagacttgaacaaatggctcttgatattgcagcaaaatcaaagtcagcgtcttcttcagggtttgtgaacagtgaattggtaaggcaactggcagttttagttgctgattacatgggtggaccagttttggatccagatagcacgttaagagcttggtggagtctgagctacagcttgaaagcaaccctccgtagcatggttctgcccctgggttctctaactattggattggctcgtcatcgtgccttgttattcaaagttttgtgtgatagtgtcggcgttccttgtcgaatagtcaaaggacagcaatataccggttcagatgatgtggcaatgaactccattaagactgatgatggcagggagtacattgttgatctcatgggagatccaggcacgcttatccccgctgatgcagctggactacaaatggactttgatgattctgtctactctgccagtcccagagatgttgattcatctcatgtagcttcttccagcagtggggtcgagagctcaattgaagaacacacagaatcttggtcagcggaacatcgttctaggaccaagggttcccgggaggaaaaccaatctgcaggtggaggggatctcatgattccaaatattagggaagctgtgggaagtcaaaaggctcctgttcaacatctttccagcaagcctactcattctttcactcatgccagatcaccttcgtggactgaaggtgttagctctccagctggacgcaggatgaaagtcaaagatgtttcacaatatatgattgatgctgccaaagagaatccacaactagctcagaagcttcatgatgtgttacttgaaagtggagttgtagctcctcgaaatttattttcggaagtctattcagagtcaatggaggcaacaggtgaaatcaaatctgtggctgaatccaatgatgagaaagggaaagattttggaacaatccagcaaggaagaaaccagagcaaccttggccctgtgaggtttttgcctcctcttccaagaccgcaatctaaagcaattacccatgacctacgtgaacattcaggatctggactcggtcatttgtctgaacattgcaatattgatggtcactctgattcctcacattctgaaacatctactgactatcccagaaatgttcctgttgccgtagctgcagcggctgttgttgcgtcttccatggttgttgctgccgccaagtcagcaaactcggattcctccactttagaactttctgctgcagctgctgctgcagttatggcgacagctgcagcagtgagcaggcagtttgaactagattcacttagcaacggggatgctggttctggtgggcttcatggggtagattcaggaggagaacgaatatccgacagatctattggcaatgaaagttcaaaatctgatgctgcaattgatgatgtagctgaatgcgagattttgtgggaggaaattactgtggctgagcgtatcggactgggatcatacggagaggtatataggggagattggcatggaactgcagtggctgtcaagaagttcattgaccaagatattactggagaggcactggaggaattcagaagtgaggtccggatgatgagaaggctcagacaccctaatattgttctcttcatgggagctgtaacccgcccaccaaatctctcaattgttacagaatttcttcctcgaggtagcttgtataggttaattcacaggcctaataaccaattagatgagcgaaagcgtctgaggatggctcttgatgctgctcgtggaatgaattatttacacagctgtaatccggtaattgtccatcgtgatcttaaatctccaaaccttctagttgacaaaaattgggttgtcaaggtgtgcgattttgggttgtctagaatgaaagtaagcacatacctctcttcaaagtcaacagcaggcacggctgaatggatggctccagaagtgcttagaaacgaacccgcagatgagaagtgtgatgtgtacagctacggggtcattctctgggaactctttacgttacagcaaccatggggaaaaatgaacccaatgcaagtggttggcgcggttggttttcaacatcgacgacttgatatccctgaatttgtggatcctggaattgcagatatcatcaggaaatgttggcagacggatccaaggttaagaccaagttttggagagatcatggattctttaaagcagctacagaaacctatccagagagcagcagttcccagttcttctgcattgaccactgatgagcaggaacaataacatcatgcttgatgaagaagatgactaaatgatgatgaaggtggggatcattctttacatattaatgttctgtggtgtgctgtccatgtgtattcaccatgttttgtttacaaattgtaaaaaaagatgaatgcaaaacaaaacaaacaaagaaaaaaagaaaaaagaagttattttgtcaatggtaaaaaaatcattgagaat

SEQ ID NO: 97798 - protein, 992 aa, Arabidopsis thaliana
  peptide (1)..(992): Ceres Seq. ID no. 13576173
MKMNMKKFLKKLRITPNQRDDGEGSVSNRSNKSSDAEPSPSDSLRSQDNSEFKPFLGLSNWLSSVTHRKSPSSSNATNSKEDDTTMEHGGPVGSESGMQGLGSSSNSKDPEVEEEYQIQLALELSAREDPEAAQIEAMKQFSLGSRPSAPENTPAELMAYRYWNYNCLGYDDKIVDGFYDLCGVMNESSLKRIPPLVDLQGTLVSDGVTWDAVLVNSSKDSNLLRLEQMALDIAAKSKSASSSGFVNSELVRQLAVLVADYMGGPVLDPDSTLRAWWSLSYSLKATLRSMVLPLGSLTIGLARHRALLFKVLCDSVGVPCRIVKGQQYTGSDDVAMNSIKTDDGREYIVDLMGDPGTLIPADAAGLQMDFDDSVYSASPRDVDSSHVASSSSGVESSIEEHTESWSAEHRSRTKGSREENQSAGGGDLMIPNIREAVGSQKAPVQHLSSKPTHSFTHARSPSWTEGVSSPAGRRMKVKDVSQYMIDAAKENPQLAQKLHDVLLESGVVAPRNLFSEVYSESMEATGEIKSVAESNDEKGKDFGTIQQGRNQSNLGPVRFLPPLPRPQSKAITHDLREHSGSGLGHLSEHCNIDGHSDSSHSETSTDYPRNVPVAVAAAAVVASSMVVAAAKSANSDSSTLELSAAAAAAVMATAAAVSRQFELDSLSNGDAGSGGLHGVDSGGERISDRSIGNESSKSDAAIDDVAECEILWEEITVAERIGLGSYGEVYRGDWHGTAVAVKKFIDQDITGEALEEFRSEVRMMRRLRHPNIVLFMGAVTRPPNLSIVTEFLPRGSLYRLIHRPNNQLDERKRLRMALDAARGMNYLHSCNPVIVHRDLKSPNLLVDKNWVVKVCDFGLSRMKVSTYLSSKSTAGTAEWMAPEVLRNEPADEKCDVYSYGVILWELFTLQQPWGKMNPMQVVGAVGFQHRRLDIPEFVDPGIADIIRKCWQTDPRLRPSFGEIMDSLKQLQKPIQRAAVPSSSALTTDEQEQ

SEQ ID NO: 97799 - protein, 990 aa, Arabidopsis thaliana
  peptide (1)..(990): Ceres Seq. ID no. 13576174
MNMKKFLKKLRITPNQRDDGEGSVSNRSNKSSDAEPSPSDSLRSQDNSEFKPFLGLSNWLSSVTHRKSPSSSNATNSKEDDTTMEHGGPVGSESGMQGLGSSSNSKDPEVEEEYQIQLALELSAREDPEAAQIEAMKQFSLGSRPSAPENTPAELMAYRYWNYNCLGYDDKIVDGFYDLCGVMNESSLKRIPPLVDLQGTLVSDGVTWDAVLVNSSKDSNLLRLEQMALDIAAKSKSASSSGFVNSELVRQLAVLVADYMGGPVLDPDSTLRAWWSLSYSLKATLRSMVLPLGSLTIGLARHRALLFKVLCDSVGVPCRIVKGQQYTGSDDVAMNSIKTDDGREYIVDLMGDPGTLIPADAAGLQMDFDDSVYSASPRDVDSSHVASSSSGVESSIEEHTESWSAEHRSRTKGSREENQSAGGGDLMIPNIREAVGSQKAPVQHLSSKPTHSFTHARSPSWTEGVSSPAGRRMKVKDVSQYMIDAAKENPQLAQKLHDVLLESGVVAPRNLFSEVYSESMEATGEIKSVAESNDEKGKDFGTIQQGRNQSNLGPVRFLPPLPRPQSKAITHDLREHSGSGLGHLSEHCNIDGHSDSSHSETSTDYPRNVPVAVAAAAVVASSMVVAAAKSANSDSSTLELSAAAAAAVMATAAAVSRQFELDSLSNGDAGSGGLHGVDSGGERISDRSIGNESSKSDAAIDDVAECEILWEEITVAERIGLGSYGEVYRGDWHGTAVAVKKFIDQDITGEALEEFRSEVRMMRRLRHPNIVLFMGAVTRPPNLSIVTEFLPRGSLYRLIHRPNNQLDERKRLRMALDAARGMNYLHSCNPVIVHRDLKSPNLLVDKNWVVKVCDFGLSRMKVSTYLSSKSTAGTAEWMAPEVLRNEPADEKCDVYSYGVILWELFTLQQPWGKMNPMQVVGAVGFQHRRLDIPEFVDPGIADIIRKCWQTDPRLRPSFGEIMDSLKQLQKPIQRAAVPSSSALTTDEQEQ

SEQ ID NO: 97800 - protein, 988 aa, Arabidopsis thaliana
  peptide (1)..(988): Ceres Seq. ID no. 13576175
MKKFLKKLRITPNQRDDGEGSVSNRSNKSSDAEPSPSDSLRSQDNSEFKPFLGLSNWLSSVTHRKSPSSSNATNSKEDDTTMEHGGPVGSESGMQGLGSSSNSKDPEVEEEYQIQLALELSAREDPEAAQIEAMKQFSLGSRPSAPENTPAELMAYRYWNYNCLGYDDKIVDGFYDLCGVMNESSLKRIPPLVDLQGTLVSDGVTWDAVLVNSSKDSNLLRLEQMALDIAAKSKSASSSGFVNSELVRQLAVLVADYMGGPVLDPDSTLRAWWSLSYSLKATLRSMVLPLGSLTIGLARHRALLFKVLCDSVGVPCRIVKGQQYTGSDDVAMNSIKTDDGREYIVDLMGDPGTLIPADAAGLQMDFDDSVYSASPRDVDSSHVASSSSGVESSIEEHTESWSAEHRSRTKGSREENQSAGGGDLMIPNIREAVGSQKAPVQHLSSKPTHSFTHARSPSWTEGVSSPAGRRMKVKDVSQYMIDAAKENPQLAQKLHDVLLESGVVAPRNLFSEVYSESMEATGEIKSVAESNDEKGKDFGTIQQGRNQSNLGPVRFLPPLPRPQSKAITHDLREHSGSGLGHLSEHCNIDGHSDSSHSETSTDYPRNVPVAVAAAAVVASSMVVAAAKSANSDSSTLELSAAAAAAVMATAAAVSRQFELDSLSNGDAGSGGLHGVDSGGERISDRSIGNESSKSDAAIDDVAECEILWEEITVAERIGLGSYGEVYRGDWHGTAVAVKKFIDQDITGEALEEFRSEVRMMRRLRHPNIVLFMGAVTRPPNLSIVTEFLPRGSLYRLIHRPNNQLDERKRLRMALDAARGMNYLHSCNPVIVHRDLKSPNLLVDKNWVVKVCDFGLSRMKVSTYLSSKSTAGTAEWMAPEVLRNEPADEKCDVYSYGVILWELFTLQQPWGKMNPMQVVGAVGFQHRRLDIPEFVDPGIADIIRKCWQTDPRLRPSFGEIMDSLKQLQKPIQRAAVPSSSALTTDEQEQ

SEQ ID NO: 97801 - DNA, 1901 bp, Arabidopsis thaliana
  misc_feature (1)..(1901): Ceres Seq. ID no. 13576325
  misc_feature (1)..(1901): Ortholog of  Ceres SEQ ID NO 14313784 as cited in SEQ ID NO 54208
atggggagcttaatgatggaagagaagcaactggatttcaaccgtccgcttatatccattagacggcctacacaaacttcagaatctgagagcaaaacaagatcttttgattcagtaaccaacatgattcctccttctccaccagtttacaagtctgatatcaagtcaggtcctgtgagaaatccaggaactgttccttttcaatgggaacataagcctggaaagccaaaagacgaaaggaaaccggttttgcaaagttttgtagagccacattttgtgccaaagcttcctcctggtagagagcgagtagtagagttagggaggaaacctgaaagtactggagctgatcaccagaccaaaactgtatcgtcttcggataaatatcttgtggaggatgcaaagagtaatagttctcggtatgatgatgatgatgatgatagtgatggtacttatcttgatgcaactgatacactttcaagaactgagtcattcttctttaactgtagtgctgttagtggtgcgagtggtttggatggttcagggatactagtagagccatttggaactttatcgactgatcgacaaactcaggatctaatgatggggagattcttgcctgcagctaaagctttgacttcagaatcacctccacatcttgctaggaaaccacctaaaccagaagaaccggtgaagcagttgatgaagaagaaacagaacaaagtggagcaaaatccgtatcggtttcgtcattcgcctgatcaagaagaggaagatggaaatataagcagcatgatggcgtctggtgtttgtggattactccctcaactctgcttgagaagctctttgggactattgaatccggttccatctgtgagaatgcagcaacaaagagctgtttctgttcgtcgtatgcggtctaagtaccaagattctgcaccttctaatgaaactcataacaagcaaaatgaagataagaggaagttgaagctaattgaatcagttgcaaaagggtcttctcaaggtgagtcattatcagtatcttctataccacaaggaaaagagaaactcgagaacgttggcaccgcttcacgcagtaaaatcagtaaaaactttggtgagctcttggctagtgatgagaatacatgggaaccttcatccgagactcctgtggcagagaaaactctgtatgtagacattgtgcatctagtagataagaaggtacaagaagagtccaagaagcagcctatattgaaagagtctccttcactagacattgttcctgtaaaagatgaagaagctgatatctcgcagcctaaaagcattgagcaagagaatggtaacagagatgaggatttcactaaattctcaagtcagaaagttgaagaatgtcctgatcatcaagctattgttgcactgccagaatccgatgtggtagagattacaaaggagaagaagattgatcttgaagttcagttgcaagtaatcacaacaaatattgaaagttcaaggcttcatcatcgttcaagttatctcattgttcctccaccaccattaccaaaagctccttcagattcttggttaaagcgtacattaccaacaataccaccaaaaaacaactcattcgcatggttacagtctcttggcactgatgatgataatcactttaccaagactcaagctaatccaaagtgggaaactatggtcaaaacgtccaatacacagcaagggtttgtgtgcttctccaaggaaacactaaaccctataccagagtcatagcaagaccaaaacaaaattctcactggtggtaatgaagaaactgtaaaatttttcacaccaaattacatgtaaattttcaacaataaagaagggatgagccaataaagtttgggtattttgtctct

SEQ ID NO: 97802 - protein, 591 aa, Arabidopsis thaliana
  peptide (1)..(591): Ceres Seq. ID no. 13576326
MGSLMMEEKQLDFNRPLISIRRPTQTSESESKTRSFDSVTNMIPPSPPVYKSDIKSGPVRNPGTVPFQWEHKPGKPKDERKPVLQSFVEPHFVPKLPPGRERVVELGRKPESTGADHQTKTVSSSDKYLVEDAKSNSSRYDDDDDDSDGTYLDATDTLSRTESFFFNCSAVSGASGLDGSGILVEPFGTLSTDRQTQDLMMGRFLPAAKALTSESPPHLARKPPKPEEPVKQLMKKKQNKVEQNPYRFRHSPDQEEEDGNISSMMASGVCGLLPQLCLRSSLGLLNPVPSVRMQQQRAVSVRRMRSKYQDSAPSNETHNKQNEDKRKLKLIESVAKGSSQGESLSVSSIPQGKEKLENVGTASRSKISKNFGELLASDENTWEPSSETPVAEKTLYVDIVHLVDKKVQEESKKQPILKESPSLDIVPVKDEEADISQPKSIEQENGNRDEDFTKFSSQKVEECPDHQAIVALPESDVVEITKEKKIDLEVQLQVITTNIESSRLHHRSSYLIVPPPPLPKAPSDSWLKRTLPTIPPKNNSFAWLQSLGTDDDNHFTKTQANPKWETMVKTSNTQQGFVCFSKETLNPIPES

SEQ ID NO: 97803 - protein, 587 aa, Arabidopsis thaliana
  peptide (1)..(587): Ceres Seq. ID no. 13576327
MMEEKQLDFNRPLISIRRPTQTSESESKTRSFDSVTNMIPPSPPVYKSDIKSGPVRNPGTVPFQWEHKPGKPKDERKPVLQSFVEPHFVPKLPPGRERVVELGRKPESTGADHQTKTVSSSDKYLVEDAKSNSSRYDDDDDDSDGTYLDATDTLSRTESFFFNCSAVSGASGLDGSGILVEPFGTLSTDRQTQDLMMGRFLPAAKALTSESPPHLARKPPKPEEPVKQLMKKKQNKVEQNPYRFRHSPDQEEEDGNISSMMASGVCGLLPQLCLRSSLGLLNPVPSVRMQQQRAVSVRRMRSKYQDSAPSNETHNKQNEDKRKLKLIESVAKGSSQGESLSVSSIPQGKEKLENVGTASRSKISKNFGELLASDENTWEPSSETPVAEKTLYVDIVHLVDKKVQEESKKQPILKESPSLDIVPVKDEEADISQPKSIEQENGNRDEDFTKFSSQKVEECPDHQAIVALPESDVVEITKEKKIDLEVQLQVITTNIESSRLHHRSSYLIVPPPPLPKAPSDSWLKRTLPTIPPKNNSFAWLQSLGTDDDNHFTKTQANPKWETMVKTSNTQQGFVCFSKETLNPIPES

SEQ ID NO: 97804 - protein, 586 aa, Arabidopsis thaliana
  peptide (1)..(586): Ceres Seq. ID no. 13576328
MEEKQLDFNRPLISIRRPTQTSESESKTRSFDSVTNMIPPSPPVYKSDIKSGPVRNPGTVPFQWEHKPGKPKDERKPVLQSFVEPHFVPKLPPGRERVVELGRKPESTGADHQTKTVSSSDKYLVEDAKSNSSRYDDDDDDSDGTYLDATDTLSRTESFFFNCSAVSGASGLDGSGILVEPFGTLSTDRQTQDLMMGRFLPAAKALTSESPPHLARKPPKPEEPVKQLMKKKQNKVEQNPYRFRHSPDQEEEDGNISSMMASGVCGLLPQLCLRSSLGLLNPVPSVRMQQQRAVSVRRMRSKYQDSAPSNETHNKQNEDKRKLKLIESVAKGSSQGESLSVSSIPQGKEKLENVGTASRSKISKNFGELLASDENTWEPSSETPVAEKTLYVDIVHLVDKKVQEESKKQPILKESPSLDIVPVKDEEADISQPKSIEQENGNRDEDFTKFSSQKVEECPDHQAIVALPESDVVEITKEKKIDLEVQLQVITTNIESSRLHHRSSYLIVPPPPLPKAPSDSWLKRTLPTIPPKNNSFAWLQSLGTDDDNHFTKTQANPKWETMVKTSNTQQGFVCFSKETLNPIPES

SEQ ID NO: 97805 - DNA, 934 bp, Arabidopsis thaliana
  misc_feature (1)..(934): Ceres Seq. ID no. 13576339
  misc_feature (1)..(934): Ortholog of  Ceres SEQ ID NO 13638567 as cited in SEQ ID NO 51303
  misc_feature (1)..(934): Ortholog of  Ceres SEQ ID NO 12610031 as cited in SEQ ID NO 55811
  misc_feature (1)..(934): Ortholog of  Ceres SEQ ID NO 12610896 as cited in SEQ ID NO 55861
  misc_feature (1)..(934): Ortholog of  Ceres SEQ ID NO 12619664 as cited in SEQ ID NO 66048
  misc_feature (1)..(934): Ortholog of  Ceres SEQ ID NO 12635952 as cited in SEQ ID NO 0
cccccgctcaaccacaaagatctctctacttcaataaatctccaccttgctttaagaacaaagtcttaacaaatggcaggaatcaaagttttcggtcacccagcttccacagccactagaagagttctcatcgctcttcacgagaagaatctcgactttgaattcgttcatatcgagctcaaagatggtgaacacaagaaagagcctttcatcttccgcaacccttttggtaaagttccagcctttgaagatggagacttcaagcttttcgaatcaagagcaatcactcaatacatagctcatttttactcagacaaaggaaaccaacttgtctcccttggctccaaggacattgcgggcatagccatgggcattgaaattgaatcgcatgagtttgacccagttggttcaaagcttgtttgggagcaagtcttaaagcctttgtatggtatgaccacagacaaaaccgttgttgaagaagaagaggctaagctagccaaggtcctcgatgtttacgaacacaggcttggtgagtccaagtatttggcttctgataaattcactttggtcgatcttcacactatccctgtgattcagtacttgcttggtacaccaactaagaaactctttgacgagcgtccacatgtcagtgcttgggttgctgacatcacttctaggccttctgctaagaaggttctttaagtgactcacaaactgttaatcagaagattgaataaagtggcgatgacctcattgccctaattctcataaacaataaaagtggcgatgacctaattgccaaattctcatacactctgtgatttttttgtgtgtgtctcctctgttttttttttttggtttgaatgtaatcttcaataataatgagtcttgatatataataaaaatatatttggtagcctaaagtttagctact

SEQ ID NO: 97806 - protein, 209 aa, Arabidopsis thaliana; identical to SEQ ID NO: 34803
  peptide (1)..(209): Ceres Seq. ID no. 13576340

SEQ ID NO: 97807 - protein, 111 aa, Arabidopsis thaliana; identical to SEQ ID NO: 34804
  peptide (1)..(111): Ceres Seq. ID no. 13576341

SEQ ID NO: 97808 - DNA, 1074 bp, Arabidopsis thaliana
  misc_feature (1)..(1074): Ceres Seq. ID no. 13576346
  misc_feature (1)..(1074): Ortholog of  Ceres SEQ ID NO 13597333 as cited in SEQ ID NO 63974
  misc_feature (1)..(1074): Ortholog of  Ceres SEQ ID NO 13599307 as cited in SEQ ID NO 0
acttcttctagtcttaaaataaaacaaacaaaaaatctagtgttcggctctaacacgctcgacgaccatggcggtctcgtttaatacaacgcttcaccagccttctctgagtccgagctgtagcatcaagctttattctgggttaaagcctcaatctgcaagctttttggcaagtgggtatcagaatttgaacaaggagttctatggaagagtttataagagtctgcaatctgggactgggaaagcgagcaggtcacgggtaaagatgatgccaataggaacaccgagagtaccctacagaaaccgagaagaagggacttggcaatgggttgatatatggaatgccctttatcgagagcgtgtaatcttcattggacaaaacattgatgaagagtttagcaaccagatattagcaaccatgttgtaccttgatactcttgatgactcgaggaggatttatatgtacctaaatggtccgggtggtgatcttactccaagtctagccatctatgatacaatgaagagcttgaaaagtccggttgggacacattgcgttgggcttgcttacaaccttgcaggttttcttcttgcggctggagaaaagggtcaccgatttgcgatgccattatcaagaatcgccctccagtcaccagctggtgcagcccgtggtcaggctgatgatatccaaaatgaagcaaaagagctttcaaggataagagactacctcttcaatgaactagccaagaatacaggccagcctgcggaaagggtcttcaaagacttgagccgggtgaaaaggttcaatgcagaggaagcaatcgagtatggacttattgataagattgttagaccaccgcgcatcaaagaagacgctcctcgccaagacgaaagcgcagggctaggctagtctttttgtttgtttgttatgtcaaaagttttaatctttatgttattgtgattgttacctaataaaatcactgattattgtttttttattccaccgattatctgatttctacaaacattttaaactgctgtgtaagatgtaaaggaagtgacttccctggaaaattc

SEQ ID NO: 97809 - protein, 279 aa, Arabidopsis thaliana; identical to SEQ ID NO: 26212
  peptide (1)..(279): Ceres Seq. ID no. 13576347

SEQ ID NO: 97810 - protein, 213 aa, Arabidopsis thaliana; identical to SEQ ID NO: 26213
  peptide (1)..(213): Ceres Seq. ID no. 13576348

SEQ ID NO: 97811 - protein, 212 aa, Arabidopsis thaliana; identical to SEQ ID NO: 27066
  peptide (1)..(212): Ceres Seq. ID no. 13576349

SEQ ID NO: 97812 - DNA, 740 bp, Arabidopsis thaliana
  misc_feature (1)..(740): Ceres Seq. ID no. 13576352
  misc_feature (1)..(740): Ortholog of  Ceres SEQ ID NO 13660334 as cited in SEQ ID NO 67468
ccacgcaattacctcttctcactctcagacattttgtcaaacagatggtgctcgtttctgaatcagcttaagaactaacaaggagacagacactaagcttggtttttctctccgattagacggaggaaaaagtgaaaacgaggggcttagacgagtgatgtgatagagatggaaggagttgagctagaattagaaagaagaagcaagttcttgaacagtttgatacagaagaagaaggctaaagaacagcaagatcagaaagatgagttcaatgttcgtgttagggcttcagatatgcctttgcctcaacagaacagagcctttagtttgtcgcgtgagattttgaatgctactccagggaaggctgataacaaaagactcgctcatgccctaaaaaaggacttcgattcagcctacggcccggcatggcactgcattgttggaacaagctttggttcatacgtgactcattccacaggaggattcctatattttcagatcgacaaagtttacgttcttctcttcaagactgccgtggagccgttagatcaaaaatgagataaaacgttgatgatcagagcatcttcaatttaatccttttcttttagaattctctgtcttgtatcccacaatgtaattctgcctaagacaaaatctttgtggctcctattgtgtaattagaagtcatcttctctactgtgaatcgtttcaacttcacaatgcaaaatattgttcttctc

SEQ ID NO: 97813 - protein, 129 aa, Arabidopsis thaliana; identical to SEQ ID NO: 23535
  peptide (1)..(129): Ceres Seq. ID no. 13576353

SEQ ID NO: 97814 - protein, 87 aa, Arabidopsis thaliana; identical to SEQ ID NO: 23536
  peptide (1)..(87): Ceres Seq. ID no. 13576354

SEQ ID NO: 97815 - DNA, 1030 bp, Arabidopsis thaliana
  misc_feature (1)..(1030): Ceres Seq. ID no. 13576355
  misc_feature (1)..(1030): Ortholog of  Ceres SEQ ID NO 12610385 as cited in SEQ ID NO 55938
  misc_feature (1)..(1030): Ortholog of  Ceres SEQ ID NO 13661939 as cited in SEQ ID NO 61170
gacaaaccaaaaaaaagcctaaaaagccgaccttttttctttctttctctcctctacctctcagcttctgctggatctctccagcagacacgatcttgttcggagagattcgtaggggaccgatctatcaaggcttcaagggcaaacagaaatggaccacgacaagacaggatgccaaagcccacctgaaggtcccaagctatgtactaacaactgcggtttctttggaagcgctgccacaatgaacatgtgttctaagtgtcacaaggatatgttgttccaacaggagcagggcgctaagtttgcatctgcagtgtctggaacatcgtcatccagcaacatcataaaggaaacctttaccgctgcgttggtcgatattgaaaccaaatccgttgagccgatgactgtttctgtacagccatcctctgtccaagtcgttgcagaggtagtagcaccagaagaagctgcgaaaccaaagggaccaagccgatgtactacttgcaataagcgggttggcctgactggattcaaatgtcgctgtgggagcctcttctgcggaacacaccgctatgcagacgtacatgactgctccttcaattaccatgctgctgcgcaagaggcgatagctaaggcaaacccggttgtgaaagcagagaagcttgacaaaatctgaaaatctaagtaaacttctctggtttcatcaggtggcctggtgtttccttctcctgtctgtgtctggttcaagtattctcatgttaaaaaggttttatataaggtcgaatgaaagcgtgcttgatctttagcgtcttccatctctctgtggtgtggaactttctattatctgtgtttgcaagcagagaaacgtgctcttaaaaaaaatgctttgtgtgtttatctttctactatttttgagcactgtgttattgtttcctgtttggtctgtatcatattgagattgtctctgtagctacatgaagcttatttaaaaaggcctgtgtttgtccttcaatcagtgattcctttcaatttc

SEQ ID NO: 97816 - protein, 173 aa, Arabidopsis thaliana; identical to SEQ ID NO: 81692
  peptide (1)..(173): Ceres Seq. ID no. 13576356

SEQ ID NO: 97817 - protein, 143 aa, Arabidopsis thaliana; identical to SEQ ID NO: 81693
  peptide (1)..(143): Ceres Seq. ID no. 13576357

SEQ ID NO: 97818 - protein, 141 aa, Arabidopsis thaliana; identical to SEQ ID NO: 81694
  peptide (1)..(141): Ceres Seq. ID no. 13576358

SEQ ID NO: 97819 - DNA, 1479 bp, Arabidopsis thaliana
  misc_feature (1)..(1479): Ceres Seq. ID no. 13576359
  misc_feature (1)..(1479): Ortholog of  Ceres SEQ ID NO 14315346 as cited in SEQ ID NO 53970
  misc_feature (1)..(1479): Ortholog of  Ceres SEQ ID NO 13594128 as cited in SEQ ID NO 58608
  misc_feature (1)..(1479): Ortholog of  Ceres SEQ ID NO 14309682 as cited in SEQ ID NO 58908
  misc_feature (1)..(1479): Ortholog of  Ceres SEQ ID NO 15176122 as cited in SEQ ID NO 62462
  misc_feature (1)..(1479): Ortholog of  Ceres SEQ ID NO 12624849 as cited in SEQ ID NO 62773
gaaattgtcctctcagttcctacgcgaagttttcaacagattcgccggagaatcttcgaatcaacggcggagaaatggctctatcacgcctctcatcacgatccaacatcatcactcgtcccttctccgccgccttcagccgattaatctcaacggacacaactccgatcacaatcgagacttcgcttcctttcacagctcacttatgtgatccaccgtcacgctccgtcgaatcatcgagtcaagagcttctcgatttcttcagaaccatggcgttgatgcgacgtatggaaatcgcagccgattcgctttacaaagcgaagctaatccgagggttttgtcatctctacgacggccaagaagctgtagctataggcatggaagctgcgattacaaagaaagacgcgattattactgcttatcgtgatcactgtattttcttaggtcgtggtggttcgcttcatgaggttttctcagagcttatgggaagacaagctggttgttctaaagggaaaggtggatctatgcacttctataagaaggaatcgtcgttttacggtggtcatgggattgttggtgctcaggttccattaggttgtggtattgcttttgctcagaagtataacaaggaagaggctgtcacatttgctttgtatggtgatggtgctgcgaatcagggacagttgtttgaagctttgaatatttctgctctttgggatttgcctgcaattttggtctgcgagaacaatcactatggaatgggaactgctgaatggagagccgctaagagtccatcttactacaagcgtggtgattatgttcctggactcaaggtagatggtatggatgcatttgctgtcaaacaagcttgcaaatttgctaagcagcatgcgttggagaaggggccaataattcttgagatggacacatacaggtaccacggtcactccatgtctgatcctgggagcacataccgtacccgagatgagatatctggtgtgaggcaggaacgggatccaattgagagaataaagaagctggtactatctcatgacctagcaaccgagaaagagcttaaggatatggagaaggaaattagaaaagaagtagatgacgccattgccaaagctaaggattgcccaatgccagagccttctgagctctttaccaatgtgtatgtgaagggatttggcaccgagtcatttggacctgacagaaaagaagtcaaagcttcccttccatgatcatggagctcttgttcgttaaactgccacgtgtcatgagaaagttggctgatagagaaatctatgaatatgaataaagatctgattgtatactctctctctccccccccttctgaactttaatctctctgtatctttgtttacaaacataaggagaaacaatgttattcttgtgaagctttagtagtctcgtgtttaatattcaagcaatcgagttgagatctcattttgtgct

SEQ ID NO: 97820 - protein, 413 aa, Arabidopsis thaliana; identical to SEQ ID NO: 42167
  peptide (1)..(413): Ceres Seq. ID no. 13576360

SEQ ID NO: 97821 - protein, 389 aa, Arabidopsis thaliana; identical to SEQ ID NO: 24019
  peptide (1)..(389): Ceres Seq. ID no. 13576361

SEQ ID NO: 97822 - protein, 324 aa, Arabidopsis thaliana; identical to SEQ ID NO: 24020
  peptide (1)..(324): Ceres Seq. ID no. 13576362

SEQ ID NO: 97823 - DNA, 1325 bp, Arabidopsis thaliana
  misc_feature (1)..(1325): Ceres Seq. ID no. 13576363
  misc_feature (1)..(1325): Ortholog of  Ceres SEQ ID NO 13596585 as cited in SEQ ID NO 62424
  misc_feature (1)..(1325): Ortholog of  Ceres SEQ ID NO 15225240 as cited in SEQ ID NO 66495
accgtttgttcttcatctcctcgccgccgcctcctactctctctttctctctaaattgctcaattctctcggccacagacctagacaaggatggtgactaaagcagaaaaacaattcgccaaaaatttcaacatagacgatctccctgacgtccctgccggacttcctccacatctcaaagcccagcaaactcgtgtcgtctctaaaaacaacgctcctgctcatactgcgagtgccatttactcgggtacctatgtttcttctacggaagaggacgacaatgtgaagctaggaaacttctatgataacttcaaagttgatgtggttagtctcacaaagacagatatggaatttgatatgattggtattgatgcagcgtttgccaatgcattccgaaggatccttatagctgaggttccttcaatggctattgaaaaagtgttgatagcgtacaacacatcggttattatagacgaagttcttgctcacaggatgggtcttattccaattgccgcagatccaagactttttgaatatttatccgaacatgatcaggcgaatgaaaagaacaccattgtattcaaactccatgtgaaatgtccgaaaaatagaccacgtcttaaagttttaacgagtgatttaaaatggttaccaaatggaagtgagcttctgagagaatcggaaaataaaacctcaaagccaaaaacttacacttcattcagttgcagccaagattcattacctgaatttgctaataatcctatcactccatgcgacctcgatatcttgatagcaaaactcgcccctggtcaggaaatcgagctcgaagctcatgcggttaagggcattggtaaaacacatgcaaagtggtctccagtagggactgcttggtatagaatgcatcctgaggtggttctacgtggggaagttgaggatgaacttgctgaacgacttgtaaacgtctgcccacagaatgttttcgacattgaagacatgggaaaaggtaagaaaagggcaacagtagcgcagccacgtaagtgcacattgtgtaaggaatgcgtaagagacgatgatttggtagaccatgtggatcttggcagtgttaagaaccattttatatttaacattgagtccaccggatcactgcctccagaggttctcttcactgaagctgtgaagatattggaagctaaatgtgaagctataaccgacttttgagttctggtttagttcaattttgaattgtctgtctatcaatgtttctcctcctattgataaattaccaacaaacaacattgacatatttatttatacggttgttgttc

SEQ ID NO: 97824 - protein, 375 aa, Arabidopsis thaliana; identical to SEQ ID NO: 40103
  peptide (1)..(375): Ceres Seq. ID no. 13576364

SEQ ID NO: 97825 - protein, 290 aa, Arabidopsis thaliana; identical to SEQ ID NO: 40104
  peptide (1)..(290): Ceres Seq. ID no. 13576365

SEQ ID NO: 97826 - protein, 286 aa, Arabidopsis thaliana; identical to SEQ ID NO: 40105
  peptide (1)..(286): Ceres Seq. ID no. 13576366

SEQ ID NO: 97827 - DNA, 1395 bp, Arabidopsis thaliana
  misc_feature (1)..(1395): Ceres Seq. ID no. 13576371
  misc_feature (1)..(1395): Ortholog of  Ceres SEQ ID NO 13596090 as cited in SEQ ID NO 68377
aaaaccttttgacaaaaaccagatattctctcccatttccctcaatcatccaaaccacgcgccgcctctaatctctcacgcgccgcggtccgatttcaaatcctccatcaatttctccatcccctcttctcgtttattcatcaagatctcacaaaatccaaatttaactatagggtttcaattacttcgatcaaaaggtatctaatttatgaattagaattcatcatcatgggaggtgttacatcatcgatcgctgctaaatttgctttctttccaccaacgccaccgtcgtatgaggttatagccgacgatagctgcggtggacgtttatacataccggagattcctcgccgtgatgatgttgatatattgaagcttcgtactcgttgtggtaatgagatcgttgctgtttatgtgaaacattcaaaagctaatggcacgcttttgtattctcatggtaacgctgctgatttgggtcaaatgtttgagcttttcgttgagcttagcaatcgccttcgcgtcaatcttatggggtatgattactctggttatggtcagtctactggacaggctagcgagtgtaatacatatgctgatatagaggcatcatataaatgcctcaaggaaaagtacggtgtaaaagacgatcaactgatagtatatggtcaatctgttggtagtggacctacggttgatctagcttcacgcacacctaacttaagaggcgtggttttacagtgtcctatcctgtctgggatgagggttttgtatcctgtgaaatgtacatattggtttgacatttacaagaatattgacaagatcggctcagttacctgtcctgtattagtaatccatggtactgcggatgaagtagttgattggtctcacggaaaacggctctgggaactcagcaaagagaagtatgaacctttgtggataagtggaggtggacactgtgaccttgaactctatccagatttcatcagacatctgaagaaatttgttgtatcacttggcaacaaacaagcagagcaagctcccacatagcgagatagctgatatgtttgaaatgggttattttcagagaaggctagacagttggctacagaaagttcaaaagaaagtaataagcctgagagattcaagatgagagtggtaataggtttagtcattaaaagataaaaaaaggtctagtctggtgacacaatgggtcaatctggaatgtaaacagtatagtacatttcgtgaataaatgtattttctgctttcatgctttagtaggttccaaagaggttactttgtttatttcacattcatggatcatacttttatgattctataacatgccagagaaagctgtaaaaataaataaatgtattggctactttttttggc

SEQ ID NO: 97828 - protein, 272 aa, Arabidopsis thaliana; identical to SEQ ID NO: 43120
  peptide (1)..(272): Ceres Seq. ID no. 13576372

SEQ ID NO: 97829 - protein, 188 aa, Arabidopsis thaliana; identical to SEQ ID NO: 43121
  peptide (1)..(188): Ceres Seq. ID no. 13576373

SEQ ID NO: 97830 - protein, 172 aa, Arabidopsis thaliana; identical to SEQ ID NO: 43122
  peptide (1)..(172): Ceres Seq. ID no. 13576374

SEQ ID NO: 97831 - DNA, 1364 bp, Arabidopsis thaliana
  misc_feature (1)..(1364): Ceres Seq. ID no. 13576379
  misc_feature (1)..(1364): Ortholog of  Ceres SEQ ID NO 13596554 as cited in SEQ ID NO 62818
  misc_feature (1164)..(1164): n is a, c, t, g, unknown, or other
  misc_feature (1191)..(1191): n is a, c, t, g, unknown, or other
  misc_feature (1303)..(1303): n is a, c, t, g, unknown, or other
  misc_feature (1322)..(1322): n is a, c, t, g, unknown, or other
atggtgaaggaaacagtgtattatgatgttcttggtgtcactccctctgcttctgaggaagagattcgcaaggcttattacatcaaggcaagacaagttcatcctgacaagaatcaaggtgatcctctagctgctgaaaaacaggttcttggtgaagcttaccaggttctaagtgatcctgttcatcgtgaagcgtatgatcggactggaaaattctcagctcccaaagaaacaatggttgatccaacggctgttttcgctcttcttttcggaagtgaactattcgaggattatatcggtcacttggctgttgcatcaatggcttccactcaaatggcttctgaaatcgaaaactctgatcagtttcaagacaaactaaaggcaaatcaaaaaccatatgctgttcagaaagaaagagaagaaaacctttcaaggtttctcaaagattttctgagtcaatatgtccacggagacaaagaaggattcataagccgcgcagaatctgaagccaagagactttcagatgcagcttttggagcggatatgttgcatacaattggatatgtatacacaagacaagcagctcaagaacttgggaagagagctctttacttaggagttccatttgtagctgaatgggttaggaacaaaggtcattcttggaaatcacagattagtgcagctaaaggagctttacagttacttcagctgcaagaagagagtaaccggagattaaagaaagatgggactagtccagcaaatgagttagagtctcatattcagaccaacaaagaaacattgatgggatctttgtggaaacttaatgttgtcgacattgaagtgactctgttacatgtgtgtcagatggtctttcgcgaaaacaatttgagaaaggaggagctcaagtctagagcaatggctctcaagattcttgggaagatttttcagcaagaaaagcaatcgaagaacggtacaacatcaagaaaagaagatgaagacagcgacgatgatgacagtagcagcgatgacgattcttcacaaccactttcatacagaactcctctgcttactcaggggattggtagacttttcagatgtctctgcaatccagcattcgatgtagacgatgatgaaattgtatacaaaggcaaatgatcaataccncactcaaatatttcaatttgatgggtntcacatgtgaaatgtgatgcagcttcttaagttattaattctttataaatatatgtaatgatgataattgatgggatcaaacttaacaaattgttaaaataagtttattttntaaaagaagaaaaactccnctactttgtaatcattacaagattgctatactgttttgttgt

SEQ ID NO: 97832 - protein, 384 aa, Arabidopsis thaliana
  peptide (1)..(384): Ceres Seq. ID no. 13576380
MVKETVYYDVLGVTPSASEEEIRKAYYIKARQVHPDKNQGDPLAAEKQVLGEAYQVLSDPVHREAYDRTGKFSAPKETMVDPTAVFALLFGSELFEDYIGHLAVASMASTQMASEIENSDQFQDKLKANQKPYAVQKEREENLSRFLKDFLSQYVHGDKEGFISRAESEAKRLSDAAFGADMLHTIGYVYTRQAAQELGKRALYLGVPFVAEWVRNKGHSWKSQISAAKGALQLLQLQEESNRRLKKDGTSPANELESHIQTNKETLMGSLWKLNVVDIEVTLLHVCQMVFRENNLRKEELKSRAMALKILGKIFQQEKQSKNGTTSRKEDEDSDDDDSSSDDDSSQPLSYRTPLLTQGIGRLFRCLCNPAFDVDDDEIVYKGK

SEQ ID NO: 97833 - protein, 306 aa, Arabidopsis thaliana
  peptide (1)..(306): Ceres Seq. ID no. 13576381
MVDPTAVFALLFGSELFEDYIGHLAVASMASTQMASEIENSDQFQDKLKANQKPYAVQKEREENLSRFLKDFLSQYVHGDKEGFISRAESEAKRLSDAAFGADMLHTIGYVYTRQAAQELGKRALYLGVPFVAEWVRNKGHSWKSQISAAKGALQLLQLQEESNRRLKKDGTSPANELESHIQTNKETLMGSLWKLNVVDIEVTLLHVCQMVFRENNLRKEELKSRAMALKILGKIFQQEKQSKNGTTSRKEDEDSDDDDSSSDDDSSQPLSYRTPLLTQGIGRLFRCLCNPAFDVDDDEIVYKGK

SEQ ID NO: 97834 - protein, 278 aa, Arabidopsis thaliana
  peptide (1)..(278): Ceres Seq. ID no. 13576382
MASTQMASEIENSDQFQDKLKANQKPYAVQKEREENLSRFLKDFLSQYVHGDKEGFISRAESEAKRLSDAAFGADMLHTIGYVYTRQAAQELGKRALYLGVPFVAEWVRNKGHSWKSQISAAKGALQLLQLQEESNRRLKKDGTSPANELESHIQTNKETLMGSLWKLNVVDIEVTLLHVCQMVFRENNLRKEELKSRAMALKILGKIFQQEKQSKNGTTSRKEDEDSDDDDSSSDDDSSQPLSYRTPLLTQGIGRLFRCLCNPAFDVDDDEIVYKGK

SEQ ID NO: 97835 - DNA, 1366 bp, Arabidopsis thaliana
  misc_feature (1)..(1366): Ceres Seq. ID no. 13576383
  misc_feature (1)..(1366): Ortholog of  Ceres SEQ ID NO 13662937 as cited in SEQ ID NO 64415
  misc_feature (1)..(1366): Ortholog of  Ceres SEQ ID NO 13595984 as cited in SEQ ID NO 68340
  misc_feature (1)..(1366): Ortholog of  Ceres SEQ ID NO 12635014 as cited in SEQ ID NO 0
acacaacaacaacacatccactcgaattttctatttccgaataacaaaaccgatcggcggagacatgacggcggcacaagggaactctaacgagactctgttttcttcttacaagatgggaagattcgatctctctcatcgagtggttctggcgccgatgacgcggtgcagggcgttgaacggagtaccaaacgcggcgttggcagagtattatgctcaacggaccactcccggcggttttctcatctccgaaggcaccatggtctctcccggatccgcagggttcccacatgtgcctggaatctattcagatgaacaagtagaagcatggaagcaagttgtggaagcagttcacgctaagggaggtttcatcttttgtcaattatggcatgttggacgtgcttctcatgcagtgtatcaacctaatggaggatcaccaatatcgtcaacgaacaaaccaatctcggaaaacaggtggcgagttttgttgcccgatggttcccacgtgaagtacccgaaacctcgggctttagaagcttccgagatacctcgggtggtggaggattattgcctttctgctttgaatgcgattcgagctggtttcgatgggattgagatccacggggcgcatggttaccttattgatcagtttttgaaagatgggatcaatgaccgtactgaccaatacggaggatccattgcaaaccgttgtagattcttgaaacaagtagtggaaggtgtagtttcagccataggagctagtaaagttggtgtgagggtatctccggctatagatcacttggacgcaactgattctgacccactatcactcgggctagccgtggttggcatgctcaataagttacaaggtgttaatggctcaaagctcgcttaccttcacgttacacaacctcgctaccacgcctacgggcaaacagagtctggaaggcaagggagtgatgaggaagaagctaagctaatgaagagcttgaggatggcttataatggaacctttatgtctagtggaggattcaataaggaactaggtatgcaagctgttcaacaaggtgatgctgatttggtttcatatggcagactgtttatcgcaaacccggatttggtttcgcggttcaagattgatggagagttgaataaatataatcggaagacgttttacactcaagatccagttgttggctacacggattatcctttcttggctcctttttcccgcctctgagtttgataatcgaggagaaaatgtattgacaatacattgatatgtaaaatgacaatgttattgttatccacttaatatttagtcatgtatcttgttgtttatctagttaaaatcttcatggcatta

SEQ ID NO: 97836 - protein, 412 aa, Arabidopsis thaliana
  peptide (1)..(412): Ceres Seq. ID no. 13576384
HNNNTSTRIFYFRITKPIGGDMTAAQGNSNETLFSSYKMGRFDLSHRVVLAPMTRCRALNGVPNAALAEYYAQRTTPGGFLISEGTMVSPGSAGFPHVPGIYSDEQVEAWKQVVEAVHAKGGFIFCQLWHVGRASHAVYQPNGGSPISSTNKPISENRWRVLLPDGSHVKYPKPRALEASEIPRVVEDYCLSALNAIRAGFDGIEIHGAHGYLIDQFLKDGINDRTDQYGGSIANRCRFLKQVVEGVVSAIGASKVGVRVSPAIDHLDATDSDPLSLGLAVVGMLNKLQGVNGSKLAYLHVTQPRYHAYGQTESGRQGSDEEEAKLMKSLRMAYNGTFMSSGGFNKELGMQAVQQGDADLVSYGRLFIANPDLVSRFKIDGELNKYNRKTFYTQDPVVGYTDYPFLAPFSRL

SEQ ID NO: 97837 - protein, 391 aa, Arabidopsis thaliana; identical to SEQ ID NO: 95866
  peptide (1)..(391): Ceres Seq. ID no. 13576385

SEQ ID NO: 97838 - protein, 374 aa, Arabidopsis thaliana; identical to SEQ ID NO: 95867
  peptide (1)..(374): Ceres Seq. ID no. 13576386

SEQ ID NO: 97839 - DNA, 794 bp, Arabidopsis thaliana
  misc_feature (1)..(794): Ceres Seq. ID no. 13576387
  misc_feature (1)..(794): Ortholog of  Ceres SEQ ID NO 15227036 as cited in SEQ ID NO 61662
  misc_feature (1)..(794): Ortholog of  Ceres SEQ ID NO 12635268 as cited in SEQ ID NO 0
aagaataaaaaaaataaaaaccaaaaagcaaaagggataacacaaaacccctttcaccttcccaattccaccaccacacagacaaagcacaccgaaaatggcggtttcttctggaacattctccactttcctctgcatcaaaacgacatctttccgcaacccatcaactcctctgtcctctctccggttcgcctctcacccggcggctaaactacgcttggttcgagcggtaacatctgcgacggaatcttcagagccaaccgcaaccaataagagagtgccacgcggtatcatgaaacctagaccagtttcaccagagatgcaagacatcgtcgaacttcctgaaatcgctcgcacacaagctcttaagcgtatttgggcttacatcaaagaacatgaccttcaggacccacaaaacaagagagaaatactgtgtgatgagaagctgaagaagatattcgaaggaagagatcgggttgggttcctagagattgcaaagctcatcggtcctcacttcctctgatggattgtttccgcggaactttatttggatgattgtctatgttttgttgttgacctgttatggccatgaaaagagaagggtatttgaagttgaggaagacttagattagtaaattaggtttttttttggttgcttcaattcaatggatgttatgtagtcgttgcttcctaatgttgtttgcgttttcgtttcgatttcagattctatttttcttgtttgactaacggtaaacggcttttgacaacatgtttttccgtttatttagttttcg

SEQ ID NO: 97840 - protein, 141 aa, Arabidopsis thaliana
  peptide (1)..(141): Ceres Seq. ID no. 13576388
MAVSSGTFSTFLCIKTTSFRNPSTPLSSLRFASHPAAKLRLVRAVTSATESSEPTATNKRVPRGIMKPRPVSPEMQDIVELPEIARTQALKRIWAYIKEHDLQDPQNKREILCDEKLKKIFEGRDRVGFLEIAKLIGPHFL

SEQ ID NO: 97841 - protein, 76 aa, Arabidopsis thaliana; identical to SEQ ID NO: 37578
  peptide (1)..(76): Ceres Seq. ID no. 13576389

SEQ ID NO: 97842 - DNA, 1206 bp, Arabidopsis thaliana
  misc_feature (1)..(1206): Ceres Seq. ID no. 13576390
  misc_feature (1)..(1206): Ortholog of  Ceres SEQ ID NO 15169545 as cited in SEQ ID NO 67456
ttttccccaatcttcataagtcataagaaaaatctcagcaattgtcaaaattttccagcaatcgagagagcagcacaagagagcatagaaggaccgattggggattagttagcgtgaaaggagatcctagtagcagctatggatagagaatggggttccaagcctggtagtggcggcgccgcctccggccaaaacgaggccatagatcgccgtgagcgtctccgtcgtcttgctcttgaaaccatagaccttgctaaagatccgtatttcatgcgaaatcatcttggaagctatgagtgtaaactatgtctaacactgcataacaatgaaggaaactacttggcacatactcaaggtaagaggcatcagacaaacttggcaaagagagctgctcgagaggctaaggatgctcctactaagccgcagccactcaagcgcaatgtctcagttcgcagaacagttaaaattggtagaccagggtaccgggttacaaaacagtatgatcccgagctgcaacaaagatctcttctgttccagattgaatatcctgagatagaggacaacataaagccaagacatcgtttcatgtcatcttatgagcagaaagttcaaccttatgacaagagctatcaataccttctatttgcagccgaaccatatgaaatcatagctttcaaggttcctagcacagaggttgataaatcaaccccaaagtttttctctcactgggatccagactccaagatgtttacactgcaggtgtatttcaagcctaccaagccagaaccaaacaagcctcagtcagctgttggagcaaatggtcttccaccgccaccaccacccccgcctcatcaagctcaaccgccaccaccacctccatctggtttattcccaccgccaccacctccaatggctaacaatggttttaggcccatgccaccagctggaggtttcggacatcctaacatgtgaaagagaatccagcgaagcagtttaaaaacacagtactctgatcatggtttactaagagagacttgctctttgactgaaaaacaaatctgttttgacatggattctcaaagctgtgatctctacggatgtattagctctctagataccttctttgagtttcttctatctgcttctcgtatgtaccattttgacaagattgttttccgttaatagtacaattagcgttggcgaaac

SEQ ID NO: 97843 - protein, 277 aa, Arabidopsis thaliana; identical to SEQ ID NO: 21044
  peptide (1)..(277): Ceres Seq. ID no. 13576391

SEQ ID NO: 97844 - protein, 233 aa, Arabidopsis thaliana; identical to SEQ ID NO: 21045
  peptide (1)..(233): Ceres Seq. ID no. 13576392

SEQ ID NO: 97845 - DNA, 1394 bp, Arabidopsis thaliana
  misc_feature (1)..(1394): Ceres Seq. ID no. 13576393
  misc_feature (1)..(1394): Ortholog of  Ceres SEQ ID NO 14307526 as cited in SEQ ID NO 58875
gtgtagactgagaaataaagaagcccttgattttgcccattgcagtcatctctctcgaatctctctctataatccgatctgagaaatttcgccggagctaggttttgttgtttaccgatcaatcctttaatcaatggcaatggctgttttccgtcgcgaagggaggcgtctcctcccttcaatcgccgctcgcccaatcgctgctatccgatctcctctctcttctgaccaggaggaaggacttcttggagttcgatctatctcaactcaagtggtgcgtaaccgcatgaagagtgttaagaacatccaaaagatcacaaaggcaatgaagatggttgctgcttccaagcttagagcagttcaaggccgagctgagaactcccgtggactttggcagccatttactgcacttctaggagataatcccagcattgatgtaaagaagagtgtggtggtcactctctcttctgacaagggtctctgtggtggaatcaactccactgtcgttaaagtgagcagggctctgtacaaattgaatgctggtcctgaaaaggaagttcagtttgttattgtcggagagaaagcaaaggctataatgtttcgtgactcaaagaacgacattgtcctctctgtaacagagctgaataagaacccactcaattatgctcaggtgtcagttctagctgatgacatcctgaagaacgttgaatttgatgctttgcgcattgtctacaacaagttccattcagttgtcgcatttctgccaactgtgtccactgttttgtcacctgagattattgagaaggagtctgaaattggaggaaaacttggcgagcttgactcatatgagattgaaggtggggaaacaaagggagaaatattgcagaatctggccgagttccaattctcttgtgtgatgttcaatgcggttctggagaatgcatgtagtgagatgggagcaagaatgtctgccatggacagctcaagcagaaacgcaggagaaatgctcgaccgtctcaccctcacatacaacaggactcgtcaagcttctattacaacagagcttattgagattatctctggagcttctgctcttgaagctgctaaataagcccatccgtgttagttctcttttcttcgctttgatatttacccccaccttgaaggagaagagtgtgttaaaattttactgaatcagtttcctttgctggcttcttgttgagacctaccaatgtttgctcaacgatttttaataaacatacctgtaatttccagcaggatttcgaataattgcattaacattttgttctgattcagactcgcttcctccagagtctgtagtgttgttttgtgcaaacaccatgtactccggtttatttgatatttttttacct

SEQ ID NO: 97846 - protein, 325 aa, Arabidopsis thaliana; identical to SEQ ID NO: 36222
  peptide (1)..(325): Ceres Seq. ID no. 13576394

SEQ ID NO: 97847 - protein, 323 aa, Arabidopsis thaliana; identical to SEQ ID NO: 36223
  peptide (1)..(323): Ceres Seq. ID no. 13576395

SEQ ID NO: 97848 - protein, 274 aa, Arabidopsis thaliana; identical to SEQ ID NO: 36224
  peptide (1)..(274): Ceres Seq. ID no. 13576396

SEQ ID NO: 97849 - DNA, 906 bp, Arabidopsis thaliana
  misc_feature (1)..(906): Ceres Seq. ID no. 13576397
  misc_feature (1)..(906): Ortholog of  Ceres SEQ ID NO 13595433 as cited in SEQ ID NO 56659
agcttcgtcaccgaaccttactttatatattagtccttcttcttctcatcttctcgcaacgtaggttctggtgaatgatcctaatccgtttagcttttaaaaaaataagaagacatatttatcaacttgatcaacttgagcaagttgcagcagatattttcctcggccaagatctagagttttgagaatggcgatggtatcaggaagacgatctactctaaaccccgacgcacctctttttattccggcagctgtacgacaagtggaagatttctcaccggagtggtggcaattggtgacaacttcgacttggtaccctgattactggatcagtcagcagcagcaaggcgcggatggtttctatgacaacggagagaatgagaatggtggaggtcatatcgatgtagctgatcttcttccagaatcatttgattttgatgatatggaagatttctttgacactgatgctgctgagtttgatcaaggattcgatggaagaatgtattaccaagcaccttccgaatttggctttggaaagaatggtgagatggttaagaaatcaagtggaaacaggagcccgagatcgattgtggaaccagctaagtatgcggaaaagccagcgaaatggggaaaccagagggttgctgctgctccgagaaacatccaccagcctcgctgaagagatatgttgttaactagtcagagaagtcagagcagttcggtctgtgtatctttagccaccactgtacctttgtaatttttagtatttgcttccacaacaaaaatctgtaactttgtatctttatgatgttcattctcaaacttgctatcacaaaaatgtaaaaacataaaaaaaaaaaaatgtaaactttgaagagaaatgagaactagagtttatttcctacc

SEQ ID NO: 97850 - protein, 163 aa, Arabidopsis thaliana; identical to SEQ ID NO: 20801
  peptide (1)..(163): Ceres Seq. ID no. 13576398

SEQ ID NO: 97851 - protein, 161 aa, Arabidopsis thaliana; identical to SEQ ID NO: 20802
  peptide (1)..(161): Ceres Seq. ID no. 13576399

SEQ ID NO: 97852 - protein, 85 aa, Arabidopsis thaliana; identical to SEQ ID NO: 20803
  peptide (1)..(85): Ceres Seq. ID no. 13576400

SEQ ID NO: 97853 - DNA, 957 bp, Arabidopsis thaliana
  misc_feature (1)..(957): Ceres Seq. ID no. 13576401
  misc_feature (1)..(957): Ortholog of  Ceres SEQ ID NO 13583408 as cited in SEQ ID NO 62616
  misc_feature (1)..(957): Ortholog of  Ceres SEQ ID NO 15179752 as cited in SEQ ID NO 63074
gttttgtcctccttctacgccgcacactatctcttcctctctctcagacgagatttcctcttcatctcaagagaaatggctgaatccaaggtagtggttccagagtctgtgctaaagaagatcaagaggcaagaggaatgggcattggccaagaaagatgaagctgtagctgctaagaagaagagtgttgaggcccgcaagcttatcttcaagagagctgagcagtatgccaaagaatacgctgagaaggataacgagttgatccgattgaagcgggaggctaagttgaaaggaggtttctacgttgaccctgaggctaagttgctctttatcattcgtatccgtggtatcaatgccattgacccaaaaaccaagaagattctgcagctcctgcgtttgagacagatcttcaatggtgtgtttcttaaggtgaacaaggcaacagtaaacatgctgcgccgagttgaaccatacgtgacttacggatacccaaacttgaagagcgttaaggaactgatctacaaaagaggttatggaaagctgaaccaccagaggatagcacttactgacaactccattgtggatcaggctctcggaaagcatgggatcatctgcgttgaggatctcatccacgagatcatgactgttggacctcacttcaaggaagccaacaacttcctgtggccattccaattgaaggcaccactcggtggccttaagaagaagagaaaccactacgtcgaaggtggtgatgctggaaacagggagaatttcatcaacgagcttgtcaggagaatgaattgatgaaagcttccttctttatctttgcaaatttcaaagattttgggaccgagttttttttttttttgttcaagttatcagagacttgtgatcttttatccgagataggctttttatgactaatcatgttattttccaatggcgggcttttaaatt

SEQ ID NO: 97854 - protein, 267 aa, Arabidopsis thaliana
  peptide (1)..(267): Ceres Seq. ID no. 13576402
VLSSFYAAHYLFLSLRRDFLFISREMAESKVVVPESVLKKIKRQEEWALAKKDEAVAAKKKSVEARKLIFKRAEQYAKEYAEKDNELIRLKREAKLKGGFYVDPEAKLLFIIRIRGINAIDPKTKKILQLLRLRQIFNGVFLKVNKATVNMLRRVEPYVTYGYPNLKSVKELIYKRGYGKLNHQRIALTDNSIVDQALGKHGIICVEDLIHEIMTVGPHFKEANNFLWPFQLKAPLGGLKKKRNHYVEGGDAGNRENFINELVRRMN

SEQ ID NO: 97855 - protein, 242 aa, Arabidopsis thaliana; identical to SEQ ID NO: 23649
  peptide (1)..(242): Ceres Seq. ID no. 13576403

SEQ ID NO: 97856 - DNA, 1524 bp, Arabidopsis thaliana
  misc_feature (1)..(1524): Ceres Seq. ID no. 13576404
  misc_feature (1)..(1524): Ortholog of  Ceres SEQ ID NO 13655988 as cited in SEQ ID NO 65557
atgtcgaaggagataagagagaaaggggacccaaaaaaagggttaggtggatctctcatgaaatcggtggagctcccccatatcttttttaaatagctttcttcttttggccccttacccagagatagattcttatatactactgagaatcttcaatttctgcaacttttgtatctcttcctgatcaccaaataagaaaactcttgtggttctattgaattgggtttccactatctttattgtagagatggagtcttcaagtccccaccatagtcacattgttgaggttaatgttggaaaatctgatgaagagagaataattgtggcgagtaaagtctgtggagaagcaccatgtgggttttcagattctaagaatgcttccggggatgctcacgaacgctctgcttctatgcggaagctttgtatcgccgtcgtgctgtgtctagtgttcatgagtgttgaagttgttggtgggattaaagccaatagtttagctatattaaccgatgcagctcatttgctctctgacgttgctgcctttgctatctccctcttctcattgtgggctgctggctgggaagcgactcctaggcagacttacgggttcttcaggattgagattttgggtgctcttgtatctatccagctcatttggttgctcacgggtattctggtttatgaagcgattatcagaattgttacagagaccagtgaggttaatggattcctcatgtttctggttgctgcctttggtctagtggtgaacatcataatggctgttctgctagggcatgatcatggtcacagtcatggacatgggcatggccacggccatgaccatcacaatcatagccatggggtgactgttaccactcatcaccatcatcacgatcatgaacatggccatagtcatggtcatggagaggacaagcatcatgctcatggggatgttactgagcaattgttggacaaatcgaagactcaagtcgcagcaaaagagaaaagaaagagaaacatcaatctccaaggagcttatctgcatgtccttggggattccatccagagtgttggtgttatgattggaggagctatcatttggtacaatccggaatggaagatagtggatctgatctgcacacttgccttttcggttattgtcctaggaacaaccatcaacatgattcgcaacattctagaagtattgatggagagtacacccagagagattgacgccacaaagctcgaaaagggtttgctcgaaatggaagaagtggtggctgttcatgagctccacatatgggctatcacagtgggaaaagtgctattggcttgccatgtcaatatcagaccagaagcagatgcagatatggtgctcaacaaggtaattgattacatccgcagggagtacaacattagtcatgtcacgatacaaatcgagcgctaaaagctaagtaagatctgatgaagggtttttgtatcagcattctcattaacaataaaatcaataaagtttctactcgtgcc

SEQ ID NO: 97857 - protein, 398 aa, Arabidopsis thaliana; identical to SEQ ID NO: 43642
  peptide (1)..(398): Ceres Seq. ID no. 13576405

SEQ ID NO: 97858 - protein, 344 aa, Arabidopsis thaliana; identical to SEQ ID NO: 43643
  peptide (1)..(344): Ceres Seq. ID no. 13576406

SEQ ID NO: 97859 - protein, 330 aa, Arabidopsis thaliana; identical to SEQ ID NO: 43644
  peptide (1)..(330): Ceres Seq. ID no. 13576407

SEQ ID NO: 97860 - DNA, 1626 bp, Arabidopsis thaliana
  misc_feature (1)..(1626): Ceres Seq. ID no. 13576408
  misc_feature (1)..(1626): Ortholog of  Ceres SEQ ID NO 13597865 as cited in SEQ ID NO 64954
acctttctgtttacacgattcttcttcttcttcttcttcttctttagatgtcttcttcctccattgtcatctacctctctacacttcattttcttgttggaagaagatcgattaccggtgactcattcttagtgatgacagtataatgtctgatgcttattatcatcatcatcatcatcggagacattcttcctcttcacgtctatggattttaatgccggagttcccatgtcttctctttcacctttgatgaatcaagatgcaatgtggcaaatgaatttgagttcagatgaaacaatggaaactggttcttaccctgaacgaccaggagagcctgattgttcttattacataagaactggtctttgtagatttggctctacttgtcggttcaaccatcctcgtgatcgggaactggttatagctactgcaaggatgagaggagaataccctgaaaggattggtcagcctgaatgcgagtactatttgaagacaggaacctgcaagtttggagtaacatgtaagtttcatcatccaaggaacaaagctgggattgctggaagagtctctctcaatatgttaggctatcctctacgctcgaatgaggttgattgtgcttatttcctaagaaccggacactgtaaatttggtggtacttgtaaattcaaccaccctcagcctcaaccaaccaacatgatggttcctacctcagggcaacagtcttatccttggtcaagagcttcttttattgccagccctcgttggcaagatccgtctagctacgcttccttaatcatgcctcaaggagttgtcccggttcaaggatggaacccttacagtggtcagctcggctcagtttctccttcaggtaccggaaatgatcaaaactacagaaatttacagcagaacgagacaatagagtcaggctctcagtctcaaggatcattctcgggttacaatccgggatcctctgttccgctaggagggtattatgcattgccgagggaaaatgtgttcccggagagaccaggacaacccgaatgccaattctacatgaagacaggtgactgcaaatttggcacagtttgcaaatttcaccatcctagagacagacaagctcctcctcctgattgtctcttaagctccattggcctccccttacgcccgggagaaccgttgtgtgtgttctatacacgctatggaatctgcaaatttggtccaagctgtaaatttgatcacccaatgcgagtattcacatacgacaacacagcttcagagacagatgaggtagtggaaacatcaacagggaaatctagaagactctctgtgtctgaaacaagacaagcagcaacaacatcctctggtaaagacactaccattgataatacacagcagtgaagaaacaaaggaagaagaagaagagcttttaaacaagaagaaaaacaaaagctttttgatttttcaaaagaggaatctgtaaattctcattttcatttagtctctcaagcatttattaataatgtatagaggtgatttatacaactgatcttgatcttgatctgatcgccattgttgtaatattcttttggcgaatcaggttcaataaaattgaaagtaatttccctc

SEQ ID NO: 97861 - protein, 397 aa, Arabidopsis thaliana; identical to SEQ ID NO: 87445
  peptide (1)..(397): Ceres Seq. ID no. 13576409

SEQ ID NO: 97862 - protein, 389 aa, Arabidopsis thaliana; identical to SEQ ID NO: 87446
  peptide (1)..(389): Ceres Seq. ID no. 13576410

SEQ ID NO: 97863 - protein, 382 aa, Arabidopsis thaliana; identical to SEQ ID NO: 87447
  peptide (1)..(382): Ceres Seq. ID no. 13576411

SEQ ID NO: 97864 - DNA, 759 bp, Arabidopsis thaliana
  misc_feature (1)..(759): Ceres Seq. ID no. 13576419
  misc_feature (1)..(759): Ortholog of  Ceres SEQ ID NO 15173608 as cited in SEQ ID NO 57605
atcacaacaacaacaattcgacctcaattgaaattagggtttctctgcaactccacaaacagactcttaacaaaacttcgattcccaatttcaacaatggcttgcgtaaacgaaccatcacctaaactccaaaagctcgaccgaaacggaatccatggcgattcatcaccatcaccattcttcaaagtgaagaaactctccgagaaagctgttataccaacacgcggctcaccactctccgctggatacgatctctcaagtgcggtggattcaaaagttccagcgagaggtaaagcgcttatcccaacggatctaagtatcgctgttcccgaaggaacttacgcgagaattgcgccgagatctggtttggcttggaaacattcgattgatgttggtgctggtgtgattgatgctgattatagaggacctgttggtgtgattttgtttaatcattctgatgctgattttgaggttaagttcggtgatcgaatcgcgcagttgattatcgagaagattgtgactcctgatgttgttgaggttgatgatttggatgagactgttcgtggtgatggtggttttggttctactggtgtctaagtgataatcatcttcttcgtttatgaatgtgttttggtttttaatttcgtcgaacagtttgtgggcattattattgtactatctctttgcttcatctttagactattcaaacaaactctcactgttttttttctttgttgggctacaaaatgaatcaattac

SEQ ID NO: 97865 - protein, 198 aa, Arabidopsis thaliana
  peptide (1)..(198): Ceres Seq. ID no. 13576420
ITTTTIRPQLKLGFLCNSTNRLLTKLRFPISTMACVNEPSPKLQKLDRNGIHGDSSPSPFFKVKKLSEKAVIPTRGSPLSAGYDLSSAVDSKVPARGKALIPTDLSIAVPEGTYARIAPRSGLAWKHSIDVGAGVIDADYRGPVGVILFNHSDADFEVKFGDRIAQLIIEKIVTPDVVEVDDLDETVRGDGGFGSTGV

SEQ ID NO: 97866 - protein, 166 aa, Arabidopsis thaliana; identical to SEQ ID NO: 30604
  peptide (1)..(166): Ceres Seq. ID no. 13576421

SEQ ID NO: 97867 - DNA, 937 bp, Arabidopsis thaliana
  misc_feature (1)..(937): Ceres Seq. ID no. 13576426
  misc_feature (1)..(937): Ortholog of  Ceres SEQ ID NO 14302000 as cited in SEQ ID NO 52175
  misc_feature (1)..(937): Ortholog of  Ceres SEQ ID NO 14316371 as cited in SEQ ID NO 60113
acagtcgtcactcaccacctcaccgttccttatccatttggctgacgcaaaatcgaatcggaaccctaaaatctctccgaaagccatgtctcctcctcctgctgtagtcactgaatctgccgatggacaacctgagcaaccaccggttaccgccattgctgaagagctggagaaaaagcttcagactgatgaaccgattgtagaagatgttaaagatgatgaagacgatgatgatgatgacgaagaagaggaagacgacgatgctcaaggtgtaagtggaagttcaaagcagagtagaagtgaaaagaagagtaggaaggcgatgttgaagctcggtatgaaacctgtcactggtgttagtcgagtaaccatcaagagaacgaaaaacgttctcttctttatctctaagcctgatgtctttaagagcccgcattcagaaacctatgttatattcggtgaggccaagatcgaggatttgagctctcagcttcaaacgcaagctgctcaacagtttaggatgcctgaaattggagccacatctcagagagcagaggcatcgacagccactgtagaagcacaggtggaagaagatgaagaggaaatcgatgagaccggtgtggaggctcgtgacattgacttggtcatgactcaggctggagtttctcgtagcaaagcggttaaagcactcaagagtcacgatggagacattgtaagtgcaataatggaactcactacttgagagttaagagagattgagtctctatgctttattcacttgcagattgttttcaaatacttttggatttatcaggaaattggattattgttgtccttacgagtatctaatctagtttgtttgttatgatgcttatgcagtatctgagttgtactctgtttttcacgacaatgtattggagaaaatacatatcaaaattcg

SEQ ID NO: 97868 - protein, 245 aa, Arabidopsis thaliana
  peptide (1)..(245): Ceres Seq. ID no. 13576427
QSSLTTSPFLIHLADAKSNRNPKISPKAMSPPPAVVTESADGQPEQPPVTAIAEELEKKLQTDEPIVEDVKDDEDDDDDDEEEEDDDAQGVSGSSKQSRSEKKSRKAMLKLGMKPVTGVSRVTIKRTKNVLFFISKPDVFKSPHSETYVIFGEAKIEDLSSQLQTQAAQQFRMPEIGATSQRAEASTATVEAQVEEDEEEIDETGVEARDIDLVMTQAGVSRSKAVKALKSHDGDIVSAIMELTT

SEQ ID NO: 97869 - protein, 217 aa, Arabidopsis thaliana
  peptide (1)..(217): Ceres Seq. ID no. 13576428
MSPPPAVVTESADGQPEQPPVTAIAEELEKKLQTDEPIVEDVKDDEDDDDDDEEEEDDDAQGVSGSSKQSRSEKKSRKAMLKLGMKPVTGVSRVTIKRTKNVLFFISKPDVFKSPHSETYVIFGEAKIEDLSSQLQTQAAQQFRMPEIGATSQRAEASTATVEAQVEEDEEEIDETGVEARDIDLVMTQAGVSRSKAVKALKSHDGDIVSAIMELTT

SEQ ID NO: 97870 - protein, 138 aa, Arabidopsis thaliana
  peptide (1)..(138): Ceres Seq. ID no. 13576429
MLKLGMKPVTGVSRVTIKRTKNVLFFISKPDVFKSPHSETYVIFGEAKIEDLSSQLQTQAAQQFRMPEIGATSQRAEASTATVEAQVEEDEEEIDETGVEARDIDLVMTQAGVSRSKAVKALKSHDGDIVSAIMELTT

SEQ ID NO: 97871 - DNA, 1222 bp, Arabidopsis thaliana
  misc_feature (1)..(1222): Ceres Seq. ID no. 13576448
  misc_feature (1)..(1222): Ortholog of  Ceres SEQ ID NO 13637842 as cited in SEQ ID NO 54650
  misc_feature (1)..(1222): Ortholog of  Ceres SEQ ID NO 12608127 as cited in SEQ ID NO 57579
  misc_feature (1)..(1222): Ortholog of  Ceres SEQ ID NO 12634558 as cited in SEQ ID NO 0
  misc_feature (1)..(1222): Ortholog of  Ceres SEQ ID NO 15180294 as cited in SEQ ID NO 0
attgcccaaaaagaaacagaaacttttctccgagaatcctcatttctccgttgaaaaaaggaccttgagaggaaatgtttcactgtttctagggttcttataatccacttcctcatcattagagaatggaaaatctcctcttctctttgatatttcttcggatttcgcttatgtcctgaatctcttgaagacccaattgaaaaaatctcaactttttttctcccggcgtttccggcgatatacaatgcggattctcgtgaatctcattctcttctccttgattcctctggcgttctccaatgaaaactccagctcgtatctcattgcgcgaccattgatcttcgaaacccagctcaagaacataaacgacaatgtcaatctacattgcacgagctggagattcgcggcggagacaaacaatctcgctccatggaaaaccattccagctgaatgcgccgattacgtgaaagattacctgatgggtgaaggttacgtcgtcgatgtggagagagtctccgaagaagctaaggtttacgcgagcagcttcgaatctaacggtgacgggaaagacatttggattttcgatattgatgagacgttattgtcgaatcttccttattacatggaacacggttgtgggttggaagtttttgatcattcaaagtttgatatgtgggtagagaaagggatagcacctgctatagcaccaagcttgaagctttaccaaaaggttatacatttggggtacaaagttatcttgcttacagggcgtagagagaaccaccgggttatcactgtcgaaaacctgcgcaatgccggtttccataactgggacaagcttattctgagatcgttggatgatcggaacaaaacagcgaccatgtacaagtcagagaagagagaggagatggtgaaagaagggtataggatcagaggcaattcaggtgaccaatggagtgatttgttgggttctgcaatgtcagaaagatccttcaaacttccaaatccaatgtattatatcccctgaaggggatcaactagaatcaggaggcaattcaggttactaaatggagcaacctactgtttttgaagtttgggttgccatgtaatcacttgcaataaatatatgtactaatgactgcatcggcttgcgtgtctaaatttgtagcttattgaaaactttttgtggttaaagacgaatccagttaactaacataagttt

SEQ ID NO: 97872 - protein, 260 aa, Arabidopsis thaliana; identical to SEQ ID NO: 21236
  peptide (1)..(260): Ceres Seq. ID no. 13576449

SEQ ID NO: 97873 - protein, 182 aa, Arabidopsis thaliana; identical to SEQ ID NO: 21237
  peptide (1)..(182): Ceres Seq. ID no. 13576450

SEQ ID NO: 97874 - protein, 134 aa, Arabidopsis thaliana; identical to SEQ ID NO: 21238
  peptide (1)..(134): Ceres Seq. ID no. 13576451

SEQ ID NO: 97875 - DNA, 1125 bp, Arabidopsis thaliana
  misc_feature (1)..(1125): Ceres Seq. ID no. 13576452
  misc_feature (1)..(1125): Ortholog of  Ceres SEQ ID NO 15169972 as cited in SEQ ID NO 51692
acacaagtgacatcgtcggaggagaaaaggtagtgccaatattagccggcgattcagatggagacggtggtcgataaagatgttctgaagtcttccggggctgagcttcttcccgacggacgtcgaggtttacgcatccatgactgggagatcgaaaccctccgcggcacgattctcacttctctcgctgtcgaagagtgggaaaaaaagcttaagacatctcacttacctgaaatggtttttggcgagaatgcattagtccttaaacacttaggtagcaacactaagattcattttaatgcgtttgacgcactagctggttggaagcaggaagggcttccacctgttgaagttcctgctgcagcacaatggaaattcaggagcaagccgtctcagcaggtgatactagattatgattacacgtttacaacgccatactgtggaagtgaagtagttgagaaagacaaagaaacgcaggttgaggcaaaagctaatccaaagggggaagctactcttcagtgggagaactgtgaagatcagattgatttggctgctctctcacttaaagaacctattctcttctatgatgaggtagttttgtatgaagatgaactggctgacaatggagtgtcacttctgactgtgaaagtgagagtcatgccaagctcatggttcctcctcttgcgattttggctgagagttgatggtgtgcttatgagattgagagagacgagaatgcattataggtttggcgaagatgaggcaccaactgttcttcgtgaaaactgttggagagaagcaacatttcagtctctatctgcgaaagggtatccagttgacttagcagtctggagcgacccgagctccatcagtcagaggcttccagtgattaagcatacgacacagaaactgaagatccctagtaaagtttaagctgtttataaagttgcaaattatatctaaaagagcgtaccgatgagctttctttacagccaaacaaactacttactattgaatttgttaatgtaaggagttactccactgacttattgtggtggtttcatatgaacattcaaacccttttcacgttgttcttacactcttattgttccctaccttgttccc

SEQ ID NO: 97876 - protein, 291 aa, Arabidopsis thaliana
  peptide (1)..(291): Ceres Seq. ID no. 13576453
METVVDKDVLKSSGAELLPDGRRGLRIHDWEIETLRGTILTSLAVEEWEKKLKTSHLPEMVFGENALVLKHLGSNTKIHFNAFDALAGWKQEGLPPVEVPAAAQWKFRSKPSQQVILDYDYTFTTPYCGSEVVEKDKETQVEAKANPKGEATLQWENCEDQIDLAALSLKEPILFYDEVVLYEDELADNGVSLLTVKVRVMPSSWFLLLRFWLRVDGVLMRLRETRMHYRFGEDEAPTVLRENCWREATFQSLSAKGYPVDLAVWSDPSSISQRLPVIKHTTQKLKIPSKV

SEQ ID NO: 97877 - protein, 232 aa, Arabidopsis thaliana
  peptide (1)..(232): Ceres Seq. ID no. 13576454
MVFGENALVLKHLGSNTKIHFNAFDALAGWKQEGLPPVEVPAAAQWKFRSKPSQQVILDYDYTFTTPYCGSEVVEKDKETQVEAKANPKGEATLQWENCEDQIDLAALSLKEPILFYDEVVLYEDELADNGVSLLTVKVRVMPSSWFLLLRFWLRVDGVLMRLRETRMHYRFGEDEAPTVLRENCWREATFQSLSAKGYPVDLAVWSDPSSISQRLPVIKHTTQKLKIPSKV

SEQ ID NO: 97878 - DNA, 880 bp, Arabidopsis thaliana
  misc_feature (1)..(880): Ceres Seq. ID no. 13576459
  misc_feature (1)..(880): Ortholog of  Ceres SEQ ID NO 15172968 as cited in SEQ ID NO 51755
  misc_feature (1)..(880): Ortholog of  Ceres SEQ ID NO 12610046 as cited in SEQ ID NO 55841
  misc_feature (1)..(880): Ortholog of  Ceres SEQ ID NO 13663630 as cited in SEQ ID NO 67065
aaacgtttcttcgaaagatcaattaacaaaacaatcatcttcttcctcaatttcttcttctacttctcatctcttttctgttcttctttgttaaacccaatctgggtctatcatcgtcttcgaggagcctgcgtgctagggtttctccgccttcttccttcccttattttagatctcaaaaggtagaagcagctcattacaggaaccatgatgtcctttgaaatgaatgaccggaaaaaaatcgggttaggcctgacaggatttggcgtattcttctcgtttttgggaatagtctttgtctttgataagggattacttgccatgggaaatattcttttcatctcgggggttagtctaaccattggcttcaagtctaccatgcagttcttcatgaagcgtcaaaattataagggaaccatctcttttggcgtcggtttcttctttgttatcatcgggtggcctatcttgggaatgatgttggagacctatggctttttcgtactcttcagtggcttctggcctaccttggcagtctttgctcagaagatacccgttctcggttggattattcagcaaccatatattagatcgttctttgacaagtaccggggcaagcgtgtgccggtctagtcttccatcccgagtagagagacgattcactgagctagatgcagctgaacaggcgattaaagtttttggaagaagaagttggtgactcctgtagaaaactaaaaccataggagaaagaaaataggaaggaaaagaacgtacaatttgaagctgtgtgtctatgtacttgagagaaaaactcagtgacttaatgctctttgatggagtttgtaaacgttttggttgtttaactctgacaaatcggttagcc

SEQ ID NO: 97879 - protein, 140 aa, Arabidopsis thaliana; identical to SEQ ID NO: 25588
  peptide (1)..(140): Ceres Seq. ID no. 13576460

SEQ ID NO: 97880 - protein, 139 aa, Arabidopsis thaliana; identical to SEQ ID NO: 25589
  peptide (1)..(139): Ceres Seq. ID no. 13576461

SEQ ID NO: 97881 - protein, 135 aa, Arabidopsis thaliana; identical to SEQ ID NO: 25590
  peptide (1)..(135): Ceres Seq. ID no. 13576462

SEQ ID NO: 97882 - DNA, 895 bp, Arabidopsis thaliana
  misc_feature (1)..(895): Ceres Seq. ID no. 13576469
  misc_feature (1)..(895): Ortholog of  Ceres SEQ ID NO 13638595 as cited in SEQ ID NO 52050
  misc_feature (1)..(895): Ortholog of  Ceres SEQ ID NO 12623490 as cited in SEQ ID NO 61136
  misc_feature (1)..(895): Ortholog of  Ceres SEQ ID NO 14301870 as cited in SEQ ID NO 61501
  misc_feature (1)..(895): Ortholog of  Ceres SEQ ID NO 12583993 as cited in SEQ ID NO 68098
ataacttcaacaaaagctcttatctataaaacattctaaagaaaaatgaagatgataatccaaattttcttcatcatctccctcatttcaaccatctcttttgcctctgttcaagacttttgtgtagctgacccaaagggtcctcaaagcccatcaggttactcttgcaagaaccctgaccaagtcaccgaaaatgactttgcatttaccggcctcggcacagctggaaacacttccaacatcattaaagccgcagtgactccagcctttgctcctgcttacgcaggcatcaatggccttggcgtatctctggctcgtcttgacttagccggtggtggtgtcatccctctccacactcatcctggtgcttctgaggtccttgtagtcattcaaggcaccatttgcgccggatttatctcctccgccaacaaagtttacttgaagactctcaacagaggagattctatggtgtttcctcaaggacttcttcattttcagctaaactctgggaaaggccctgccttggcctttgtcgcattcggaagctcctccccagggctccaaattctaccatttgctctgtttgcaaacgatttgccttcagaacttgttgaagccacaacgttccttagcgatgcagaagttaagaagcttaagggtgtgcttgggggaactaattaagcttctcttagtttcattgttcatttttttaaaaatgtggttgtgcgttttgttatttcgagttcctttagcattttgagtttgtttcttctaatgatttggtttttctttatgagttgttattgttctcaatgtttcattttatagtctctttggcttcaaattgtaataactaataagcattatattgcagatttctaagtagcttgtcaac

SEQ ID NO: 97883 - protein, 211 aa, Arabidopsis thaliana
  peptide (1)..(211): Ceres Seq. ID no. 13576470
MKMIIQIFFIISLISTISFASVQDFCVADPKGPQSPSGYSCKNPDQVTENDFAFTGLGTAGNTSNIIKAAVTPAFAPAYAGINGLGVSLARLDLAGGGVIPLHTHPGASEVLVVIQGTICAGFISSANKVYLKTLNRGDSMVFPQGLLHFQLNSGKGPALAFVAFGSSSPGLQILPFALFANDLPSELVEATTFLSDAEVKKLKGVLGGTN

SEQ ID NO: 97884 - protein, 209 aa, Arabidopsis thaliana
  peptide (1)..(209): Ceres Seq. ID no. 13576471
MIIQIFFIISLISTISFASVQDFCVADPKGPQSPSGYSCKNPDQVTENDFAFTGLGTAGNTSNIIKAAVTPAFAPAYAGINGLGVSLARLDLAGGGVIPLHTHPGASEVLVVIQGTICAGFISSANKVYLKTLNRGDSMVFPQGLLHFQLNSGKGPALAFVAFGSSSPGLQILPFALFANDLPSELVEATTFLSDAEVKKLKGVLGGTN

SEQ ID NO: 97885 - DNA, 1150 bp, Arabidopsis thaliana
  misc_feature (1)..(1150): Ceres Seq. ID no. 13576472
  misc_feature (1)..(1150): Ortholog of  Ceres SEQ ID NO 15178931 as cited in SEQ ID NO 1125
  misc_feature (1)..(1150): Ortholog of  Ceres SEQ ID NO 13596648 as cited in SEQ ID NO 63080
atttcccacaccaatcgcataatcgatttcttccaacttcaataaaggggaaccaacgtaaccctaattttgctttctcctctttgttcagaaaattttccctttactctcaaattccttttcgatttccctctcttaaacctccgaaagctcacatggcgtctcgaaactatcggtgggagctcttcgcagcttcgttaaccctaaccttagctttgattcacctggtcgaagcaaactccgaaggagatgctctctacgctcttcgccggagtttgacagatccagaccatgtcctccagagctgggatccaactcttgttaatccttgtacctggttccatgtcacctgtaaccaagacaaccgcgtcactcgtgtggatttgggaaattcaaacctctctggacatcttgcgcctgagcttgggaagcttgaacatttacagtatctagagctctacaaaaacaacatccaaggaactataccttccgaacttggaaatctgaagaatctcatcagcttggatctgtacaacaacaatcttacagggatagttcccacttctttgggaaaattgaagtctctggtctttttacggcttaatgacaaccgattgaccggtccaatccctagagcactcacggcaatcccaagccttaaagttgttgacgtctcaagcaatgatttgtgtggaacaatcccaacaaacggaccctttgctcacattcctttacagaactttgagaacaacccgagattggagggaccggaattactcggtcttgcaagctacgacactaactgcacctgaaacaactggcaaaacctgaaaatgaagaattggggggtgaccttgtaagaacacttcaccactttatcaaatatcacatctattatgtaataagtatatatatgtagtaaaaacaaaaaaaatgaagaatcgaatcggtaatatcatctggtctcaattgagaacttcgaggtctgtatgtaaaatttctaaatgcgattttcgcttactgtaatgttcggttgtgggattctgagaagtaacatttgtattggtatggtatcaagttgttctgccttgtctgcatttaacacttgtgttttagatctgttatataaagccaaaaaaggttttgtgtg

SEQ ID NO: 97886 - protein, 269 aa, Arabidopsis thaliana
  peptide (1)..(269): Ceres Seq. ID no. 13576473
FPHQSHNRFLPTSIKGNQRNPNFAFSSLFRKFSLYSQIPFRFPSLKPPKAHMASRNYRWELFAASLTLTLALIHLVEANSEGDALYALRRSLTDPDHVLQSWDPTLVNPCTWFHVTCNQDNRVTRVDLGNSNLSGHLAPELGKLEHLQYLELYKNNIQGTIPSELGNLKNLISLDLYNNNLTGIVPTSLGKLKSLVFLRLNDNRLTGPIPRALTAIPSLKVVDVSSNDLCGTIPTNGPFAHIPLQNFENNPRLEGPELLGLASYDTNCT

SEQ ID NO: 97887 - protein, 218 aa, Arabidopsis thaliana; identical to SEQ ID NO: 21774
  peptide (1)..(218): Ceres Seq. ID no. 13576474

SEQ ID NO: 97888 - DNA, 668 bp, Arabidopsis thaliana
  misc_feature (1)..(668): Ceres Seq. ID no. 13576475
  misc_feature (1)..(668): Ortholog of  Ceres SEQ ID NO 12783998 as cited in SEQ ID NO 61535
  misc_feature (1)..(668): Ortholog of  Ceres SEQ ID NO 15174264 as cited in SEQ ID NO 61877
aacagtatcaaatcaaaaccatcacagcaaaaaaaactcactccctagaaaagtttgaaaatggcgaaggcagataagaaaccagcggagaagaaaccggcagagaaaactccggcagccgaaccagcagcagcggcagagaagaaaccaaaagccggaaagaaactcccgaaggaaccagccggcgccggagacaagaagaagaagagatcaaagaagaacgttgagacatacaagatctacatcttcaaggtgttgaagcaagttcatccagatatcggaatctccagcaaagccatgggaatcatgaacagtttcatcaatgatatctttgagaaacttgctggtgagtcttcgaagcttgcgaggtacaacaagaagccgacgattacttctagggagattcagactgcggtgagacttgtgttgcctggagagttggcgaaacatgctgtttctgaagggactaaggcggttacgaagtttacgagttcttagatttggaatgtggttttgtaatggaggagaagtagtagtagtagttggaatgtgaaatagggtttatgcttttgggtatctttgagggttatgtaatatgggaattagggttttaatttatggcacggctatgaaatctacttaattttccaatgttcgattgcaatttc

SEQ ID NO: 97889 - protein, 145 aa, Arabidopsis thaliana
  peptide (1)..(145): Ceres Seq. ID no. 13576476
MAKADKKPAEKKPAEKTPAAEPAAAAEKKPKAGKKLPKEPAGAGDKKKKRSKKNVETYKIYIFKVLKQVHPDIGISSKAMGIMNSFINDIFEKLAGESSKLARYNKKPTITSREIQTAVRLVLPGELAKHAVSEGTKAVTKFTSS

SEQ ID NO: 97890 - DNA, 1470 bp, Arabidopsis thaliana
  misc_feature (1)..(1470): Ceres Seq. ID no. 13576477
  misc_feature (1)..(1470): Ortholog of  Ceres SEQ ID NO 15172426 as cited in SEQ ID NO 59156
aaaagcaatttagaacttataaaaaggaaagccatttcttcggcatcctcttcaccaactggcataagcagaagaagaagaagaagacaacgacgacgactttgaagaagaacaaactcttccttcaatctcaatctctctctcagatgggttgtggtggaactttgttctacccacttctcataactctctccgttgctctaatcacttacaacatcatcatctccgctaatgctcctctcaaacaaggcttcccaggccgatcttcttcctccgatatctccattgacccagtcatcgaattaccacgtggcggcggatccagaaacaacgatggtaaaaggataagacttttccacacggcggtgacggcgtctgattccgtctataacacttggcaatgtagagttatgtactattggttcaaaaagattcaagcttctgctggacccggttctgaaatgggtgggtttactcggatcttgcattccggtaaaccggatcagtatatggatgagattcctacttttgttgctcagcctttaccttctgggatggatcagggttatgttgtgttgaataggccatgggcatttgtacaatggcttcaacaaacagatataaaagaagattatattttgatgtctgagcctgatcatatcattgttaaacctataccaaatttggctaaagatgggcttggagctgcgtttcctttcttttacattgaaccgaaaaagtatgagaaggtgttgaggaagtattatcctgaagtgagaggaccggttactaatatcgatccgataggaaactctcctgtcattgttggaaaggatgctttgaagaagattgctccaacttggatgaatgtttctttggctatgaagaaggatcctgaagcagacaaggcttttggatgggttcttgaaatgtatgcttatgctgtctcatctgcattgcatggtgttagcaatattctacacaaagacttcatgattcagccaccatgggatatagaggttggtgacaagtacatcatacactacacttatggatgtgattatgatatgaagggtaaattaacttatgggaaaatcggggaatggagatttgacaaaagatcgtatgatagcaaaccaccaccaaggaaccttacaatgcctccacctggtgtttcacaaagtgtggtaacactagtgaagatgataaatgaagccacggccaacataccaaactggggatcataaagagacagagagagagaaaccgtaatctatatgtacctgtgagttgctcctttcttttcaaaataccttgtcctgctctttagtttctcctttggttgtggctaggtttgtaacatatatagtgattcaaacaaagcatttctttggcattttacttctctaattcagtctggtctccactagattttgttgtcctctagcatctcaaaggataaattacaat

SEQ ID NO: 97891 - protein, 414 aa, Arabidopsis thaliana
  peptide (1)..(414): Ceres Seq. ID no. 13576478
KQFRTYKKESHFFGILFTNWHKQKKKKKTTTTTLKKNKLFLQSQSLSQMGCGGTLFYPLLITLSVALITYNIIISANAPLKQGFPGRSSSSDISIDPVIELPRGGGSRNNDGKRIRLFHTAVTASDSVYNTWQCRVMYYWFKKIQASAGPGSEMGGFTRILHSGKPDQYMDEIPTFVAQPLPSGMDQGYVVLNRPWAFVQWLQQTDIKEDYILMSEPDHIIVKPIPNLAKDGLGAAFPFFYIEPKKYEKVLRKYYPEVRGPVTNIDPIGNSPVIVGKDALKKIAPTWMNVSLAMKKDPEADKAFGWVLEMYAYAVSSALHGVSNILHKDFMIQPPWDIEVGDKYIIHYTYGCDYDMKGKLTYGKIGEWRFDKRSYDSKPPPRNLTMPPPGVSQSVVTLVKMINEATANIPNWGS

SEQ ID NO: 97892 - protein, 366 aa, Arabidopsis thaliana
  peptide (1)..(366): Ceres Seq. ID no. 13576479
MGCGGTLFYPLLITLSVALITYNIIISANAPLKQGFPGRSSSSDISIDPVIELPRGGGSRNNDGKRIRLFHTAVTASDSVYNTWQCRVMYYWFKKIQASAGPGSEMGGFTRILHSGKPDQYMDEIPTFVAQPLPSGMDQGYVVLNRPWAFVQWLQQTDIKEDYILMSEPDHIIVKPIPNLAKDGLGAAFPFFYIEPKKYEKVLRKYYPEVRGPVTNIDPIGNSPVIVGKDALKKIAPTWMNVSLAMKKDPEADKAFGWVLEMYAYAVSSALHGVSNILHKDFMIQPPWDIEVGDKYIIHYTYGCDYDMKGKLTYGKIGEWRFDKRSYDSKPPPRNLTMPPPGVSQSVVTLVKMINEATANIPNWGS

SEQ ID NO: 97893 - protein, 278 aa, Arabidopsis thaliana; identical to SEQ ID NO: 24715
  peptide (1)..(278): Ceres Seq. ID no. 13576480

SEQ ID NO: 97894 - DNA, 789 bp, Arabidopsis thaliana
  misc_feature (1)..(789): Ceres Seq. ID no. 13576485
  misc_feature (1)..(789): Ortholog of  Ceres SEQ ID NO 12609890 as cited in SEQ ID NO 51792
  misc_feature (1)..(789): Ortholog of  Ceres SEQ ID NO 12597253 as cited in SEQ ID NO 62959
  misc_feature (1)..(789): Ortholog of  Ceres SEQ ID NO 15173341 as cited in SEQ ID NO 63800
  misc_feature (1)..(789): Ortholog of  Ceres SEQ ID NO 12635416 as cited in SEQ ID NO 0
  misc_feature (1)..(789): Ortholog of  Ceres SEQ ID NO 12635564 as cited in SEQ ID NO 0
  misc_feature (1)..(789): Ortholog of  Ceres SEQ ID NO 12636917 as cited in SEQ ID NO 0
  misc_feature (1)..(789): Ortholog of  Ceres SEQ ID NO 14309430 as cited in SEQ ID NO 0
gcaaatcgtaaaccgccacaaaaccgaaaaaaacactaattgtgctttccctttagattcatttgtattttcttttggagcttttgaacaatggagtcatcacaagcaacgacgaagccaacgagaggagcaggaggaaggaaaggtggagataggaagaagagtgttagtaaatctgttaaagctggtcttcaatttcccgttggtcgtatcgctcgttacttgaagaaaggtcggtacgctctccgatacggttccggtgctccggtttacctcgccgccgttctcgaatacctagccgccgaggtacttgagctagctgggaacgcagcgagagataataagaagaacaggataaaccctaggcatctatgtttagcgataaggaacgatgaggaattggggagattgcttcatggagttactattgctagtggtggtgttcttccaaacattaatccagttcttcttcctaagaaatcaacagcttcttcttctcaagcggagaaagcttctgctaccaaatctcctaagaaggcttgataaagaatagtatcgatgttgctttttggttatattcggatcttagatgaagaagaagaagaagaagaaacaacttgttttttgttttagaggatttgtgtaggtatctgaaatcttcttctctttgttttggtttgtcttatgtaaaaaccatgggaagatgattatgtttgttaacgcaatttgtaatggaaaataattaagttctgggattagtaacttcatctgtctaattaatttctgggt

SEQ ID NO: 97895 - protein, 150 aa, Arabidopsis thaliana; identical to SEQ ID NO: 27208
  peptide (1)..(150): Ceres Seq. ID no. 13576486

SEQ ID NO: 97896 - DNA, 1066 bp, Arabidopsis thaliana
  misc_feature (1)..(1066): Ceres Seq. ID no. 13576487
  misc_feature (1)..(1066): Ortholog of  Ceres SEQ ID NO 13594416 as cited in SEQ ID NO 51058
  misc_feature (1)..(1066): Ortholog of  Ceres SEQ ID NO 13596609 as cited in SEQ ID NO 63070
  misc_feature (1)..(1066): Ortholog of  Ceres SEQ ID NO 12616895 as cited in SEQ ID NO 63909
  misc_feature (1)..(1066): Ortholog of  Ceres SEQ ID NO 14302096 as cited in SEQ ID NO 68356
  misc_feature (1)..(1066): Ortholog of  Ceres SEQ ID NO 13598574 as cited in SEQ ID NO 69083
atttcaaaccaaacagatttcaagaacacaaaaacagagttaaaactctcatctctcccaaaaaagatgcctttaagcaacaatgtaattggttgcataaacttcatcaccgtcctcctctccattccggtcatcggcgccggaatctggctagccataggaacagtaaactcatgcgtcaagcttcttcaatggccagtaataatcctcggagtcttaatcctcttagtgggtctcgctggtttcattggagggttttggagaatcacatggcttcttgttgtttacttaatcgccatgcttattctcattgtacttttgggttgccttgtcggatttatttacatggttaccataagaggctctggtcatccagaaccaagtagagcttatcttgagtatagtcttcaagatttctctggttggttacgtagaagagttcagagatcttataaatgggaaaggattcgtacttgtttgagtacaactaccatttgccctgaactaaatcagagatacactttggctcaagatttcttcaatgctcatcttgatcccattcaatctggttgctgcaagcccccaacaaaatgtggattcacatttgttaatcctacttattggataagtcccatagatatgtctgctgatatggattgtctaaattggagcaatgaccaaaacactttgtgttacacttgtgattcttgtaaagccggcttgctcgcaaatattaaggtagattggttaaaagcggatatctttctactcttggcgcttatcggattgattatcgtctacattatcgggtgctgcgcattccgtaatgcggaaactgaggatattttcaggaagtacaagcagggttatacttgatcaagatgagaagtttagtggcaaaactgcgaggaattttaatatttactggattcctgtattttagtttctctacgttttggcccctgtagtatgtttttgtgtgaactacctgaacattcgttgtaactggaagattatgttgtatatctatctttgatttgggtttgtgaaacttaactaattatct

SEQ ID NO: 97897 - protein, 291 aa, Arabidopsis thaliana
  peptide (1)..(291): Ceres Seq. ID no. 13576488
ISNQTDFKNTKTELKLSSLPKKMPLSNNVIGCINFITVLLSIPVIGAGIWLAIGTVNSCVKLLQWPVIILGVLILLVGLAGFIGGFWRITWLLVVYLIAMLILIVLLGCLVGFIYMVTIRGSGHPEPSRAYLEYSLQDFSGWLRRRVQRSYKWERIRTCLSTTTICPELNQRYTLAQDFFNAHLDPIQSGCCKPPTKCGFTFVNPTYWISPIDMSADMDCLNWSNDQNTLCYTCDSCKAGLLANIKVDWLKADIFLLLALIGLIIVYIIGCCAFRNAETEDIFRKYKQGYT

SEQ ID NO: 97898 - protein, 269 aa, Arabidopsis thaliana; identical to SEQ ID NO: 79186
  peptide (1)..(269): Ceres Seq. ID no. 13576489

SEQ ID NO: 97899 - protein, 192 aa, Arabidopsis thaliana; identical to SEQ ID NO: 79187
  peptide (1)..(192): Ceres Seq. ID no. 13576490

SEQ ID NO: 97900 - DNA, 942 bp, Arabidopsis thaliana
  misc_feature (1)..(942): Ceres Seq. ID no. 13576491
  misc_feature (1)..(942): Ortholog of  Ceres SEQ ID NO 13594828 as cited in SEQ ID NO 56431
  misc_feature (1)..(942): Ortholog of  Ceres SEQ ID NO 14316363 as cited in SEQ ID NO 57222
  misc_feature (1)..(942): Ortholog of  Ceres SEQ ID NO 15177754 as cited in SEQ ID NO 57945
  misc_feature (1)..(942): Ortholog of  Ceres SEQ ID NO 13594354 as cited in SEQ ID NO 58082
  misc_feature (1)..(942): Ortholog of  Ceres SEQ ID NO 14316408 as cited in SEQ ID NO 58228
  misc_feature (1)..(942): Ortholog of  Ceres SEQ ID NO 13528075 as cited in SEQ ID NO 60188
  misc_feature (1)..(942): Ortholog of  Ceres SEQ ID NO 13600483 as cited in SEQ ID NO 0
ataaatacgctttctacattttcggatcgttgaacaacatctctctctctctctctctctctctctaaacccattaaagtaatttagctcctcatagattctcgagaagaacacttccatggcgactaaagtatatatcgtgtactactctatgtatggtcatgttgagaaattggctgaagaaataaggaaaggagctgcttctgttgaaggtgttgaagctaaactatggcaggtaccagagacgcttcacgaagaggcactctctaagatgagcgcaccaccaaagagtgaatccccaatcataaccccgaatgagctagctgaagctgatgggtttgtctttggtttcccaacaagatttggtatgatggctgctcagttcaaagcctttttggatgcaaccggtggactctggagggctcaggcactcgccggtaaaccagctggtatcttctacagcactggctctcaaggtggtggccaagaaaccacagcattgacggcaataactcagctggttcaccacgggatgttatttgtcccaatcggttacacatttggcgcgggaatgttcgaaatggagaatgtgaaaggtggaagcccatatggagctggaacatttgcaggagacggttcaaggcagccaacagagctggagctacagcaagcatttcaccaaggccagtacattgccagcatcaccaagaagctcaagggatctactgcttagagcttaaaaagattatggtatcaataagaaaaaaagaaaaaaacagtttggttctgcttttttttatattctttctctttgaatttgggggcttttgtgatttttcgggtttaattatcttaaaatacatgatattatttcacagcaataattcttatcttggttttacgtatagatgataatgtatgatttgtacttgtgttacactc

SEQ ID NO: 97901 - protein, 204 aa, Arabidopsis thaliana [sequence omitted]

SEQ ID NO: 97902 - protein, 193 aa, Arabidopsis thaliana; identical to SEQ ID NO: 39070
  peptide (1)..(193): Ceres Seq. ID no. 13576493

SEQ ID NO: 97903 - protein, 153 aa, Arabidopsis thaliana; identical to SEQ ID NO: 39071
  peptide (1)..(153): Ceres Seq. ID no. 13576494

SEQ ID NO: 97904 - DNA, 1454 bp, Arabidopsis thaliana
  misc_feature (1)..(1454): Ceres Seq. ID no. 13576499
  misc_feature (1)..(1454): Ortholog of  Ceres SEQ ID NO 15177012 as cited in SEQ ID NO 56256
  misc_feature (1)..(1454): Ortholog of  Ceres SEQ ID NO 14311993 as cited in SEQ ID NO 60371
  misc_feature (1)..(1454): Ortholog of  Ceres SEQ ID NO 13596509 as cited in SEQ ID NO 62004
  misc_feature (1)..(1454): Ortholog of  Ceres SEQ ID NO 13500385 as cited in SEQ ID NO 67583
tttttttttttttttccatttattttctcgaatcttcttcttcttcctagattccagcgacttaacaacaacaacaacaacatattctctgctgggtattagattcgaatttctctttttgtgatcagaaatggatcgagctccggtgaccacaggaccgttggatatgccgattatgcacgacagtgatcgatatgacttcgttaaggatattggttctggtaatttcggtgttgctcgtcttatgagagataaactcactaaagagcttgttgctgtcaagtacatcgagagaggagacaagattgatgaaaatgttcaaagggagatcattaaccacaggtcactaaggcatcctaatattgtcagatttaaagaggtcattttgacgccgactcatctggctatcataatggaatatgcttctggcggtgaactttacgagcggatttgcaatgcaggacggtttagtgaagatgaggctcggttcttctttcagcagcttctatctggagtcagttattgtcattcgatgcaaatttgccatcgtgacctgaagctagagaatacattgttggatggaagtcctgctcctcgattaaaaatttgtgattttggatattcaaagtcttctgttcttcattcacaaccaaagtcaactgttggtactcctgcatacatcgctccagaggtactgcttcgtcaggaatatgatggcaagattgcagatgtatggtcatgtggtgtgaccttatacgtcatgttggttggagcgtatccgttcgaagatccagaagagccaagagactatcggaaaacaatacagagaatccttagcgttaaatactcaatccctgatgacatacggatatcacctgaatgctgtcatcttatttcaagaatcttcgtggctgatcccgctaccagaataagcataccagagatcaaaacccatagttggttcttgaagaatctccctgctgatctaatgaacgagagcaacacaggaagccagttccaggagcctgaacaaccaatgcaaagccttgacacaatcatgcaaatcatctctgaagccacaattcccgctgttcgaaaccgttgcctagacgatttcatgactgacaatcttgatcttgacgatgacatggatgactttgactctgaatctgaaatcgacattgacagtagcggagagatagtttacgctctctaataaaaagccttttttaacaaccaaaacacttctctatctgttctaagaccagtagtgttctgatcctctggtttcaaattctaccaatttttgtattgtctctgtttgtttcttgttttcttcatgcacacatatatcatatatgtaatgtaaaatatcatctgtgtatattatatatatattccaatgtcacacaaaagcaaattaacagttaaaacagttgaagcaagttgaggtt

SEQ ID NO: 97905 - protein, 361 aa, Arabidopsis thaliana
  peptide (1)..(361): Ceres Seq. ID no. 13576500
MDRAPVTTGPLDMPIMHDSDRYDFVKDIGSGNFGVARLMRDKLTKELVAVKYIERGDKIDENVQREIINHRSLRHPNIVRFKEVILTPTHLAIIMEYASGGELYERICNAGRFSEDEARFFFQQLLSGVSYCHSMQICHRDLKLENTLLDGSPAPRLKICDFGYSKSSVLHSQPKSTVGTPAYIAPEVLLRQEYDGKIADVWSCGVTLYVMLVGAYPFEDPEEPRDYRKTIQRILSVKYSIPDDIRISPECCHLISRIFVADPATRISIPEIKTHSWFLKNLPADLMNESNTGSQFQEPEQPMQSLDTIMQIISEATIPAVRNRCLDDFMTDNLDLDDDMDDFDSESEIDIDSSGEIVYAL

SEQ ID NO: 97906 - protein, 349 aa, Arabidopsis thaliana
  peptide (1)..(349): Ceres Seq. ID no. 13576501
MPIMHDSDRYDFVKDIGSGNFGVARLMRDKLTKELVAVKYIERGDKIDENVQREIINHRSLRHPNIVRFKEVILTPTHLAIIMEYASGGELYERICNAGRFSEDEARFFFQQLLSGVSYCHSMQICHRDLKLENTLLDGSPAPRLKICDFGYSKSSVLHSQPKSTVGTPAYIAPEVLLRQEYDGKIADVWSCGVTLYVMLVGAYPFEDPEEPRDYRKTIQRILSVKYSIPDDIRISPECCHLISRIFVADPATRISIPEIKTHSWFLKNLPADLMNESNTGSQFQEPEQPMQSLDTIMQIISEATIPAVRNRCLDDFMTDNLDLDDDMDDFDSESEIDIDSSGEIVYAL

SEQ ID NO: 97907 - protein, 346 aa, Arabidopsis thaliana
  peptide (1)..(346): Ceres Seq. ID no. 13576502
MHDSDRYDFVKDIGSGNFGVARLMRDKLTKELVAVKYIERGDKIDENVQREIINHRSLRHPNIVRFKEVILTPTHLAIIMEYASGGELYERICNAGRFSEDEARFFFQQLLSGVSYCHSMQICHRDLKLENTLLDGSPAPRLKICDFGYSKSSVLHSQPKSTVGTPAYIAPEVLLRQEYDGKIADVWSCGVTLYVMLVGAYPFEDPEEPRDYRKTIQRILSVKYSIPDDIRISPECCHLISRIFVADPATRISIPEIKTHSWFLKNLPADLMNESNTGSQFQEPEQPMQSLDTIMQIISEATIPAVRNRCLDDFMTDNLDLDDDMDDFDSESEIDIDSSGEIVYAL

SEQ ID NO: 97908 - DNA, 746 bp, Arabidopsis thaliana
  misc_feature (1)..(746): Ceres Seq. ID no. 13576511
  misc_feature (1)..(746): Ortholog of  Ceres SEQ ID NO 15179445 as cited in SEQ ID NO 0
aatttatttttgtttagtttgtcacttcgccgtgcgcggcgggagagaacgctggcggaaaaaagaaatcggaaaactggagaaaccctaaatcgacgaaaaggagagacctttgaatcgaagcttggtgtgtttatactatgaagagtcaatggtctaattttcatcagattgggagaaactctttcttagctgcttctactgtttacgtttcaaacgaattcaacttcttaaacacttctcttcttaatcgaagaagcttctgttttgcagaaggagatcgatccagctttgtagtgttgaaatcggaagcagagttcaacagtgcattgagtaaagctcgagatggatctttgccatcggttttctatttcactgccgcatggtgtggaccttgcaggcttatctctcctgtgatattggagctcagtaataaatatcctgatgtaacaacgtataaggtcgacattgacgagggcggtctatcaaatgctattgggaagttaaatgtatctgctgtgccaacactgcaattcttcaaaggtggcgtgaagaaagcagagattgtaggcgttgatgtggtgaggctgaagagtgtcatggaacaactctacaagtgagagagactcttgacttctgtacactacattgctttgagttgtgattatcttgtgcttttgcttttaagttagattctttgattctcgtgttcctgcaaattcataagggtgctaagtttggtttct

SEQ ID NO: 97909 - protein, 159 aa, Arabidopsis thaliana; identical to SEQ ID NO: 21816
  peptide (1)..(159): Ceres Seq. ID no. 13576512

SEQ ID NO: 97910 - DNA, 2050 bp, Arabidopsis thaliana
  misc_feature (1)..(2050): Ceres Seq. ID no. 13578471
  misc_feature (1)..(2050): Ortholog of  Ceres SEQ ID NO 13654989 as cited in SEQ ID NO 63117
  misc_feature (1)..(2050): Ortholog of  Ceres SEQ ID NO 15169474 as cited in SEQ ID NO 66139
  misc_feature (1)..(2050): Ortholog of  Ceres SEQ ID NO 13584744 as cited in SEQ ID NO 69137
ttaaatcaggagaaagctcacgagaatccctcttcagatcagaacaccacaaaacatggctgcgtgtacactccacgcgctctcagtcaccttattcctccttctcttctttgccgtgtcaccggcgaaagctcagcaaccgtacgtcaacaaccaccagctcgcctgcgaggtccgtgtctacgacaacataaccaacggattcacatgtaacggcccaccttcttgccgctcatacctcactttctggtctcaaccaccgtacaacacggcggactcaatcgccaaactcctcaacgtctccgccgcagagatccaatcaatcaacaacctccccacagccaccaccagaatcccaacccgtgaattagtcgtgatcccagctaactgctcctgctcctcctccagcggaggattttaccaacacaacgccacttacaatctctccggtaacagaggagatgaaacctatttctcagtggctaacgatacttaccaagctttatccacgtgtcaagccatgatgtcacaaaaccgttacggcgagagacaactaacccccggcttaaacctccttgttcctctccgatgtgcttgtcccaccgccaaacaaaccaccgccggatttaaatatctcctgacttacttagtcgccatgggagatagtatctccggcatcgccgagatgttcaacagcacatccgccgccataaccgaaggtaacgagcttacatcagacaatatcttcttcttcacaccggttctagttcctctcacaactgaacctaccaaaatcgttatatctccgtcgcctcctcctccacccgttgttgctacgccgcctcaaacgccagttgatcctccgggatcttcttcttctcacaaatggatctacatcggaattggaatcggagctggtttgcttctcttactctcaatcttagctctctgcttctacaaacgaaggtctaagaagaagtcattaccgtcgtcgttgccggaggagaacaagctctttgattcatcaaccaaacaatctattcccacaacaacaacgactcaatggtcaatagatttatccaattcatcagaagctttcggtttaaaatccgccatagaatctctaacactatacagattcaacgatcttcaatcagctacttcgaatttcagcgacgaaaacagaatcaaaggctctgtttatcgcgcgacaatcaacggcgacgatgccgctgtgaaagtgatcaaaggagatgtttcttcctctgagatcaatcttttgaagaagctaaatcattctaatatcatccgtctctcaggtttctgtatccgtgaaggaacatcgtacctcgtcttcgagtattcagagaatggatcgatcagtgattggcttcactcgtcgggcaagaagagtttgacatggaaacagagagttgaaatagcaagggatgtggcagaggcgttagattatctccataactatataactccacctcatattcataagaacttggaatcaacaaacatacttctggattctaatttcagagccaagattgcgaatttcggtgttgcgaggattcttgatgaaggtgatcttgatcttcagttaacaagacatgttgaaggaacacaaggctacttagctccagagtatgtggagaatggagtcattacttcgaaactagacgtgtttgcttttggagttgcggttcttgagcttctttcggggagagaagcagtaacgatacataagaagaaggaaggagaagaagaagtggagatgttgtgtaaagtgataaacagtgtgcttggaggagagaatgtgagagagaagttaaaagagtttatggatccatctctagggaatgagtatccgttggagctggcttacaccatggctcagcttgctaagagctgtgtcgcaactgatcttaactcgcgtccatctgtcactcaggttctaaccacgctctcaatgatcgtctcctcctccatcgattgggagccttctgatgaccttcttcgttccggctctcttggcaactag

SEQ ID NO: 97911 - protein, 664 aa, Arabidopsis thaliana; identical to SEQ ID NO: 46281
  peptide (1)..(664): Ceres Seq. ID no. 13578472

SEQ ID NO: 97912 - protein, 509 aa, Arabidopsis thaliana; identical to SEQ ID NO: 46282
  peptide (1)..(509): Ceres Seq. ID no. 13578473

SEQ ID NO: 97913 - protein, 508 aa, Arabidopsis thaliana; identical to SEQ ID NO: 46283
  peptide (1)..(508): Ceres Seq. ID no. 13578474

SEQ ID NO: 97914 - DNA, 1953 bp, Arabidopsis thaliana
  misc_feature (1)..(1953): Ceres Seq. ID no. 13578491
  misc_feature (1)..(1953): Ortholog of  Ceres SEQ ID NO 14316344 as cited in SEQ ID NO 60120
gttttgtttttgaatcagatccttattcttgacctttcgatcagattcatggcaacgactcaatcacacacctcagatcttacttcagaggagcaacctgctagtttggacatcatgaaggagcagactgtcccggcaaacaacgagacatcagcctcttttaagtcctcccaggaagctccagttgtagttcatccagcaaaagttgctccacttactggaccttatggtttagccggtgattttgccggacacttacctagcagcatcctctctcctcaagcacaaggcttttactatagaggttatgaaaaccccacaggcgaatgggacgagtattcctcgtatgtcaatgttgaaggattggacatcacatctcctgttggcttcaatgagaatgcttctctggtctaccaaacgggatatggatacaaccctcaaatgccatatgggccatattcccctgcagcaagtcccttgccttctgagggacagttgtattctccacaacagtttccgttttcaggggcatcaccgtattaccagcaggtagttcctcctagcatgcaatatattacttctccaactcagcccgagctcaccagccttgtcggtgttgaccaacaaggtgataacatcggaccacgccaatcctaccatcctcatcccattggaccgtttaatggaaaccagccaaaccttggttttcctgaatggcagcaaggttttgacgggggaatatggtcggattggtccaagccttctgatatgcacaggcattcttcttctatttctccggctttatctcctcagccactcggctcatatggatcatatggccagaacatacccatggggtcacagcgacagagatcattttacggttttggatctggttcgaactcttataacagaggttatatgcatagtggtggtcgtggccagggttctaactatggaagtagactaatttctaatgtgggtatgggaaaccaaggctggattggggttgacaacagtcgagggcgtggaagggttagtgatccatctttgggtggtgcttataatggtacttttgatatcctcaatgagcaaaatcgaggaccaagggcttcaaagcccaagactcaggtcttagaggagcttgattctgctgctgattctaagaaaaataacaaaggcagtgcaaaggagcacgaggaatccaacaacgcagactttgtcaccgactacactaacgccaagttgttcatcatcaagtcttacagtgaagacaatgttcacaaaagcatcaaatacaatgtatgggctagcacccctaatggcaacaaaaagcttgacgctgcttatcgtgaggccaaggatgagaaagaaccgtgtccactttttcttctgttctcggtaaatgcgagctctcaattctgtggtgtagcagagatggttggacctgttgattttgagaagagcgttgattactggcaacaagataaatggagtggacagttcccagtgaagtggcacattatcaaagatgttccaaacagccagttccgccacattatattggaaaacaatgacaataagcctgtgactaatagtcgagacacccaagaagtaaaactggaacagggcatcgagatgctgaagatcttcaagaactacgacgctgacacgtcaatcttggatgatttcgggttttatgaagagcgggagaaaattatacaagaccggaaggcaagaagacagccaagcttgccatctgcaggagtagtagcaggagaaaatgaacataaacctgcttctgctgcattacccacagacttcatgaagaacatgtccaagagttttgcgcaagttgtccgcttggacgaaggcagcaaagaagcagtcaaggccagttcatctccagatgcaattacaacagcagcagtctcttctggtcaatccaactag

SEQ ID NO: 97915 - protein, 650 aa, Arabidopsis thaliana
  peptide (1)..(650): Ceres Seq. ID no. 13578492
VLFLNQILILDLSIRFMATTQSHTSDLTSEEQPASLDIMKEQTVPANNETSASFKSSQEAPVVVHPAKVAPLTGPYGLAGDFAGHLPSSILSPQAQGFYYRGYENPTGEWDEYSSYVNVEGLDITSPVGFNENASLVYQTGYGYNPQMPYGPYSPAASPLPSEGQLYSPQQFPFSGASPYYQQVVPPSMQYITSPTQPELTSLVGVDQQGDNIGPRQSYHPHPIGPFNGNQPNLGFPEWQQGFDGGIWSDWSKPSDMHRHSSSISPALSPQPLGSYGSYGQNIPMGSQRQRSFYGFGSGSNSYNRGYMHSGGRGQGSNYGSRLISNVGMGNQGWIGVDNSRGRGRVSDPSLGGAYNGTFDILNEQNRGPRASKPKTQVLEELDSAADSKKNNKGSAKEHEESNNADFVTDYTNAKLFIIKSYSEDNVHKSIKYNVWASTPNGNKKLDAAYREAKDEKEPCPLFLLFSVNASSQFCGVAEMVGPVDFEKSVDYWQQDKWSGQFPVKWHIIKDVPNSQFRHIILENNDNKPVTNSRDTQEVKLEQGIEMLKIFKNYDADTSILDDFGFYEEREKIIQDRKARRQPSLPSAGVVAGENEHKPASAALPTDFMKNMSKSFAQVVRLDEGSKEAVKASSSPDAITTAAVSSGQSN

SEQ ID NO: 97916 - protein, 634 aa, Arabidopsis thaliana
  peptide (1)..(634): Ceres Seq. ID no. 13578493
MATTQSHTSDLTSEEQPASLDIMKEQTVPANNETSASFKSSQEAPVVVHPAKVAPLTGPYGLAGDFAGHLPSSILSPQAQGFYYRGYENPTGEWDEYSSYVNVEGLDITSPVGFNENASLVYQTGYGYNPQMPYGPYSPAASPLPSEGQLYSPQQFPFSGASPYYQQVVPPSMQYITSPTQPELTSLVGVDQQGDNIGPRQSYHPHPIGPFNGNQPNLGFPEWQQGFDGGIWSDWSKPSDMHRHSSSISPALSPQPLGSYGSYGQNIPMGSQRQRSFYGFGSGSNSYNRGYMHSGGRGQGSNYGSRLISNVGMGNQGWIGVDNSRGRGRVSDPSLGGAYNGTFDILNEQNRGPRASKPKTQVLEELDSAADSKKNNKGSAKEHEESNNADFVTDYTNAKLFIIKSYSEDNVHKSIKYNVWASTPNGNKKLDAAYREAKDEKEPCPLFLLFSVNASSQFCGVAEMVGPVDFEKSVDYWQQDKWSGQFPVKWHIIKDVPNSQFRHIILENNDNKPVTNSRDTQEVKLEQGIEMLKIFKNYDADTSILDDFGFYEEREKIIQDRKARRQPSLPSAGVVAGENEHKPASAALPTDFMKNMSKSFAQVVRLDEGSKEAVKASSSPDAITTAAVSSGQSN

SEQ ID NO: 97917 - protein, 612 aa, Arabidopsis thaliana
  peptide (1)..(612): Ceres Seq. ID no. 13578494
MKEQTVPANNETSASFKSSQEAPVVVHPAKVAPLTGPYGLAGDFAGHLPSSILSPQAQGFYYRGYENPTGEWDEYSSYVNVEGLDITSPVGFNENASLVYQTGYGYNPQMPYGPYSPAASPLPSEGQLYSPQQFPFSGASPYYQQVVPPSMQYITSPTQPELTSLVGVDQQGDNIGPRQSYHPHPIGPFNGNQPNLGFPEWQQGFDGGIWSDWSKPSDMHRHSSSISPALSPQPLGSYGSYGQNIPMGSQRQRSFYGFGSGSNSYNRGYMHSGGRGQGSNYGSRLISNVGMGNQGWIGVDNSRGRGRVSDPSLGGAYNGTFDILNEQNRGPRASKPKTQVLEELDSAADSKKNNKGSAKEHEESNNADFVTDYTNAKLFIIKSYSEDNVHKSIKYNVWASTPNGNKKLDAAYREAKDEKEPCPLFLLFSVNASSQFCGVAEMVGPVDFEKSVDYWQQDKWSGQFPVKWHIIKDVPNSQFRHIILENNDNKPVTNSRDTQEVKLEQGIEMLKIFKNYDADTSILDDFGFYEEREKIIQDRKARRQPSLPSAGVVAGENEHKPASAALPTDFMKNMSKSFAQVVRLDEGSKEAVKASSSPDAITTAAVSSGQSN

SEQ ID NO: 97918 - DNA, 680 bp, Arabidopsis thaliana
  misc_feature (1)..(680): Ceres Seq. ID no. 13578553
  misc_feature (1)..(680): Ortholog of  Ceres SEQ ID NO 14310243 as cited in SEQ ID NO 20666
gatctgatcattcgttttctaacaccaaggcgaactgagagagattcgttaagcacaaaagagagaaaaaagatctaatgttttctccacatgatggaacactctgttctaaaaagagggatcatatgaaagtttttggagaatcgtttcatggttctttcaaaaggagcaaacaaggagatcaaaaacaaaccaaatttgagaagaacactactactctgttctttcaaagatcaaagtcagatagcgccatgttgataaagcctgatgttcagcttcacctagaggctaagacccaatcagagacatttgaagatcataggacagacctggaccttaatttgaacctttattcgtcatcaagttcctctgtcaaaaaaacaatcatggagaaagatgaatgttccaaaggcggaactgtgatcatcagcccaagtaagaaggtgagatcaggtgatatagggctaagtcgatccccgtcttggctagcgtttgaaggtgatgatgatgataatcagaagaagcaagagatgataacaacagtgtgcatgaagtgtcacatgctggttatgctctgcaaatctactcttgtctgtcctaactgcaaattcatgcaccatgatgatcatagctccactaaacagtttcagactttaaatttgtttaagctcttatgctag

SEQ ID NO: 97919 - protein, 200 aa, Arabidopsis thaliana
  peptide (1)..(200): Ceres Seq. ID no. 13578554
MFSPHDGTLCSKKRDHMKVFGESFHGSFKRSKQGDQKQTKFEKNTTTLFFQRSKSDSAMLIKPDVQLHLEAKTQSETFEDHRTDLDLNLNLYSSSSSSVKKTIMEKDECSKGGTVIISPSKKVRSGDIGLSRSPSWLAFEGDDDDNQKKQEMITTVCMKCHMLVMLCKSTLVCPNCKFMHHDDHSSTKQFQTLNLFKLLC

SEQ ID NO: 97920 - protein, 184 aa, Arabidopsis thaliana
  peptide (1)..(184): Ceres Seq. ID no. 13578555
MKVFGESFHGSFKRSKQGDQKQTKFEKNTTTLFFQRSKSDSAMLIKPDVQLHLEAKTQSETFEDHRTDLDLNLNLYSSSSSSVKKTIMEKDECSKGGTVIISPSKKVRSGDIGLSRSPSWLAFEGDDDDNQKKQEMITTVCMKCHMLVMLCKSTLVCPNCKFMHHDDHSSTKQFQTLNLFKLLC

SEQ ID NO: 97921 - protein, 142 aa, Arabidopsis thaliana; identical to SEQ ID NO: 82509
  peptide (1)..(142): Ceres Seq. ID no. 13578556

SEQ ID NO: 97922 - DNA, 1262 bp, Arabidopsis thaliana
  misc_feature (1)..(1262): Ceres Seq. ID no. 13578561
  misc_feature (1)..(1262): Ortholog of  Ceres SEQ ID NO 13596034 as cited in SEQ ID NO 62066
aaatttctccgatttggatctgtctccaactggcaagggtgacaatggctagctccaagggatcacagagtgttagaaacttgatgtacccgggaaagcatgctttgctcccaccaaaaataccgtttcctagtgtatcagcatcgtattccgagtatattcctactggtttgattggttcaagacatggtcagaagcttagtaatgagaaaacacatcaccagcgaacttcctccgagagccatttggtagaagagcttcccttttggcttgatgatcttctcaatgagcagccggaaagccctgctcgaaaatgtggtcatcggcgttcatcaagtgactcttacgcttatctagatgtggctaatgctacaaacataagtttgactctccaaaatgatttcagttataggaatactgttttatccactcaaagaggagtccaagagcttgaccggaataaaaatgctcaggatgctgccttctactctggtgctagttttctgaaacagaagagtcgtcagcgggattctttggtggcaactggggcttgtccttcttggttacctttcgctcgtgagaacggtggcggaaaaaacttgggagctttatatatgtctcaagatgcaacagtaatatcgtcagaaagaaagaactatgctgaacctttttctcatgacccaaagatgttatcttctgaggaaaacaactccaatccttcgcctgtgacttatgaagctgacaacacaaaacgagccaaacagcaatttgcacaaagatcacgggtccgtaagctccagtacatatctgagctagaaagaaatgtacagacattgcaggcagaaggctccaaagtttcagctgaacttgattttctcaaccagaggaatcttattctgagtatggaaaataaagctctcaagaagcgtctcgaaagtatagctcaggagaagcttatcaaacaatattcaacagttcttaagattgtatacctcatgagttctgtctattatccagtggaacaagaagtgttggaaaaggagattgggagactacgagcgttgtatcagcaacaacaacaaactcaaaaaccatcagccagtcgcggacgtgctactagcaaagatctcgactctcagttctccagtctttcactgaacaccaaagattccaactgtaggcgtgactctgtatctgtgatggggcctggcgactcaacaagatcagacccttatctaccgcctcaccacagacgtttttaa

SEQ ID NO: 97923 - protein, 419 aa, Arabidopsis thaliana
  peptide (1)..(419): Ceres Seq. ID no. 13578562
ISPIWICLQLARVTMASSKGSQSVRNLMYPGKHALLPPKIPFPSVSASYSEYIPTGLIGSRHGQKLSNEKTHHQRTSSESHLVEELPFWLDDLLNEQPESPARKCGHRRSSSDSYAYLDVANATNISLTLQNDFSYRNTVLSTQRGVQELDRNKNAQDAAFYSGASFLKQKSRQRDSLVATGACPSWLPFARENGGGKNLGALYMSQDATVISSERKNYAEPFSHDPKMLSSEENNSNPSPVTYEADNTKRAKQQFAQRSRVRKLQYISELERNVQTLQAEGSKVSAELDFLNQRNLILSMENKALKKRLESIAQEKLIKQYSTVLKIVYLMSSVYYPVEQEVLEKEIGRLRALYQQQQQTQKPSASRGRATSKDLDSQFSSLSLNTKDSNCRRDSVSVMGPGDSTRSDPYLPPHHRRF

SEQ ID NO: 97924 - protein, 405 aa, Arabidopsis thaliana
  peptide (1)..(405): Ceres Seq. ID no. 13578563
MASSKGSQSVRNLMYPGKHALLPPKIPFPSVSASYSEYIPTGLIGSRHGQKLSNEKTHHQRTSSESHLVEELPFWLDDLLNEQPESPARKCGHRRSSSDSYAYLDVANATNISLTLQNDFSYRNTVLSTQRGVQELDRNKNAQDAAFYSGASFLKQKSRQRDSLVATGACPSWLPFARENGGGKNLGALYMSQDATVISSERKNYAEPFSHDPKMLSSEENNSNPSPVTYEADNTKRAKQQFAQRSRVRKLQYISELERNVQTLQAEGSKVSAELDFLNQRNLILSMENKALKKRLESIAQEKLIKQYSTVLKIVYLMSSVYYPVEQEVLEKEIGRLRALYQQQQQTQKPSASRGRATSKDLDSQFSSLSLNTKDSNCRRDSVSVMGPGDSTRSDPYLPPHHRRF

SEQ ID NO: 97925 - protein, 392 aa, Arabidopsis thaliana
  peptide (1)..(392): Ceres Seq. ID no. 13578564
MYPGKHALLPPKIPFPSVSASYSEYIPTGLIGSRHGQKLSNEKTHHQRTSSESHLVEELPFWLDDLLNEQPESPARKCGHRRSSSDSYAYLDVANATNISLTLQNDFSYRNTVLSTQRGVQELDRNKNAQDAAFYSGASFLKQKSRQRDSLVATGACPSWLPFARENGGGKNLGALYMSQDATVISSERKNYAEPFSHDPKMLSSEENNSNPSPVTYEADNTKRAKQQFAQRSRVRKLQYISELERNVQTLQAEGSKVSAELDFLNQRNLILSMENKALKKRLESIAQEKLIKQYSTVLKIVYLMSSVYYPVEQEVLEKEIGRLRALYQQQQQTQKPSASRGRATSKDLDSQFSSLSLNTKDSNCRRDSVSVMGPGDSTRSDPYLPPHHRRF

SEQ ID NO: 97926 - DNA, 855 bp, Arabidopsis thaliana
  misc_feature (1)..(855): Ceres Seq. ID no. 13578580
  misc_feature (1)..(855): Ortholog of  Ceres SEQ ID NO 12616895 as cited in SEQ ID NO 63909
  misc_feature (1)..(855): Ortholog of  Ceres SEQ ID NO 13598574 as cited in SEQ ID NO 69083
gacaaccccacttttgtacttctcttccctctccccctcccaaataaccgccgataaacaatgctccggctaagcaacgccgccgtaataacaaccaatgcaattctcgcattgatcggcctcgccgctctatctttttccgtctacgtctacgttcaaggcccatcacagtgtcaacgtttcgttcaaaaccctctcattgtaactgcggctctcctcttcttcatctcgtccttaggccttatcgctgctctctacggtagccacatcatcatcacactctatctcttcttccttttcctctccattcttctgcttcttgtcctctctgtctttatcttcctcgtcacgaatcccaccgccggaaaagcgttatccggtagaggaataggcaatgtcaagaccggagattatcagaactggatcgggaaccatttccttcgtgggaagaattgggaagggatcaccaaatgtttgtctgattctagggtttgtaaaaggtttggtccacgtgacattgactttgactccaaacatctctctaatgtacagtttggttgttgtcgacctcccgtagaatgtgggttcgaatcaaagaatgccacgtggtggacagttcctgccacagcgactacggcgattataggggattgtaaggcatggagtaacacgcagagacagttatgttacgcgtgcgagtcgtgtaagattggagttttaaaagggataagaaaaagatggaggatacttattgtcgtcaatctccttcttatccttctcgtcgtttttctttactcgtgtggctgttgcgtgagaaagaacaatcgtgttccatggaagcgccggttcttctaa

SEQ ID NO: 97927 - protein, 264 aa, Arabidopsis thaliana
  peptide (1)..(264): Ceres Seq. ID no. 13578581
MLRLSNAAVITTNAILALIGLAALSFSVYVYVQGPSQCQRFVQNPLIVTAALLFFISSLGLIAALYGSHIIITLYLFFLFLSILLLLVLSVFIFLVTNPTAGKALSGRGIGNVKTGDYQNWIGNHFLRGKNWEGITKCLSDSRVCKRFGPRDIDFDSKHLSNVQFGCCRPPVECGFESKNATWWTVPATATTAIIGDCKAWSNTQRQLCYACESCKIGVLKGIRKRWRILIVVNLLLILLVVFLYSCGCCVRKNNRVPWKRRFF

SEQ ID NO: 97928 - DNA, 1467 bp, Arabidopsis thaliana
  misc_feature (1)..(1467): Ceres Seq. ID no. 13578641
  misc_feature (1)..(1467): Ortholog of  Ceres SEQ ID NO 14315063 as cited in SEQ ID NO 52256
  misc_feature (1)..(1467): Ortholog of  Ceres SEQ ID NO 13597574 as cited in SEQ ID NO 64677
  misc_feature (1)..(1467): Ortholog of  Ceres SEQ ID NO 13662880 as cited in SEQ ID NO 65422
  misc_feature (1)..(1467): Ortholog of  Ceres SEQ ID NO 14302071 as cited in SEQ ID NO 66585
  misc_feature (1)..(1467): Ortholog of  Ceres SEQ ID NO 14316013 as cited in SEQ ID NO 67181
  misc_feature (1)..(1467): Ortholog of  Ceres SEQ ID NO 12779098 as cited in SEQ ID NO 67698
  misc_feature (1)..(1467): Ortholog of  Ceres SEQ ID NO 13596180 as cited in SEQ ID NO 67941
  misc_feature (1)..(1467): Ortholog of  Ceres SEQ ID NO 13591190 as cited in SEQ ID NO 68044
  misc_feature (1)..(1467): Ortholog of  Ceres SEQ ID NO 13596089 as cited in SEQ ID NO 68373
agagagaaattcacaacaaaaatggagactagagaaacaaaaccagtgatctttctcttccctttccctttacaaggtcacttaaacccaatgtttcagctcgccaacatcttcttcaacagaggcttctccatcactgtgatccacactgagttcaactctccaaactcttccaatttccctcatttcactttcgtatccatccccgatagcttgtctgaacctgaatcctatcccgatgtcatcgagattctccatgacctcaattccaagtgtgttgctccttttggtgattgcttaaagaagcttatatctgaagaaccaacagcagcttgtgtgattgttgacgctctttggtacttcactcacgatttaaccgagaaattcaatttcccgaggattgttctccgaaccgttaacctctcagctttcgtcgctttctcaaagtttcatgttttacgagagaaagggtatctttctttacaagagactaaggcagactcaccggttccggagcttccgtatcttagaatgaaggatcttccatggttccagacagaagatccaagatcaggggataagttacagataggtgtgatgaagtcactaaagtcttcctcaggaatcatattcaacgccattgaagatcttgaaacagatcagcttgatgaagcccgcatagaattcccagttccactcttctgtattggaccctttcacaggtacgtttcagcttcatccagtagcttacttgcacacgacatgacttgtctctcctggttagacaagcaagcaacaaattccgtaatctacgcaagtcttggaagcattgcttcgatcgatgaatctgaattcttggagattgcttggggtctaagaaacagcaaccaaccttttctatgggtggttagacccggtttaatccacgggaaagaatggatcgagattctgcctaaagggttcatcgaaaatctcgagggccggggtaaaatagtgaaatgggcacctcagcctgaagttttagctcaccgtgcaacaggcggattcttaacacattgtggatggaactcaacacttgagggcatatgtgaagctataccaatgatatgcagaccatcttttggggaccagagggtgaatgctagatacattaacgatgtttggaagatcggattgcatttggaaaacaaggtagagagactagtgatcgaaaacgcggttagaacactaatgacgagctcggaaggggaagagatccgcaagaggattatgcccatgaaggaaactgttgaacaatgccttaagcttggaggttcatcatttcggaatctcgaaaacttaattgcttatatattgtctttctaatgcggtgttcttcttcttctccacatccaaatttgctttcctttgatttaatctgcattcccataatcagacacattttatcattcaaaaactttaccatgt

SEQ ID NO: 97929 - protein, 454 aa, Arabidopsis thaliana
  peptide (1)..(454): Ceres Seq. ID no. 13578642
REKFTTKMETRETKPVIFLFPFPLQGHLNPMFQLANIFFNRGFSITVIHTEFNSPNSSNFPHFTFVSIPDSLSEPESYPDVIEILHDLNSKCVAPFGDCLKKLISEEPTAACVIVDALWYFTHDLTEKFNFPRIVLRTVNLSAFVAFSKFHVLREKGYLSLQETKADSPVPELPYLRMKDLPWFQTEDPRSGDKLQIGVMKSLKSSSGIIFNAIEDLETDQLDEARIEFPVPLFCIGPFHRYVSASSSSLLAHDMTCLSWLDKQATNSVIYASLGSIASIDESEFLEIAWGLRNSNQPFLWVVRPGLIHGKEWIEILPKGFIENLEGRGKIVKWAPQPEVLAHRATGGFLTHCGWNSTLEGICEAIPMICRPSFGDQRVNARYINDVWKIGLHLENKVERLVIENAVRTLMTSSEGEEIRKRIMPMKETVEQCLKLGGSSFRNLENLIAYILSF

SEQ ID NO: 97930 - protein, 447 aa, Arabidopsis thaliana
  peptide (1)..(447): Ceres Seq. ID no. 13578643
METRETKPVIFLFPFPLQGHLNPMFQLANIFFNRGFSITVIHTEFNSPNSSNFPHFTFVSIPDSLSEPESYPDVIEILHDLNSKCVAPFGDCLKKLISEEPTAACVIVDALWYFTHDLTEKFNFPRIVLRTVNLSAFVAFSKFHVLREKGYLSLQETKADSPVPELPYLRMKDLPWFQTEDPRSGDKLQIGVMKSLKSSSGIIFNAIEDLETDQLDEARIEFPVPLFCIGPFHRYVSASSSSLLAHDMTCLSWLDKQATNSVIYASLGSIASIDESEFLEIAWGLRNSNQPFLWVVRPGLIHGKEWIEILPKGFIENLEGRGKIVKWAPQPEVLAHRATGGFLTHCGWNSTLEGICEAIPMICRPSFGDQRVNARYINDVWKIGLHLENKVERLVIENAVRTLMTSSEGEEIRKRIMPMKETVEQCLKLGGSSFRNLENLIAYILSF

SEQ ID NO: 97931 - protein, 424 aa, Arabidopsis thaliana
  peptide (1)..(424): Ceres Seq. ID no. 13578644
MFQLANIFFNRGFSITVIHTEFNSPNSSNFPHFTFVSIPDSLSEPESYPDVIEILHDLNSKCVAPFGDCLKKLISEEPTAACVIVDALWYFTHDLTEKFNFPRIVLRTVNLSAFVAFSKFHVLREKGYLSLQETKADSPVPELPYLRMKDLPWFQTEDPRSGDKLQIGVMKSLKSSSGIIFNAIEDLETDQLDEARIEFPVPLFCIGPFHRYVSASSSSLLAHDMTCLSWLDKQATNSVIYASLGSIASIDESEFLEIAWGLRNSNQPFLWVVRPGLIHGKEWIEILPKGFIENLEGRGKIVKWAPQPEVLAHRATGGFLTHCGWNSTLEGICEAIPMICRPSFGDQRVNARYINDVWKIGLHLENKVERLVIENAVRTLMTSSEGEEIRKRIMPMKETVEQCLKLGGSSFRNLENLIAYILSF

SEQ ID NO: 97932 - DNA, 1161 bp, Arabidopsis thaliana
  misc_feature (1)..(1161): Ceres Seq. ID no. 13578720
  misc_feature (1)..(1161): Ortholog of  Ceres SEQ ID NO 13596581 as cited in SEQ ID NO 62420
  misc_feature (1)..(1161): Ortholog of  Ceres SEQ ID NO 13591273 as cited in SEQ ID NO 65904
  misc_feature (1)..(1161): Ortholog of  Ceres SEQ ID NO 13623086 as cited in SEQ ID NO 0
atggacaaggcttcaatcactgaaggaaagccgattcgatgcaaagcagcaatcttaagaaaagcaggagaaccattggtgatagaagagatccaagttgatccacctcaagcttacgaagtcagaatcaaaattttatgcacttctctatgtcacacggatgttactttctggaaactagacagtggaccgcttgcaagatttcctaggattctaggtcatgaagcagtcggtgtggtcgagagtattggagaaaaggtagacggatttaaacaaggcgacgtcgttttgccagtgtttcatcctcaatgtgaagaatgcaaagagtgcatatctccaaagagcaactggtgcacaaaatatacaaacgattatttatcaaacacaagacgatatggaatgacttcaagattcaaggactctcgtggagaagatattcaccatttcatctttgtctcaagttttactgaatataccgttgtagatatcgcacatctcgtcaaaatatctcctgaaattcccgttgatatagcggccttgctcagctgcagtgttgccacaggacttggagctgcgtggaaagtggctgacgtagaggaaggttccactgtcgttatctttggccttggtgctgttggactagcggttgcagaaggagtcagattgcgtggagccgcaaaaatcatcggtgtggatctcaatcccgcgaaatttgaaataggtaaaagatttggaatcacagattttgtcaatcctgctttgtgtggggagaagacaattagcgaggtgattagagaaatgacagatgtaggagctgactacagttttgaatgcattggtttagcttccttgatggaagaggcattcaagagtactcgcccgggatcgggtaaaacgatagtattggggatggaacaaaaggctttgccaataagcttgggtagttatgatcttctcagaggcagaactgtatgcggcactttatttggcggtttgaaacccaaacttgatattcctattctcgtggatcgttatttgaaaaaggagcttaatctagaggatctgattacacacgaattaagctttgaagaaattaacaaagctttccatttattggctgagggaaactctatccgttgcattatatggatggataaatag

SEQ ID NO: 97933 - protein, 386 aa, Arabidopsis thaliana
  peptide (1)..(386): Ceres Seq. ID no. 13578721
MDKASITEGKPIRCKAAILRKAGEPLVIEEIQVDPPQAYEVRIKILCTSLCHTDVTFWKLDSGPLARFPRILGHEAVGVVESIGEKVDGFKQGDVVLPVFHPQCEECKECISPKSNWCTKYTNDYLSNTRRYGMTSRFKDSRGEDIHHFIFVSSFTEYTVVDIAHLVKISPEIPVDIAALLSCSVATGLGAAWKVADVEEGSTVVIFGLGAVGLAVAEGVRLRGAAKIIGVDLNPAKFEIGKRFGITDFVNPALCGEKTISEVIREMTDVGADYSFECIGLASLMEEAFKSTRPGSGKTIVLGMEQKALPISLGSYDLLRGRTVCGTLFGGLKPKLDIPILVDRYLKKELNLEDLITHELSFEEINKAFHLLAEGNSIRCIIWMDK

SEQ ID NO: 97934 - protein, 253 aa, Arabidopsis thaliana
  peptide (1)..(253): Ceres Seq. ID no. 13578722
MTSRFKDSRGEDIHHFIFVSSFTEYTVVDIAHLVKISPEIPVDIAALLSCSVATGLGAAWKVADVEEGSTVVIFGLGAVGLAVAEGVRLRGAAKIIGVDLNPAKFEIGKRFGITDFVNPALCGEKTISEVIREMTDVGADYSFECIGLASLMEEAFKSTRPGSGKTIVLGMEQKALPISLGSYDLLRGRTVCGTLFGGLKPKLDIPILVDRYLKKELNLEDLITHELSFEEINKAFHLLAEGNSIRCIIWMDK

SEQ ID NO: 97935 - DNA, 1100 bp, Arabidopsis thaliana
  misc_feature (1)..(1100): Ceres Seq. ID no. 13578723
  misc_feature (1)..(1100): Ortholog of  Ceres SEQ ID NO 12626061 as cited in SEQ ID NO 64594
  misc_feature (1)..(1100): Ortholog of  Ceres SEQ ID NO 15174020 as cited in SEQ ID NO 0
  misc_feature (1)..(1100): Ortholog of  Ceres SEQ ID NO 15179151 as cited in SEQ ID NO 0
aaaaaaaaaaaaaaggtaggaaacgtgggccgaacattatcagaaggattcaagcgaagcaaaatcccaccctttcttctgtgacagagtgtctgtatttgttgtttcccttcaattggagagagtaagcgagtctcttacgcccagagagagagagagagagaggcttgtttgttttctctcctctaagaaacaatcagtctcataaagtggcaaagatggttgcagaacgatacacagtcgatttgaataagccacttgtgtttcaggttggtcatcttggcgaagaatatcaggaatggattcatcaacctattgtatgcgttgagggtcctcgttttttcgaaagtgatttttgggagtttttgactcgcacggtttggtgggcaatcccaacaatctggcttccagttgtttgctacgttctttcaatatcggcgagtaagggacttacgtttccccagatcggtttaatagttgcttttggtgtactcacgtggacactgctcgagtacacgcttcatcgcttccttttccacatccaaaccaagagttactgggcaaacactgcacactatcttcttcatggatgccatcacaagcacccacaagacggccttcgtcttgttttccctcctacagcaacagctattctcttggttccactatggaagcttctccatctcctagctactcctgctacagcacctgctattcttggaggcatattgtttggctatgtgatgtatgatattacccattactatctacaccatggtcaacctaaagaaccaacctttaaacatcttaagaaataccacctgaatcatcactttaggattcaggacaaaggatatggaatcacttcctctctatgggacaaagtctttggaacacttcccggtattaaagccgctgcgaagaagagctaaatcggatttctgtttgccatttttcagagtgtcgaaaaactcactgatattgtgtattctaaattcatcaggtgattcaatgactgtttaactacttctgtatacgatctattcaccatatttgaacatatttttagtggtttaatatcattcagaatttggtctttg

SEQ ID NO: 97936 - protein, 237 aa, Arabidopsis thaliana; identical to SEQ ID NO: 46634
  peptide (1)..(237): Ceres Seq. ID no. 13578724

SEQ ID NO: 97937 - DNA, 1220 bp, Arabidopsis thaliana
  misc_feature (1)..(1220): Ceres Seq. ID no. 13578733
  misc_feature (1)..(1220): Ortholog of  Ceres SEQ ID NO 14301822 as cited in SEQ ID NO 66211
atggatgaagaagtttcagcttcggcgactccagagtcccggagaaagaggattggaaagaagacgacgtcgtttattcaaagatctatatccttaaactacatgccatctcttcttgtccacatgtccgatacgacatcgtttggccagtacgacttcgttcggccgcaaacctccgtatatcgcaggctctctcactctttccgtcttctgatttctccctccaaaacaaacctcggaagagaaaattggagcgaaggagcgatagatatggcgtcggcgtcctcgtctgacggagttgccggaaggattcagaacgcttctttggttcttgtctccgataacagttccacgcttgctgatatccgcaaagctgtggcaatgatgaagaacattgcagttcaattggagaaagaaaatcaaacggacaaggttaaggaccttgaaaattctgtggctgagttattggatttgcatagtgattgtaatcaccgttcgacagcaattcaatccgttgcaaatcggtaccaacccgtggaacaattaacggactttaaaaagttgcttgatgatgaattcacaaagctcaaggctacaccttcctcagtgccacaaaatgatcatttgatgcgccagttcagggaagcagtttggaatgttcatcatgcaggtgaaccaatgcctggtgacgatgatgaggacattgttatgaccagtactcagtgccctcttctaaacatgacatgtcccttgagcgggaagcctgtcactgaattagcagatccagttcgcagtatggattgcaggcacgtctatgaaaaatctgtaatcctgcattacatagtcaacaatccaaatgcgaattgtcctgtagcagggtgccgaggtaaactgcagaatagcaaagtgatttgtgatgcaatgttgaagtttgaaatagaggagatgcgctcgttgaacaaacaatctaatagggctgaagtgattgaagacttcacagaagatgtggatgaagattagagatcagacatttcttggaccgggttttaagcgctgcaatgaaacaagttgaagccatatgtttcacaactttttgctattcttagtccgttcggtatattttatcaaacgtgaaatttgataccaattgtttccactttatggaggatgtaaatagtcgatctcttccgattctgaattcaactgctgttttttttgcc

SEQ ID NO: 97938 - protein, 339 aa, Arabidopsis thaliana
  peptide (1)..(339): Ceres Seq. ID no. 13578734
MDEEVSASATPESRRKRIGKKTTSFIQRSISLNYMPSLLVHMSDTTSFGQYDFVRPQTSVYRRLSHSFRLLISPSKTNLGRENWSEGAIDMASASSSDGVAGRIQNASLVLVSDNSSTLADIRKAVAMMKNIAVQLEKENQTDKVKDLENSVAELLDLHSDCNHRSTAIQSVANRYQPVEQLTDFKKLLDDEFTKLKATPSSVPQNDHLMRQFREAVWNVHHAGEPMPGDDDEDIVMTSTQCPLLNMTCPLSGKPVTELADPVRSMDCRHVYEKSVILHYIVNNPNANCPVAGCRGKLQNSKVICDAMLKFEIEEMRSLNKQSNRAEVIEDFTEDVDED

SEQ ID NO: 97939 - protein, 305 aa, Arabidopsis thaliana
  peptide (1)..(305): Ceres Seq. ID no. 13578735
MPSLLVHMSDTTSFGQYDFVRPQTSVYRRLSHSFRLLISPSKTNLGRENWSEGAIDMASASSSDGVAGRIQNASLVLVSDNSSTLADIRKAVAMMKNIAVQLEKENQTDKVKDLENSVAELLDLHSDCNHRSTAIQSVANRYQPVEQLTDFKKLLDDEFTKLKATPSSVPQNDHLMRQFREAVWNVHHAGEPMPGDDDEDIVMTSTQCPLLNMTCPLSGKPVTELADPVRSMDCRHVYEKSVILHYIVNNPNANCPVAGCRGKLQNSKVICDAMLKFEIEEMRSLNKQSNRAEVIEDFTEDVDED

SEQ ID NO: 97940 - protein, 298 aa, Arabidopsis thaliana
  peptide (1)..(298): Ceres Seq. ID no. 13578736
MSDTTSFGQYDFVRPQTSVYRRLSHSFRLLISPSKTNLGRENWSEGAIDMASASSSDGVAGRIQNASLVLVSDNSSTLADIRKAVAMMKNIAVQLEKENQTDKVKDLENSVAELLDLHSDCNHRSTAIQSVANRYQPVEQLTDFKKLLDDEFTKLKATPSSVPQNDHLMRQFREAVWNVHHAGEPMPGDDDEDIVMTSTQCPLLNMTCPLSGKPVTELADPVRSMDCRHVYEKSVILHYIVNNPNANCPVAGCRGKLQNSKVICDAMLKFEIEEMRSLNKQSNRAEVIEDFTEDVDED

SEQ ID NO: 97941 - DNA, 2414 bp, Arabidopsis thaliana
  misc_feature (1)..(2414): Ceres Seq. ID no. 13578752
  misc_feature (1)..(2414): Ortholog of  Ceres SEQ ID NO 13654290 as cited in SEQ ID NO 62197
  misc_feature (1)..(2414): Ortholog of  Ceres SEQ ID NO 14301924 as cited in SEQ ID NO 67731
atggtagttgcattttcgcttgaaattgtctgtccttttgctagtttgagtcacaattttcaattgaaaagaaataagagagagagatttagagcgtgtgagggagataggaagagagaaagtgagcgagagacgatcacggccgcgctgaaatccacgaccacggccgcgctgaaatccacgaccacggccgctctgaagaagaagactctctccgtctcctcccttctcctcctccgtctaagagacaaggcatccccagacgccatgatctctctcactccctcgttgtttctgaacaagacggttgttcctggatgttccacacgcctctctctgcgccagcctagaactataattactcctcctgcttccttgagagtcttttcctctctcggatctaaccaggatcccaccggcagcgttttgattgagaccactgccacttcatcctcctctctcgagacctccgccgccgacattgttcccaaatccaccgtatctggtggagttcaggatgtctacggcgaggatgccgccaccgaggacatgcctatcactccttggtctctctctgtcgccagtgggtatacgttgttgcgtgatccacatcacaacaaaggccttgcctttagccacagagagcgtgacgctcactatctacgcggcctcctcccccccactgttatctcacaagatcttcaggttaaaaaaattatgcacactcttcgtcagtatcaagttcccttgcagaagtatatggctatgatggatctccaggagaccaacgagaggctgttttacaaacttctcattgatcacgtcgaggagttgctacccgttatctacactccaacggttggggaagcctgccagaagtatggtagcattttcctgcgtccacaggggctttttatcagcttgaaagaaaaaggtaagattcatgaagtgctgaggaactggcctgagaagaacatccaggtcattgttgtcactgatggggagcgcattttagggttaggagatcttggatgtcagggaatgggaatacctgttgggaaactttctctctacacagcccttggaggtgtccggccatctgcctgtctgcccgtaacaatcgatgttgggacaaacaacgaaaagctattgaacgatgagttctacatagggctccgccaaaggagagctacaggagaggaatactccgaacttatgcatgaattcatgacagcagtcaagcagaactatggggagaaagtcgttattcagtttgaagactttgccaaccataatgcttttgatctgttagctaagtatggtacaacacatcttgttttcaatgacgatattcagggcacagcatcagttgtgcttgctggacttatcgctgctcttagatttgtggggggatccttgtcagaccacagattcctcttcctcggggctggagaggctggcactggaatagctgaactaattgctcttgagatttcaaagaagtcccatattccattggaagaggctcggaagaatatttggctcgtggattcaaagggattgattgtcagttcccggaaagaatccattcaacatttcaaaaagccctgggctcatgaccatgaaccaataagggaacttgttgatgccgtcaaggcaatcaagccgacagttctgatcggaacatcaggtgtaggtcaaacattcactcaagacgtggtggaaaccatggcaaagctaaatgagaaacccatcattctttctctttcgaacccaacttctcagtcagaatgtacggcagaagaggcctatacgtggagtcagggacgggcgatctttgcaagtggaagcccatttgcgccagtagagtatgagggaaagacgtttgtgcctggacaggcaaacaacgcatacatcttccctgggtttggactcgggctaataatgtcagggacgatccgtgtccatgatgacatgcttctggcagcatcagaagctttggctgaggaactgatggaggaacactatgagaaggggatgatataccctcccttcaggaatatcagaaaaatctcagctcgtattgcagctaaggtggctgccaaggcctacgaactgggactggccacgaggttgcctcagcccaaggagctggagcagtgtgctgagagcagcatgtacagcccttcgtatcgaagctaccgctgaggataagcttaatctaatttgttatgtctcatacgactcttatggccatttctctcctctcctattcgttcaccttccacttcccgtgagatttttgtttgtttgtttgtcagcatctttaaaatcttgtgttgtaatcactgtttcccttgttgtttctttttaagtccgtaataatcctcctatggaaattgtttctctgggcc

SEQ ID NO: 97942 - protein, 735 aa, Arabidopsis thaliana
  peptide (1)..(735): Ceres Seq. ID no. 13578753
MVVAFSLEIVCPFASLSHNFQLKRNKRERFRACEGDRKRESERETITAALKSTTTAALKSTTTAALKKKTLSVSSLLLLRLRDKASPDAMISLTPSLFLNKTVVPGCSTRLSLRQPRTIITPPASLRVFSSLGSNQDPTGSVLIETTATSSSSLETSAADIVPKSTVSGGVQDVYGEDAATEDMPITPWSLSVASGYTLLRDPHHNKGLAFSHRERDAHYLRGLLPPTVISQDLQVKKIMHTLRQYQVPLQKYMAMMDLQETNERLFYKLLIDHVEELLPVIYTPTVGEACQKYGSIFLRPQGLFISLKEKGKIHEVLRNWPEKNIQVIVVTDGERILGLGDLGCQGMGIPVGKLSLYTALGGVRPSACLPVTIDVGTNNEKLLNDEFYIGLRQRRATGEEYSELMHEFMTAVKQNYGEKVVIQFEDFANHNAFDLLAKYGTTHLVFNDDIQGTASVVLAGLIAALRFVGGSLSDHRFLFLGAGEAGTGIAELIALEISKKSHIPLEEARKNIWLVDSKGLIVSSRKESIQHFKKPWAHDHEPIRELVDAVKAIKPTVLIGTSGVGQTFTQDVVETMAKLNEKPIILSLSNPTSQSECTAEEAYTWSQGRAIFASGSPFAPVEYEGKTFVPGQANNAYIFPGFGLGLIMSGTIRVHDDMLLAASEALAEELMEEHYEKGMIYPPFRNIRKISARIAAKVAAKAYELGLATRLPQPKELEQCAESSMYSPSYRSYR

SEQ ID NO: 97943 - protein, 646 aa, Arabidopsis thaliana; identical to SEQ ID NO: 45959
  peptide (1)..(646): Ceres Seq. ID no. 13578754

SEQ ID NO: 97944 - protein, 552 aa, Arabidopsis thaliana; identical to SEQ ID NO: 45960
  peptide (1)..(552): Ceres Seq. ID no. 13578755

SEQ ID NO: 97945 - DNA, 1171 bp, Arabidopsis thaliana
  misc_feature (1)..(1171): Ceres Seq. ID no. 13578787
  misc_feature (1)..(1171): Ortholog of  Ceres SEQ ID NO 12364737 as cited in SEQ ID NO 51089
  misc_feature (1)..(1171): Ortholog of  Ceres SEQ ID NO 14311515 as cited in SEQ ID NO 51680
  misc_feature (1)..(1171): Ortholog of  Ceres SEQ ID NO 13582301 as cited in SEQ ID NO 56509
  misc_feature (1)..(1171): Ortholog of  Ceres SEQ ID NO 13595567 as cited in SEQ ID NO 56760
  misc_feature (1)..(1171): Ortholog of  Ceres SEQ ID NO 13655302 as cited in SEQ ID NO 63307
  misc_feature (1)..(1171): Ortholog of  Ceres SEQ ID NO 13597380 as cited in SEQ ID NO 64054
  misc_feature (1)..(1171): Ortholog of  Ceres SEQ ID NO 12625474 as cited in SEQ ID NO 64169
  misc_feature (1)..(1171): Ortholog of  Ceres SEQ ID NO 13597502 as cited in SEQ ID NO 64681
  misc_feature (1)..(1171): Ortholog of  Ceres SEQ ID NO 15180805 as cited in SEQ ID NO 0
gacaaacaacttcataatggctttccacttccggcgactttgcttcttctcagctcttcttgccgtggttctccaactccttcatggcgtctctggccaactagttgtggttgaggaacctatttctgctcctccgcctccgctggtcgacctaaacaccggtgatggcattgtgccggcgctgtttgtcttcggtgactctctaatagacaatgggaataacaataacattccttcctttgccaaagccaattattttccttatggcattgatttcaatggcggtccgaccggtcgattctgcaatggcttaacgatggtcgatgggattgctcaactattggggctgccactgattccggcctactcggaagctaccggagatcaagtacttcgtggtgtcaactatgcttccgcagccgcggggattcttcctgacaccggaggaaactttgtgggacgcatacctttcgaccagcagattcataacttcgagacaacactagatcaggtggcgagcaagtccggtggtgcagtggccattgcggattcggtgactcgaagcttgttcttcatcggaatgggaagcaacgactatctcaacaattacttgatgcccaatttccctacccgtaaccaatacaactcccaacagttcggtgatctcttggttcaacattacaccgatcagctcaccagactatataatcttggtggtcggaaatttgtagtggccggacttggaagaatggggtgcattcccagcattctagctcaaggaaacgacggtaaatgctcggaagaagtgaaccaacttgttcttcctttcaacacaaacgttaaaacaatgatctctaatctcaaccagaatctcccggatgctaaatttatttacctcgacatcgctcatatgttcgaagacatcgttgctaaccaagcagcttatggtcttactactatggacaaaggatgttgtggaataggaaaaaacagaggacagatcacttgtcttccctttgaaacgccttgtcctaacagagatcagtatgtgttttgggatgctttccatcctacagagaaagttaatctcataatggcaaagaaagcgtttgctggtgaccgcactgtcgcgtacccgatcaacattcagcaattggctagtctcaattaa

SEQ ID NO: 97946 - protein, 389 aa, Arabidopsis thaliana; identical to SEQ ID NO: 48855
  peptide (1)..(389): Ceres Seq. ID no. 13578788

SEQ ID NO: 97947 - protein, 384 aa, Arabidopsis thaliana; identical to SEQ ID NO: 48856
  peptide (1)..(384): Ceres Seq. ID no. 13578789

SEQ ID NO: 97948 - protein, 284 aa, Arabidopsis thaliana; identical to SEQ ID NO: 48857
  peptide (1)..(284): Ceres Seq. ID no. 13578790

SEQ ID NO: 97949 - DNA, 1674 bp, Arabidopsis thaliana
  misc_feature (1)..(1674): Ceres Seq. ID no. 13578791
  misc_feature (1)..(1674): Ortholog of  Ceres SEQ ID NO 13654166 as cited in SEQ ID NO 68381
  misc_feature (1)..(1674): Ortholog of  Ceres SEQ ID NO 13599720 as cited in SEQ ID NO 0
atacgtgactcatcgtctttttcactcccacacgttctgctccagcgatactgtgagagaatctctgtgtggttctgaattcttaggctggaattgaattctgaaatggcggaggagtacaaggaagcgttgttggagaagcagaactatcacgacggatgtcccggctgtaaggtggagcagatgaagcagctccggcgaggatatccttacctcgagctttccttcgtttggattatcgtcctctccacttctctaccaatttcctcactctatcccttcctctactatatgattgaggattttggtgtcgcaaagacggagaaagatattgggttttatgctggttttgttggttgctcttttatgcttggaagagcactgacttctgtgttctggggaattgtggctgatcgttatggaagaaaacccattatactcttgggaactatctcaattgcaattttcaacgctctttttggcttgagctcaaatttttggatggcaattggcacaaggtttcttcttgggagtttcaactgtttgcttggaacaatgaaggcctatgcatcagaaatatttcgtgatgaatatcaagctaccgcaatgtcagctgttagtactgcttggggcattggactgatcattggccctgctcttggtggttttttagctcagccggcagacaaatatccaaatgtgttctcccaagaatctctttttggcagattccggtatgcattgccttgctttacgatttcagcttttgccttgcttgtgacagtactatgctgcttcatcccggagacactgcacaatcataagctggacagcttatcacatgatgattcatacgatatacttgaagctgcatctcatgaatcatctccttctaccgggaaggcaggaaaaaacgaaagaaaggcttctcagtctctcttgaagaattggccgctgatgtcatctatcattgtgtattgtgttctgtgtcttcatgatactgcatactcggagatatttgcactatgggctaacagtccaaggaagtatggaggtctgagctactcaacgaatgaagtcggtacagttcttgctatctcaggtctcggcctattctcttttcaggtatttgtttatcctttggctgagaaactgctaggacctgttctggtcacccgatatgctggggcactgatgatacctatacaaatgagttatccatttatagcaggcttgtcaggtctcagtctaagcttgatgttaaattgtgcatcaatcctcataaatgtcttaagtgtgtctgccataaccggcctgttgatccttcaaaatagagcagtggatcagagccaaagaggggcggctaatggaatagctatgactgcgatgtctctatttaagacagttggaccagctggtgctggcatcttattttcttggagtgagaggcgactaaacgctgcatttctaccaggatcgcatatggtattcttcgtcttgaatgtgatagtagtggtcggagtagctctgacattcaagccatttctaacgacgagtcgaagatgaaattcatttgaattggtaagatagggaatgtatggacaagttgattcttttcatttcagatacgaaagaaaccggtaataaaatttcactaaccttaggatttcagct

SEQ ID NO: 97950 - protein, 486 aa, Arabidopsis thaliana
  peptide (1)..(486): Ceres Seq. ID no. 13578792
MAEEYKEALLEKQNYHDGCPGCKVEQMKQLRRGYPYLELSFVWIIVLSTSLPISSLYPFLYYMIEDFGVAKTEKDIGFYAGFVGCSFMLGRALTSVFWGIVADRYGRKPIILLGTISIAIFNALFGLSSNFWMAIGTRFLLGSFNCLLGTMKAYASEIFRDEYQATAMSAVSTAWGIGLIIGPALGGFLAQPADKYPNVFSQESLFGRFRYALPCFTISAFALLVTVLCCFIPETLHNHKLDSLSHDDSYDILEAASHESSPSTGKAGKNERKASQSLLKNWPLMSSIIVYCVLCLHDTAYSEIFALWANSPRKYGGLSYSTNEVGTVLAISGLGLFSFQVFVYPLAEKLLGPVLVTRYAGALMIPIQMSYPFIAGLSGLSLSLMLNCASILINVLSVSAITGLLILQNRAVDQSQRGAANGIAMTAMSLFKTVGPAGAGILFSWSERRLNAAFLPGSHMVFFVLNVIVVVGVALTFKPFLTTSRR

SEQ ID NO: 97951 - protein, 460 aa, Arabidopsis thaliana
  peptide (1)..(460): Ceres Seq. ID no. 13578793
MKQLRRGYPYLELSFVWIIVLSTSLPISSLYPFLYYMIEDFGVAKTEKDIGFYAGFVGCSFMLGRALTSVFWGIVADRYGRKPIILLGTISIAIFNALFGLSSNFWMAIGTRFLLGSFNCLLGTMKAYASEIFRDEYQATAMSAVSTAWGIGLIIGPALGGFLAQPADKYPNVFSQESLFGRFRYALPCFTISAFALLVTVLCCFIPETLHNHKLDSLSHDDSYDILEAASHESSPSTGKAGKNERKASQSLLKNWPLMSSIIVYCVLCLHDTAYSEIFALWANSPRKYGGLSYSTNEVGTVLAISGLGLFSFQVFVYPLAEKLLGPVLVTRYAGALMIPIQMSYPFIAGLSGLSLSLMLNCASILINVLSVSAITGLLILQNRAVDQSQRGAANGIAMTAMSLFKTVGPAGAGILFSWSERRLNAAFLPGSHMVFFVLNVIVVVGVALTFKPFLTTSRR

SEQ ID NO: 97952 - protein, 424 aa, Arabidopsis thaliana
  peptide (1)..(424): Ceres Seq. ID no. 13578794
MIEDFGVAKTEKDIGFYAGFVGCSFMLGRALTSVFWGIVADRYGRKPIILLGTISIAIFNALFGLSSNFWMAIGTRFLLGSFNCLLGTMKAYASEIFRDEYQATAMSAVSTAWGIGLIIGPALGGFLAQPADKYPNVFSQESLFGRFRYALPCFTISAFALLVTVLCCFIPETLHNHKLDSLSHDDSYDILEAASHESSPSTGKAGKNERKASQSLLKNWPLMSSIIVYCVLCLHDTAYSEIFALWANSPRKYGGLSYSTNEVGTVLAISGLGLFSFQVFVYPLAEKLLGPVLVTRYAGALMIPIQMSYPFIAGLSGLSLSLMLNCASILINVLSVSAITGLLILQNRAVDQSQRGAANGIAMTAMSLFKTVGPAGAGILFSWSERRLNAAFLPGSHMVFFVLNVIVVVGVALTFKPFLTTSRR

SEQ ID NO: 97953 - DNA, 981 bp, Arabidopsis thaliana
  misc_feature (1)..(981): Ceres Seq. ID no. 13578803
  misc_feature (1)..(981): Ortholog of  Ceres SEQ ID NO 12562983 as cited in SEQ ID NO 53309
  misc_feature (1)..(981): Ortholog of  Ceres SEQ ID NO 14309224 as cited in SEQ ID NO 0
tctttagttctcctatctttctccaataatactcaaaaagcttaattattgtttcgttttctagcactctacaaaaatatggctccctcgtttctaagcgtcgcaagattcgttgaggcactactccgccggagattctcctccgctggtctctccttacaaaccctatccatcgactccgaaaccaccatacagttctggggaccaccaccgtcttcatcatcggaaaatacacaaaaaccgtcgctcctcctcctccatggttttggaccttccgctgtatggcaatggagccatcaggtcaagccactctctcacttctttcgtctctacgtccccgacctagtcttcttcggcggctcctcttcctccggtgagaaccggtcggagatgtttcaagcgttgtgcatggggaagcttatggagaagctcgaggtcgagagattcagtgtcgttgggacgagctacggcgggtttgtggcgtataatatggcgaaaatgtttccggagaaagtggagaaggtggtgcttgcgagctccggtgttaatttgcggaggagtgacaacgaggcgtttatcgctagggctaagtgccaccgtatcaaggaggtgatgcttcctgcttctgcaacagatcttaggagattctctgggatggtttcttctaagagactcgattatgtcccagattttgtcttgaacgacttttgccaggaaaaagcagaacttctcgaggggctgagtattgggaaggatgacaaaaccaacgtttctccaattcaacaggatgtaatgctgatatggggtgagcaagatcaagtttttcctttaaaaatggcccatgacctcaaagagatgttggggactaaggcgacgctaaaagttatacaaaagacatcacatatacctcaaacggagaagtccaaagaattcaatggctttgtcatgtctttcttattacctccttctccatcaccataa

SEQ ID NO: 97954 - protein, 300 aa, Arabidopsis thaliana
  peptide (1)..(300): Ceres Seq. ID no. 13578804
MAPSFLSVARFVEALLRRRFSSAGLSLQTLSIDSETTIQFWGPPPSSSSENTQKPSLLLLHGFGPSAVWQWSHQVKPLSHFFRLYVPDLVFFGGSSSSGENRSEMFQALCMGKLMEKLEVERFSVVGTSYGGFVAYNMAKMFPEKVEKVVLASSGVNLRRSDNEAFIARAKCHRIKEVMLPASATDLRRFSGMVSSKRLDYVPDFVLNDFCQEKAELLEGLSIGKDDKTNVSPIQQDVMLIWGEQDQVFPLKMAHDLKEMLGTKATLKVIQKTSHIPQTEKSKEFNGFVMSFLLPPSPSP

SEQ ID NO: 97955 - protein, 196 aa, Arabidopsis thaliana
  peptide (1)..(196): Ceres Seq. ID no. 13578805
MFQALCMGKLMEKLEVERFSVVGTSYGGFVAYNMAKMFPEKVEKVVLASSGVNLRRSDNEAFIARAKCHRIKEVMLPASATDLRRFSGMVSSKRLDYVPDFVLNDFCQEKAELLEGLSIGKDDKTNVSPIQQDVMLIWGEQDQVFPLKMAHDLKEMLGTKATLKVIQKTSHIPQTEKSKEFNGFVMSFLLPPSPSP

SEQ ID NO: 97956 - protein, 190 aa, Arabidopsis thaliana
  peptide (1)..(190): Ceres Seq. ID no. 13578806
MGKLMEKLEVERFSVVGTSYGGFVAYNMAKMFPEKVEKVVLASSGVNLRRSDNEAFIARAKCHRIKEVMLPASATDLRRFSGMVSSKRLDYVPDFVLNDFCQEKAELLEGLSIGKDDKTNVSPIQQDVMLIWGEQDQVFPLKMAHDLKEMLGTKATLKVIQKTSHIPQTEKSKEFNGFVMSFLLPPSPSP

SEQ ID NO: 97957 - DNA, 1751 bp, Arabidopsis thaliana
  misc_feature (1)..(1751): Ceres Seq. ID no. 13578815
  misc_feature (1)..(1751): Ortholog of  Ceres SEQ ID NO 15174947 as cited in SEQ ID NO 236
cttagccaacaaaaaatggcagaacttattccttggtactacacttcagggtcagggatcgtacttgtacttcaaaccatttttctcttctcgatcgtacgtgctgatttaccaggctcatgggaactcattgtacaagacgccggtatagcttctatgcacacggcggtgacccggttcaacacggtcatccttctagaccgaactaacatcggaccgtcgagaaaggctcttgaccgtcaccggtgccggagagacccaaaagacgccgctttgaaacgcgattgttacgctcactcggttctgttcgaccttggtacaaatcagatcagaccactgatgatacaaaccgacacgtggtgctcgtcgggccagtttttatccgacggatcgttgctacaaacgggtggggataaagacgggtttaaaaagatacgtaaattcgaaccctgtgacccgaacgaaacgtgcgattgggtggagcttcaagataccgaattgataaccggacgctggtacgcttctaaccagatattaccggatggttcggttatcatcgtcggtggtagaggaactaatacggttgagtattaccctccacgcgaaaacggtgccgttccgtttcagtttcttgctgacgtggaagacaaacaaatggataatctctatccgtacgttcatctcctccccgacgacgacggtggcaatctcttcatcttcgccaacagtcgcgccgttaaatacgatcaccggataaacgccgtcgtgaaagagtatccaccgttagacggtggtccgaggaattatccgtcaggtggatcatcggcgatgctagctatccaaggagatttcaccacagcggagattctaatctgcggcggagcacaatccggagccttcacagcgcgtgcaattgatgctccggcgcatggaacctgcggacgaatcgtagctaccgcggcggatcctgtttgggtgacggaggagatgccgttcgggagaatcatgggagatatggtgaatttaccgacgggagagattctgatcataaacggagctcaagccggaagccaaggattcgaaatgggatccgatccgtgtttatacccgcttttataccgacccgatcaaccaattggtttacgattcatgacgttgaacccaggaactgtaccgagaatgtaccattccacggcgaatcttttaccggacggtagaattcttctcgccggaagcaatcctcactatttctacaaattcaacgccgaattcccaacggagctacggatcgaagcgttttcaccggagtatctgtcaccggatcgagctaatctccgaccagagatccaagaaatcccgcagatcatacggtacggagaggttttcgacgtgttcgtgaccgtgccgttgccggtggtggggataattcagatgaattggggaagtgcgccttttgcgactcattcgttttctcaaggtcaacggctcgttaagttgaccgttgctccgtctgtgcctgacggagtaggtcgttataggattcagtgtacggctccacctaacggcgccgtttctccgcctgggtattatatggccttcgctgttaaccagggagttcctagcattgctcgatggatacgaatagtttcttgatttaaaaccagaggagatatttaaaatgttaatttgttaaatagttaaacacatcatgtaatataaatattttcatggaaaaacttactccgcaaagt

SEQ ID NO: 97958 - protein, 550 aa, Arabidopsis thaliana
  peptide (1)..(550): Ceres Seq. ID no. 13578816
LSQQKMAELIPWYYTSGSGIVLVLQTIFLFSIVRADLPGSWELIVQDAGIASMHTAVTRFNTVILLDRTNIGPSRKALDRHRCRRDPKDAALKRDCYAHSVLFDLGTNQIRPLMIQTDTWCSSGQFLSDGSLLQTGGDKDGFKKIRKFEPCDPNETCDWVELQDTELITGRWYASNQILPDGSVIIVGGRGTNTVEYYPPRENGAVPFQFLADVEDKQMDNLYPYVHLLPDDDGGNLFIFANSRAVKYDHRINAVVKEYPPLDGGPRNYPSGGSSAMLAIQGDFTTAEILICGGAQSGAFTARAIDAPAHGTCGRIVATAADPVWVTEEMPFGRIMGDMVNLPTGEILIINGAQAGSQGFEMGSDPCLYPLLYRPDQPIGLRFMTLNPGTVPRMYHSTANLLPDGRILLAGSNPHYFYKFNAEFPTELRIEAFSPEYLSPDRANLRPEIQEIPQIIRYGEVFDVFVTVPLPVVGIIQMNWGSAPFATHSFSQGQRLVKLTVAPSVPDGVGRYRIQCTAPPNGAVSPPGYYMAFAVNQGVPSIARWIRIVS

SEQ ID NO: 97959 - protein, 545 aa, Arabidopsis thaliana
  peptide (1)..(545): Ceres Seq. ID no. 13578817
MAELIPWYYTSGSGIVLVLQTIFLFSIVRADLPGSWELIVQDAGIASMHTAVTRFNTVILLDRTNIGPSRKALDRHRCRRDPKDAALKRDCYAHSVLFDLGTNQIRPLMIQTDTWCSSGQFLSDGSLLQTGGDKDGFKKIRKFEPCDPNETCDWVELQDTELITGRWYASNQILPDGSVIIVGGRGTNTVEYYPPRENGAVPFQFLADVEDKQMDNLYPYVHLLPDDDGGNLFIFANSRAVKYDHRINAVVKEYPPLDGGPRNYPSGGSSAMLAIQGDFTTAEILICGGAQSGAFTARAIDAPAHGTCGRIVATAADPVWVTEEMPFGRIMGDMVNLPTGEILIINGAQAGSQGFEMGSDPCLYPLLYRPDQPIGLRFMTLNPGTVPRMYHSTANLLPDGRILLAGSNPHYFYKFNAEFPTELRIEAFSPEYLSPDRANLRPEIQEIPQIIRYGEVFDVFVTVPLPVVGIIQMNWGSAPFATHSFSQGQRLVKLTVAPSVPDGVGRYRIQCTAPPNGAVSPPGYYMAFAVNQGVPSIARWIRIVS

SEQ ID NO: 97960 - protein, 498 aa, Arabidopsis thaliana
  peptide (1)..(498): Ceres Seq. ID no. 13578818
MHTAVTRFNTVILLDRTNIGPSRKALDRHRCRRDPKDAALKRDCYAHSVLFDLGTNQIRPLMIQTDTWCSSGQFLSDGSLLQTGGDKDGFKKIRKFEPCDPNETCDWVELQDTELITGRWYASNQILPDGSVIIVGGRGTNTVEYYPPRENGAVPFQFLADVEDKQMDNLYPYVHLLPDDDGGNLFIFANSRAVKYDHRINAVVKEYPPLDGGPRNYPSGGSSAMLAIQGDFTTAEILICGGAQSGAFTARAIDAPAHGTCGRIVATAADPVWVTEEMPFGRIMGDMVNLPTGEILIINGAQAGSQGFEMGSDPCLYPLLYRPDQPIGLRFMTLNPGTVPRMYHSTANLLPDGRILLAGSNPHYFYKFNAEFPTELRIEAFSPEYLSPDRANLRPEIQEIPQIIRYGEVFDVFVTVPLPVVGIIQMNWGSAPFATHSFSQGQRLVKLTVAPSVPDGVGRYRIQCTAPPNGAVSPPGYYMAFAVNQGVPSIARWIRIVS

SEQ ID NO: 97961 - DNA, 4270 bp, Arabidopsis thaliana
  misc_feature (1)..(4270): Ceres Seq. ID no. 13578874
  misc_feature (1)..(4270): Ortholog of  Ceres SEQ ID NO 13666169 as cited in SEQ ID NO 0
atatttcgtctcgggacaattcacacgcactgaatcatctctctcacgaggactattcagccatttgcaaacgcacacacaaacgcacacgcgtttatttttttttcgccaaatcaaatctgaagagttcctgtatcttttaaccgctcttcttcttcttcagagagcttcgttgattgaacggaaaaaatggtggttcctggacggagaaccgtctgggattgtgtgattgagctgacaaagatggctcaagagaactgtgtcgatcctcgtctttgggcttctcagttatcatcgaatttgaaattcttcgccgtggagttaccgtcgacggagcttgcggaggttattgtttcgtacatttgttgggataataacgttcctattgtttggaagtttcttgaaagagctatggctttgaagcttgtttctcctctcgttgttcttgctcttctcgctgacagagttgttccaacccggtctacgcaacaagcagcttatagaatttacttggagctgctcaagagaaatatgttcaccattaaagatcatattagtggacctcactaccagaaggtcatgatttcagtatccaatattcttcgtctttcagagttatttgatctggacacaagcaaacctggtgtgcttttagtagagtttgtttttaagatggtgtcacaattgctagatgcagcgttaagtgatgaaggtttgctagagctaagccaagactcgagctcccagtggctagttaagtctcaagatatggaaattgatgctcctgagagatataatgaaaagactggatcactagagaagttacagagtttgaataccatcatggctattgagttgatagcggaattcctcagaaatacagtgattgcgagattgctatacttggtatcttccaacagggcttcgaagtggcatgaatttgtccagaaagtgcagcttcttggagaaaattcatcggctttaaaacactcaaaggttctaaattctggggatctattacaattgatttcgaatagacgatttgggtattcttatgatagcaaagtaacttcagcacggaaatccaatgcaattgtggattttggatctctctcttcctatgctggcttatgccatggagcaagtctctcttcactttggcttcctcttgatctagtatttgaagatgcaatggatggatatcaagtaaacccaactagtgcgattgaaatcattaccggtctagctaaaacacttaaagaaattaatgggagcacttggcatgacactttcttggggctttggatagcagctctccgacttgttcaaagggaaagggatcctattgagggacctattcctcgactggacacaaggctgtgcatgtcattatgtattgtgcctcttgtggtcgcaaaccttattgaagaggggaaatacgaatctgtcatggaaaagctgcgagatgaccttgttacaagtttgcaggtcctcggtgatttccctggattgctggctcctcccaaatgcgttgtttctgctgccaacaaggctgccacaaaggcaatcttgtttttgtctggtggcaatgttggaaagtcatgttttgatgtcataaacatgaaggacatgcctgtcaactgctctggaaacatgcgccacctgatagtcgaggcttgtattgcaagaaacatactggatatgtcggcttattcgtggcctggctatgttaatggccgaatcaaccaaatacctcagagtctgccgaatgaagtaccctgctggtcatcatttgtgaaaggggctccactaaatgccgcaatggtgaatacattagtttcagttcctgcttcaagcttagcagagctcgagaaactatttgaggttgcagtcaaaggatcggatgacgagaagatatctgctgctacagttctttgcggggcatctctcacacggggttggaacatacaggaacacactgttgaatatcttacaagattactatccccacccgttccagcagattattccagggctgaaaatcatttgattggttatgcctgcatgttgaatgttgttattgttgggataggatctgttgacagcattcaaattttctctttacatggcatggttccgcaacttgcttgctcactaatgccaatttgtgaagagtttggatcttacaccccgagtgtatcatggactcttccttctggagaagcaatatcagcatattctgttttctcaaatgcattcactcttcttttaaagctatggagattcaatcatcctcctattgagcatggtgtgggagatgttcccacagttggctcccaactcactcctgaacatcttctttcagtgcgtaattcttatcttgtttcgtcggagatccttgatagagaccgaaacagaaagagactttcagaagttgcaagggcagcatcttgccagcccgtgtttgtggactcgttccccaagctgaaagtctggtataggcagcaccaaagatgcatagcagccacattatctggacttacacatggatctcccgttcatcagacagttgaagcacttctcaacatgacgttcggaaaggtcagaggcagtcagactttaaatccagtaaattcgggcacaagcagttcatcaggagctgcaagtgaagatagcaatattagacctgagtttcctgcttgggatatcctcaaagccgttccatatgttgtcgatgctgctttaaccgcttgtactcatggaaggctttcgcctcgtcagttagctacagggctgaaagacttagcagattttctcccggcatcattagcaacgatagtaagctatttctcagctgaggtgagtagaggtgtttggaagccagtattcatgaacggcgtggattggccaagtccagctacaaatctatccactgttgaggaatatataacgaaaattcttgcaacaacaggcgtcgatatccctagccttgctccaggagggagttctccggcaacgcttcctttacctctagccgcatttgttagtctaaccattacttacaaaattgacaaagcctcagagcggtttctcaacctggctggcccagctctggagtgcttggctgcaggctgcccttggccttgcatgcccattgtagcttcattatggacccaaaaggcgaaacgttggtttgacttccttgttttctctgcctctcgcaccgtcttccttcacaaccaagacgctgtgattcagctcctcagaaactgcttcagtgccactctgggtttgaatgctgcccccatgtcaaatgatggtggcgttggagctcttcttggccatggattcggctctcatttctatggagggatctctcctgtagcaccagggattctttatctccgtatgtatcgtgctctcagagatactgtctccgtatcggaagagattctctctctgctgatacattcggtggaggatatagcccagaacaggctctcaaaggagaagctggaaaagctgaagacagtgaagaacggatcaagatacggccaaagttctctagcaacagcaatgactcaagtgaagcttgctgcttcgctgagtgcctcgttggtatggctaaccggtggcttaggtgtggtccacgttctcatcaaagaaacgatcccatcttggtttctatcaactgacaaatcagaccgagaacaaggaccatcggatctagttgcagagctaagaggtcatgcccttgcctactttgtggtcctatgtggagcacttacttggggcgtggattcaagatcatctgcatccaaacgccgccgccaagcaatcttgggaagccacttggagttcatcgcgagtgccttagatgggaaaatatcagtgggatgtgaaacagcaacttggcgaacatatatttccggtttggtgagtctaatggtgagctgtttgccgctctgggtgacagagatcgatacagaagtgttaaagagtctaagcaatggactaagaaaatggggaaaagacgagctagcgattgtattactctccttgggaggtctcaaaacaatggattacgcagctgatttcatcattcatttgcgttcatagcttcttaaaaagttttgatcttctccagatttcagatagttgtttgatagatgtttttcttctagtgtttgcttccttgttgtgacttgtgttctctagctccagtgttgtgtgatgaaatcaatcacgcatatgtatagagagaaacagg

SEQ ID NO: 97962 - protein, 1309 aa, Arabidopsis thaliana
  peptide (1)..(1309): Ceres Seq. ID no. 13578875
MVVPGRRTVWDCVIELTKMAQENCVDPRLWASQLSSNLKFFAVELPSTELAEVIVSYICWDNNVPIVWKFLERAMALKLVSPLVVLALLADRVVPTRSTQQAAYRIYLELLKRNMFTIKDHISGPHYQKVMISVSNILRLSELFDLDTSKPGVLLVEFVFKMVSQLLDAALSDEGLLELSQDSSSQWLVKSQDMEIDAPERYNEKTGSLEKLQSLNTIMAIELIAEFLRNTVIARLLYLVSSNRASKWHEFVQKVQLLGENSSALKHSKVLNSGDLLQLISNRRFGYSYDSKVTSARKSNAIVDFGSLSSYAGLCHGASLSSLWLPLDLVFEDAMDGYQVNPTSAIEIITGLAKTLKEINGSTWHDTFLGLWIAALRLVQRERDPIEGPIPRLDTRLCMSLCIVPLVVANLIEEGKYESVMEKLRDDLVTSLQVLGDFPGLLAPPKCVVSAANKAATKAILFLSGGNVGKSCFDVINMKDMPVNCSGNMRHLIVEACIARNILDMSAYSWPGYVNGRINQIPQSLPNEVPCWSSFVKGAPLNAAMVNTLVSVPASSLAELEKLFEVAVKGSDDEKISAATVLCGASLTRGWNIQEHTVEYLTRLLSPPVPADYSRAENHLIGYACMLNVVIVGIGSVDSIQIFSLHGMVPQLACSLMPICEEFGSYTPSVSWTLPSGEAISAYSVFSNAFTLLLKLWRFNHPPIEHGVGDVPTVGSQLTPEHLLSVRNSYLVSSEILDRDRNRKRLSEVARAASCQPVFVDSFPKLKVWYRQHQRCIAATLSGLTHGSPVHQTVEALLNMTFGKVRGSQTLNPVNSGTSSSSGAASEDSNIRPEFPAWDILKAVPYVVDAALTACTHGRLSPRQLATGLKDLADFLPASLATIVSYFSAEVSRGVWKPVFMNGVDWPSPATNLSTVEEYITKILATTGVDIPSLAPGGSSPATLPLPLAAFVSLTITYKIDKASERFLNLAGPALECLAAGCPWPCMPIVASLWTQKAKRWFDFLVFSASRTVFLHNQDAVIQLLRNCFSATLGLNAAPMSNDGGVGALLGHGFGSHFYGGISPVAPGILYLRMYRALRDTVSVSEEILSLLIHSVEDIAQNRLSKEKLEKLKTVKNGSRYGQSSLATAMTQVKLAASLSASLVWLTGGLGVVHVLIKETIPSWFLSTDKSDREQGPSDLVAELRGHALAYFVVLCGALTWGVDSRSSASKRRRQAILGSHLEFIASALDGKISVGCETATWRTYISGLVSLMVSCLPLWVTEIDTEVLKSLSNGLRKWGKDELAIVLLSLGGLKTMDYAADFIIHLRS

SEQ ID NO: 97963 - protein, 1291 aa, Arabidopsis thaliana
  peptide (1)..(1291): Ceres Seq. ID no. 13578876
MAQENCVDPRLWASQLSSNLKFFAVELPSTELAEVIVSYICWDNNVPIVWKFLERAMALKLVSPLVVLALLADRVVPTRSTQQAAYRIYLELLKRNMFTIKDHISGPHYQKVMISVSNILRLSELFDLDTSKPGVLLVEFVFKMVSQLLDAALSDEGLLELSQDSSSQWLVKSQDMEIDAPERYNEKTGSLEKLQSLNTIMAIELIAEFLRNTVIARLLYLVSSNRASKWHEFVQKVQLLGENSSALKHSKVLNSGDLLQLISNRRFGYSYDSKVTSARKSNAIVDFGSLSSYAGLCHGASLSSLWLPLDLVFEDAMDGYQVNPTSAIEIITGLAKTLKEINGSTWHDTFLGLWIAALRLVQRERDPIEGPIPRLDTRLCMSLCIVPLVVANLIEEGKYESVMEKLRDDLVTSLQVLGDFPGLLAPPKCVVSAANKAATKAILFLSGGNVGKSCFDVINMKDMPVNCSGNMRHLIVEACIARNILDMSAYSWPGYVNGRINQIPQSLPNEVPCWSSFVKGAPLNAAMVNTLVSVPASSLAELEKLFEVAVKGSDDEKISAATVLCGASLTRGWNIQEHTVEYLTRLLSPPVPADYSRAENHLIGYACMLNVVIVGIGSVDSIQIFSLHGMVPQLACSLMPICEEFGSYTPSVSWTLPSGEAISAYSVFSNAFTLLLKLWRFNHPPIEHGVGDVPTVGSQLTPEHLLSVRNSYLVSSEILDRDRNRKRLSEVARAASCQPVFVDSFPKLKVWYRQHQRCIAATLSGLTHGSPVHQTVEALLNMTFGKVRGSQTLNPVNSGTSSSSGAASEDSNIRPEFPAWDILKAVPYVVDAALTACTHGRLSPRQLATGLKDLADFLPASLATIVSYFSAEVSRGVWKPVFMNGVDWPSPATNLSTVEEYITKILATTGVDIPSLAPGGSSPATLPLPLAAFVSLTITYKIDKASERFLNLAGPALECLAAGCPWPCMPIVASLWTQKAKRWFDFLVFSASRTVFLHNQDAVIQLLRNCFSATLGLNAAPMSNDGGVGALLGHGFGSHFYGGISPVAPGILYLRMYRALRDTVSVSEEILSLLIHSVEDIAQNRLSKEKLEKLKTVKNGSRYGQSSLATAMTQVKLAASLSASLVWLTGGLGVVHVLIKETIPSWFLSTDKSDREQGPSDLVAELRGHALAYFVVLCGALTWGVDSRSSASKRRRQAILGSHLEFIASALDGKISVGCETATWRTYISGLVSLMVSCLPLWVTEIDTEVLKSLSNGLRKWGKDELAIVLLSLGGLKTMDYAADFIIHLRS

SEQ ID NO: 97964 - protein, 1235 aa, Arabidopsis thaliana
  peptide (1)..(1235): Ceres Seq. ID no. 13578877
MALKLVSPLVVLALLADRVVPTRSTQQAAYRIYLELLKRNMFTIKDHISGPHYQKVMISVSNILRLSELFDLDTSKPGVLLVEFVFKMVSQLLDAALSDEGLLELSQDSSSQWLVKSQDMEIDAPERYNEKTGSLEKLQSLNTIMAIELIAEFLRNTVIARLLYLVSSNRASKWHEFVQKVQLLGENSSALKHSKVLNSGDLLQLISNRRFGYSYDSKVTSARKSNAIVDFGSLSSYAGLCHGASLSSLWLPLDLVFEDAMDGYQVNPTSAIEIITGLAKTLKEINGSTWHDTFLGLWIAALRLVQRERDPIEGPIPRLDTRLCMSLCIVPLVVANLIEEGKYESVMEKLRDDLVTSLQVLGDFPGLLAPPKCVVSAANKAATKAILFLSGGNVGKSCFDVINMKDMPVNCSGNMRHLIVEACIARNILDMSAYSWPGYVNGRINQIPQSLPNEVPCWSSFVKGAPLNAAMVNTLVSVPASSLAELEKLFEVAVKGSDDEKISAATVLCGASLTRGWNIQEHTVEYLTRLLSPPVPADYSRAENHLIGYACMLNVVIVGIGSVDSIQIFSLHGMVPQLACSLMPICEEFGSYTPSVSWTLPSGEAISAYSVFSNAFTLLLKLWRFNHPPIEHGVGDVPTVGSQLTPEHLLSVRNSYLVSSEILDRDRNRKRLSEVARAASCQPVFVDSFPKLKVWYRQHQRCIAATLSGLTHGSPVHQTVEALLNMTFGKVRGSQTLNPVNSGTSSSSGAASEDSNIRPEFPAWDILKAVPYVVDAALTACTHGRLSPRQLATGLKDLADFLPASLATIVSYFSAEVSRGVWKPVFMNGVDWPSPATNLSTVEEYITKILATTGVDIPSLAPGGSSPATLPLPLAAFVSLTITYKIDKASERFLNLAGPALECLAAGCPWPCMPIVASLWTQKAKRWFDFLVFSASRTVFLHNQDAVIQLLRNCFSATLGLNAAPMSNDGGVGALLGHGFGSHFYGGISPVAPGILYLRMYRALRDTVSVSEEILSLLIHSVEDIAQNRLSKEKLEKLKTVKNGSRYGQSSLATAMTQVKLAASLSASLVWLTGGLGVVHVLIKETIPSWFLSTDKSDREQGPSDLVAELRGHALAYFVVLCGALTWGVDSRSSASKRRRQAILGSHLEFIASALDGKISVGCETATWRTYISGLVSLMVSCLPLWVTEIDTEVLKSLSNGLRKWGKDELAIVLLSLGGLKTMDYAADFIIHLRS

SEQ ID NO: 97965 - DNA, 2839 bp, Arabidopsis thaliana
  misc_feature (1)..(2839): Ceres Seq. ID no. 13578909
  misc_feature (1)..(2839): Ortholog of  Ceres SEQ ID NO 15174477 as cited in SEQ ID NO 20777
gtcaccgcaaactaggcagattatctggttttccggcggtttctcgttatctacgagagagtgagagaggaaatacctcggggtgaactcgctgcgtagccaaagcctcttcaattttgctcttttgttcaattccgtcgcttaattatctggttttgcgtattttgaagagtcagtttgacgaatttatgctgaaatttcgttctttctctgtttatctttcagcgacgatttttctgggtttttcagttttggatcaatccataatctgtcgtgattagggttttataccttgatgaggatttactgaattagttgtattaaagatggcgagaaaagctaacaatagttttttccttgaagaatggttaaggactgtgagtggaagtagtgtctctggtgatctagtgaagcaaaattctgctccatctgctaggtcgattattcaagcatggtctgagattcgtgaatctcttcaaaaccaaaactttgattcacgttaccttcaagctttgagagctttggttagctctgagtccactatccatgttgcagatccccaagcaaagctacttatttctatactagcttttcaagatgtatctcttccgtctgagtcttacacacttgttctcagactactctatgtgtggattaggaaagcatttcgaccgtctcaagcacttgttggtgtagcggttcaggccattcgtggcgttgttgatgacaggcgtaatctccaaccagccttagtagcgcagagtgttctggtttctggtgcgtttgcgtgtgttccttctctgtcaggagacgtgaaagtcttatgcttggaattgttatgcaggcttttggaagaagagtactctttagtgggatctcaagaagaacttgttcctgtagtgcttgcaggaattgggtatgctttatcttcttcgttggatgttcattacgtcagactattggatttattgtttggcatttggttaaaagacgagggtcctcgtggcactgtcacttacggtctgatgattcttcatttgattgagtgggttgtgtcaggttatatgcggtctaattctatcaacaagatgtctctttttgcgaacgaggtactagagacttctaaggaaaagtatgctgttttcgctgtcttcatggcagcagctggggtagtgagagcttccacggcaggattcagtagtggtgcacagagtttggagatttctaaactaagaaattcagctgaaaagcgaatagaatttgtagctcaaattttagtttctaatggtaatgttgttacacttccaaccacacagagagaaggtcccctgttgaagtgctttgctattgcattggctcgatgtgggtctgtttcttcctctgctcctctgcttttgtgtctcacttctgcattgttaactcaggtatttcctttaggccagatatatgaatcattttgcaatgcttttggcaaagagcctattggaccaagactcatttgggtcagggagcatctttctgatgttcttttcaaggaatcaggggccatatctggggctttctgcaatcaatattcatcagcaagtgaagagaacaagtatattgtggagaatatgatttgggatttctgtcaaaatctctacttacagcaccgtcaaattgctatgttgctttgtggtagaagatacattgcttggagacatcgagaaaattgcagaatcatctttccttatggttgtcgtctttgcgctagctgttacgaaacaatggctaaaaccaatagtgtctaaagaaagaaaaatggtgacatcagttaagatattagtttcgttctcctgtgtagagtatttcaggcatattcgtttacctgaatacatggagacaattagagaggtgatttcatgtgtccaggagaatgatgctccttgtgtttcatttgtagagtccattcctgcctatgatagcttgacgaatccgaaagacttgtttacgcaaaggataaaatatgaatggtcaagagatgatgtgcagacatctcgaatattgttttatcttcgagtaatcccaacttgcatcggacggttatctgcttctgccttcaggggagtggttgcatcaaccatgtttttatatattggacatcctaacagaaaagtggcgcaagcatctcatacgttgttggcagcatttctctcttcagcaaaagaatcagaggaggacgaacgaactcaattcaaagaacaacttgttttctattacatgcaacgatctttggaggtttaccctgagatcacaccttttgaaggtttagcttccggcgttgcaaccttggtccagcatctacctgcgggaagtcctgctatattttattctgttcatagccttgttgagaaggcttctacatttagcaccgaatcattgcaaggcagaaagtctgatcctggtaatcagattcttgagttgcttttgcgacttgtctctttggttgatatacaagtgttgccatatcttatgaagtcattggcacagctagttataaagttaccaaaagaaagacagaacgttgtgcttggtgaattgtatggtcaagtggctgagtcagacgatgtgattcgcaagccttctttggtctcttggctacagtcactgaactacttatgttctaataaccgtactgaagttttagcttctggatcaacgatagacacttcgaaccagttggctgctcgactctagggatctcctcatagtttacaaacatgtgaaatagaataaagtttgtatgacttgtatcatggaattatgttgaaaagaattataaattaacatcatctccatt

SEQ ID NO: 97966 - protein, 487 aa, Arabidopsis thaliana
  peptide (1)..(487): Ceres Seq. ID no. 13578910
MARKANNSFFLEEWLRTVSGSSVSGDLVKQNSAPSARSIIQAWSEIRESLQNQNFDSRYLQALRALVSSESTIHVADPQAKLLISILAFQDVSLPSESYTLVLRLLYVWIRKAFRPSQALVGVAVQAIRGVVDDRRNLQPALVAQSVLVSGAFACVPSLSGDVKVLCLELLCRLLEEEYSLVGSQEELVPVVLAGIGYALSSSLDVHYVRLLDLLFGIWLKDEGPRGTVTYGLMILHLIEWVVSGYMRSNSINKMSLFANEVLETSKEKYAVFAVFMAAAGVVRASTAGFSSGAQSLEISKLRNSAEKRIEFVAQILVSNGNVVTLPTTQREGPLLKCFAIALARCGSVSSSAPLLLCLTSALLTQVFPLGQIYESFCNAFGKEPIGPRLIWVREHLSDVLFKESGAISGAFCNQYSSASEENKYIVENMIWDFCQNLYLQHRQIAMLLCGRRYIAWRHRENCRIIFPYGCRLCASCYETMAKTNSV

SEQ ID NO: 97967 - protein, 334 aa, Arabidopsis thaliana
  peptide (1)..(334): Ceres Seq. ID no. 13578911
MVVVFALAVTKQWLKPIVSKERKMVTSVKILVSFSCVEYFRHIRLPEYMETIREVISCVQENDAPCVSFVESIPAYDSLTNPKDLFTQRIKYEWSRDDVQTSRILFYLRVIPTCIGRLSASAFRGVVASTMFLYIGHPNRKVAQASHTLLAAFLSSAKESEEDERTQFKEQLVFYYMQRSLEVYPEITPFEGLASGVATLVQHLPAGSPAIFYSVHSLVEKASTFSTESLQGRKSDPGNQILELLLRLVSLVDIQVLPYLMKSLAQLVIKLPKERQNVVLGELYGQVAESDDVIRKPSLVSWLQSLNYLCSNNRTEVLASGSTIDTSNQLAARL

SEQ ID NO: 97968 - protein, 311 aa, Arabidopsis thaliana
  peptide (1)..(311): Ceres Seq. ID no. 13578912
MVTSVKILVSFSCVEYFRHIRLPEYMETIREVISCVQENDAPCVSFVESIPAYDSLTNPKDLFTQRIKYEWSRDDVQTSRILFYLRVIPTCIGRLSASAFRGVVASTMFLYIGHPNRKVAQASHTLLAAFLSSAKESEEDERTQFKEQLVFYYMQRSLEVYPEITPFEGLASGVATLVQHLPAGSPAIFYSVHSLVEKASTFSTESLQGRKSDPGNQILELLLRLVSLVDIQVLPYLMKSLAQLVIKLPKERQNVVLGELYGQVAESDDVIRKPSLVSWLQSLNYLCSNNRTEVLASGSTIDTSNQLAARL

SEQ ID NO: 97969 - DNA, 1070 bp, Arabidopsis thaliana
  misc_feature (1)..(1070): Ceres Seq. ID no. 13578948
  misc_feature (1)..(1070): Ortholog of  Ceres SEQ ID NO 13595861 as cited in SEQ ID NO 58153
  misc_feature (1)..(1070): Ortholog of  Ceres SEQ ID NO 13584292 as cited in SEQ ID NO 63687
aatctcactttttccctttctctgtacatcatcatccttcaagctcggagctctctcttcccgccggcgatctcctccgcttctctccgattttaagtcgatcgaatggggaaaatcaagaaagtgaatcaaaggggtcatattgctacaccgtatccatcaccatgttgtaagaaagaatgggctggctcaacctgtccagtatgcttggagtctccacacaatgcggttcttctcctgtgttcgtcttatcacaaaggatgccgtccttacatgtgtgctacaagcagccgttttgccaactgccttgatcaatacaggaaatcctacggtaacgaaaactcaggacaacccgagcttttgtgtccactgtgtagaggtcaagtgaaaggctggactgttgtgaaagatgctcggatgcattttaactccaagagaaggacttgtatgcaggataactgttcctttttaggaaatttccgaaagctcaagaaacacatgaaggaaaaacacccacatgcttgcccaagagccattgatccagctttagaaactaaatggaagaggcttgagagggaaagagacagaagagacgtgataagcacgataatgtcatcgacaccaggtgctgttgtgttgggagattatgtgatagagccgcataaccgaggtgtttatgatgaagaagacgaagaagaagattacagctcagatgactctctaagcaacgggatactggatctagaatcatcatggcaaggacaaagccatcatattcggtttcttgatatggaatcaagtgacttcgcatcctcttccagctcccctgcttctccaagccgttcgcttcaccgtttgctctttccaaggaaccagagaggcggcaatagaggagcagtataaaaaggctaacatgactagccaattagccatacacagggaattggaaaaaaaaaactcgcagtcgtccctttcttttatttattttcatgtaaattattgtattctgtgtaattgtattattgtttctgcattgttgtactttaatgaggaatgatctcttatgcctc

SEQ ID NO: 97970 - protein, 265 aa, Arabidopsis thaliana
  peptide (1)..(265): Ceres Seq. ID no. 13578949
MGKIKKVNQRGHIATPYPSPCCKKEWAGSTCPVCLESPHNAVLLLCSSYHKGCRPYMCATSSRFANCLDQYRKSYGNENSGQPELLCPLCRGQVKGWTVVKDARMHFNSKRRTCMQDNCSFLGNFRKLKKHMKEKHPHACPRAIDPALETKWKRLERERDRRDVISTIMSSTPGAVVLGDYVIEPHNRGVYDEEDEEEDYSSDDSLSNGILDLESSWQGQSHHIRFLDMESSDFASSSSSPASPSRSLHRLLFPRNQRGGNRGAV

SEQ ID NO: 97971 - protein, 209 aa, Arabidopsis thaliana
  peptide (1)..(209): Ceres Seq. ID no. 13578950
MCATSSRFANCLDQYRKSYGNENSGQPELLCPLCRGQVKGWTVVKDARMHFNSKRRTCMQDNCSFLGNFRKLKKHMKEKHPHACPRAIDPALETKWKRLERERDRRDVISTIMSSTPGAVVLGDYVIEPHNRGVYDEEDEEEDYSSDDSLSNGILDLESSWQGQSHHIRFLDMESSDFASSSSSPASPSRSLHRLLFPRNQRGGNRGAV

SEQ ID NO: 97972 - protein, 161 aa, Arabidopsis thaliana; identical to SEQ ID NO: 48641
  peptide (1)..(161): Ceres Seq. ID no. 13578951

SEQ ID NO: 97973 - DNA, 1392 bp, Arabidopsis thaliana
  misc_feature (1)..(1392): Ceres Seq. ID no. 13578952
  misc_feature (1)..(1392): Ortholog of  Ceres SEQ ID NO 14314312 as cited in SEQ ID NO 57283
gctcacggtttagtacatgcacacaaagcaaaaacgctggtttgtcttttaaaaaaaaagaacttcgtttctcttcaattccgttaccgtcactgtcaccgttcacctccgtttatctcatcctcaccgttcatcttcttcgatctaactcgccgtcgttcaccttataatggacaccgtcaacgattccttttcgccgggatcttcccgaccttcgccggcgacgctttctcgtgaagattgctggagcgaggaagcgaccttcacgctcatccaagcctggggtaatcgctacgtcgacctcagccgaggtaatctccgtcagaaacactggcaagaggtggctaacgccgttaacgaccgtcactacaacaccggtcgaaacgtttccgccgccaaatcgcagccgtatcgcaccgacgttcagtgtaaaaaccggatcgatactctgaagaagaagtacaaagtcgagaaggctagggtttcggaatccaatcccggtgcctacatcagcccttggcctttcttctccgctctcgatgaccttctccgggaaagctttccgacgtctagtaatcctgattcaactgataacatcccgcaccagaggctatcacttccgatgtccattaatccagttccggtcgctccacgatcggcgatccccagacgtccggcgacatcgccggcgattatacctcacgccggtgacgatttactcggatttcgcgggaatctcaacgcattcgcggcagccgcagcggcggcggcgtgtccggcgtctgaagatgactcggaaggttcaaggtctagatcgagcggtcgtagcgggagtaacaagaagcgggagaggaaaattgagaagaagcaaggctacaaggaagttgccgacgcaattgagaggcttggacagatatacgagagagtcgaggagaagaagaggaaggaaatggttgaattggagaagcagagaatgagattcgctaaggaattggaatgccataggatgcaactgttcacggagatgcaggtacgtcttcataagctccggcgtacctctggctccaaaggaccgacttcctccgcctccgccgctcttgattatgggatgatggatttccctagttacttctagagcatcatgagtttgtgattgtagccattttgatgaagatgagagaaagtcagcgttcttccaccaaccaatagaagatatggtaacaaagaaacatgagtttctctttgttttgtaaattttaacccttttagaagattccgattccaacccaggattgaaaaaaaaattggtgacgttatattggtatatctacacaatgaaacagtacaagaaacagttttcagcaaaattatattggttagtattgtttggtt

SEQ ID NO: 97974 - protein, 321 aa, Arabidopsis thaliana
  peptide (1)..(321): Ceres Seq. ID no. 13578953
MDTVNDSFSPGSSRPSPATLSREDCWSEEATFTLIQAWGNRYVDLSRGNLRQKHWQEVANAVNDRHYNTGRNVSAAKSQPYRTDVQCKNRIDTLKKKYKVEKARVSESNPGAYISPWPFFSALDDLLRESFPTSSNPDSTDNIPHQRLSLPMSINPVPVAPRSAIPRRPATSPAIIPHAGDDLLGFRGNLNAFAAAAAAAACPASEDDSEGSRSRSSGRSGSNKKRERKIEKKQGYKEVADAIERLGQIYERVEEKKRKEMVELEKQRMRFAKELECHRMQLFTEMQVRLHKLRRTSGSKGPTSSASAALDYGMMDFPSYF

SEQ ID NO: 97975 - protein, 170 aa, Arabidopsis thaliana
  peptide (1)..(170): Ceres Seq. ID no. 13578954
MSINPVPVAPRSAIPRRPATSPAIIPHAGDDLLGFRGNLNAFAAAAAAAACPASEDDSEGSRSRSSGRSGSNKKRERKIEKKQGYKEVADAIERLGQIYERVEEKKRKEMVELEKQRMRFAKELECHRMQLFTEMQVRLHKLRRTSGSKGPTSSASAALDYGMMDFPSYF

SEQ ID NO: 97976 - DNA, 2721 bp, Arabidopsis thaliana
  misc_feature (1)..(2721): Ceres Seq. ID no. 13578971
  misc_feature (1)..(2721): Ortholog of  Ceres SEQ ID NO 15225226 as cited in SEQ ID NO 58693
  misc_feature (1)..(2721): Ortholog of  Ceres SEQ ID NO 13654989 as cited in SEQ ID NO 63117
  misc_feature (1)..(2721): Ortholog of  Ceres SEQ ID NO 13584744 as cited in SEQ ID NO 69137
gaaaataatttctcgaaagagaaaaaaagagagagagagagagagatggagcttctacagtactaaaagctgagtgaatcccaanaaatctccgccaacggaatattttttttctgggagctgaaaatcgttggtgacgatggcggattctctttctagggtttacggaactctgtttagtggtgttaatatatctctcttctcggatccaccgttgaaaaccccctgaagagtgtttttttttccgggtttaaggtcttttacgtttcgttttttcttgagatttcgtcttccgctgtgagtttctgttctcgcggcgagtttttgtgtagatctgagggttttcaaggcaagagaaagtgtcggtgatgtcgattttctcactcgcgagctcttctgattcacaaagagatgacctaataatggcgttgaaggcggtggttattgtatattgtgtggtttctctcgtcagtgttcaattagctgatgctcaacatgaaggactgccagtttcaccaacgttatcaccttcaacttcaccagttatcactgatctgcccctaccagctgaatttccgcggtttcacagaaagtatttcgcaccacaacaagcagaagcacctcagcattctcccccttatagtcgtttggtcgcttctgatcatccccctaccagctcacatttctccaaaccttccatgaaaaggaatgctcagtctcctggagccggcttggctgatattgctccagcacaatctagcaatggtgttcttcctgatgccttaactcagccacctttgtcgccctccatttcaaattgttgcaaatcagatatggtgcttaaacgaagaagtattggttgccactgcgtgtatcctataaaactggacatccttctcttgaatgtttcagaaactcctagttggaacatgttcttgaacgaatttgctacccagcttggtctcctacctcaccaaatcgagctgattaacttctatgtgctaagcttatcaaggatgaacatatcgatggatatcacccctcattctggaattagtttctcagctagtcaggcatccgcaataaactcttcccttatcagccacaagattcaatttagccctactttggtgggagattacaaacttctaaaccttacttggtttgaggcccctgcaccttcgcaagcacctctagtggcttcttcacctcataaagcaccatcacaaggatcctcagcaactacgtcagtaagatctccagggaaaaagaggcatcccaatcttattcttatcttttctatagccgctggtgtgcttatacttgccataatcactgtacttgttatttgttcccgcgcactccgagaagagaaagctccagatcctcacaaagaagctgtaaaaccaaggaacctggacgctggttcatttgggggatctcttcctcacccagcaagtacacggtttctgtcatatgaagaactcaaagaggcaactagcaattttgaatctgctagcattctaggagaaggtgggtttggcaaggtttacagaggcatcttagccgatggtactgctgtagcgattaagaagctcacaagtggtgggccacaaggtgataaagaattccaggtggagattgatatgcttagccgtcttcatcatcgtaatcttgtgaaacttgtgggttactatagtagtcgagattcttctcagcacctactttgttatgagcttgttccaaatggcagcctcgaggcttggctccatgggcctctcgggttgaactgtcctcttgattgggacaccagaatgaagattgcacttgatgctgcaagaggacttgcataccttcatgaagactcgcaaccctccgttatacacagagattttaaagcctctaatatactccttgaaaacaacttcaacgccaaagttgcagattttggcctagccaaacaagctcctgaaggcaggggtaatcacttatctactcgtgttatgggcacatttggatatgttgcgcctgaatatgcaatgacgggacacctactcgtcaagagtgatgtttatagttacggtgtggtccttctcgaattgttaactggtagaaaacctgtggatatgtcacaaccttcaggccaagaaaatctcgtcacttggacaaggccagttttaagagacaaagaccggttagaagaactagtcgattcaagacttgaaggaaaatacccgaaagaagatttcataagagtatgcacaatcgctgcagcttgtgttgcacctgaagctagccagagaccaacgatgggcgaagtggttcagtcacttaaaatggttcaacgggtggttgagtatcaagacccggttttaaacacttcaaataaagctcgtcctaaccggagacaatcatcagctacgttcgagtcagaagtaacctcttctatgttctcttctggtccttattctggtctaagcgcttttgatcatgaaaatattacacgaacaactgttttctcagaagatcttcacgaaggccgatgatagaagccagggttttcttctttttatttgtttttctcccacttacggtgagaaaatttccaccagagaagcttttgagtttgggacattattacagctctttggattttggattctcctttattggaggatagaattttgtatatatttttgcgttaattaattaatatttgcc

SEQ ID NO: 97977 - protein, 725 aa, Arabidopsis thaliana; identical to SEQ ID NO: 48790
  peptide (1)..(725): Ceres Seq. ID no. 13578972

SEQ ID NO: 97978 - protein, 707 aa, Arabidopsis thaliana; identical to SEQ ID NO: 48791
  peptide (1)..(707): Ceres Seq. ID no. 13578973

SEQ ID NO: 97979 - protein, 615 aa, Arabidopsis thaliana; identical to SEQ ID NO: 48792
  peptide (1)..(615): Ceres Seq. ID no. 13578974

SEQ ID NO: 97980 - DNA, 2598 bp, Arabidopsis thaliana
  misc_feature (1)..(2598): Ceres Seq. ID no. 13578980
  misc_feature (1)..(2598): Ortholog of  Ceres SEQ ID NO 13598023 as cited in SEQ ID NO 66487
ggtagaagagctactacttcatcaaccacaaccactatctcctcaaaatctctctctaccgatcgatggaagcagcagtgccacgtctcgtcaattgcggaccggagccaattcgattctccgtctcctcccgccgctccttcgtctccgggattcctcaccgtaataaacgctctcgccagattctagccgtcgctactgatcctaaacctacacagactagtccacccaagtccaccaccgtaaacggatcttcttctccatcgtctgcgtcaaaagtagtcaacaacaatgtttccactagaattaacgatgtatcaaaagagattaaaagagtacgagctcaaatggaagaagatgaacagttatctgtgttgatgagagggcttcgtggccagaatttgaaggattcggtttttgctgatgataatattcagctaaggcttgttgagactggtgaaagcagtgagttcttacctttggtatatgatccggagaccatttctgcctattgggggaaacggcctcgtgctgttgcttctcgagttatccagttgctttcggttgctggagggtttctatcgcgtattgcaggggatgtaataaacaagaaagttaaagagaatgaggttgctagggcaattgaattgagggaaattgtaacttccttgggtccagcatacattaaacttgggcaagctttgagtattcgaccagatatattgtcacccgctgcaatgacagagctacaaaagttgtgtgataaggtcccttcatatcctgatgatgtagcaatggctctaattgaggaggagcttgggaagccatggtacgacgtttattccgagctctctccttccccaatcgctgctgcatccctgggacaagtttataagggaagactaaaggaaaatggggatctagtggcagtaaaagtacagaggcctttcgttctcgagactgtgactgttgacttgtttgtgatacggaatttaggtctatttctgcggaagttccctcaggtgtcagtagatgttgttggactggttgatgaatgggctgctcgcttttttgaggagctggattatgttaacgagggagaaaatggaacatattttgcagaaatgatgaagaaagatcttccacaagttgttgtacctaaaacctaccaaaagtacacgtcaaggaaggttcttacaacctcatggattgatggtgagaaactgtcacaaagtattgagagtgatgtcggcgaacttgtgaatgttggtgttatttgttacctaaagcagttgctcgatactgggtttttccatgctgaccctcatcctggaaatatgatccgtaccccagacgggaaactagccatcctcgattttggtcttgttaccaagttgactgatgatcagaagtacggaatgattgaagccattgcacacttaattcaccgagattatgatgccatagtaaaagattttgttaaactcggtttcatccctgatggggtcaatctggctcctatattacctgtcctggccaaggtttttgatcaggcgctcgaaggtggtggagcaaaaaacatcaattttcaagagttggcagcagatttggcacagataacttttgactatcctttcagaattcccccttatttcgccctaattattagggcaattggtgtgctagaaggtatagctctagtggggaatcctgaatttgctattgtggatgaggcttatccttatatcgctcagcggctccttacggatgaatcacctcgcttgagagaggctttacgctacacaatatatgggaagactggcgtttttgatgctgaaagattcatcgatgtgatgcaagcctttgagactttcattacagcagccaaaagtggaggaggggaagatatgaatggaggcatggcagagatggctcttatgcaaagtaagacaagcagtttggttcctatgtttccagctagtgcatcccaaccggaccagccagttcaaacaagagtcgctttgtcttttctgctttcggagaaagggaacttcttccgcgagtttctattggatgagatagtaaaaggtatcgatgcaatcacaagagaacagctggtgcaagcaatggcggtattcggattcagaaacgcgacaccaatcttcggtatgttaccaccaacactgggacccttcaagcctgcagcacttcttccatccgtgacggaagaagacaaggtcatcttgaacaatgttcagaaagtaatcgagttccttaccgcaagaagctccatgtcgaataatcctgatcaggtagtagatgtatctcaagttgttcgggaactgcttccagtgttgcctggaatctctgccacagtactgcctgagattttgagtcggcttgggtcaagggtcatggcgagaatagtccgggatgcgtttttgtgaatattggattaaactttgtacaattgtgcatataagttgcattttaaagttactacaaagaaatatatagctgattaagttgcattattaacacatatacacttgatgttatatacacagttgcaatggaacaatgactttgccttcctta

SEQ ID NO: 97981 - protein, 793 aa, Arabidopsis thaliana
  peptide (1)..(793): Ceres Seq. ID no. 13578981
MEAAVPRLVNCGPEPIRFSVSSRRSFVSGIPHRNKRSRQILAVATDPKPTQTSPPKSTTVNGSSSPSSASKVVNNNVSTRINDVSKEIKRVRAQMEEDEQLSVLMRGLRGQNLKDSVFADDNIQLRLVETGESSEFLPLVYDPETISAYWGKRPRAVASRVIQLLSVAGGFLSRIAGDVINKKVKENEVARAIELREIVTSLGPAYIKLGQALSIRPDILSPAAMTELQKLCDKVPSYPDDVAMALIEEELGKPWYDVYSELSPSPIAAASLGQVYKGRLKENGDLVAVKVQRPFVLETVTVDLFVIRNLGLFLRKFPQVSVDVVGLVDEWAARFFEELDYVNEGENGTYFAEMMKKDLPQVVVPKTYQKYTSRKVLTTSWIDGEKLSQSIESDVGELVNVGVICYLKQLLDTGFFHADPHPGNMIRTPDGKLAILDFGLVTKLTDDQKYGMIEAIAHLIHRDYDAIVKDFVKLGFIPDGVNLAPILPVLAKVFDQALEGGGAKNINFQELAADLAQITFDYPFRIPPYFALIIRAIGVLEGIALVGNPEFAIVDEAYPYIAQRLLTDESPRLREALRYTIYGKTGVFDAERFIDVMQAFETFITAAKSGGGEDMNGGMAEMALMQSKTSSLVPMFPASASQPDQPVQTRVALSFLLSEKGNFFREFLLDEIVKGIDAITREQLVQAMAVFGFRNATPIFGMLPPTLGPFKPAALLPSVTEEDKVILNNVQKVIEFLTARSSMSNNPDQVVDVSQVVRELLPVLPGISATVLPEILSRLGSRVMARIVRDAFL

SEQ ID NO: 97982 - protein, 699 aa, Arabidopsis thaliana
  peptide (1)..(699): Ceres Seq. ID no. 13578982
MEEDEQLSVLMRGLRGQNLKDSVFADDNIQLRLVETGESSEFLPLVYDPETISAYWGKRPRAVASRVIQLLSVAGGFLSRIAGDVINKKVKENEVARAIELREIVTSLGPAYIKLGQALSIRPDILSPAAMTELQKLCDKVPSYPDDVAMALIEEELGKPWYDVYSELSPSPIAAASLGQVYKGRLKENGDLVAVKVQRPFVLETVTVDLFVIRNLGLFLRKFPQVSVDVVGLVDEWAARFFEELDYVNEGENGTYFAEMMKKDLPQVVVPKTYQKYTSRKVLTTSWIDGEKLSQSIESDVGELVNVGVICYLKQLLDTGFFHADPHPGNMIRTPDGKLAILDFGLVTKLTDDQKYGMIEAIAHLIHRDYDAIVKDFVKLGFIPDGVNLAPILPVLAKVFDQALEGGGAKNINFQELAADLAQITFDYPFRIPPYFALIIRAIGVLEGIALVGNPEFAIVDEAYPYIAQRLLTDESPRLREALRYTIYGKTGVFDAERFIDVMQAFETFITAAKSGGGEDMNGGMAEMALMQSKTSSLVPMFPASASQPDQPVQTRVALSFLLSEKGNFFREFLLDEIVKGIDAITREQLVQAMAVFGFRNATPIFGMLPPTLGPFKPAALLPSVTEEDKVILNNVQKVIEFLTARSSMSNNPDQVVDVSQVVRELLPVLPGISATVLPEILSRLGSRVMARIVRDAFL

SEQ ID NO: 97983 - protein, 689 aa, Arabidopsis thaliana
  peptide (1)..(689): Ceres Seq. ID no. 13578983
MRGLRGQNLKDSVFADDNIQLRLVETGESSEFLPLVYDPETISAYWGKRPRAVASRVIQLLSVAGGFLSRIAGDVINKKVKENEVARAIELREIVTSLGPAYIKLGQALSIRPDILSPAAMTELQKLCDKVPSYPDDVAMALIEEELGKPWYDVYSELSPSPIAAASLGQVYKGRLKENGDLVAVKVQRPFVLETVTVDLFVIRNLGLFLRKFPQVSVDVVGLVDEWAARFFEELDYVNEGENGTYFAEMMKKDLPQVVVPKTYQKYTSRKVLTTSWIDGEKLSQSIESDVGELVNVGVICYLKQLLDTGFFHADPHPGNMIRTPDGKLAILDFGLVTKLTDDQKYGMIEAIAHLIHRDYDAIVKDFVKLGFIPDGVNLAPILPVLAKVFDQALEGGGAKNINFQELAADLAQITFDYPFRIPPYFALIIRAIGVLEGIALVGNPEFAIVDEAYPYIAQRLLTDESPRLREALRYTIYGKTGVFDAERFIDVMQAFETFITAAKSGGGEDMNGGMAEMALMQSKTSSLVPMFPASASQPDQPVQTRVALSFLLSEKGNFFREFLLDEIVKGIDAITREQLVQAMAVFGFRNATPIFGMLPPTLGPFKPAALLPSVTEEDKVILNNVQKVIEFLTARSSMSNNPDQVVDVSQVVRELLPVLPGISATVLPEILSRLGSRVMARIVRDAFL

SEQ ID NO: 97984 - DNA, 1197 bp, Arabidopsis thaliana
  misc_feature (1)..(1197): Ceres Seq. ID no. 13579055
  misc_feature (1)..(1197): Ortholog of  Ceres SEQ ID NO 14302216 as cited in SEQ ID NO 66456
gattctcattccttcctcctgtttccgtaccgggggattttgtgatcatcaaaatcaaaaacaatcagatttcttctaccaaacgattaattgccttttgggatacgattcagggcttcttttggggcctctgtttgaattaacaccttgtttgctgcaaacaataataaggaaagataaacgagatggtgtcggacaatgagatgggtctggtattagctgtgtcgtcgagcgtcttcataggttccagcttcattttgaagaagaaaggtctcaagcgcgctgctgctaatggcacccgcgctggtttcggaggttatacatatttgttagagccactttggtgggtaggcttggtaacaatgacttttggagaaattgctaactttgtggcttacgtttatgcacctgctgtactagtcactcctcttggcgcattaagtataatcatcagtgctgttttggcacatttcttgttagacgaaaaacttaggaaaatgggagtttggggatgtgtttgttgcattgtgggctcagttatgatcgtcatacacgcacctcaggagcagactcccaattctgtagaagaaatctggaaactagcaatgcaaccagcttttctaatttacgtagccatatcaatgtcgatagtccttgctttgattctctactgtgaacctctctgcggccaaaccaacattcttgtgtatatcggaatttgttcattgatgggttctctcacagttatgagcatcaaggctgtagggattgccataaagttaacatttgaagggataaaccagatctggtatccagagacttggttttttgccatggttgcagcaatctgtgttgttatgcaaatgatttacctcaacaaggcgctggacacattcaacgcagcaattgtttctccaatctattatgtgatgttcacaacactcacaattgtcgctagtgcaatcatgttcaaggactggaatgggcaaaacacagacagcatagcctctgagatttgtggattcatcacagtgcttacaggaacggttatactccattccacgagagaagaggaacaagcttcgccacgacgaatgagatggcaggattcagggaagagctttgacgaagaacatttgacaagtttgtacagtcctgaatattaggaaggtaacaaagatttaaaccttgtgctga

SEQ ID NO: 97985 - protein, 326 aa, Arabidopsis thaliana
  peptide (1)..(326): Ceres Seq. ID no. 13579056
MVSDNEMGLVLAVSSSVFIGSSFILKKKGLKRAAANGTRAGFGGYTYLLEPLWWVGLVTMTFGEIANFVAYVYAPAVLVTPLGALSIIISAVLAHFLLDEKLRKMGVWGCVCCIVGSVMIVIHAPQEQTPNSVEEIWKLAMQPAFLIYVAISMSIVLALILYCEPLCGQTNILVYIGICSLMGSLTVMSIKAVGIAIKLTFEGINQIWYPETWFFAMVAAICVVMQMIYLNKALDTFNAAIVSPIYYVMFTTLTIVASAIMFKDWNGQNTDSIASEICGFITVLTGTVILHSTREEEQASPRRMRWQDSGKSFDEEHLTSLYSPEY

SEQ ID NO: 97986 - protein, 320 aa, Arabidopsis thaliana
  peptide (1)..(320): Ceres Seq. ID no. 13579057
MGLVLAVSSSVFIGSSFILKKKGLKRAAANGTRAGFGGYTYLLEPLWWVGLVTMTFGEIANFVAYVYAPAVLVTPLGALSIIISAVLAHFLLDEKLRKMGVWGCVCCIVGSVMIVIHAPQEQTPNSVEEIWKLAMQPAFLIYVAISMSIVLALILYCEPLCGQTNILVYIGICSLMGSLTVMSIKAVGIAIKLTFEGINQIWYPETWFFAMVAAICVVMQMIYLNKALDTFNAAIVSPIYYVMFTTLTIVASAIMFKDWNGQNTDSIASEICGFITVLTGTVILHSTREEEQASPRRMRWQDSGKSFDEEHLTSLYSPEY

SEQ ID NO: 97987 - protein, 267 aa, Arabidopsis thaliana
  peptide (1)..(267): Ceres Seq. ID no. 13579058
MTFGEIANFVAYVYAPAVLVTPLGALSIIISAVLAHFLLDEKLRKMGVWGCVCCIVGSVMIVIHAPQEQTPNSVEEIWKLAMQPAFLIYVAISMSIVLALILYCEPLCGQTNILVYIGICSLMGSLTVMSIKAVGIAIKLTFEGINQIWYPETWFFAMVAAICVVMQMIYLNKALDTFNAAIVSPIYYVMFTTLTIVASAIMFKDWNGQNTDSIASEICGFITVLTGTVILHSTREEEQASPRRMRWQDSGKSFDEEHLTSLYSPEY

SEQ ID NO: 97988 - DNA, 3234 bp, Arabidopsis thaliana
  misc_feature (1)..(3234): Ceres Seq. ID no. 13579066
  misc_feature (1)..(3234): Ortholog of  Ceres SEQ ID NO 14310259 as cited in SEQ ID NO 20662
  misc_feature (1)..(3234): Ortholog of  Ceres SEQ ID NO 12586556 as cited in SEQ ID NO 64667
  misc_feature (1)..(3234): Ortholog of  Ceres SEQ ID NO 13660894 as cited in SEQ ID NO 67475
ggatgtgatcgaaacaaaaagctctttgcttcttcttcgtccatttctcgtagcacacttttcacaaagaagatgggttcttcacaatctacgcaaatggaagacgaagaagaagaagaagaggaaactgacaatgaagaagaagaagaagaagataatggcagatcaaacacaagacaattagacaatctcctagtaaagaaagttctagaacaagagcctgagatgttaccatgtcacgcttcagcttcaccactctcaccacaactatcatctctcggtactccaaggcttggaccatcgattaaagtctgggatccttacaacgtcctctctccgccgccgcaaccgccgtctatcttctctcgaatcgtgtctggtgatgaagatcgagctgtgacagaggtttatctgattagccatggtgagtctgatcttaatcttaaacctgatttgattggtgggagatgtcatgtagctgctcttactgctaatggtaaacgtcaagctagggctcttgctgttttcttcaaatctcaaggtgttcggtttaattcggtttattcgtcacctctagatcgagctagatccatggctgtttctgtttgtcaggaaatgagttttccggaggagcatgtacaatcttcggatgctgttattgagatgagtttaggggattgggaaggctgtaatcaagcagagatttatagtcctgaaactttgagtttgattgaaaggtgccaacctgatttcacagctccatctggagaatcactgaggcaagtagagtttcgaatggttcagtttctaaacgggacagtctcaggagttgcagagaagcttaggtcagattattcttccactacgaatcacaatgaaactcatgagcgtgatggtggtgtgtcacttgcttcgactaactgggacttactacacaagcatcgtcccagtcttacaaggaagaaatctggtaaaagcaggcttcaagtgatgactaatcacgaacctgacgatggaaactccccaagggaagaagttaatcataatcacactgacctaagtgattcgtcttccttaatctcgaattgtgtcggggttttcacgcattctttgcctataaagtgtcttttaaccggaatcctcggttgcagtccggtaatgactcataagatctgtgtagaagactcttcagtgactgtgttacaacattcatggagaaacgggtggcagatcaaacgaatgaatgatactgctcatcttagattgtttaaaaaagcactgttttgttccgtctctcgtcttctccacacggagagacacacagagagacaaaacctaacaacgctgttcaacagatatgtcgacaaaacagatgttttctcatggaactctgtcatcgccgacctcgctcgtagcggtgattctgctgaagctcttctcgctttttcctcaatgcggaagctttctctatacccaactcgctctagctttccttgcgccattaaagcatgttcgtctctttttgatatcttctccggcaaacagacccatcagcaagcttttgtcttcggttatcaatccgacatctttgtgtcttcggctttgatcgttatgtattcaacttgtgggaaactggaggatgcacggaaagtgttcgacgaaattcccaagagaaatattgtatcttggacttcgatgattcgagggtatgatcttaacggtaatgcccttgatgctgtttctcttttcaaggatctattggtcgatgaaaatgatgatgacgatgcaatgtttcttgattctatgggtttggtttcggtaatctctgcttgttctcgtgttcctgctaagggtttaacggaatctattcatagctttgtgattaagagaggttttgatagaggagtgagtgttggtaatactcttttggatgcttatgctaagggtggagaaggaggtgttgctgtggcgagaaaaatctttgatcagattgtggataaggatcgtgtttcgtataattcgattatgagtgtgtatgctcagagtgggatgtctaatgaggcttttgaggtttttcgtagacttgttaagaataaagttgtgacctttaacgccattacattgtctactgtgttgttggcggtctcgcattcaggtgctctgcgtattggaaagtgtatacatgatcaggtaataaggatgggtcttgaggatgatgtgatagtggggacgtcgataattgatatgtattgcaaatgcggaagagttgagacggcgagaaaagcatttgatcgaatgaaaaacaagaatgttaggtcgtggaccgccatgattgctggatatggaatgcacggccacgcggctaaagcgttagagttattccctgctatgatcgattcaggggttcgaccaaattacattacttttgtatcagtgttagctgcttgcagtcatgcgggtcttcatgtggaaggctggcgctggtttaacgcaatgaaggggagatttggtgtggaaccagggttagaacactacggttgtatggttgatcttctaggtagagctgggtttcttcagaaagcttatgatttgattcagagaatgaagatgaagccggactctatcatctggagctcacttcttgcagcttgtagaattcacaagaacgtggagctagctgagatatccgtggcgcgtttgtttgaattggactcttcgaattgcggttactacatgctgctttcgcatatctacgctgatgcgggtcgttggaaagatgttgagagggtgagaatgatcatgaagaatcgcggattggtgaaaccgccaggttttagtctactcgagttgaatggtgaggttcatgtgttcttgatcggagacgaagagcatcctcagcgtgagaagatttacgagtttttagcagaactgaacaggaagctgttagaggcaggttacgtatcgaacacgtcatctgtatgtcatgatgttgatgaggaagagaaagagatgacactgagagttcacagcgagaaactagcgattgcgtttgggatcatgaacacggttcctggctcgacggttaatgtggtcaagaatctgagagtttgcagcgattgtcacaatgtgatcaagttgatttcaaagattgttgatagagagtttgtggttagagatgcgaagaggtttcaccatttcaaagatggtggatgttcctgtggagattactggtga

SEQ ID NO: 97989 - protein, 1077 aa, Arabidopsis thaliana
  peptide (1)..(1077): Ceres Seq. ID no. 13579067
GCDRNKKLFASSSSISRSTLFTKKMGSSQSTQMEDEEEEEEETDNEEEEEEDNGRSNTRQLDNLLVKKVLEQEPEMLPCHASASPLSPQLSSLGTPRLGPSIKVWDPYNVLSPPPQPPSIFSRIVSGDEDRAVTEVYLISHGESDLNLKPDLIGGRCHVAALTANGKRQARALAVFFKSQGVRFNSVYSSPLDRARSMAVSVCQEMSFPEEHVQSSDAVIEMSLGDWEGCNQAEIYSPETLSLIERCQPDFTAPSGESLRQVEFRMVQFLNGTVSGVAEKLRSDYSSTTNHNETHERDGGVSLASTNWDLLHKHRPSLTRKKSGKSRLQVMTNHEPDDGNSPREEVNHNHTDLSDSSSLISNCVGVFTHSLPIKCLLTGILGCSPVMTHKICVEDSSVTVLQHSWRNGWQIKRMNDTAHLRLFKKALFCSVSRLLHTERHTERQNLTTLFNRYVDKTDVFSWNSVIADLARSGDSAEALLAFSSMRKLSLYPTRSSFPCAIKACSSLFDIFSGKQTHQQAFVFGYQSDIFVSSALIVMYSTCGKLEDARKVFDEIPKRNIVSWTSMIRGYDLNGNALDAVSLFKDLLVDENDDDDAMFLDSMGLVSVISACSRVPAKGLTESIHSFVIKRGFDRGVSVGNTLLDAYAKGGEGGVAVARKIFDQIVDKDRVSYNSIMSVYAQSGMSNEAFEVFRRLVKNKVVTFNAITLSTVLLAVSHSGALRIGKCIHDQVIRMGLEDDVIVGTSIIDMYCKCGRVETARKAFDRMKNKNVRSWTAMIAGYGMHGHAAKALELFPAMIDSGVRPNYITFVSVLAACSHAGLHVEGWRWFNAMKGRFGVEPGLEHYGCMVDLLGRAGFLQKAYDLIQRMKMKPDSIIWSSLLAACRIHKNVELAEISVARLFELDSSNCGYYMLLSHIYADAGRWKDVERVRMIMKNRGLVKPPGFSLLELNGEVHVFLIGDEEHPQREKIYEFLAELNRKLLEAGYVSNTSSVCHDVDEEEKEMTLRVHSEKLAIAFGIMNTVPGSTVNVVKNLRVCSDCHNVIKLISKIVDREFVVRDAKRFHHFKDGGCSCGDYW

SEQ ID NO: 97990 - protein, 1053 aa, Arabidopsis thaliana
  peptide (1)..(1053): Ceres Seq. ID no. 13579068
MGSSQSTQMEDEEEEEEETDNEEEEEEDNGRSNTRQLDNLLVKKVLEQEPEMLPCHASASPLSPQLSSLGTPRLGPSIKVWDPYNVLSPPPQPPSIFSRIVSGDEDRAVTEVYLISHGESDLNLKPDLIGGRCHVAALTANGKRQARALAVFFKSQGVRFNSVYSSPLDRARSMAVSVCQEMSFPEEHVQSSDAVIEMSLGDWEGCNQAEIYSPETLSLIERCQPDFTAPSGESLRQVEFRMVQFLNGTVSGVAEKLRSDYSSTTNHNETHERDGGVSLASTNWDLLHKHRPSLTRKKSGKSRLQVMTNHEPDDGNSPREEVNHNHTDLSDSSSLISNCVGVFTHSLPIKCLLTGILGCSPVMTHKICVEDSSVTVLQHSWRNGWQIKRMNDTAHLRLFKKALFCSVSRLLHTERHTERQNLTTLFNRYVDKTDVFSWNSVIADLARSGDSAEALLAFSSMRKLSLYPTRSSFPCAIKACSSLFDIFSGKQTHQQAFVFGYQSDIFVSSALIVMYSTCGKLEDARKVFDEIPKRNIVSWTSMIRGYDLNGNALDAVSLFKDLLVDENDDDDAMFLDSMGLVSVISACSRVPAKGLTESIHSFVIKRGFDRGVSVGNTLLDAYAKGGEGGVAVARKIFDQIVDKDRVSYNSIMSVYAQSGMSNEAFEVFRRLVKNKVVTFNAITLSTVLLAVSHSGALRIGKCIHDQVIRMGLEDDVIVGTSIIDMYCKCGRVETARKAFDRMKNKNVRSWTAMIAGYGMHGHAAKALELFPAMIDSGVRPNYITFVSVLAACSHAGLHVEGWRWFNAMKGRFGVEPGLEHYGCMVDLLGRAGFLQKAYDLIQRMKMKPDSIIWSSLLAACRIHKNVELAEISVARLFELDSSNCGYYMLLSHIYADAGRWKDVERVRMIMKNRGLVKPPGFSLLELNGEVHVFLIGDEEHPQREKIYEFLAELNRKLLEAGYVSNTSSVCHDVDEEEKEMTLRVHSEKLAIAFGIMNTVPGSTVNVVKNLRVCSDCHNVIKLISKIVDREFVVRDAKRFHHFKDGGCSCGDYW

SEQ ID NO: 97991 - protein, 1045 aa, Arabidopsis thaliana
  peptide (1)..(1045): Ceres Seq. ID no. 13579069
MEDEEEEEEETDNEEEEEEDNGRSNTRQLDNLLVKKVLEQEPEMLPCHASASPLSPQLSSLGTPRLGPSIKVWDPYNVLSPPPQPPSIFSRIVSGDEDRAVTEVYLISHGESDLNLKPDLIGGRCHVAALTANGKRQARALAVFFKSQGVRFNSVYSSPLDRARSMAVSVCQEMSFPEEHVQSSDAVIEMSLGDWEGCNQAEIYSPETLSLIERCQPDFTAPSGESLRQVEFRMVQFLNGTVSGVAEKLRSDYSSTTNHNETHERDGGVSLASTNWDLLHKHRPSLTRKKSGKSRLQVMTNHEPDDGNSPREEVNHNHTDLSDSSSLISNCVGVFTHSLPIKCLLTGILGCSPVMTHKICVEDSSVTVLQHSWRNGWQIKRMNDTAHLRLFKKALFCSVSRLLHTERHTERQNLTTLFNRYVDKTDVFSWNSVIADLARSGDSAEALLAFSSMRKLSLYPTRSSFPCAIKACSSLFDIFSGKQTHQQAFVFGYQSDIFVSSALIVMYSTCGKLEDARKVFDEIPKRNIVSWTSMIRGYDLNGNALDAVSLFKDLLVDENDDDDAMFLDSMGLVSVISACSRVPAKGLTESIHSFVIKRGFDRGVSVGNTLLDAYAKGGEGGVAVARKIFDQIVDKDRVSYNSIMSVYAQSGMSNEAFEVFRRLVKNKVVTFNAITLSTVLLAVSHSGALRIGKCIHDQVIRMGLEDDVIVGTSIIDMYCKCGRVETARKAFDRMKNKNVRSWTAMIAGYGMHGHAAKALELFPAMIDSGVRPNYITFVSVLAACSHAGLHVEGWRWFNAMKGRFGVEPGLEHYGCMVDLLGRAGFLQKAYDLIQRMKMKPDSIIWSSLLAACRIHKNVELAEISVARLFELDSSNCGYYMLLSHIYADAGRWKDVERVRMIMKNRGLVKPPGFSLLELNGEVHVFLIGDEEHPQREKIYEFLAELNRKLLEAGYVSNTSSVCHDVDEEEKEMTLRVHSEKLAIAFGIMNTVPGSTVNVVKNLRVCSDCHNVIKLISKIVDREFVVRDAKRFHHFKDGGCSCGDYW

SEQ ID NO: 97992 - DNA, 1393 bp, Arabidopsis thaliana
  misc_feature (1)..(1393): Ceres Seq. ID no. 13579082
  misc_feature (1)..(1393): Ortholog of  Ceres SEQ ID NO 13654989 as cited in SEQ ID NO 63117
  misc_feature (1)..(1393): Ortholog of  Ceres SEQ ID NO 13657138 as cited in SEQ ID NO 65923
  misc_feature (1)..(1393): Ortholog of  Ceres SEQ ID NO 13584744 as cited in SEQ ID NO 69137
tttttggccatttcctatttctcccttcgtctccatcaagcaaccctctctctctctctctctctatcatcatcatcgcagaggagacgatcttacgcgacgaatccttgagagattgagagggacaagcgagttttgacccaaggattgttgacggtctatattgaacaagtaaacaaggatgcgtaagtggatctgttgtacatgtcaaatagaagactcaaatgaagagcaacaactgaaaagttcacagcagcaatctgatgcaaatcataagaattcaaaaccagcacctgttgcaaaacatgaggttaagaaggaagctcttcccatcgaggtccctcccttgtctttggatgaggtcaaggaaaagactgaaaattttggatccaaggcactgattggtgaagggtcttatgggagagtatattatgcgacactaaatgatggtgtggcggttgctctgaagaaacttgatgtcgcacctgaagctgaaacagataccgaattcttgagtcaggtttccatggtctctaggctgaagcatgaaaatctcattcaattgcttggtttttgtgttgatggaaacctccgcgtccttgcatatgagtttgcaacaatgggatcgttgcatgacatcttgcatggtaggaagggagttcaaggagcacaaccaggtccaacacttgactggataacgagggtgaagatagcggttgaggcagctaggggtttggaatacctccatgagaagtctcagcctcctgtaatccatagggacataagatctagcaatgtccttctttttgaagactacaaagcaaagattgctgatttcaatctctcgaatcaagcacctgataatgctgcccgtcttcactcaacaagagtcttggggacttttggttatcatgctccagaatatgcaatgactggacagttaactcagaagagtgatgtgtacagctttggtgttgtacttctagaacttcttacagggaggaaaccggtggatcataccatgcctagaggtcaacagagtcttgtaacctgggcgacaccaagactcagtgaagataaagtgaaacagtgcattgatccaaagctaaaagccgattaccctccaaaagcagttgctaagctagcagcggtggcagcattgtgtgtgcaatacgaagctgagtttagaccaaatatgagcatagttgtgaaggcgctacagcctctcctgaaacctccagcagcagctccagcaccagaatcttgaaacttttaaatcttttttttcgctgcaactatcagaaagaatctacatagtaccatttgccataaatgataatgaggttggttttgagagtgataactactattattaaaagatgatattatgttt

SEQ ID NO: 97993 - protein, 361 aa, Arabidopsis thaliana
  peptide (1)..(361): Ceres Seq. ID no. 13579083
MRKWICCTCQIEDSNEEQQLKSSQQQSDANHKNSKPAPVAKHEVKKEALPIEVPPLSLDEVKEKTENFGSKALIGEGSYGRVYYATLNDGVAVALKKLDVAPEAETDTEFLSQVSMVSRLKHENLIQLLGFCVDGNLRVLAYEFATMGSLHDILHGRKGVQGAQPGPTLDWITRVKIAVEAARGLEYLHEKSQPPVIHRDIRSSNVLLFEDYKAKIADFNLSNQAPDNAARLHSTRVLGTFGYHAPEYAMTGQLTQKSDVYSFGVVLLELLTGRKPVDHTMPRGQQSLVTWATPRLSEDKVKQCIDPKLKADYPPKAVAKLAAVAALCVQYEAEFRPNMSIVVKALQPLLKPPAAAPAPES

SEQ ID NO: 97994 - protein, 246 aa, Arabidopsis thaliana
  peptide (1)..(246): Ceres Seq. ID no. 13579084
MVSRLKHENLIQLLGFCVDGNLRVLAYEFATMGSLHDILHGRKGVQGAQPGPTLDWITRVKIAVEAARGLEYLHEKSQPPVIHRDIRSSNVLLFEDYKAKIADFNLSNQAPDNAARLHSTRVLGTFGYHAPEYAMTGQLTQKSDVYSFGVVLLELLTGRKPVDHTMPRGQQSLVTWATPRLSEDKVKQCIDPKLKADYPPKAVAKLAAVAALCVQYEAEFRPNMSIVVKALQPLLKPPAAAPAPES

SEQ ID NO: 97995 - protein, 215 aa, Arabidopsis thaliana
  peptide (1)..(215): Ceres Seq. ID no. 13579085
MGSLHDILHGRKGVQGAQPGPTLDWITRVKIAVEAARGLEYLHEKSQPPVIHRDIRSSNVLLFEDYKAKIADFNLSNQAPDNAARLHSTRVLGTFGYHAPEYAMTGQLTQKSDVYSFGVVLLELLTGRKPVDHTMPRGQQSLVTWATPRLSEDKVKQCIDPKLKADYPPKAVAKLAAVAALCVQYEAEFRPNMSIVVKALQPLLKPPAAAPAPES

SEQ ID NO: 97996 - DNA, 2126 bp, Arabidopsis thaliana
  misc_feature (1)..(2126): Ceres Seq. ID no. 13579167
  misc_feature (1)..(2126): Ortholog of  Ceres SEQ ID NO 13655755 as cited in SEQ ID NO 65117
aacatcttttaagcttctcccgcaaaattcagcaaagctttcggaggaatctcctaacagtcaccaccaccaccaccgtctaggncaaatctcgtcttcctcacgctctatttctccatagaanatttcctaactcctcctccgggttatcgattttttcaatttttctagggtttcgcgccgggatctaaaaaatcacaatcatgccggtgagtttgactccgaacgcaatcacggcgatacatgacggcgacgtgaatttgaagccgttgttacaggttttagaaatcaaaatgataggaagaagtcaagagagaagccaggagaggtatcgtttcctcatttcagatggtgtttctgctcaacatgctatggtcgcggttcagcttaatgatcgagtcaagtcaggacaatttgagaaaggatctatcgttcagctgattgattacatttgtagcgacgttaaaggccgcaagcttattgtggtgctgaacatggagacgatagtacaacagtctgaaaccattgggaaccctacaatatttggagaaacagatacagaagcccagaagacattttcaggtacgggcaatataccgcctccgaacagggttgtttttaatgaaccaatggttcagcattctgttaatagagcacctcccaggggtgtaaacattcaaaatcaagccaacaatactccaagcttcaggccatctgttcaaccttcatatcaaccgcctgcaagttacagaaatcatggacccatcatgaagaacgaggctccagctcgagtcatccctattgctgctctcaatccataccaaggtcgatgggctattaaggctagagtaactgcgaaaggagatatcagacgatataacaatgcaaaaggagatggaaaggttttctcgtttgatctgcttgactatgatggaggggagattcgggttacgtgctttaatgctcttgttgaccgtttctatgatgttactgaggttggtaaggtatatttgatttcaaagggaagtttgaagcctgcacagaaaaatttcaaccacttaaagaatgaatgggaaattttcttggagtcaacatcgactgtggagctttgccctgatgaagatggctccataccaaagcagcaattctccttccgcccaataagtgacattgagaacgctgagaacaataccatactcgatgtcattggtgtggtgacttctgtgaacccctcggtgccaatcttgagaaagaacgggatggaaacccataggaggatcctgaatctaaaggatgaatcaggaaaggctgtagaggtaacactttggggagaattctgtaaccgagatggtcggcaactggaagagatggttgattcagcttttcacccggttttagcaataaaagctggaaaagtaagcgacttcagtgggaaatcagtagggacaatatcttcaacacagctcttcataaatccagatttccctgaagctcataaactacggacctggttcgattacgggggaaaagacactgcttccttctccatctccagggacactatgcctggaggagtttccaggaacgagataaggaaaaatgtttctcagatcaaagaggaaggtcttggaagatcagataagcctgactggatcactgtgaaagcaaccatatcattcatcaaaacagatagcttctgttatacagcttgtcctttgatgatcggggataaacaatgcaacaagaaggttacacggtctggaacaaacaggtggctctgtgaccggtgcaaccaagagtctgatgaatgcgactatagataccttcttcaggtacagattcaagaccacactgggttgacttggataaccgcgtttcaagaaacaggagaagaaataatgggatgtccggctaagaagctttacgcaatgaaatacgaattggagaaggaggaagagttcgcagagattgttagagacagactgtttcatcagtacatgttgaagctgaagatcaaagaggaatcgtatggggatgaacaaagagtgaagatgactgttgtgaaggttgataaggtgaattatacatccgagagtaaatacatgcttgatttgctcgtaaggtaa

SEQ ID NO: 97997 - protein, 640 aa, Arabidopsis thaliana
  peptide (1)..(640): Ceres Seq. ID no. 13579168
MPVSLTPNAITAIHDGDVNLKPLLQVLEIKMIGRSQERSQERYRFLISDGVSAQHAMVAVQLNDRVKSGQFEKGSIVQLIDYICSDVKGRKLIVVLNMETIVQQSETIGNPTIFGETDTEAQKTFSGTGNIPPPNRVVFNEPMVQHSVNRAPPRGVNIQNQANNTPSFRPSVQPSYQPPASYRNHGPIMKNEAPARVIPIAALNPYQGRWAIKARVTAKGDIRRYNNAKGDGKVFSFDLLDYDGGEIRVTCFNALVDRFYDVTEVGKVYLISKGSLKPAQKNFNHLKNEWEIFLESTSTVELCPDEDGSIPKQQFSFRPISDIENAENNTILDVIGVVTSVNPSVPILRKNGMETHRRILNLKDESGKAVEVTLWGEFCNRDGRQLEEMVDSAFHPVLAIKAGKVSDFSGKSVGTISSTQLFINPDFPEAHKLRTWFDYGGKDTASFSISRDTMPGGVSRNEIRKNVSQIKEEGLGRSDKPDWITVKATISFIKTDSFCYTACPLMIGDKQCNKKVTRSGTNRWLCDRCNQESDECDYRYLLQVQIQDHTGLTWITAFQETGEEIMGCPAKKLYAMKYELEKEEEFAEIVRDRLFHQYMLKLKIKEESYGDEQRVKMTVVKVDKVNYTSESKYMLDLLVR

SEQ ID NO: 97998 - protein, 610 aa, Arabidopsis thaliana
  peptide (1)..(610): Ceres Seq. ID no. 13579169
MIGRSQERSQERYRFLISDGVSAQHAMVAVQLNDRVKSGQFEKGSIVQLIDYICSDVKGRKLIVVLNMETIVQQSETIGNPTIFGETDTEAQKTFSGTGNIPPPNRVVFNEPMVQHSVNRAPPRGVNIQNQANNTPSFRPSVQPSYQPPASYRNHGPIMKNEAPARVIPIAALNPYQGRWAIKARVTAKGDIRRYNNAKGDGKVFSFDLLDYDGGEIRVTCFNALVDRFYDVTEVGKVYLISKGSLKPAQKNFNHLKNEWEIFLESTSTVELCPDEDGSIPKQQFSFRPISDIENAENNTILDVIGVVTSVNPSVPILRKNGMETHRRILNLKDESGKAVEVTLWGEFCNRDGRQLEEMVDSAFHPVLAIKAGKVSDFSGKSVGTISSTQLFINPDFPEAHKLRTWFDYGGKDTASFSISRDTMPGGVSRNEIRKNVSQIKEEGLGRSDKPDWITVKATISFIKTDSFCYTACPLMIGDKQCNKKVTRSGTNRWLCDRCNQESDECDYRYLLQVQIQDHTGLTWITAFQETGEEIMGCPAKKLYAMKYELEKEEEFAEIVRDRLFHQYMLKLKIKEESYGDEQRVKMTVVKVDKVNYTSESKYMLDLLVR

SEQ ID NO: 97999 - protein, 584 aa, Arabidopsis thaliana
  peptide (1)..(584): Ceres Seq. ID no. 13579170
MVAVQLNDRVKSGQFEKGSIVQLIDYICSDVKGRKLIVVLNMETIVQQSETIGNPTIFGETDTEAQKTFSGTGNIPPPNRVVFNEPMVQHSVNRAPPRGVNIQNQANNTPSFRPSVQPSYQPPASYRNHGPIMKNEAPARVIPIAALNPYQGRWAIKARVTAKGDIRRYNNAKGDGKVFSFDLLDYDGGEIRVTCFNALVDRFYDVTEVGKVYLISKGSLKPAQKNFNHLKNEWEIFLESTSTVELCPDEDGSIPKQQFSFRPISDIENAENNTILDVIGVVTSVNPSVPILRKNGMETHRRILNLKDESGKAVEVTLWGEFCNRDGRQLEEMVDSAFHPVLAIKAGKVSDFSGKSVGTISSTQLFINPDFPEAHKLRTWFDYGGKDTASFSISRDTMPGGVSRNEIRKNVSQIKEEGLGRSDKPDWITVKATISFIKTDSFCYTACPLMIGDKQCNKKVTRSGTNRWLCDRCNQESDECDYRYLLQVQIQDHTGLTWITAFQETGEEIMGCPAKKLYAMKYELEKEEEFAEIVRDRLFHQYMLKLKIKEESYGDEQRVKMTVVKVDKVNYTSESKYMLDLLVR

SEQ ID NO: 98000 - DNA, 1490 bp, Arabidopsis thaliana
  misc_feature (1)..(1490): Ceres Seq. ID no. 13579183
  misc_feature (1)..(1490): Ortholog of  Ceres SEQ ID NO 14310037 as cited in SEQ ID NO 20603
gcttttccattttcatcttcatgcattgctttccttcgtcgtccttggaggggacgacgacggatctgtctttctgtctactgaaaatccaaatttcatcctctccatttatttaactttttcagatttagttttgtcaagaaaacacaaaatgtcttttcttgcgccttgtcaaattttggagctgaatattatttcggcccaagaattggcgcccgtggcacggtgtatgaagacatatgcaatcgcttggattgatccagagcgtaaattgacgactcgggtcgacaatacgggcggaacaagccctacatggaacgacaagtttgtgtttcgtctagatgaggaagcactctacgatgccacatcaatagttgttatagagatctatgcattgcattggttcaaagacattcatgttggaacggtacaagccttaataagtgaccttgtaagcccttcttcggctatgagattcgttaccctagaggttcttcgtgcctcgggccgcccccacggcctcctaaacattgcggtggggcttatcgataactcaggccaaagcatgcctcttttgtttgaagaagatttgttgtttcacaagaaaaacatatcttcaaaacccgtagggcttcgacggtcaaaaagtgatacaagctcaatggtggattcaccaaggaaggtgacacaatcccgtgtgagttctactacaaactcaggatttgataaagatgagttttcttctgactctcaaatggttgtgtatgagccccaaagaaaaacgccgaatacaatgaggcaaacaaagcaacaactcgtgtatgggacaccgatgaggccaaggaaaacgacagcatatacccccaaaaggaacacaatcgaatatggaacaccaatgaggtcaagaccaatcgttattacagaatctgacttaggtccttcagcctcagtagttgctgcccaaatagcaaaagagaaagcacttacagggaaagatgcggagagtactgtgataagtgttggtgaacgaagtgtcgagggtcttcgttctaagttagaaagatggcaagccaatttaccagtggttttagacgtggggtcaagttatcaaccaagttctgactacaaaacaaactctaactttaaccctaaatcaagttacaagcctaacgaaatcgtcccaagaaatcctcaaatgattggagctcccatccaaaagccaagtgggaggaacaagaaaagtggagataacggattgttttcatgttttggtaacatttgtggcattgagtgttctattgtttgtggtggctctagtggacaaaaagcagccaagaagaagaagaaaaagaagtgataaataacaaacatgattccttcaattctaaatgattcatttctcattatgtttctatttttcaagcttgtcgattttgctactcaataatccaaatttatatagtaagacatggggaaaaggtacattaatt

SEQ ID NO: 98001 - protein, 451 aa, Arabidopsis thaliana
  peptide (1)..(451): Ceres Seq. ID no. 13579184
LFHFHLHALLSFVVLGGDDDGSVFLSTENPNFILSIYLTFSDLVLSRKHKMSFLAPCQILELNIISAQELAPVARCMKTYAIAWIDPERKLTTRVDNTGGTSPTWNDKFVFRLDEEALYDATSIVVIEIYALHWFKDIHVGTVQALISDLVSPSSAMRFVTLEVLRASGRPHGLLNIAVGLIDNSGQSMPLLFEEDLLFHKKNISSKPVGLRRSKSDTSSMVDSPRKVTQSRVSSTTNSGFDKDEFSSDSQMVVYEPQRKTPNTMRQTKQQLVYGTPMRPRKTTAYTPKRNTIEYGTPMRSRPIVITESDLGPSASVVAAQIAKEKALTGKDAESTVISVGERSVEGLRSKLERWQANLPVVLDVGSSYQPSSDYKTNSNFNPKSSYKPNEIVPRNPQMIGAPIQKPSGRNKKSGDNGLFSCFGNICGIECSIVCGGSSGQKAAKKKKKKK

SEQ ID NO: 98002 - protein, 401 aa, Arabidopsis thaliana
  peptide (1)..(401): Ceres Seq. ID no. 13579185
MSFLAPCQILELNIISAQELAPVARCMKTYAIAWIDPERKLTTRVDNTGGTSPTWNDKFVFRLDEEALYDATSIVVIEIYALHWFKDIHVGTVQALISDLVSPSSAMRFVTLEVLRASGRPHGLLNIAVGLIDNSGQSMPLLFEEDLLFHKKNISSKPVGLRRSKSDTSSMVDSPRKVTQSRVSSTTNSGFDKDEFSSDSQMVVYEPQRKTPNTMRQTKQQLVYGTPMRPRKTTAYTPKRNTIEYGTPMRSRPIVITESDLGPSASVVAAQIAKEKALTGKDAESTVISVGERSVEGLRSKLERWQANLPVVLDVGSSYQPSSDYKTNSNFNPKSSYKPNEIVPRNPQMIGAPIQKPSGRNKKSGDNGLFSCFGNICGIECSIVCGGSSGQKAAKKKKKKK

SEQ ID NO: 98003 - protein, 375 aa, Arabidopsis thaliana
  peptide (1)..(375): Ceres Seq. ID no. 13579186
MKTYAIAWIDPERKLTTRVDNTGGTSPTWNDKFVFRLDEEALYDATSIVVIEIYALHWFKDIHVGTVQALISDLVSPSSAMRFVTLEVLRASGRPHGLLNIAVGLIDNSGQSMPLLFEEDLLFHKKNISSKPVGLRRSKSDTSSMVDSPRKVTQSRVSSTTNSGFDKDEFSSDSQMVVYEPQRKTPNTMRQTKQQLVYGTPMRPRKTTAYTPKRNTIEYGTPMRSRPIVITESDLGPSASVVAAQIAKEKALTGKDAESTVISVGERSVEGLRSKLERWQANLPVVLDVGSSYQPSSDYKTNSNFNPKSSYKPNEIVPRNPQMIGAPIQKPSGRNKKSGDNGLFSCFGNICGIECSIVCGGSSGQKAAKKKKKKK

SEQ ID NO: 98004 - DNA, 2394 bp, Arabidopsis thaliana
  misc_feature (1)..(2394): Ceres Seq. ID no. 13579221
  misc_feature (1)..(2394): Ortholog of  Ceres SEQ ID NO 15180156 as cited in SEQ ID NO 0
atttgtttatttcatcgtccaaatttttgacagtatttttttgtttgttagagaagggcgagagagagtgactttttttgtttgcctttgttaatggcttgtgtgtgagattcattgaattttttgaaaattctgacgaataaaaaccatatctaccaatcacaaaccctagatttttgttatcttcttcatccgaagattctctttgatctgtgtctccttccttctgattctcccatttcatttcattgattcttttgattcgattctattcgagctcaattttgtagatcagaacccagaatcgaatttgggataacttgaacaatatccttggtaacttgttgatctgaatttgagtgaagaagacatcgaattcaagtttggtgtgggagattttttttaatggagtgatgatgatttaaaggggaaggtaaagggaacgatgactggattgggtgttcgatccagtagctatggttccttggagaagacgggacttaacggcgtcgttttacctatccagatcactaccacgacgcgtaccaaaccatctaagatgcagaaagatagagaaggtattgtacattggatctgcaaattcgctggtcgtaagaaggttggcatgttgcttctcttcttaatctccgccgtcgtcttccttcgcgtcctttacgtcggaaaaggtgaagatagtcaggaaggtcaaggtcctccgagtcttcatttcaatggcagttcaggcgtaaattattcaaatatgttacaaacaaatgaagagctaaacatgaatattggaaatatatcgttcaaggcaaaagaagttattgtgttccctcctcctcctatacattttcttggttattcgcttcctcaaggtcatccttgtaacagtttcactttacctcccccaccagcagacaggaaaagaacaggaccacgcccatgcccggtatgttaccttccagtagaagaagcagttgccttgatgccaaatgccccatcattttcccctgttcttaagaacttaacgtatatatatgaagaaccgttaaacagagagacagagtttggagggtcagattttggtggttatcctactttgaaacataggaatgattcttttgacattaaagaaacaatgagtgtacattgtgggtttgtcaaaggacctcaacctggtcgaaatacaggatttgacattgatgaggcagatcttcttgaaatgaagcagtgtcgtgggatagttgttgcttcagcagtatttgatgcttttgatgatgtaaaagccccacaaaatatcagtaaatatgcggaggaaacagtttgcttctacatgtttgttgatgaagagactgaatcaattttgaagagagaacgaggccttgatggcaataagaaagtagggatatggagagttgttgttgttcataatctcccctattcagatggaaggcgcaatggaaaggtgcccaagcttcttgtccataggatgtttccaaatgctcgctattctttatggattgacggaaaactagaacttgtcgtcgatccatatcaaattcttgaaagattcttgtggaggaaaaatgctacttttgctatttctagacattacaaacgatttgatgtcttagtggaagccgaagcaaataaagctgctggtaaatatgataatgcttctatcgactttcaagtggatttttacaagaacgaagggttaaccccttattctgtcgcaaagctcccaatcacaagcgacgtacccgagggttgtgtcattttaagagagcatgttcccataagcaacctcttcacttgtctttggttcaacgaagttgaccgattcacttctagagatcaaatcagtttctcaacagtaagagataagatcgcagcaaaaacaaactggacagtaagcatgttccttgattgtgaaagacgcaattttgtagttcagagatatcaccgagcagaacaagaaagatttgcaaggcaacgacctccggtgcctaattttcctcctccaccaccttcgccgcctccaccagttttaatcagcagcgatttgcctagaaaaatgtcaagtggaagagcaacgccgcctagaagacgaggaagagacagacggtctggtcaaaggggtcacaggaaagctaacttgccagtaagattaccagattcagcttaagagttggcgtccgtcttcttcttcttcttcatggtcactctcatcaccaacatcacattccaattttaccacacagtatgtttattttttttgtttctctatttgattctaaggattcaaaatcaattttttaatgtatatatatacacgaacattttgtacttggataataaattatagtttcgaatttttgaagttcaaaa

SEQ ID NO: 98005 - protein, 581 aa, Arabidopsis thaliana
  peptide (1)..(581): Ceres Seq. ID no. 13579222
MTGLGVRSSSYGSLEKTGLNGVVLPIQITTTTRTKPSKMQKDREGIVHWICKFAGRKKVGMLLLFLISAVVFLRVLYVGKGEDSQEGQGPPSLHFNGSSGVNYSNMLQTNEELNMNIGNISFKAKEVIVFPPPPIHFLGYSLPQGHPCNSFTLPPPPADRKRTGPRPCPVCYLPVEEAVALMPNAPSFSPVLKNLTYIYEEPLNRETEFGGSDFGGYPTLKHRNDSFDIKETMSVHCGFVKGPQPGRNTGFDIDEADLLEMKQCRGIVVASAVFDAFDDVKAPQNISKYAEETVCFYMFVDEETESILKRERGLDGNKKVGIWRVVVVHNLPYSDGRRNGKVPKLLVHRMFPNARYSLWIDGKLELVVDPYQILERFLWRKNATFAISRHYKRFDVLVEAEANKAAGKYDNASIDFQVDFYKNEGLTPYSVAKLPITSDVPEGCVILREHVPISNLFTCLWFNEVDRFTSRDQISFSTVRDKIAAKTNWTVSMFLDCERRNFVVQRYHRAEQERFARQRPPVPNFPPPPPSPPPPVLISSDLPRKMSSGRATPPRRRGRDRRSGQRGHRKANLPVRLPDSA

SEQ ID NO: 98006 - protein, 543 aa, Arabidopsis thaliana
  peptide (1)..(543): Ceres Seq. ID no. 13579223
MQKDREGIVHWICKFAGRKKVGMLLLFLISAVVFLRVLYVGKGEDSQEGQGPPSLHFNGSSGVNYSNMLQTNEELNMNIGNISFKAKEVIVFPPPPIHFLGYSLPQGHPCNSFTLPPPPADRKRTGPRPCPVCYLPVEEAVALMPNAPSFSPVLKNLTYIYEEPLNRETEFGGSDFGGYPTLKHRNDSFDIKETMSVHCGFVKGPQPGRNTGFDIDEADLLEMKQCRGIVVASAVFDAFDDVKAPQNISKYAEETVCFYMFVDEETESILKRERGLDGNKKVGIWRVVVVHNLPYSDGRRNGKVPKLLVHRMFPNARYSLWIDGKLELVVDPYQILERFLWRKNATFAISRHYKRFDVLVEAEANKAAGKYDNASIDFQVDFYKNEGLTPYSVAKLPITSDVPEGCVILREHVPISNLFTCLWFNEVDRFTSRDQISFSTVRDKIAAKTNWTVSMFLDCERRNFVVQRYHRAEQERFARQRPPVPNFPPPPPSPPPPVLISSDLPRKMSSGRATPPRRRGRDRRSGQRGHRKANLPVRLPDSA

SEQ ID NO: 98007 - protein, 521 aa, Arabidopsis thaliana
  peptide (1)..(521): Ceres Seq. ID no. 13579224
MLLLFLISAVVFLRVLYVGKGEDSQEGQGPPSLHFNGSSGVNYSNMLQTNEELNMNIGNISFKAKEVIVFPPPPIHFLGYSLPQGHPCNSFTLPPPPADRKRTGPRPCPVCYLPVEEAVALMPNAPSFSPVLKNLTYIYEEPLNRETEFGGSDFGGYPTLKHRNDSFDIKETMSVHCGFVKGPQPGRNTGFDIDEADLLEMKQCRGIVVASAVFDAFDDVKAPQNISKYAEETVCFYMFVDEETESILKRERGLDGNKKVGIWRVVVVHNLPYSDGRRNGKVPKLLVHRMFPNARYSLWIDGKLELVVDPYQILERFLWRKNATFAISRHYKRFDVLVEAEANKAAGKYDNASIDFQVDFYKNEGLTPYSVAKLPITSDVPEGCVILREHVPISNLFTCLWFNEVDRFTSRDQISFSTVRDKIAAKTNWTVSMFLDCERRNFVVQRYHRAEQERFARQRPPVPNFPPPPPSPPPPVLISSDLPRKMSSGRATPPRRRGRDRRSGQRGHRKANLPVRLPDSA

SEQ ID NO: 98008 - DNA, 2509 bp, Arabidopsis thaliana
  misc_feature (1)..(2509): Ceres Seq. ID no. 13579233
  misc_feature (1)..(2509): Ortholog of  Ceres SEQ ID NO 13657138 as cited in SEQ ID NO 65923
  misc_feature (1)..(2509): Ortholog of  Ceres SEQ ID NO 13584744 as cited in SEQ ID NO 69137
gaacgtgattcgcccttttctctttgcccaagagctatacgacaatacctccaccacaccccacacacacacacgagagacagagagagagagagaggaaatttgctactgagagatacattcagtgagtgtgtgtctgtcaccgtggaggagaaacggaaggaggatagatgaaaccgaccggagaaggaggaggggaagtcgccggagcggtggcggaaggttcggcgttgttaattgtaggagtaaagccagatgaatggagtagagaggttcttacatggtctttggtgaatgtagcgcgtcctggagatcgaatcgttgctcttcatgttctcgattattctctagagggctcaacgtcgcttatttcgttggttaggaattttgatactatgcttggtgtttatgaaagcttctgcaacttaaaacaggtagatttgaagttgaaggttttcagagggaagtcagctaggaaagttcttgtacaagaagttaaatcgtgtggagctacaagtttaatcgttggttcctctaggaaacatcacactatccgttcttcagcttctttagccaagtattgtgccaggaatcttgccaaggatgtctctgtttttgctgttaaaagtggcaagattatgttccgcagagtacctaataccaatggtgcagatggtccacagatgaatattccctctttagtttgtggatcaccagatattgctattgaagcggcaaagattggaaacagttttagccctgctagaacgagctcacgctggacaagaactagtcgtagttcgtcattgcagtctcctgacagcttaggtgtagacaatttgttggctttagtgccagtacaaacaaatgagactgattctggttcccttgagtcaggaccaggttggcattttcttcgcgggctttacggtaataatcgaaaaagctggaccaaagtttctgctaagaaggctgtacttcagtgggtttcgaggctgcgaggtcggcattcagaaactgtaatctatctggataggaaacggagtgactctggttgtgatgaagattgctcttctagtattgatggtgaagatgtttctatatcacggtttggttctgagcttatgcagtcacctctttctcctttcattggatcaaacaacattccagaagagctggaaggtctacatgaaaagtactcttccacatgtagattattcacatacgaggaagtcttgtcaattacctcaaactttgcatctgagaacttggttggagaaggtggtaatagttatgtttatagaggagatctaccagatggcagggaattagctgtcaaaatattgaaaccttgtctggatgtgttgaaggaatttatactggaaattgaagtcattaccagtgtacatcacaaaaatatagtatctctctttggtttctgtttcgagaataataatttgatgctggtatacgattatctaccacgaggaagccttgaagagaaccttcatggcaatagaaaggatgcaaagaaatttggctggatggagagatataaggtggcagtgggtgttgccgaggcgttagactatctgcataatactcatgatccagaagtaattcaccgggatgtcaaatcttctaatgttcttttggcagatgattttgagccacagctctcagatttcggattcgccagcttggcttcaagtacctcacagcatgtagcgggtggggatattgccgggacatttggttacctagcaccagagtacttcatgcacggtaaagtaaccgacaagattgatgtctatgcttttggtgttgtattgctcgagctcatatcgggtagaaaaccaatctgcgtcgaccagtctaaaggccaggagagccttgtcttgtgggcaaacccaattctagatagtggaaagtttgctcagttactggatcccagtctagaaaatgataacagtaacgatctaatcgagaaactattgttagctgccacgctatgcatcaaacgcacacctcatgaccgtccgcaaattggccttgtcctaaagatattacaaggggaagaagaagcaacagagtggggaaagcaacaagtgagagcctcagaagacgtgagcgcatatttgacaaatatagaatcacacataaacctcgcattgcttgatttggaagatgatgcagcttctgatagcagccctgaagctagtagtatctctgttgaggaatacttgaaagggcgatggagccgcactgctagcttcaacttcaactaataatttttactagtttaaccccgaaaatcccaaaatttgacgatattgtaagttgtgtaaattgtaatcgattttctgagattctcaagctttaagttgtgtcaatttaggaagagtgaatagctcttgtagagaggacttaagttggaatttgtcttctttgttttgtcagagcagaaaatgtttcaagtgttccactttcatatcggttttaaaagttt

SEQ ID NO: 98009 - protein, 705 aa, Arabidopsis thaliana
  peptide (1)..(705): Ceres Seq. ID no. 13579234
MKPTGEGGGEVAGAVAEGSALLIVGVKPDEWSREVLTWSLVNVARPGDRIVALHVLDYSLEGSTSLISLVRNFDTMLGVYESFCNLKQVDLKLKVFRGKSARKVLVQEVKSCGATSLIVGSSRKHHTIRSSASLAKYCARNLAKDVSVFAVKSGKIMFRRVPNTNGADGPQMNIPSLVCGSPDIAIEAAKIGNSFSPARTSSRWTRTSRSSSLQSPDSLGVDNLLALVPVQTNETDSGSLESGPGWHFLRGLYGNNRKSWTKVSAKKAVLQWVSRLRGRHSETVIYLDRKRSDSGCDEDCSSSIDGEDVSISRFGSELMQSPLSPFIGSNNIPEELEGLHEKYSSTCRLFTYEEVLSITSNFASENLVGEGGNSYVYRGDLPDGRELAVKILKPCLDVLKEFILEIEVITSVHHKNIVSLFGFCFENNNLMLVYDYLPRGSLEENLHGNRKDAKKFGWMERYKVAVGVAEALDYLHNTHDPEVIHRDVKSSNVLLADDFEPQLSDFGFASLASSTSQHVAGGDIAGTFGYLAPEYFMHGKVTDKIDVYAFGVVLLELISGRKPICVDQSKGQESLVLWANPILDSGKFAQLLDPSLENDNSNDLIEKLLLAATLCIKRTPHDRPQIGLVLKILQGEEEATEWGKQQVRASEDVSAYLTNIESHINLALLDLEDDAASDSSPEASSISVEEYLKGRWSRTASFNFN

SEQ ID NO: 98010 - protein, 630 aa, Arabidopsis thaliana
  peptide (1)..(630): Ceres Seq. ID no. 13579235
MLGVYESFCNLKQVDLKLKVFRGKSARKVLVQEVKSCGATSLIVGSSRKHHTIRSSASLAKYCARNLAKDVSVFAVKSGKIMFRRVPNTNGADGPQMNIPSLVCGSPDIAIEAAKIGNSFSPARTSSRWTRTSRSSSLQSPDSLGVDNLLALVPVQTNETDSGSLESGPGWHFLRGLYGNNRKSWTKVSAKKAVLQWVSRLRGRHSETVIYLDRKRSDSGCDEDCSSSIDGEDVSISRFGSELMQSPLSPFIGSNNIPEELEGLHEKYSSTCRLFTYEEVLSITSNFASENLVGEGGNSYVYRGDLPDGRELAVKILKPCLDVLKEFILEIEVITSVHHKNIVSLFGFCFENNNLMLVYDYLPRGSLEENLHGNRKDAKKFGWMERYKVAVGVAEALDYLHNTHDPEVIHRDVKSSNVLLADDFEPQLSDFGFASLASSTSQHVAGGDIAGTFGYLAPEYFMHGKVTDKIDVYAFGVVLLELISGRKPICVDQSKGQESLVLWANPILDSGKFAQLLDPSLENDNSNDLIEKLLLAATLCIKRTPHDRPQIGLVLKILQGEEEATEWGKQQVRASEDVSAYLTNIESHINLALLDLEDDAASDSSPEASSISVEEYLKGRWSRTASFNFN

SEQ ID NO: 98011 - protein, 549 aa, Arabidopsis thaliana
  peptide (1)..(549): Ceres Seq. ID no. 13579236
MFRRVPNTNGADGPQMNIPSLVCGSPDIAIEAAKIGNSFSPARTSSRWTRTSRSSSLQSPDSLGVDNLLALVPVQTNETDSGSLESGPGWHFLRGLYGNNRKSWTKVSAKKAVLQWVSRLRGRHSETVIYLDRKRSDSGCDEDCSSSIDGEDVSISRFGSELMQSPLSPFIGSNNIPEELEGLHEKYSSTCRLFTYEEVLSITSNFASENLVGEGGNSYVYRGDLPDGRELAVKILKPCLDVLKEFILEIEVITSVHHKNIVSLFGFCFENNNLMLVYDYLPRGSLEENLHGNRKDAKKFGWMERYKVAVGVAEALDYLHNTHDPEVIHRDVKSSNVLLADDFEPQLSDFGFASLASSTSQHVAGGDIAGTFGYLAPEYFMHGKVTDKIDVYAFGVVLLELISGRKPICVDQSKGQESLVLWANPILDSGKFAQLLDPSLENDNSNDLIEKLLLAATLCIKRTPHDRPQIGLVLKILQGEEEATEWGKQQVRASEDVSAYLTNIESHINLALLDLEDDAASDSSPEASSISVEEYLKGRWSRTASFNFN

SEQ ID NO: 98012 - DNA, 1443 bp, Arabidopsis thaliana
  misc_feature (1)..(1443): Ceres Seq. ID no. 13579245
  misc_feature (1)..(1443): Ortholog of  Ceres SEQ ID NO 12625388 as cited in SEQ ID NO 63299
  misc_feature (1)..(1443): Ortholog of  Ceres SEQ ID NO 15179860 as cited in SEQ ID NO 66716
aatgaattttggggtcaaattcatttcaactgattcaatcaattctcatgaattccatcttgtcaagcgtccttcctgctcccgaagatcctgttctcagtgtaatttttgcttgtagagatgatcctagtccggttaagttgaatttgagcgcaggtacctatcgaactgaggaaggaaagcctcttgttcttgatgttgtgagaagagcagagcaacagttagccaacgacctggacaaggaatatcttcccctcaatggacttcctgaatttaataaattaagtaccaagctcatcttaggtgatgatagtcctgcattgaaagagaatagagttgttacaacccaatgtttgtctggtactggttctttgagagttggagctgagtttctagcaacacacaacaaagaaagtgtcattttcgttccaaacccaacgtgggggaaccatccccgtatttttactttggcgggtttgtctgtccagtatttccgttattatgatccgaagagccgaggactcgacttcaaaggcatgctcgaggatcttggcgctgcacctcctggagctatagtggtacttcaagcttgtgcgcataaccccacaggagttgacccaacattcgaacaatgggaaaagattcgacgactagtgagatcgaaaagcttattacctttctttgatagtgcatatcagggttttgctagtggtagccttgacgcagatgcacaagcggttcgtatgtttgtagccgatggaggtgaatgtttgatagctcaaagttatgccaaaaatatgggcctttatggggagcgtattggctctcttacgatcgtatgcacatcagaagatgtcgctaagaaagttgagaaccaagtgctacttgttgtgaggcctatgtatcttacaccacctattcatggtgcatctattgttgccacaattctaaaaaacagtgatatgtacaatgactggaccattgagctgaaaggaatggctgaccgcataattagcatgcgtcaacagttatatgcagctctagaagctagaggaacacctggtgattggagtcacattattaaacatattgggatgtttacttttaccggattgagtgaggagcaagttcgcttgatggccaaagaatatcacatttacatgacttatgatgggaggataagcatggcaagtctaagttcgaagacagtgcctcaactcgctgatgctatacatgctgttgttactcgcatcgcctaattaaatttgcgattctgttcttttgttgtttaatttatgaacacaattagagaataaaactgcgttcttggtttacatttaataagatagcacaaagaagcaatattatggatgatattgtttctagttggtagtcaaacctaccaaaatgaggattgggacctttaaaccaacacagtttttt

SEQ ID NO: 98013 - protein, 403 aa, Arabidopsis thaliana
  peptide (1)..(403): Ceres Seq. ID no. 13579246
MNSILSSVLPAPEDPVLSVIFACRDDPSPVKLNLSAGTYRTEEGKPLVLDVVRRAEQQLANDLDKEYLPLNGLPEFNKLSTKLILGDDSPALKENRVVTTQCLSGTGSLRVGAEFLATHNKESVIFVPNPTWGNHPRIFTLAGLSVQYFRYYDPKSRGLDFKGMLEDLGAAPPGAIVVLQACAHNPTGVDPTFEQWEKIRRLVRSKSLLPFFDSAYQGFASGSLDADAQAVRMFVADGGECLIAQSYAKNMGLYGERIGSLTIVCTSEDVAKKVENQVLLVVRPMYLTPPIHGASIVATILKNSDMYNDWTIELKGMADRIISMRQQLYAALEARGTPGDWSHIIKHIGMFTFTGLSEEQVRLMAKEYHIYMTYDGRISMASLSSKTVPQLADAIHAVVTRIA

SEQ ID NO: 98014 - protein, 240 aa, Arabidopsis thaliana
  peptide (1)..(240): Ceres Seq. ID no. 13579247
MLEDLGAAPPGAIVVLQACAHNPTGVDPTFEQWEKIRRLVRSKSLLPFFDSAYQGFASGSLDADAQAVRMFVADGGECLIAQSYAKNMGLYGERIGSLTIVCTSEDVAKKVENQVLLVVRPMYLTPPIHGASIVATILKNSDMYNDWTIELKGMADRIISMRQQLYAALEARGTPGDWSHIIKHIGMFTFTGLSEEQVRLMAKEYHIYMTYDGRISMASLSSKTVPQLADAIHAVVTRIA

SEQ ID NO: 98015 - DNA, 1546 bp, Arabidopsis thaliana
  misc_feature (1)..(1546): Ceres Seq. ID no. 13579300
  misc_feature (1)..(1546): Ortholog of  Ceres SEQ ID NO 13659033 as cited in SEQ ID NO 66372
ttgaactcaagtagccaaaatccaaaatctccgccatggctgagagcttctgagagagacacagccatggctacaacttcacacaacaaaccctcactcttccctctactctcccttctctgtttcatctccattttcctcctcctctctctatccaaacgcgcttccctctcctctcccaaaactcaccgctccgccaccgtcttccctccaaaacccgacggttccctctcacctctctccgccacttgcgacttctccgaaggctcctggatctacgaccccaaccccagatccaccaggtacaccagtagttgtaaagaaatcttcaaaggatggaattgtattcgtaacaacaaaaccaatggtttcgagatatctaattggcgatggaaacctaaacactgtgatcttccttcgtttgatccactcaaatttcttcagtctcatcgcaataccaacatcggatttgtgggtgattcattgaataggaacatgtttgtatctttattctgtatgttaaagagtgtgacgggtgaattgaagaagtggcgacctgccggtgcagatcgcggattcacgttttcgcagtataatttgactatcgcgtatcatcgaacaaatctattggctcgttatggtagatggtcagccaatgctaagggtggtgagttagaatctcttggatttaaagagggctatagagttgatgttgatattccagacagctcgtgggcgaaggcttcgagtttccatgacattctcattttgaacactgggcattggtggtgggcgccatcaaaatttgaccctgtaaaatctcctatgcttttctttgaaggcggtcggccaatacttccacctatacctcctgctactggcctagaccgggttctaaacaatatggtaaattttgtggagaaaacaaagcgacctggagggatcatattcttccggacacaatcacctaggcactttgaaggaggtgactgggaccaaggtggtacttgtcaacgactgcaacctttgttacctggaaaagttgaggaatttttctcagtggggaacaacggaacaaatgtagaggttcgtctcgtgaatcaacacctctataactccctcaagagtagaagcgccttccacgttttggacataactcgaatgagcgagtacagagccgacgctcatccggcagcagctggtggaaagaatcacgatgactgcatgcattggtgcctcccgggccttaccgacacttggaatgatttattcgttgcaactcttcatacgatcaaagctttgtaacctgaagaatcacacccgtctttagaatggttactcttgggtctagcgtcatagtcattttatttctttttgtactcttgtaaattttgatgttatcttctgcgatttttttttgtttagttattttttggcctacagtattcaaaagtgtttttaatattacatgcacttttcattttattttttttggtcaaacacttttcgtatctgtttgatatttcttctaaaaaattgaatcatc

SEQ ID NO: 98016 - protein, 434 aa, Arabidopsis thaliana
  peptide (1)..(434): Ceres Seq. ID no. 13579301
LNSSSQNPKSPPWLRASERDTAMATTSHNKPSLFPLLSLLCFISIFLLLSLSKRASLSSPKTHRSATVFPPKPDGSLSPLSATCDFSEGSWIYDPNPRSTRYTSSCKEIFKGWNCIRNNKTNGFEISNWRWKPKHCDLPSFDPLKFLQSHRNTNIGFVGDSLNRNMFVSLFCMLKSVTGELKKWRPAGADRGFTFSQYNLTIAYHRTNLLARYGRWSANAKGGELESLGFKEGYRVDVDIPDSSWAKASSFHDILILNTGHWWWAPSKFDPVKSPMLFFEGGRPILPPIPPATGLDRVLNNMVNFVEKTKRPGGIIFFRTQSPRHFEGGDWDQGGTCQRLQPLLPGKVEEFFSVGNNGTNVEVRLVNQHLYNSLKSRSAFHVLDITRMSEYRADAHPAAAGGKNHDDCMHWCLPGLTDTWNDLFVATLHTIKAL

SEQ ID NO: 98017 - protein, 412 aa, Arabidopsis thaliana; identical to SEQ ID NO: 45103
  peptide (1)..(412): Ceres Seq. ID no. 13579302

SEQ ID NO: 98018 - protein, 269 aa, Arabidopsis thaliana; identical to SEQ ID NO: 45104
  peptide (1)..(269): Ceres Seq. ID no. 13579303

SEQ ID NO: 98019 - DNA, 2290 bp, Arabidopsis thaliana
  misc_feature (1)..(2290): Ceres Seq. ID no. 13579309
  misc_feature (1)..(2290): Ortholog of  Ceres SEQ ID NO 13600220 as cited in SEQ ID NO 0
atcactttgaaatctcaaaagacaccaagcaaaaaaacaaagacagacaaaaaaaaaagagacagaaagaaaaagaaaaaaagtaaattgtccgaactaccttcttatcctttttatcatctcaatgttagaaaatatgatcaattctctagaattagatcggcatagttttcctgatgatttcatctttgggacagctgcctcggcgtttcagtacgaaggtgcaacaagtgaaggtggcaagtctccaactatatgggatcacttcaccctctcgtatccagaaaggaccaaaatgcataatgcagatgtagcaattgatttttatcatcgttacaaggatggcataaaattgatgaaggagctaaacatggacgctttccgattttcaatctcgtgggcaagattaatacccagtggaaagctaaaggatggagtaaacaaagaaggtgtacaattctacaaggatctcatagacgaacttcttgctaatgacatacaaccttcgatgacgctctatcattgggaccacccacaatctttggaggacgaatatggtggctttctaagccctaaaatcgtagaagattttcgagattttgccagaatttgttttgaagagtttggagataaagttaagatgtggacaacaatcaacgaaccttatataatgactgttgcgggttatgatcaaggtaacaaggcggctggacgatgctcaaaatgggtaaacgaaaagtgtcaggctggagattcgagaaccgagccttacattgtttcacatcacactcttcttgcccatgccgctgcagtggaagaaattcgaaaatgtgaaaaaacttcgcatgatggccaaattgggatagtactatcaccaagatggttcgagccttatcattccgattcaactgacgataaagaagcagctgaacgagctcttgcctttgaaattggatggcatcttgatccagtcattcacggagattatccagagattgtaaaaaagtacgcgggaaataaattaccttcatttactgttgaacaatcaaagatgttacaaaattcatcagatttcgttagaattaattactacacggctcgcttcgctgctcatcttcctcacatagaccctgaaaaacctcgtttcaaaactgaccaccatgtggaatggaaactgactaatcacagtggtcacatcatcggacctggggtacgtatttacgtctttttttcataactatcaatttcaaaagctacatgtaatcattctaagatattttaaattttgtattatatatcctcaggaagaaaggggcttcttattttcacacccggaaggcttacgaaaagttcttaactatattaaagagagatacaataacatgccagtctacatcaaagaaaatggtcaaaaactctttccttttcttttttttgctaaagcagaaagtttttttttgttaactagaaattcagaaaactttttagtacgtagttatttaactaaagatttttttatttttttattttttaactctaccacacattaataatatcctagcagtgaattgaaactgaagtttgatttaaatatatttccctaaccagttcaacaaactgatttaaaaaaaaaaaaaaatggtgtgactattaataatttacgttgattactgaattacaggaattaatgacaacgacgacggtacaaaaccaagagaagaaattgtgaaggacacatttaggattgaataccataagacacatttcgaagaacttcacaaagctatagtggaagatgggtgtgacgtaagaggatattacgcatggtcattgatggacaattttgaatgggagcatggatacactgcaagatttggtctatactatgttgattttgtcaatggtctcaaacgttatccaaaagattcggtcaaatggtttaagcggttccttaagaaatcggtcgtcggagagagtaacaaagaggaggtagaggagatgtcacgcgcggaagggaataagacttttaagggtttcgaagaatcggcgggtttctttgcatctttcatggcaatgaaccaatcgaggagagatgaggagaataatcgttgctcctttgattttcctcatactcattttggtgttttgcaaggcatagagaacccatcttcattttattgatttcaaatcccttatgtttttaaattccttatggttggacatgtagttaattagaatttagctcatgttaatatatgaacattttcatggtaatatttttcttcttggg

SEQ ID NO: 98020 - protein, 370 aa, Arabidopsis thaliana
  peptide (1)..(370): Ceres Seq. ID no. 13579310
MLENMINSLELDRHSFPDDFIFGTAASAFQYEGATSEGGKSPTIWDHFTLSYPERTKMHNADVAIDFYHRYKDGIKLMKELNMDAFRFSISWARLIPSGKLKDGVNKEGVQFYKDLIDELLANDIQPSMTLYHWDHPQSLEDEYGGFLSPKIVEDFRDFARICFEEFGDKVKMWTTINEPYIMTVAGYDQGNKAAGRCSKWVNEKCQAGDSRTEPYIVSHHTLLAHAAAVEEIRKCEKTSHDGQIGIVLSPRWFEPYHSDSTDDKEAAERALAFEIGWHLDPVIHGDYPEIVKKYAGNKLPSFTVEQSKMLQNSSDFVRINYYTARFAAHLPHIDPEKPRFKTDHHVEWKLTNHSGHIIGPGVRIYVFFS

SEQ ID NO: 98021 - protein, 366 aa, Arabidopsis thaliana
  peptide (1)..(366): Ceres Seq. ID no. 13579311
MINSLELDRHSFPDDFIFGTAASAFQYEGATSEGGKSPTIWDHFTLSYPERTKMHNADVAIDFYHRYKDGIKLMKELNMDAFRFSISWARLIPSGKLKDGVNKEGVQFYKDLIDELLANDIQPSMTLYHWDHPQSLEDEYGGFLSPKIVEDFRDFARICFEEFGDKVKMWTTINEPYIMTVAGYDQGNKAAGRCSKWVNEKCQAGDSRTEPYIVSHHTLLAHAAAVEEIRKCEKTSHDGQIGIVLSPRWFEPYHSDSTDDKEAAERALAFEIGWHLDPVIHGDYPEIVKKYAGNKLPSFTVEQSKMLQNSSDFVRINYYTARFAAHLPHIDPEKPRFKTDHHVEWKLTNHSGHIIGPGVRIYVFFS

SEQ ID NO: 98022 - protein, 313 aa, Arabidopsis thaliana
  peptide (1)..(313): Ceres Seq. ID no. 13579312
MHNADVAIDFYHRYKDGIKLMKELNMDAFRFSISWARLIPSGKLKDGVNKEGVQFYKDLIDELLANDIQPSMTLYHWDHPQSLEDEYGGFLSPKIVEDFRDFARICFEEFGDKVKMWTTINEPYIMTVAGYDQGNKAAGRCSKWVNEKCQAGDSRTEPYIVSHHTLLAHAAAVEEIRKCEKTSHDGQIGIVLSPRWFEPYHSDSTDDKEAAERALAFEIGWHLDPVIHGDYPEIVKKYAGNKLPSFTVEQSKMLQNSSDFVRINYYTARFAAHLPHIDPEKPRFKTDHHVEWKLTNHSGHIIGPGVRIYVFFS

SEQ ID NO: 98023 - DNA, 1105 bp, Arabidopsis thaliana
  misc_feature (1)..(1105): Ceres Seq. ID no. 13579321
  misc_feature (1)..(1105): Ortholog of  Ceres SEQ ID NO 15173851 as cited in SEQ ID NO 57413
aaaacttgtcgatgtatattaattaggaagcttgcagaaccacaaaaaaagactcttttttgtcaattgattcgattcaagagttctttcaacgtttggagtagagagagtttgacctatttgaaagtctctgagaccggtgtggcatgacggtcgcggcgggtatcggctacgcgctggtggctttaggaccgtctctttcacttttcgtctccgtcatctccagaaagccctttctcatcctcactgttctctccagtacgttgctgtggcttgtgagtctgatcatcttgtcgggattatggagaccatttcttcctctcaaagccaatgtgtggtggccttatgctttacttgttatcacctctgtttgtttccaggaaggccttcgctttctcttctggaaggtttacaagaggcttgaggatgtcttggattcctttgcggatcgtatctcaaggccccgcctgtttctcactgataagctgcagattgctctagctggtggtttaggtcatggtgtggcgcatgctgtattcttttgtttgagcctcttaactccagcgtttggtccagccacattctatgtcgaaagatgttcgaaggtgccattttttctcatctctgcaatcattgctcttgcatttgttacgatccacacattctcgatggtcattgctttcgaagggtatgcaaaagggaacaaagtagatcaaataatagttccagtcatacaccttactgctggaatgttgacattggtgaattttgcatcggaaggttgtgtgatcggggttcctcttctttaccttgtggcatctttgactcttgtgcattgtggaaaaatggtttggcaaaggttgttggaaagccggaaccaaagcagcgcctcacggtaatctggcctcggtctcagaacaacaatagaacagtcgttaatatcattttatctcatgtcttggtttcttgcttgcaaatctcgttcgtctttatctcctaattgcctcgaaacttaaacccttgtgttttaaaacgcacttatgatcctaaattatcaaaaaaaaactgaggaaattttatatcactgaaccaagaaatatttcag

SEQ ID NO: 98024 - protein, 250 aa, Arabidopsis thaliana
  peptide (1)..(250): Ceres Seq. ID no. 13579322
MTVAAGIGYALVALGPSLSLFVSVISRKPFLILTVLSSTLLWLVSLIILSGLWRPFLPLKANVWWPYALLVITSVCFQEGLRFLFWKVYKRLEDVLDSFADRISRPRLFLTDKLQIALAGGLGHGVAHAVFFCLSLLTPAFGPATFYVERCSKVPFFLISAIIALAFVTIHTFSMVIAFEGYAKGNKVDQIIVPVIHLTAGMLTLVNFASEGCVIGVPLLYLVASLTLVHCGKMVWQRLLESRNQSSASR

SEQ ID NO: 98025 - protein, 134 aa, Arabidopsis thaliana
  peptide (1)..(134): Ceres Seq. ID no. 13579323
MFEGAIFSHLCNHCSCICYDPHILDGHCFRRVCKREQSRSNNSSSHTPYCWNVDIGEFCIGRLCDRGSSSLPCGIFDSCALWKNGLAKVVGKPEPKQRLTVIWPRSQNNNRTVVNIILSHVLVSCLQISFVFIS

SEQ ID NO: 98026 - DNA, 1443 bp, Arabidopsis thaliana
  misc_feature (1)..(1443): Ceres Seq. ID no. 13579328
  misc_feature (1)..(1443): Ortholog of  Ceres SEQ ID NO 15176317 as cited in SEQ ID NO 52865
  misc_feature (1)..(1443): Ortholog of  Ceres SEQ ID NO 13518893 as cited in SEQ ID NO 58108
  misc_feature (1)..(1443): Ortholog of  Ceres SEQ ID NO 12617152 as cited in SEQ ID NO 63555
atcaaagtttgggataatagtcttatctctttcatccacactaatataaataggatacatacacaacacattacaagaagataaatccaaacttttctttctctctctttcgtttcccattttttctcttattactcatagatcctgattgatctgaaaaaatggtgaagaagcaatcgccattacacgttgtcggtgtgtctgttttgatggtgttgttatgcagtgttaattacagtctctgtgaaaagatcaaaacgtataagctcacaagaggaagcttaagtgttactttcactaactatggtgctgtcatgacctctcttctcctccctgacagacatggaaaacaagacgatgttgttcttggatttgatactgttgatggttacaagaatgatacaacatattttggagcaattgtgggaagagtggctaatagaataggaggtgctaaattcaagttaaatggtcatctctacaaaaccgatcccaacgaaggccgtaacactctccatggtggttcaaagggatttagtgatgtgatttggtcagtccaaaagtatgttcccactagtcacattactttcacatacgatagcttcgacggtgaagaaggttttccgggcaatgtgacggtgaaagtgacgtacatgttgatcggagaaaacaaactcggtgtaaaaatggaagcaaagccactcaacaaacctacaccaatcaacttagctctccacacttactggaacctccacagccacaactccgggaacatcctctcccacaaaattcaactcctcgccggaaaaatcactcccgtcgacgacaaactcattcccaccggagaaatcacctccattaccggaactccttacgatttcctcgagccacgtgagatcggtagccggatccacgaattacccggcggttacgacatcaattacgtgatcgacggaccgatcgggaaacatctgaggaaaactgcggttgtgacggagcaagtcaccgggaggaagatggagctgtggacgaatcagcctggtgttcagttttacacgagtaatatgatgaaacgtgtcgtcggtaaaggtaaagccgtttatgagaaatacggtggcttgtgtttggagactcaaggcttcccagattccgtcaatcacaagaactttccgtcgcagattgttaatcccggcgagagttatttgcatgttatgctcttcagattcactgctcactaatcgggtcgggtcgggtcgggtggggtcgggttattagggcttaatatttccgaataaactcgccaacatcgttgtaatgcaaaattgcaaatgccaataaaaatattcgacttttgcaggaagttgttaaaagttgtttattctcaatggttcgttttgcaaattgttaaaaatattatttttcacaagaaagttctaaatgttt

SEQ ID NO: 98027 - protein, 358 aa, Arabidopsis thaliana; identical to SEQ ID NO: 86160
  peptide (1)..(358): Ceres Seq. ID no. 13579329

SEQ ID NO: 98028 - protein, 342 aa, Arabidopsis thaliana; identical to SEQ ID NO: 86161
  peptide (1)..(342): Ceres Seq. ID no. 13579330

SEQ ID NO: 98029 - protein, 307 aa, Arabidopsis thaliana; identical to SEQ ID NO: 86162
  peptide (1)..(307): Ceres Seq. ID no. 13579331

SEQ ID NO: 98030 - DNA, 797 bp, Arabidopsis thaliana
  misc_feature (1)..(797): Ceres Seq. ID no. 13579340
  misc_feature (1)..(797): Ortholog of  Ceres SEQ ID NO 13660598 as cited in SEQ ID NO 67591
aatttctcctatttccaaaatcttctatttctctctaaaaaaatgtcgaagaacgtttcgagaaactgcttaggatcaatggaagacatcaagaaagtattccaacgattcgacaaaaacaacgatgggaaaatctctatcgatgagcttaaagacgtgataggagctctctctccaaacgcttcacaagaagaaaccaaagcaatgatgaaagagtttgatcttgacggtaatggtttcattgatttggatgagtttgttgctttgtttcaaatcagtgatcaaagtagcaacaatagtgcgattagagatttgaaagaagcttttgatttgtatgatttggatcgtaatggaaggatctcggctaatgagttacactcggttatgaagaatcttggtgagaagtgttcgattcaagattgtcaaaggatgattaataaagttgattctgatggtgatggttgtgttgattttgaagagtttaagaagatgatgatgattaatggtagtgcttgatagaatcgatttagaatttggaaaagtgatatccattttttgtttgtaaatattgtgttttatgatttcgttaatctaatcttttttaggatttaggttaattaggagtttttaattttttaggttttatcgattaatctagaagaatctctatgttgcttctttaatggctctctgacctaatgttagggaatattgttgatgaccttaaataatcgattaacaatacaaaaaaaaaccttttttaaagacatttattaataaggttggtttggtttggt

SEQ ID NO: 98031 - protein, 171 aa, Arabidopsis thaliana; identical to SEQ ID NO: 38308
  peptide (1)..(171): Ceres Seq. ID no. 13579341

SEQ ID NO: 98032 - protein, 157 aa, Arabidopsis thaliana; identical to SEQ ID NO: 38309
  peptide (1)..(157): Ceres Seq. ID no. 13579342

SEQ ID NO: 98033 - protein, 145 aa, Arabidopsis thaliana; identical to SEQ ID NO: 38310
  peptide (1)..(145): Ceres Seq. ID no. 13579343

SEQ ID NO: 98034 - DNA, 1287 bp, Arabidopsis thaliana
  misc_feature (1)..(1287): Ceres Seq. ID no. 13579352
  misc_feature (1)..(1287): Ortholog of  Ceres SEQ ID NO 13597476 as cited in SEQ ID NO 65132
atgtctttctttttttttttttttttttggcctaactctggctttgagagagacagagaggtagagagagtaacgatggctgctgtagaagaagtagacgatgttggaagaacaatagaggaagagactgtgtgtgaaaaaagagaaagaggagaggaagctgaaacattgactccatgggagcaacactccagcatcataagcatccctcgattcgactacaaagctccctcttctctgcttcatcattctcattccggattcctcgtcacctgcaacatcaaaagggagaaaagtgctactaaagaggtcatgtccatccttggaaagtatattgggtccatgcatgaggagaaacctgaagttctaaactctactgcatccaaaaaacaaaaagtttgtgcacaagagacagaggaaggcggagagaagactgtacctcttgagaatgatgccttgcaggaaacaggtgaaaatccaaatgttgaggatcttaaattagcaaatgaagaacacaattctctcatgtcattggttaagctaacaaagagtggcttgcttctctttactttccctgttgaaaactctcccaatacaacgaatatcgtatcacgagtcttccagtctatggaatctggagctttgaaggcaccaatctggtgccatcggatattcccagttcaagctacttgtggtttgacagagaaagaacttcgggaaacagtatcaaagcttgttcagcggtttgtcaatgataaagacaatacactatcaaaacctgtgaagtttgcagctgggtatcaacgtagaggtgcggaggagacgaaaggaaagattcggaaagacgcttcagatgttctagttcaatgtccgttgctggaccgcattaaatgctttgaaactgtggcagctggagtgaaagacattgtaccagattcagttgtggatctcaaatctccagagttatgtgttctggtggaactgttaccgctctctagaatatcaagtggctcctttgtagctgctgtttcagtgcttccacatagactcgttagcacaaagccgaaactctgcatcaagcctctagtccctgaatccaaacacaaaaagggaccaaactgacaggtgcaaaggctgatcgctgcattcgattttcgagagccaaagatatcaatagaagttgtaatctctctgtttttgtttagatatgtcttttgctttcagtatctctaatggagttaacaacaatgtctgacctatgttattcaagagaacaaagataaaccc

SEQ ID NO: 98035 - protein, 373 aa, Arabidopsis thaliana
  peptide (1)..(373): Ceres Seq. ID no. 13579353
MSFFFFFFFWPNSGFERDREVERVTMAAVEEVDDVGRTIEEETVCEKRERGEEAETLTPWEQHSSIISIPRFDYKAPSSLLHHSHSGFLVTCNIKREKSATKEVMSILGKYIGSMHEEKPEVLNSTASKKQKVCAQETEEGGEKTVPLENDALQETGENPNVEDLKLANEEHNSLMSLVKLTKSGLLLFTFPVENSPNTTNIVSRVFQSMESGALKAPIWCHRIFPVQATCGLTEKELRETVSKLVQRFVNDKDNTLSKPVKFAAGYQRRGAEETKGKIRKDASDVLVQCPLLDRIKCFETVAAGVKDIVPDSVVDLKSPELCVLVELLPLSRISSGSFVAAVSVLPHRLVSTKPKLCIKPLVPESKHKKGPN

SEQ ID NO: 98036 - protein, 348 aa, Arabidopsis thaliana
  peptide (1)..(348): Ceres Seq. ID no. 13579354
MAAVEEVDDVGRTIEEETVCEKRERGEEAETLTPWEQHSSIISIPRFDYKAPSSLLHHSHSGFLVTCNIKREKSATKEVMSILGKYIGSMHEEKPEVLNSTASKKQKVCAQETEEGGEKTVPLENDALQETGENPNVEDLKLANEEHNSLMSLVKLTKSGLLLFTFPVENSPNTTNIVSRVFQSMESGALKAPIWCHRIFPVQATCGLTEKELRETVSKLVQRFVNDKDNTLSKPVKFAAGYQRRGAEETKGKIRKDASDVLVQCPLLDRIKCFETVAAGVKDIVPDSVVDLKSPELCVLVELLPLSRISSGSFVAAVSVLPHRLVSTKPKLCIKPLVPESKHKKGPN

SEQ ID NO: 98037 - protein, 269 aa, Arabidopsis thaliana
  peptide (1)..(269): Ceres Seq. ID no. 13579355
MSILGKYIGSMHEEKPEVLNSTASKKQKVCAQETEEGGEKTVPLENDALQETGENPNVEDLKLANEEHNSLMSLVKLTKSGLLLFTFPVENSPNTTNIVSRVFQSMESGALKAPIWCHRIFPVQATCGLTEKELRETVSKLVQRFVNDKDNTLSKPVKFAAGYQRRGAEETKGKIRKDASDVLVQCPLLDRIKCFETVAAGVKDIVPDSVVDLKSPELCVLVELLPLSRISSGSFVAAVSVLPHRLVSTKPKLCIKPLVPESKHKKGPN

SEQ ID NO: 98038 - DNA, 1745 bp, Arabidopsis thaliana
  misc_feature (1)..(1745): Ceres Seq. ID no. 13579366
  misc_feature (1)..(1745): Ortholog of  Ceres SEQ ID NO 13595900 as cited in SEQ ID NO 69289
actgatgtcagtcaaacaaaaataataatatatgtttttaagttcctctaatttcaatcttctaaacaacaaccctaaatccttatctctatccttgcgcttgatccagattcggttctgattggagctgccatggaacgcatcatcggcggcaagtacaagctcggacggaagatcggcggtggttcgttcggagagatttttctagctacgcacgtcgataccttcgagatcgtagctgttaagatcgagaacagtaaaacaaagcatcctcaacttctctatgaagctaagctatatagaattcttgaaggaggaagtggaattccgcgcataaaatggtttggagttgatggaacagagaatgctttagtgatggatttgctcggtccaagtctcgaagatcttttcgtctactgtgggaggaaattctcaccaaagacagtcttgatgttggctgatcaaatgctaacaagaatagaatttgtacattcgaaaggatatctgcatagagatattaaacccgataacttcctcatgggcctaggtcggaaagcaaatcaggtttatctaattgactttggacttgccaaaagatatcgggatgccaacaccaaccgccacatcccttacagggaaaacaagaatttaacaggaactgcacgatatgcaagttgcaatacacatcttggaattgagcaaagtcgacgggatgatctagaatcgctgggatatgtgcttctgtatttcctaagaggaagtcttccatggcagggtcttaaggctgttgacaagaagcaaaagtatgataaaatctgtgagaagaagatatcaactcccattgaggtgctatgcaaaaatcaccctgtggagtttgcatcatattttcattactgccatacactgacatttgatcagcgcccagattatggattcttgaagcggctttttcgtgatttattttcgcgggaaggatatgagttcgactatatatttgactggactatcataaagtatcaacaagcacagaaatctagaaatcagtctcaggcagttcctgggtctagcaatcctcgtgcaatgccagtggacacaagcaatcatcggggaggaccaaatatttcttatgaagccgaggcctctgaacgcgtcagatcggctaatgccattggtccaagcccacagataaataataatactgctgcagggaggactccggggtttgatcaccctgtccacaagaatatgaacatgccatccacttcattatctcctgcgggtacctcaaaaagaaatgtcggacccgaaacctcaaattctggatatgggagtgggaatagaactggttggacttcgtcattcatgtctccagagaaatgatgcaaagaaaatgtagctttttcctgaaatggtgagtgagatgatgcgctgttaatgtgactccgtgcccttaattcacctctgaaactacagcagaaatcagaacttggtgtcactaacacctttgtatctcctccacctttggctggaagaaagatgcaatggtttctatgtaaattctctgaagtgtgtgtggacaagaaggcgttggttgaagcatttgtgtttacacacacaagacatgaaagtgtatgtgtgcttttcattcaaagatttcccccaacctttgtataattcttacacccggatgtgtaatcttgttatgtgattcatacatatcatttttagctactctttgctatgcg

SEQ ID NO: 98039 - protein, 415 aa, Arabidopsis thaliana
  peptide (1)..(415): Ceres Seq. ID no. 13579367
MERIIGGKYKLGRKIGGGSFGEIFLATHVDTFEIVAVKIENSKTKHPQLLYEAKLYRILEGGSGIPRIKWFGVDGTENALVMDLLGPSLEDLFVYCGRKFSPKTVLMLADQMLTRIEFVHSKGYLHRDIKPDNFLMGLGRKANQVYLIDFGLAKRYRDANTNRHIPYRENKNLTGTARYASCNTHLGIEQSRRDDLESLGYVLLYFLRGSLPWQGLKAVDKKQKYDKICEKKISTPIEVLCKNHPVEFASYFHYCHTLTFDQRPDYGFLKRLFRDLFSREGYEFDYIFDWTIIKYQQAQKSRNQSQAVPGSSNPRAMPVDTSNHRGGPNISYEAEASERVRSANAIGPSPQINNNTAAGRTPGFDHPVHKNMNMPSTSLSPAGTSKRNVGPETSNSGYGSGNRTGWTSSFMSPEK

SEQ ID NO: 98040 - protein, 334 aa, Arabidopsis thaliana
  peptide (1)..(334): Ceres Seq. ID no. 13579368
MDLLGPSLEDLFVYCGRKFSPKTVLMLADQMLTRIEFVHSKGYLHRDIKPDNFLMGLGRKANQVYLIDFGLAKRYRDANTNRHIPYRENKNLTGTARYASCNTHLGIEQSRRDDLESLGYVLLYFLRGSLPWQGLKAVDKKQKYDKICEKKISTPIEVLCKNHPVEFASYFHYCHTLTFDQRPDYGFLKRLFRDLFSREGYEFDYIFDWTIIKYQQAQKSRNQSQAVPGSSNPRAMPVDTSNHRGGPNISYEAEASERVRSANAIGPSPQINNNTAAGRTPGFDHPVHKNMNMPSTSLSPAGTSKRNVGPETSNSGYGSGNRTGWTSSFMSPEK

SEQ ID NO: 98041 - protein, 309 aa, Arabidopsis thaliana
  peptide (1)..(309): Ceres Seq. ID no. 13579369
MLADQMLTRIEFVHSKGYLHRDIKPDNFLMGLGRKANQVYLIDFGLAKRYRDANTNRHIPYRENKNLTGTARYASCNTHLGIEQSRRDDLESLGYVLLYFLRGSLPWQGLKAVDKKQKYDKICEKKISTPIEVLCKNHPVEFASYFHYCHTLTFDQRPDYGFLKRLFRDLFSREGYEFDYIFDWTIIKYQQAQKSRNQSQAVPGSSNPRAMPVDTSNHRGGPNISYEAEASERVRSANAIGPSPQINNNTAAGRTPGFDHPVHKNMNMPSTSLSPAGTSKRNVGPETSNSGYGSGNRTGWTSSFMSPEK

SEQ ID NO: 98042 - DNA, 1533 bp, Arabidopsis thaliana
  misc_feature (1)..(1533): Ceres Seq. ID no. 13579374
  misc_feature (1)..(1533): Ortholog of  Ceres SEQ ID NO 13593889 as cited in SEQ ID NO 53305
  misc_feature (1)..(1533): Ortholog of  Ceres SEQ ID NO 13581959 as cited in SEQ ID NO 56156
acccccccgtctttttgttcaactcctacacactccaatcacacaattcacaacccattgagaaaccaataaaataacctcaatcaaaaaaaaaaaaaaaaaaaaaaaaaagatgaaaatctcaatttagtaaaggagaaaaaagccatttcgaataacttgaaaaggttttggttttgcagaagaaaatgaaggagaaggcggagagtggtggaggagtaggatacgtgagagcagatcagatagatttaaagagtctggacgagcaattgcagagacacttaagtaaagcatggacgatggagaagaggaagagtttgagtgatggtgaagataacgtcaataacacccgacataaccagaacaacttcggacatcgacagcttgtgtttcagaggccgcttcttggtggtggatatagcaacaacaacaacagcagcaagaacgacataattaggtcgaccgaggttgagaagtcgaggagagagtgggagattgatccttctaagcttataatcaaaagtgtgattgctagaggtacttttggtacggttcaccgtggaatctacgatggtcaagatgtcgccgtaaaactactagactggggagaagaggggcacaggtcagacgcagagatagcttcgcttagagctgctttcactcaagaagttgctgtgtggcataagctcgaccatcccaatgtcaccaagttcataggagcggcgatggggacatcggagatgagcatacaaacggaaaacgggcaaatgggaatgccgagtaacgtttgctgtgtcgtggttgagtattgccccggcggcgctctcaagtcattcctcatcaaaactcgccgccgcaaactcgccttcaaagtcgttatccaactctcccttgatcttgctcgcgggttgagttacttgcactctcagaagattgtgcatagagacgtgaaaacggagaacatgcttttagataagtcacgcaccttaaagattgcagattttggtgtggctcgtctagaggcttcaaaccctaacgacatgaccggtgagaccggaaccttgggctatatggctcctgaggtgctaaacgggagtccctacaacagaaagtgcgatgtgtatagctttgggatatgtctttgggagatttactgttgcgacatgccttatcctgacctcagcttctccgaagtaacctccgccgtcgtccgccagaatttgagaccagagatacctagatgttgtccaagctcgctggcgaacgtgatgaagaggtgttgggatgcgaatccggagaagcggccggagatggaggaagttgtggctatgttggaggctattgatacttccaaaggcggaggaatgattcctcctgaccaacaacaaggctgtttctgtttccgccgacaccgaggcccatgaagtacacacacatgcactacgttcccattattattataattaactcttactattttggaagaagagagattatttttaaaagttaattgtggggtaattaaaatgtttt

SEQ ID NO: 98043 - protein, 411 aa, Arabidopsis thaliana; identical to SEQ ID NO: 36421
  peptide (1)..(411): Ceres Seq. ID no. 13579375

SEQ ID NO: 98044 - protein, 374 aa, Arabidopsis thaliana; identical to SEQ ID NO: 36422
  peptide (1)..(374): Ceres Seq. ID no. 13579376

SEQ ID NO: 98045 - protein, 232 aa, Arabidopsis thaliana; identical to SEQ ID NO: 36423
  peptide (1)..(232): Ceres Seq. ID no. 13579377

SEQ ID NO: 98046 - DNA, 1824 bp, Arabidopsis thaliana
  misc_feature (1)..(1824): Ceres Seq. ID no. 13579380
  misc_feature (1)..(1824): Ortholog of  Ceres SEQ ID NO 13660287 as cited in SEQ ID NO 67316
aaaacagaaagaaaaaaaaaatgaagaagagtatcgaaactccgttattgttgaacaccaaacaatcacaagacgaagataaagaaaaaataagatgggagaagatgaagaaagttgcttcaatggctgctccaatggtcgccgtgaacatgtctcaataccttcttcaagcaacttctacaatgatcgtcggtcaccggagcgaactcgctctcgccggaatcgctctaggaagctcctttgctaatgttaccggctttggtgttctttttggactttcaggttcattggaaacactatgtggtcaagcatatggagcaaaacaatatcacaagcttggatcttacactttcacttcaatagttttccttttgattatctctgttccgatttcgattctttggatgttcatgaaccagatcttgctgttgcttcatcaagatcctcaaatagcagagttagctggtgtgtactgtctctggctggtaccagctttattcggttactctgttctcgagtcgttggttcgatattttcagtcacaaagcttgatttatccaatggtcttgagctctctagctgctctgtctttccatgttcctctctgttggctaatggttcataaatttgattttggagccaaaggagcggctgcgtctatcggtatctcttactggctcaacgcggtttttctttgggtttatatgaaacgctctagtcgttgtgtcgaaacgcggatttatatgtccaaggatgtttttgttcatacaaatatcttctttcaatttgccattccttctgcaatgatgtgttggtaagtatgtacaactttattaaaaatccatatagaattaaccaagtgatggtagtctagtggtggtcattgttttgtggataggtgaaagatttaaaatcttaggttacataaataaatgtgtaatggattttttttcccttcactaatattctattgacacttattttcttattgctcttgcttccttcaatagccttgagtggttagctttcgaggtcattactttgctgtctggtcttctacccaactcaaagctcgaaacatcggttatttcgatttgcctcacgacctcttcattgcattacaatctagtaaatggaattggtgatgcagcaagcaccaatgtggctaatgagctaggagctgggaatccgcgaggggctcgtgattctgctgcggctgcaatcataattgcagctgttgagtcagttattgtgagctctagtctgttcttgtctcgcagtgtgtggccttatgcatatagcaatgtggaggaagtaattagttatgtgactgatatcactcctattctttgtatctcaatcctcatggacagcttcttgaccgtcctctccgggattgtgagaggaacagggtggcaaaaaattggagcttatgtgaacataacctcttattatgtcattggtattcctgttggacttctattgtgttttcatcttcacttcaatgggaaaggactttgggctggtttagtcacaggatcaacattacaaactctaatcctatttcttgttattggatttaccaattggagcaaagaggcaattaaggctagggagagaattggtgatgagaaagtttggagacatgactcattgcttaattgaagaaaaaaagaaatacaaacttttgggggattttgattgcttctttttttgtgtgtgtttgtgcaataaccttcagttgattgtaatttatattgaaagtacattatagtctttcatatgatattagagtgtaagaaagtttgaaaatatatctcagtt

SEQ ID NO: 98047 - protein, 271 aa, Arabidopsis thaliana
  peptide (1)..(271): Ceres Seq. ID no. 13579381
NRKKKKMKKSIETPLLLNTKQSQDEDKEKIRWEKMKKVASMAAPMVAVNMSQYLLQATSTMIVGHRSELALAGIALGSSFANVTGFGVLFGLSGSLETLCGQAYGAKQYHKLGSYTFTSIVFLLIISVPISILWMFMNQILLLLHQDPQIAELAGVYCLWLVPALFGYSVLESLVRYFQSQSLIYPMVLSSLAALSFHVPLCWLMVHKFDFGAKGAAASIGISYWLNAVFLWVYMKRSSRCVETRIYMSKDVFVHTNIFFQFAIPSAMMCW

SEQ ID NO: 98048 - protein, 265 aa, Arabidopsis thaliana
  peptide (1)..(265): Ceres Seq. ID no. 13579382
MKKSIETPLLLNTKQSQDEDKEKIRWEKMKKVASMAAPMVAVNMSQYLLQATSTMIVGHRSELALAGIALGSSFANVTGFGVLFGLSGSLETLCGQAYGAKQYHKLGSYTFTSIVFLLIISVPISILWMFMNQILLLLHQDPQIAELAGVYCLWLVPALFGYSVLESLVRYFQSQSLIYPMVLSSLAALSFHVPLCWLMVHKFDFGAKGAAASIGISYWLNAVFLWVYMKRSSRCVETRIYMSKDVFVHTNIFFQFAIPSAMMCW

SEQ ID NO: 98049 - protein, 237 aa, Arabidopsis thaliana
  peptide (1)..(237): Ceres Seq. ID no. 13579383
MKKVASMAAPMVAVNMSQYLLQATSTMIVGHRSELALAGIALGSSFANVTGFGVLFGLSGSLETLCGQAYGAKQYHKLGSYTFTSIVFLLIISVPISILWMFMNQILLLLHQDPQIAELAGVYCLWLVPALFGYSVLESLVRYFQSQSLIYPMVLSSLAALSFHVPLCWLMVHKFDFGAKGAAASIGISYWLNAVFLWVYMKRSSRCVETRIYMSKDVFVHTNIFFQFAIPSAMMCW

SEQ ID NO: 98050 - DNA, 1105 bp, Arabidopsis thaliana
  misc_feature (1)..(1105): Ceres Seq. ID no. 13579388
  misc_feature (1)..(1105): Ortholog of  Ceres SEQ ID NO 13662949 as cited in SEQ ID NO 64276
gcacgagtacgcagaaattctgtctgcgtctccgaaccaactctatccttctctcaatccgatccgttccgttcactacttgtctcaatttcgaaccaattggatcgcatcttttaggggctcaaacctttggtgacgaggacgaggaagaagattgtcgcatctgatttatatcggaaaaaggtctcttgccggaaaggacacgatccgctttcataaaggagagattttgacagattcagtagacgccatggatgtgcctagctcttgggatgctttacggaaacaggctagaaagattgaagctcagcttgacgagcagatgcattcatatcgtagacttgtttccacaaaggctttatcaaaatcagatggtaatgagagtgatcttgaagctgggattgacttacttcttaggcaactgcaacaagttaatgctcagatgcaagcatgggtatcttctggtgggtcagaaatggtctcccatactttaactcgacatcaagagatccttcaagatctgacacaggagttttatcgacaccgctccagtcttagagcaaaacaagagcatgcttcacttcttgaggactttagagaatttgatcggactagattagatttagaagatggatatgggtctgaacaagccctgatcaaggaacatatgggaatcaaccgcaatacagctcagatggacggtgtcatttcacaagctcaggcaacactcggtacgcttgtgtttcaacgttcaacttttggaggcatcaactcaaagcttagcaatgtcgccagccgtctacctacggtgaacactattctggcagcgataaagaggaaaaagtcgatggatacaatcattctttcactcgttgcggctgtatgcacatttctcatattcatttactggataaccaagtagaatttgcccatttctttcgtttcatctttatgttgggccacgtctggttttcccatgatgtcaatttgttctgcaattatcggtgttctagtaaagaatctaaagatcaaaaacataaatattgtgtacagaaaatttcatccctgtctttgcagtctagacgagcttgttaaatgttgagtt

SEQ ID NO: 98051 - protein, 223 aa, Arabidopsis thaliana; identical to SEQ ID NO: 86087
  peptide (1)..(223): Ceres Seq. ID no. 13579389

SEQ ID NO: 98052 - protein, 199 aa, Arabidopsis thaliana; identical to SEQ ID NO: 86088
  peptide (1)..(199): Ceres Seq. ID no. 13579390

SEQ ID NO: 98053 - protein, 159 aa, Arabidopsis thaliana; identical to SEQ ID NO: 86089
  peptide (1)..(159): Ceres Seq. ID no. 13579391

SEQ ID NO: 98054 - DNA, 1613 bp, Arabidopsis thaliana
  misc_feature (1)..(1613): Ceres Seq. ID no. 13579395
  misc_feature (1)..(1613): Ortholog of  Ceres SEQ ID NO 14302734 as cited in SEQ ID NO 66748
aaaaacaaaaaaacaaagaggatttaagggttacgagtcgcctccccaaaacccttgtccctagtctcttctgcttcttcttcttcaaaatctctctcttcaccaaatcctcagaagatgagcaacgacaaggatagcttcaacgtctccgatcttactgctgctcttaaggacgaggatcgagctggccttgtcaatgctctaaagaacaagctgcagaatctggctggtcagcgttctgatgtgctcgagaatctgactcccaatgtgagaaagcgcgttgatgccttgagggatatacagagccaacatgatgaactagaggcaaaattccgtgaggagagagctattcttgaagccaagtatcaaacgctgtatcagcctttgtatgtcaagcgttatgagattgtgaatggcactactgaagttgaactggctccagaggatgataccaaggtggaccaaggagaggagaaaactgcagaagagaaaggagttccaagtttctggctgacagctctgaaaaataacgatgttatttccgaggaggtcacagagcgtgatgaaggggctctcaaatatcttaaagatattaagtggtgcaagattgaagagcctaaaggattcaaacttgagtttttctttgacacgaatccgtattttaagaacactgtcttgacaaagtcttatcatatgattgatgaagatgagccactgcttgagaaggctatggggacagaaattgattggtatcctggaaagtgtctaactcagaagattctcaagaagaagcctaagaaaggttcaaagaatactaaaccaatcaccaaactcgaagattgtgaaagcttcttcaacttctttagtcctccagaagttccggatgaagatgaagatatcgacgaggaaagagctgaggatcttcaaaacctgatggaacaagattatgacatcggatctactattcgggaaaagattattcctcgtgctgtctcatggtttactggtgaggctatggaagcagaggattttgaaatagatgacgatgaggaagatgacattgatgaggatgaagatgaggaagacgaagaggatgaggaggacgatgatgatgaggatgaagaagaaagcaagaccaaaaagaagccatcaatcggcaacaagaagggagggagatctcagatagttggtgaaggtaaacaagatgagaggccacccgaatgcaagcaacagtaatcttttactacgctctaccagacataaaaggattgcgtgaaaatataattcaggtcattctctgttcatcaagaatgaggattgagaaaaggttttgggatttttaaaagtgaaattcatcttgtaggagtttcgttcgtttttctattggtgtgtttattttctctaaagcactttaataatataccttggtatttaatttatgaatcaagcatcatcatccctagtctctgcattcactacttcatcccctacctaaactttgtcgacgaaagagattttaataaccatttagatagtaatgggtagtgggaatgatcattattcttttgttcaccgtcctttgattttcaatggtaaccattttgttgtgtaag

SEQ ID NO: 98055 - protein, 372 aa, Arabidopsis thaliana
  peptide (1)..(372): Ceres Seq. ID no. 13579396
MSNDKDSFNVSDLTAALKDEDRAGLVNALKNKLQNLAGQRSDVLENLTPNVRKRVDALRDIQSQHDELEAKFREERAILEAKYQTLYQPLYVKRYEIVNGTTEVELAPEDDTKVDQGEEKTAEEKGVPSFWLTALKNNDVISEEVTERDEGALKYLKDIKWCKIEEPKGFKLEFFFDTNPYFKNTVLTKSYHMIDEDEPLLEKAMGTEIDWYPGKCLTQKILKKKPKKGSKNTKPITKLEDCESFFNFFSPPEVPDEDEDIDEERAEDLQNLMEQDYDIGSTIREKIIPRAVSWFTGEAMEAEDFEIDDDEEDDIDEDEDEEDEEDEEDDDDEDEEESKTKKKPSIGNKKGGRSQIVGEGKQDERPPECKQQ

SEQ ID NO: 98056 - DNA, 1812 bp, Arabidopsis thaliana
  misc_feature (1)..(1812): Ceres Seq. ID no. 13579397
  misc_feature (1)..(1812): Ortholog of  Ceres SEQ ID NO 13599900 as cited in SEQ ID NO 531
  misc_feature (1)..(1812): Ortholog of  Ceres SEQ ID NO 14304811 as cited in SEQ ID NO 53097
  misc_feature (1)..(1812): Ortholog of  Ceres SEQ ID NO 13659971 as cited in SEQ ID NO 67565
  misc_feature (1)..(1812): Ortholog of  Ceres SEQ ID NO 13500385 as cited in SEQ ID NO 67583
ggttttggcacattaccctctttcctgttaaagttgtctcgtctccttctcgtctccttcctcaagcatattctctgcgcttaaagtactttgatggcattgggacacttgtgcagcatccactgtttccttaaaatagggaaacaagaagagcttcttgtcctagatattggtttgcctattcccagtttcttcctcattaactttattggtagcagagcctcatccatctggtgaacttgtgaagcttcctctgtgattcttttggcgattggttagaaatatggtttcttctcagtgttctgttgcaaacaaaaaccagactgggaagccgtttcagaaacatctatctttatccatcagccctccaaaatctgtcttgggtgataaccttgagcttcaattctctgatgtctttggaccaatgcctgaagctaactctgaagaggcctgtgatgttgcttacgacgagcctgctgttgtctacagtcgatcccactcattggttggcccgtctttggttgttagccattctttgaagatgaacaagctcactttacgagaaactgaggactcagttgacttggtggagtgtgttgaaggtgaatcgataaaagagaacgatgaattctctggtaatgatgacactgacagtgagaaatctccagaggaggtctcaggtgtagtaggcattgaggactttgaggtattgaaggttgtgggacaaggtgcatttggaaaagtgtaccaggtgaggaaaaaagacacgtctgagatatacgcgatgaaggtcatgagaaaagataaaattgttgagaagaatcatgctgaatacatgaaagccgagcgcgatattctaaccaaaatcgatcatcctttcattgtgcaacttaaatactcttttcagaccaaatacagattgtatcttgttcttgactttataaacggaggtcatcttttcttccagctctatcaccaagggcttttcagggaggacttggctcgtgtgtacactgcagaaatcgtctctgcagtttcccatctccatgagaaaggcataatgcatagagatcttaaacctgaaaacatactcatggacgtagatggccatgtgatgttaactgattttggtttagcaaaagaatttgaagaaaacacaagatcaaactccatgtgtgggactacggagtatatggcccctgagattgttcgtggaaaaggacatgataaggctgccgactggtggagtgtaggaatccttctgtatgagatgctcactggaaagccgccgtttctcgggagcaaaggaaagatacagcagaaaatcgttaaggacaagatcaagcttccacagtttctgtctaatgaagctcatgccttgctgaaagggctgctgcaaaaagagccagaaaggagactgggaagtggaccgagcggagcagaggagataaaaaaacacaaatggttcaaggcgataaactggaagaagctggaggctagagaagtacaaccaagtttcaagccggcggtttcgggaagacaatgcatagctaattttgacaagtgttggactgacatgtctgttttggattctccagcaagtagtcccaactctgatgctaaggcgaacccttttacaaacttcacatacgtcaggcctcctcattcattccttcatcggaccacatccaacttgtagatgaactataatatgttacccccgcttctgtttttgtaatccgaaacatatgaacatgcacaaaatcaacggttgtttgaagaaacctatttctcgatttaatatattatact

SEQ ID NO: 98057 - protein, 471 aa, Arabidopsis thaliana; identical to SEQ ID NO: 80387
  peptide (1)..(471): Ceres Seq. ID no. 13579398

SEQ ID NO: 98058 - protein, 424 aa, Arabidopsis thaliana; identical to SEQ ID NO: 80388
  peptide (1)..(424): Ceres Seq. ID no. 13579399

SEQ ID NO: 98059 - protein, 385 aa, Arabidopsis thaliana; identical to SEQ ID NO: 80389
  peptide (1)..(385): Ceres Seq. ID no. 13579400

SEQ ID NO: 98060 - DNA, 1236 bp, Arabidopsis thaliana
  misc_feature (1)..(1236): Ceres Seq. ID no. 13579413
  misc_feature (1)..(1236): Ortholog of  Ceres SEQ ID NO 12336358 as cited in SEQ ID NO 20733
  misc_feature (1)..(1236): Ortholog of  Ceres SEQ ID NO 12623467 as cited in SEQ ID NO 60951
  misc_feature (1)..(1236): Ortholog of  Ceres SEQ ID NO 14309133 as cited in SEQ ID NO 0
tctcggaccaatatacaaaaccgtgtgttcttctctgtatcttattaaatcaaaaccaattttgttcttcttctttgattcttttttccttcattttttaacgtatcttgagagatcgacgatgtcgtcgaagaaatccctagttcaaagtctcttcaacatttccaaaacctactccaggatttctggtcttacccgaatgcgtccgaccaaatccggcggcattcctcccgacgccggagattctggaatccgccgcagatttctccacaagagggcatttttctcgccggagatagttcctaaaggtggtaacttgatggagaaactcagggaattgactttgtccaataataatcgtattagactcgacgagatgttaccgccaccttcgccgaagaaatcatcaccggagtttttcccggcggtcacggtggaagacgtgaagaagctcatgagagcagcggaaatggagctggtgaaatcgaagctgagagagattggcaagaactgggttccttattcggagtttgttcgggtctgcggagaatacagttcggatcctgaacaaggtaaccgggtcgcgaatatgcttgacgaagctggaaacgtcatcgttttgggaaaactcgtctgccttaaacccgaagagctaacaagcgccatggctggtctgattccgacactcgaacccagtctcgacgccgagacaagacaagagttcgaacaacttgagatcataaaatcagatatcgacaaaagagccgatgatctggttcgaaaagaattatgggccggattaggcctaataatggcccaaacagttggattttttaggctgacgttttgggaactgtcgtgggacgtgatggaacccatatgcttctacgtaacttcgacatatttcatggctggttacgccttcttcctccgaacttcaaaggaaccttcctttgaaggtttttacaaaagccggttcgagacgaagcagaaacgtttgattaaaatgcttgatttcgatatcgatcgatttaccaagctacagaagatgcatcgtccaaatttgactaaatctggtcgttgttgatcgtaattcttttcttcttctttttcctaaatcggatgctaaattaatgtatagacgactgaaattttcgtagagaataattagttttagagggataaaaaaaagtcttctcatgcgggggtaacactaaataactaaatcaattaatt

SEQ ID NO: 98061 - protein, 361 aa, Arabidopsis thaliana
  peptide (1)..(361): Ceres Seq. ID no. 13579414
LGPIYKTVCSSLYLIKSKPILFFFFDSFFLHFLTYLERSTMSSKKSLVQSLFNISKTYSRISGLTRMRPTKSGGIPPDAGDSGIRRRFLHKRAFFSPEIVPKGGNLMEKLRELTLSNNNRIRLDEMLPPPSPKKSSPEFFPAVTVEDVKKLMRAAEMELVKSKLREIGKNWVPYSEFVRVCGEYSSDPEQGNRVANMLDEAGNVIVLGKLVCLKPEELTSAMAGLIPTLEPSLDAETRQEFEQLEIIKSDIDKRADDLVRKELWAGLGLIMAQTVGFFRLTFWELSWDVMEPICFYVTSTYFMAGYAFFLRTSKEPSFEGFYKSRFETKQKRLIKMLDFDIDRFTKLQKMHRPNLTKSGRC

SEQ ID NO: 98062 - protein, 321 aa, Arabidopsis thaliana; identical to SEQ ID NO: 86339
  peptide (1)..(321): Ceres Seq. ID no. 13579415

SEQ ID NO: 98063 - protein, 295 aa, Arabidopsis thaliana; identical to SEQ ID NO: 86340
  peptide (1)..(295): Ceres Seq. ID no. 13579416

SEQ ID NO: 98064 - DNA, 439 bp, Arabidopsis thaliana
  misc_feature (1)..(439): Ceres Seq. ID no. 13579417
  misc_feature (1)..(439): Ortholog of  Ceres SEQ ID NO 13593557 as cited in SEQ ID NO 175
aaaaaaaaaaacgcaaaaaccaaagatgggtgagatgatcaaagccagacgcatactcctcttctccatcgtattcctcttcttcttctctcaggcctttcttttgtgttcagctgagggtgagcatggctcaagaaatctcgcagtggtgatgaagaaaagggtgaaatacagaggacctcgcaacacaacaacatcctctgcagcctcaactattatgttcccaggctccttccatattggtgctgcttcctctttactccttgctcttcttttataagctcccttgtagtgatcattattgtactgtttgacaatgattcatgtaatttgcttttctcgattgattttgtagaaatttctcaaatggtctaaaattctgtttgtaaattatttgctctgtttcagtattgtgaaagttaataagatatttgaagct

SEQ ID NO: 98065 - protein, 92 aa, Arabidopsis thaliana
  peptide (1)..(92): Ceres Seq. ID no. 13579418
KKKTQKPKMGEMIKARRILLFSIVFLFFFSQAFLLCSAEGEHGSRNLAVVMKKRVKYRGPRNTTTSSAASTIMFPGSFHIGAASSLLLALLL

SEQ ID NO: 98066 - protein, 84 aa, Arabidopsis thaliana; identical to SEQ ID NO: 27916
  peptide (1)..(84): Ceres Seq. ID no. 13579419

SEQ ID NO: 98067 - protein, 81 aa, Arabidopsis thaliana; identical to SEQ ID NO: 27917
  peptide (1)..(81): Ceres Seq. ID no. 13579420

SEQ ID NO: 98068 - DNA, 1904 bp, Arabidopsis thaliana
  misc_feature (1)..(1904): Ceres Seq. ID no. 13579424
  misc_feature (1)..(1904): Ortholog of  Ceres SEQ ID NO 15169627 as cited in SEQ ID NO 64517
  misc_feature (1)..(1904): Ortholog of  Ceres SEQ ID NO 14307952 as cited in SEQ ID NO 66029
  misc_feature (1)..(1904): Ortholog of  Ceres SEQ ID NO 12614124 as cited in SEQ ID NO 68392
gcaaagaacaaaccagtgaaggaaaaatggagatatggttacttatcttgggctctctcttcctctctctccttctcaatttactcctctttcgccgccgtgactcctcctctcttccgttaccacctgaccctaacttcttccctttccttggaaccctccaatggctccggcaaggcttaggtggactcaacaactatctccgctccgtccaccaccgtctcggtcccatcatcacccttcgcatcacttcccgccccgctatcttcgtcgccgatcgttctcttgctcaccaggctctcgttttgaacggtgccgttttcgctgatcgtccaccggctgctccgatcagtaagattatttcgagtaaccaacataacatcagctctagtttatatggagccacgtggcgtcttcttcgccggaatctcacttctgagattcttcacccctcgcgcgtgagatcttactctcacgcgcggcgttgggttcttgagattctttttgatcgatttggtaaaagcagaggtgaagaaccgattgttgttgttgatcatcttcactatgcaatgtttgcgcttcttgttctcatgtgttttggagataagcttgacgagaaacaaatcaaacaggtggaatatgttcagagacgacagcttcttggcttttccagattcaatattctcaatctctggcctaagtttactaaattgattttgcgaaagagatgggaagagtttttccagatgcggagagagcagcatgacgttttgcttccgttgattcgtgctcggagaaagattgttgaagagagaaagaatagatcatcagaggaagaagaagacaacaaagtgtatgtacaatcatacgttgatactctgcttgagctggagcttccagatgagaagaggaagctgaacgaagatgagattgttagtttgtgttcggagtttctcaacggtgggactgatacaacggccaccgcgttgcaatggatcatggcgaacttggtgaaaaacccggagattcagaagaggttatacgaggagatcaaaagcgtagttggggaagaagcaaaggaagtagaggaagaagacgcgcaaaagatgccgtatctaaaggcagtggtgatggagggtctccggagacatcctccgggacattttgtactcccgcacagtgtaactgaggacactgtgttgggaggatacaaagtcccgaagaagggaacaattaatttcatggtggcagagattgggagggatccaatggtgtgggaggaaccaatggcgtttaagccagagaggtttatgggagaagaagaagcggtggacataaccggaagcagagggataaagatgatgccgttcggggcgggtagaaggatttgtccagggattgggctagcgatgctgcatcttgagtactatgtggcgaatatggtgagggagtttgagtggaaagaggtccaaggtcatgaagtggacttgacggagaagtttgagtttaccgtagtcatgaagcattcgcttaaggctcttgctgttcttaggagaagtcactagttgtctacttcttaaacttcagtttagtattcaccaaagactaggtgatgtatgaagaattgaagttatgggcattttgttagctgaagtcaactatggaactatcttttttattaaagtacattttgtaccttggaataaatgatagaaacaacaatccttttattttgtattaaaaggaatcttttatgacgagtgtttttacaagaaaggtacataggtctagaaaagtgtgggatttctagtgtttagtgactagatgatttagaaaagtgtgggattttgatggttgttgatacttttgttgggagaaatcgaaagagtaaaagcmtttgtggt

SEQ ID NO: 98069 - protein, 520 aa, Arabidopsis thaliana
  peptide (1)..(520): Ceres Seq. ID no. 15222681
KEQTSEGKMEIWLLILGSLFLSLLLNLLLFRRRDSSSLPLPPDPNFFPFLGTLQWLRQGLGGLNNYLRSVHHRLGPIITLRITSRPAIFVADRSLAHQALVLNGAVFADRPPAAPISKIISSNQHNISSSLYGATWRLLRRNLTSEILHPSRVRSYSHARRWVLEILFDRFGKSRGEEPIVVVDHLHYAMFALLVLMCFGDKLDEKQIKQVEYVQRRQLLGFSRFNILNLWPKFTKLILRKRWEEFFQMRREQHDVLLPLIRARRKIVEERKNRSSEEEEDNKVYVQSYVDTLLELELPDEKRKLNEDEIVSLCSEFLNGGTDTTATALQWIMANLVKNPEIQKRLYEEIKSVVGEEAKEVEEEDAQKMPYLKAVVMEGLRRHPPGHFVLPHSVTEDTVLGGYKVPKKGTINFMVAEIGRDPMVWEEPMAFKPERFMGEEEAVDITGSRGIKMMPFGAGRRICPGIGLAMLHLEYYVANMVREFEWKEVQGHEVDLTEKFEFTVVMKHSLKALAVLRRSH

SEQ ID NO: 98070 - protein, 512 aa, Arabidopsis thaliana
  peptide (1)..(512): Ceres Seq. ID no. 15222682
MEIWLLILGSLFLSLLLNLLLFRRRDSSSLPLPPDPNFFPFLGTLQWLRQGLGGLNNYLRSVHHRLGPIITLRITSRPAIFVADRSLAHQALVLNGAVFADRPPAAPISKIISSNQHNISSSLYGATWRLLRRNLTSEILHPSRVRSYSHARRWVLEILFDRFGKSRGEEPIVVVDHLHYAMFALLVLMCFGDKLDEKQIKQVEYVQRRQLLGFSRFNILNLWPKFTKLILRKRWEEFFQMRREQHDVLLPLIRARRKIVEERKNRSSEEEEDNKVYVQSYVDTLLELELPDEKRKLNEDEIVSLCSEFLNGGTDTTATALQWIMANLVKNPEIQKRLYEEIKSVVGEEAKEVEEEDAQKMPYLKAVVMEGLRRHPPGHFVLPHSVTEDTVLGGYKVPKKGTINFMVAEIGRDPMVWEEPMAFKPERFMGEEEAVDITGSRGIKMMPFGAGRRICPGIGLAMLHLEYYVANMVREFEWKEVQGHEVDLTEKFEFTVVMKHSLKALAVLRRSH

SEQ ID NO: 98071 - protein, 331 aa, Arabidopsis thaliana
  peptide (1)..(331): Ceres Seq. ID no. 15222683
MFALLVLMCFGDKLDEKQIKQVEYVQRRQLLGFSRFNILNLWPKFTKLILRKRWEEFFQMRREQHDVLLPLIRARRKIVEERKNRSSEEEEDNKVYVQSYVDTLLELELPDEKRKLNEDEIVSLCSEFLNGGTDTTATALQWIMANLVKNPEIQKRLYEEIKSVVGEEAKEVEEEDAQKMPYLKAVVMEGLRRHPPGHFVLPHSVTEDTVLGGYKVPKKGTINFMVAEIGRDPMVWEEPMAFKPERFMGEEEAVDITGSRGIKMMPFGAGRRICPGIGLAMLHLEYYVANMVREFEWKEVQGHEVDLTEKFEFTVVMKHSLKALAVLRRSH

SEQ ID NO: 98072 - DNA, 2967 bp, Arabidopsis thaliana
  misc_feature (1)..(2967): Ceres Seq. ID no. 13579425
  misc_feature (1)..(2967): Ortholog of  Ceres SEQ ID NO 13648449 as cited in SEQ ID NO 171
  misc_feature (1)..(2967): Ortholog of  Ceres SEQ ID NO 15176325 as cited in SEQ ID NO 52802
  misc_feature (1)..(2967): Ortholog of  Ceres SEQ ID NO 15176313 as cited in SEQ ID NO 52831
atgtctttcgatgagcttctaagatttgtgagtgaagtccaaggagaacggcacgcagggttggactacgtgcaagatatcttccacagcgttaaacaccacaacgtttttcatcaccatggacttgttcatctcaacgccttctatcgctacctcttcagcgataccaactctcctcttcccatgtctggccaggtgcatcatgacatgaaggcgccgttatcgcattactttgtgtacacgggacataactcttacttgactgggaaccaagtgaacagcagaagcagcgtagaaccgatcgtgcaggctctcagaaaaggcgtaaaagtgatcgagctcgacttatggcctaatccttcagggaacgctgctgaagttcgtcatggcaggacgcttacttcgcatgaagatttgcagaaatgtctaaccgccattaaggataacgcgtttcatgtgtctgactatccagtcatcatcactctcgaagatcatttgccacccaagcttcaagcgcaagttgctaagatgttaactaaaacatacagagggatgctgtttcgtcgtgtctcagagagttttaagcattttccatcaccagaagaacttaaggggaagatcctgatctctacgaagcctccaaaggagtatcttgagagcaaaactgtacacaccacaagaactccaacggttaaagagacttcgtggaacagagtagcgaacaagattcttgaagaatataaagatatggagagtgaagctgtaggatatagagacttgatagcaatccacgctgcaaactgcaaagatccttcaaaggattgcttgagtgatgatccagagaagcctatacgggtcagcatggacgagcagtggctagacactatggttaggaccagaggaacggatcttgtcaggtttacacagaggaatctggtgaggatatatccaaagggcacaagagtggactcgtcaaactacgatcctcatgttgggtggacacacggtgctcaaatggttgcttttaacatgcaaggacatgggaagcaactatggataatgcaaggaatgttcagggggaatggtggatgtgggtacgttaaaaagcctcgcatcttgctagacgagcacacactcttcgacccttgcaaaaggtttcccattaagaccactcttaaggttaagatttacactggcgaaggatgggatttggatttccatcatacacactttgatcaatactctcctccagatttcttcgtcaagattggaatagcaggagtaccgagagacacggtctcatacagaacggaaacagctgtcgatcagtggtttcctatatggggcaacgacgagttcctgtttcagctgtctgttccagaactggcgcttctgtggttcaaagtccaagactacgacaatgacacccagaatgatttcgcaggacagacatgtcttcctctgccggaactgaagtccggagttagagccgtccggcttcacgatcgaacaggcaaggcctacaagaacacgaggcttctcgtcagcttcgccttggatcctccttatacgtttcatcatcaacgcaccatggaagaagaaggcagcccagatatcatcatcgttggcgccggtatctccggcctttccaccgctgttggactacacaggcttgggatcagaagcatggtgctggaatcttcggagacactgagagcgacaggatttgcatttaccacttggttcaatgcttggaaggccatggaagctctcggcgtttctcagcatattcgcagtctccatgatcgccttgaaggatgggtggttggaacaatttctgcaggaactcctcccacagagatgctgtttccagaatccgaagaatatgagtctcgatgcgtacagaggaagctgttgttagaggctctagcaggtgagttgcctgaagagaccatcaggttttcgtctaaggttgttcatattgaattgtctggatgctacaagaaggttcatctctccgacgggaccattctcaaaaccaaggttttggtagggtgcgatggagtgtactcagtggttggtaagtggctaggcttcaaaaatcccgctacaactgcccggttagcaatccgagggctcacacattttccggaaggccatggatttgggaaaaggttcttccagttttatggagacggcgttcgttccggttttatcccatgtgaccacaacactgtctactggttcctaacccacacctccactgatatagatgaggagacaaattcggaaatcctcaaagagtttgtgctgaacaagatcaaagacttgcctgaaaacattaagaatgtggtggagaccactgatcttgatagcatggtgatgtctcaactgaagtaccgacctccatgggaactgctatggtcaaacatcacaaaagacaacgtgtgcgttgcaggagatgcacttcacccaatgactcctgatatcggacaaggaggttgctcagccatggaggatggagttatccttgctcgttgtctaggtgaagcgataaaggcaaagagtctgaaaggtgaaacagaagaaaatgaagaagagggttataagaggattgaagaaggtttgaagaagtatgcaggagaaaggaaatggagaagcattgatcttataacaacggcatatacagtaggattcatacagcagagcagagggaagtggatgaacatgttcagagacaggttcctgtcgtcttacctttctaggatgctgctgaaaaagtcccatttcgattgcggaagccttgtcccatgatgattctcaaacataagtcaaaagcttgtgattcttcttgtcatcaccaactgcagaacagttttcacctttggtttgcttcaaagactatctatctgtttagtgttatttcatataacaaactcagaattaataaagtaagtttgtgtagtg

SEQ ID NO: 98073 - protein, 937 aa, Arabidopsis thaliana
  peptide (1)..(937): Ceres Seq. ID no. 13579426
MSFDELLRFVSEVQGERHAGLDYVQDIFHSVKHHNVFHHHGLVHLNAFYRYLFSDTNSPLPMSGQVHHDMKAPLSHYFVYTGHNSYLTGNQVNSRSSVEPIVQALRKGVKVIELDLWPNPSGNAAEVRHGRTLTSHEDLQKCLTAIKDNAFHVSDYPVIITLEDHLPPKLQAQVAKMLTKTYRGMLFRRVSESFKHFPSPEELKGKILISTKPPKEYLESKTVHTTRTPTVKETSWNRVANKILEEYKDMESEAVGYRDLIAIHAANCKDPSKDCLSDDPEKPIRVSMDEQWLDTMVRTRGTDLVRFTQRNLVRIYPKGTRVDSSNYDPHVGWTHGAQMVAFNMQGHGKQLWIMQGMFRGNGGCGYVKKPRILLDEHTLFDPCKRFPIKTTLKVKIYTGEGWDLDFHHTHFDQYSPPDFFVKIGIAGVPRDTVSYRTETAVDQWFPIWGNDEFLFQLSVPELALLWFKVQDYDNDTQNDFAGQTCLPLPELKSGVRAVRLHDRTGKAYKNTRLLVSFALDPPYTFHHQRTMEEEGSPDIIIVGAGISGLSTAVGLHRLGIRSMVLESSETLRATGFAFTTWFNAWKAMEALGVSQHIRSLHDRLEGWVVGTISAGTPPTEMLFPESEEYESRCVQRKLLLEALAGELPEETIRFSSKVVHIELSGCYKKVHLSDGTILKTKVLVGCDGVYSVVGKWLGFKNPATTARLAIRGLTHFPEGHGFGKRFFQFYGDGVRSGFIPCDHNTVYWFLTHTSTDIDEETNSEILKEFVLNKIKDLPENIKNVVETTDLDSMVMSQLKYRPPWELLWSNITKDNVCVAGDALHPMTPDIGQGGCSAMEDGVILARCLGEAIKAKSLKGETEENEEEGYKRIEEGLKKYAGERKWRSIDLITTAYTVGFIQQSRGKWMNMFRDRFLSSYLSRMLLKKSHFDCGSLVP

SEQ ID NO: 98074 - protein, 876 aa, Arabidopsis thaliana
  peptide (1)..(876): Ceres Seq. ID no. 13579427
MSGQVHHDMKAPLSHYFVYTGHNSYLTGNQVNSRSSVEPIVQALRKGVKVIELDLWPNPSGNAAEVRHGRTLTSHEDLQKCLTAIKDNAFHVSDYPVIITLEDHLPPKLQAQVAKMLTKTYRGMLFRRVSESFKHFPSPEELKGKILISTKPPKEYLESKTVHTTRTPTVKETSWNRVANKILEEYKDMESEAVGYRDLIAIHAANCKDPSKDCLSDDPEKPIRVSMDEQWLDTMVRTRGTDLVRFTQRNLVRIYPKGTRVDSSNYDPHVGWTHGAQMVAFNMQGHGKQLWIMQGMFRGNGGCGYVKKPRILLDEHTLFDPCKRFPIKTTLKVKIYTGEGWDLDFHHTHFDQYSPPDFFVKIGIAGVPRDTVSYRTETAVDQWFPIWGNDEFLFQLSVPELALLWFKVQDYDNDTQNDFAGQTCLPLPELKSGVRAVRLHDRTGKAYKNTRLLVSFALDPPYTFHHQRTMEEEGSPDIIIVGAGISGLSTAVGLHRLGIRSMVLESSETLRATGFAFTTWFNAWKAMEALGVSQHIRSLHDRLEGWVVGTISAGTPPTEMLFPESEEYESRCVQRKLLLEALAGELPEETIRFSSKVVHIELSGCYKKVHLSDGTILKTKVLVGCDGVYSVVGKWLGFKNPATTARLAIRGLTHFPEGHGFGKRFFQFYGDGVRSGFIPCDHNTVYWFLTHTSTDIDEETNSEILKEFVLNKIKDLPENIKNVVETTDLDSMVMSQLKYRPPWELLWSNITKDNVCVAGDALHPMTPDIGQGGCSAMEDGVILARCLGEAIKAKSLKGETEENEEEGYKRIEEGLKKYAGERKWRSIDLITTAYTVGFIQQSRGKWMNMFRDRFLSSYLSRMLLKKSHFDCGSLVP

SEQ ID NO: 98075 - protein, 868 aa, Arabidopsis thaliana
  peptide (1)..(868): Ceres Seq. ID no. 13579428
MKAPLSHYFVYTGHNSYLTGNQVNSRSSVEPIVQALRKGVKVIELDLWPNPSGNAAEVRHGRTLTSHEDLQKCLTAIKDNAFHVSDYPVIITLEDHLPPKLQAQVAKMLTKTYRGMLFRRVSESFKHFPSPEELKGKILISTKPPKEYLESKTVHTTRTPTVKETSWNRVANKILEEYKDMESEAVGYRDLIAIHAANCKDPSKDCLSDDPEKPIRVSMDEQWLDTMVRTRGTDLVRFTQRNLVRIYPKGTRVDSSNYDPHVGWTHGAQMVAFNMQGHGKQLWIMQGMFRGNGGCGYVKKPRILLDEHTLFDPCKRFPIKTTLKVKIYTGEGWDLDFHHTHFDQYSPPDFFVKIGIAGVPRDTVSYRTETAVDQWFPIWGNDEFLFQLSVPELALLWFKVQDYDNDTQNDFAGQTCLPLPELKSGVRAVRLHDRTGKAYKNTRLLVSFALDPPYTFHHQRTMEEEGSPDIIIVGAGISGLSTAVGLHRLGIRSMVLESSETLRATGFAFTTWFNAWKAMEALGVSQHIRSLHDRLEGWVVGTISAGTPPTEMLFPESEEYESRCVQRKLLLEALAGELPEETIRFSSKVVHIELSGCYKKVHLSDGTILKTKVLVGCDGVYSVVGKWLGFKNPATTARLAIRGLTHFPEGHGFGKRFFQFYGDGVRSGFIPCDHNTVYWFLTHTSTDIDEETNSEILKEFVLNKIKDLPENIKNVVETTDLDSMVMSQLKYRPPWELLWSNITKDNVCVAGDALHPMTPDIGQGGCSAMEDGVILARCLGEAIKAKSLKGETEENEEEGYKRIEEGLKKYAGERKWRSIDLITTAYTVGFIQQSRGKWMNMFRDRFLSSYLSRMLLKKSHFDCGSLVP

SEQ ID NO: 98076 - DNA, 1514 bp, Arabidopsis thaliana
  misc_feature (1)..(1514): Ceres Seq. ID no. 13579429
  misc_feature (1)..(1514): Ortholog of  Ceres SEQ ID NO 13638769 as cited in SEQ ID NO 51773
  misc_feature (1)..(1514): Ortholog of  Ceres SEQ ID NO 12583723 as cited in SEQ ID NO 58297
  misc_feature (1)..(1514): Ortholog of  Ceres SEQ ID NO 12623263 as cited in SEQ ID NO 60988
  misc_feature (1)..(1514): Ortholog of  Ceres SEQ ID NO 15225568 as cited in SEQ ID NO 61512
  misc_feature (1)..(1514): Ortholog of  Ceres SEQ ID NO 13590249 as cited in SEQ ID NO 68385
  misc_feature (1)..(1514): Ortholog of  Ceres SEQ ID NO 12635807 as cited in SEQ ID NO 0
  misc_feature (1)..(1514): Ortholog of  Ceres SEQ ID NO 15179245 as cited in SEQ ID NO 0
gtcgactgaagtgtgaaggtggagattatgtattcacttgttgatttggtatacattctatgtaaggttcaattatttacgttatataattataatggagtaatttacagtaattgggttaaaatggtttgattcggtcaggttgatacggtttggaagttaaacccggcctagatatgatgttacaaccagtccacatcttttatgattttagtggaacaaacgaagagttatttagacgatacaaacaaggtccgaataagtgtgagctgtcccaagtaagaccacgtaatactcacctcaacaagatagtgttcttaaagtgtgtcaaacacaatcacacacacacaaatcataaaacacaaagacgataatccatcgatccacagaatagacgccacgtggtagataggattctcactaaaaagttctcaccttttaatctttctccacgccatttccacaagccataatcctcaaaaatctcaactttatctcccaaaacacaaaacaaaaaaaaatggcttccactgctctctcaagcgccatcgtcggaacttcattcatccgtcgttccccagctccaatcagtctccgttcccttccatcagccaacacacaatccctcttcggtctcaaatcaggcaccgctcgtggtggacgtgtcacagccatggctacatacaaggtcaagttcatcacaccagaaggtgagctagaggttgagtgtgacgacgacgtctacgttcttgatgctgctgaggaagctggaatcgatttgccttactcttgccgtgctggttcttgttcgagctgtgctggtaaagttgtgtctggatctgttgatcagtctgaccagagtttccttgatgatgaacagattggtgaagggtttgttctcacttgtgctgcttaccctacctctgatgttaccattgaaacccacaaagaagaagacattgtttaagcctcacctactcaccagcttttgatggtttaaaaatcatgtctttataaatttcacattttgggttgagtttgttgttactaaaaactattgttatctgttgttattgttcctggtttggctcaccatcaatcgatgacattttaaactatgcaactgcaaattctgcaacactttcgatgagaatctaacattatcgtttaaacattggaaatacattttcttgaagtctagctagctttggtttgtagttcttattctgaactcaacaatcatcaaagtatcaagaaaaatccgatttgcgagcaattgtgaaatcttagattgataaattctctagaaagaactatacatgttatttgtagctatagaagaaactatggaatcttatactctaattaagcccaaatggcaagagaagacatgagtccagctcctaggaacaacattacataagatacaatttgaagcctaaagttacacctcatttttgtactcaagaaatcagcagctatgagatccactaaagccatgtacacaagaattc

SEQ ID NO: 98077 - protein, 148 aa, Arabidopsis thaliana; identical to SEQ ID NO: 35508
  peptide (1)..(148): Ceres Seq. ID no. 13579430

SEQ ID NO: 98078 - protein, 97 aa, Arabidopsis thaliana; identical to SEQ ID NO: 35509
  peptide (1)..(97): Ceres Seq. ID no. 13579431

SEQ ID NO: 98079 - protein, 79 aa, Arabidopsis thaliana; identical to SEQ ID NO: 79492
  peptide (1)..(79): Ceres Seq. ID no. 13579432

SEQ ID NO: 98080 - DNA, 505 bp, Arabidopsis thaliana
  misc_feature (1)..(505): Ceres Seq. ID no. 13579433
  misc_feature (1)..(505): Ortholog of  Ceres SEQ ID NO 13595226 as cited in SEQ ID NO 56331
  misc_feature (1)..(505): Ortholog of  Ceres SEQ ID NO 13661903 as cited in SEQ ID NO 61722
  misc_feature (1)..(505): Ortholog of  Ceres SEQ ID NO 15173940 as cited in SEQ ID NO 61934
atggcccttatggccgagctccgtgtctttcttgccgatgagaaacgccggttctaggctcgtagtcagggcagccgaagatcctgctccggcttcctcttcttcaaaagattctccggcagctgccgctgctccggatggagctactgccaccaaacccaagccaccaccgattggtcctaagagagggtctaaggtcaagattctaaggagagaatcctattggttcaagaacgttggatcagttgttgccgttgatcaggaccctaagactcgatacccggttgtggtccggttcgcaaaagtcaattacgccaacatatcgaccaacaactatgcattggatgaggtcgaagaagttgcagcttaaatgggagaattcaaaaactctgtgtattctataccggtttatccgtttgtaacttgacccaaaccgtatgtaccgcaaaagtttaccaattatttctcctcatctgaatctcgagggccgatttggccaatcgag

SEQ ID NO: 98081 - protein, 122 aa, Arabidopsis thaliana
  peptide (1)..(122): Ceres Seq. ID no. 13579434
WPLWPSSVSFLPMRNAGSRLVVRAAEDPAPASSSSKDSPAAAAAPDGATATKPKPPPIGPKRGSKVKILRRESYWFKNVGSVVAVDQDPKTRYPVVVRFAKVNYANISTNNYALDEVEEVAA

SEQ ID NO: 98082 - protein, 110 aa, Arabidopsis thaliana
  peptide (1)..(110): Ceres Seq. ID no. 13579435
MRNAGSRLVVRAAEDPAPASSSSKDSPAAAAAPDGATATKPKPPPIGPKRGSKVKILRRESYWFKNVGSVVAVDQDPKTRYPVVVRFAKVNYANISTNNYALDEVEEVAA

SEQ ID NO: 98083 - DNA, 877 bp, Arabidopsis thaliana
  misc_feature (1)..(877): Ceres Seq. ID no. 13579436
  misc_feature (1)..(877): Ortholog of  Ceres SEQ ID NO 13599586 as cited in SEQ ID NO 0
aatcattttgaagcagaaatcgatttccaaaatggctcttgttcaatccagaacttttccacacctcaacactccgttatcgccgattctatcctccctccatgctccgtcttctctctttatccggagggaaatccgaccggtagccgcgccgttctcctcctccaccgccggaaacttgcccttctcgccgttgacgcgtccgcgaaagcttctctgtcctccgcctcgcggcaagtttgtcagagaagattatcttgtgaagaaattgtcagctcaagaacttcaggaactggtgaaaggagataggaaggtgccgttgattgttgatttttatgcgacatggtgtggaccttgtatcttgatggcccaggaactagaaatgcttgcagtagagtatgagagcaatgcaataatcgtgaaagttgatacagatgatgagtacgagtttgcacgcgacatgcaggttcgagggttacctacattattcttcatcagtcctgacccaagcaaagatgcaatcaggacagaagggctaattccgttacagatgatgcacgatatcattgacaacgagatgtgaagtttttactgagaaaacacttttgtactctttatgatttgattagaatcgccgtaatttaggattggtaccgtgttgtttgcatttgagatgtggtaagaatgtcttctagtttcatagatgaagaatgtagtcttaagacatttgtttgtatgcagtgttcgtttcaatacctaagtgaaaaggttagagctgttgatctggtcggatccaagttatgtggcacatcaaattcacgatccggtccatgtaataacactgtagcttaaacttggaagagagagatatgacgtc

SEQ ID NO: 98084 - protein, 193 aa, Arabidopsis thaliana; identical to SEQ ID NO: 28903
  peptide (1)..(193): Ceres Seq. ID no. 13579437

SEQ ID NO: 98085 - protein, 183 aa, Arabidopsis thaliana; identical to SEQ ID NO: 28904
  peptide (1)..(183): Ceres Seq. ID no. 13579438

SEQ ID NO: 98086 - protein, 102 aa, Arabidopsis thaliana; identical to SEQ ID NO: 28905
  peptide (1)..(102): Ceres Seq. ID no. 13579439

SEQ ID NO: 98087 - DNA, 1205 bp, Arabidopsis thaliana
  misc_feature (1)..(1205): Ceres Seq. ID no. 13579447
  misc_feature (1)..(1205): Ortholog of  Ceres SEQ ID NO 14308536 as cited in SEQ ID NO 55469
  misc_feature (1)..(1205): Ortholog of  Ceres SEQ ID NO 15179772 as cited in SEQ ID NO 64248
ctcttatttactttagtcctctcgaatcccataaagtccacaactctctccttgtagagagagagattttatggcggtggagctcatgactcggaattacatctccggcgtcggagctgatagcttcgccgttcaagaagcagctgcttcaggactcaaaagtatcgaaaatttcatcggtttaatgtctcgtgatagctttaactctgatcagccatcttcttcttccgcctccgcctccgcctccgccgccgcagatcttgaatcagctcgtaacacaacggcggacgcggctgtttcaaagtttaaaagagtcatatctctcttagatcgaactcgaaccggacacgcccggtttagacgtgctccggttcatgttatttctccggttcttttacaagaagaaccaaaaacgacgccgtttcagtctcctcttcctcctccgccgcaaatgatccgaaaaggttcgttttcttcatcgatgaaaacgattgatttctcatctctctcctctgtaacaacggaatcagacaaccagaagaagattcatcatcatcaacgtccctctgaaacggcgccgtttgcgtctcaaactcaaagcctctccacgacggtctcgtctttctcaaaatcaacaaagagaaaatgtaactctgagaatcttctcaccggaaaatgcgcttccgcttcttcctccggtcgttgtcattgctcgaagaaaagaaagataaaacagaggagaataattagggttccggcgataagtgcaaaaatgtccgatgtaccaccggacgattattcatggaggaaatacggacaaaaaccaattaaaggatctccacatccaagaggatattataagtgtagtagcgtaagaggttgtccagcacgtaaacatgttgagagagcagctgatgattcgtccatgttgattgttacttatgaaggagatcataatcattctctctccgccgctgatctcgccggagccgccgttgctgatcttattttggaatcgtcttgaaaagaacaaatctttatttaaggcttttataatataaatttagatccttacttagtgaagtactcaaactatgaatgaaatcaatgtaatcaaaatcaaaaagcttttgctaaatttcgatttgttagttttttggattgttaaattataaattgtgatatattcatcatgtttacttgtt

SEQ ID NO: 98088 - protein, 317 aa, Arabidopsis thaliana; identical to SEQ ID NO: 24612
  peptide (1)..(317): Ceres Seq. ID no. 13579448

SEQ ID NO: 98089 - protein, 312 aa, Arabidopsis thaliana; identical to SEQ ID NO: 24613
  peptide (1)..(312): Ceres Seq. ID no. 13579449

SEQ ID NO: 98090 - protein, 279 aa, Arabidopsis thaliana; identical to SEQ ID NO: 24614
  peptide (1)..(279): Ceres Seq. ID no. 13579450

SEQ ID NO: 98091 - DNA, 1618 bp, Arabidopsis thaliana
  misc_feature (1)..(1618): Ceres Seq. ID no. 13579470
  misc_feature (1)..(1618): Ortholog of  Ceres SEQ ID NO 13597269 as cited in SEQ ID NO 63932
gtgtttcttctcagcaggactaaaaggaaaaaaggaaatcgattgctaatgtcgggtgagaaacaagcggaggagtcaatagtagtctccggggaggatgaggtggccggtagaaaagtggaagattcagcggcggaggaggatattgacggcaacgggggcaatggatttagtatgaagagcttcctctggcatggcgggtccgcttgggacgcctggtttagctgtgcatcaaatcaagtggcacaagtgctgttgacgctgccgtattcgttctcgcagttgggaatgttatcaggaatattgcttcaaatattctatgggttaatgggatcttggactgcttatctcatcagtgttctttacgtcgagtatcgtgcccgtatggagaaacaagaagccaaatccttcaaaaaccacgttattcaatggtttgaagtgcttgatgggctgctgggtccgtactggaaagcagcggggctcgcatttaattgcaccttcttgttattcggatcagtcatccagctcattgcttgtgctagcaatatatattacataaacgataggttagacaagaggacatggacttatatatttggggcttgctgtgccacgaccgttttcataccatctttccacaattaccgtatttggtctttcctcggccttggcatgaccacctacaccgcttggtacctcaccatcgcctcttttctccatggtcaggcggagggtgtgacacattccggtccaaccaagcttgtgttgtactttaccggagccaccaacatcctctataccttcggtggacacgctgtgaccgtggaaataatgcatgcgatgtggaaaccaaggaagtttaagagcatctacttgatggcaactctgtacgtcttcacattaacgcttccgtcagcctccgccgtctactgggctttcggcgaccaacttctcaaccactcaaacgctttctctctcctccctaaaacgcgtttccgtgacaccgccgttatcctcatgctcatccatcagtttataacgttcgggtttgcgtgtacaccattgtacttcgtatgggaaaaagcgatcggaatgcaccacacaaagagcttatgtctaagagcgctggtgaggctaccggtggtggttccgatatggtttttggcaatcatctttccctttttcgggccaataaactcggcagttggagccttacttgttaccttcaccgtctatatcatccctgccttagcccacatgctcacgtaccgcaccgcctctgcccaacgcggcggagaaaccaccgttttttatccctagctgggctggagtttacgtgataaacgctttcatagtggtttgggtcctagttctcgggttcgggtttggcggatgggccagtatgaccaacttcatcaggcaaattgatacttttggcctctttgccaaatgctaccaatgcaaaccacctccagctccgatcgccgccggagctcaccaccgccgttagttaacgtaagcgacgtgtgatagtgtgattgaacccttttttctttaattctgtatgaaagaaaatatctgtaattcagtgatttagtgaatctatgctataaaattt

SEQ ID NO: 98092 - protein, 439 aa, Arabidopsis thaliana
  peptide (1)..(439): Ceres Seq. ID no. 13579471
VFLLSRTKRKKGNRLLMSGEKQAEESIVVSGEDEVAGRKVEDSAAEEDIDGNGGNGFSMKSFLWHGGSAWDAWFSCASNQVAQVLLTLPYSFSQLGMLSGILLQIFYGLMGSWTAYLISVLYVEYRARMEKQEAKSFKNHVIQWFEVLDGLLGPYWKAAGLAFNCTFLLFGSVIQLIACASNIYYINDRLDKRTWTYIFGACCATTVFIPSFHNYRIWSFLGLGMTTYTAWYLTIASFLHGQAEGVTHSGPTKLVLYFTGATNILYTFGGHAVTVEIMHAMWKPRKFKSIYLMATLYVFTLTLPSASAVYWAFGDQLLNHSNAFSLLPKTRFRDTAVILMLIHQFITFGFACTPLYFVWEKAIGMHHTKSLCLRALVRLPVVVPIWFLAIIFPFFGPINSAVGALLVTFTVYIIPALAHMLTYRTASAQRGGETTVFYP

SEQ ID NO: 98093 - protein, 423 aa, Arabidopsis thaliana
  peptide (1)..(423): Ceres Seq. ID no. 13579472
MSGEKQAEESIVVSGEDEVAGRKVEDSAAEEDIDGNGGNGFSMKSFLWHGGSAWDAWFSCASNQVAQVLLTLPYSFSQLGMLSGILLQIFYGLMGSWTAYLISVLYVEYRARMEKQEAKSFKNHVIQWFEVLDGLLGPYWKAAGLAFNCTFLLFGSVIQLIACASNIYYINDRLDKRTWTYIFGACCATTVFIPSFHNYRIWSFLGLGMTTYTAWYLTIASFLHGQAEGVTHSGPTKLVLYFTGATNILYTFGGHAVTVEIMHAMWKPRKFKSIYLMATLYVFTLTLPSASAVYWAFGDQLLNHSNAFSLLPKTRFRDTAVILMLIHQFITFGFACTPLYFVWEKAIGMHHTKSLCLRALVRLPVVVPIWFLAIIFPFFGPINSAVGALLVTFTVYIIPALAHMLTYRTASAQRGGETTVFYP

SEQ ID NO: 98094 - protein, 381 aa, Arabidopsis thaliana
  peptide (1)..(381): Ceres Seq. ID no. 13579473
MKSFLWHGGSAWDAWFSCASNQVAQVLLTLPYSFSQLGMLSGILLQIFYGLMGSWTAYLISVLYVEYRARMEKQEAKSFKNHVIQWFEVLDGLLGPYWKAAGLAFNCTFLLFGSVIQLIACASNIYYINDRLDKRTWTYIFGACCATTVFIPSFHNYRIWSFLGLGMTTYTAWYLTIASFLHGQAEGVTHSGPTKLVLYFTGATNILYTFGGHAVTVEIMHAMWKPRKFKSIYLMATLYVFTLTLPSASAVYWAFGDQLLNHSNAFSLLPKTRFRDTAVILMLIHQFITFGFACTPLYFVWEKAIGMHHTKSLCLRALVRLPVVVPIWFLAIIFPFFGPINSAVGALLVTFTVYIIPALAHMLTYRTASAQRGGETTVFYP

SEQ ID NO: 98095 - DNA, 2044 bp, Arabidopsis thaliana
  misc_feature (1)..(2044): Ceres Seq. ID no. 13579477
  misc_feature (1)..(2044): Ortholog of  Ceres SEQ ID NO 13599900 as cited in SEQ ID NO 531
  misc_feature (1)..(2044): Ortholog of  Ceres SEQ ID NO 13659971 as cited in SEQ ID NO 67565
  misc_feature (1)..(2044): Ortholog of  Ceres SEQ ID NO 13500385 as cited in SEQ ID NO 67583
gaattcggcacgagcaaaaacaaaaactctaccaagtgaagaagaaagagaagtgtcacatctctctctctatctctttgatccaaacaaattccctcatatatctctgctctctcttcccaatattcttcctttttcttcaatcgagattttatcgctttttgattcgagaatttcgaaatcggaacccaccaccaccaccctccatcgtcgccaacagatccaacggttctctgattatttttatttgaaaattgtcttctttgttctccctctcgctgggtttgattctgagattgattaatctaaatgggtcgcatcgagatttagaagaaaagggaaatgttggcaatggagaaagaatttgattcaaagcttgttcttcaagggaactcatccaacggtgctaatgtttctagaagcaaaagcttctcctttaaagctcctcaagaaaatttcaccagccatgatttcgaatttggcaagatctatggtgttggttcttactctaaggttgttagggcaaagaagaaggaaactggaactgtgtatgctttaaagattatggacaaaaagtttatcaccaaggagaataaaactgcttatgtgaaattggaaaggattgttcttgatcaacttgaacatcctgggatcattaaactttacttcacgtttcaagacacatcctcactatatatggcacttgaatcttgtgagggtggcgagcttttcgaccaaataaccagaaaaggtcggctatcggaggatgaagctcggttctacactgcagaagttgtggatgctcttgagtatatacatagtatgggactgattcatcgagatattaagccggagaatctgttgctgacttcagatggacacattaagattgcggattttggaagtgtaaagccgatgcaggatagccagatcacagttctacctaatgcagcttctgacgataaggcgtgcacttttgtcgggactgctgcatatgttcctccagaagttctcaactcctctcccgcaactttcgggaatgatctttgggctctcggctgcactctctatcagatgctttcggggacttccccatttaaagatgcaagtgaatggctgattttccaaagaattatagccagagatataaagttcccaaatcatttttcagaagcagcaagagacctcatcgaccggttgctggataccgagccaagcagaaggccaggtgctggctcagaaggttatgttgctcttaagagacatcctttctttaatggagttgactggaagaatctaaggtcccagactcctccaaaactagctccagatcctgcgtctcagacagcatctcccgagagggatgacacacatggttctccatggaacctgacacatattggagattctttagccacacagaacgaggggcacagtgctcctcctacatcttctgaatcatcgggttccataactcgacttgcttcaatagactcttttgattcaagatggcaacagtttttagagccaggagaatcggttctgatgatatcagcggtgaagaagcttcagaaaataacgagcaagaaggtgcagctaatactcaccaacaaacccaagctgatctatgtcgacccgtcaaaactagttgtgaaaggaaacattatatggtctgataactcgaatgacctcaacgttgtagtcactagcccttcacatttcaagatttgcacgccaaagaaggttttatcatttgaagacgcaaaacagagagcttcagtgtggaaaaaggcaatcgagactcttcagaaccgctgagacaaactccactgaagaatggttctgttaatttcctcgttggtgttttgtctttccttcaagattttaaactgaccaaactccattcttcatatgttttttctatttcacgcatccttgaaaagaccagttggacacaaaactgaaaaactgctttttgaatcctttgtataagtcaaacaaatgtattacaaggttaaagttacatgagatactgaattcaagc

SEQ ID NO: 98096 - protein, 491 aa, Arabidopsis thaliana; identical to SEQ ID NO: 27923
  peptide (1)..(491): Ceres Seq. ID no. 13579478

SEQ ID NO: 98097 - protein, 488 aa, Arabidopsis thaliana; identical to SEQ ID NO: 27924
  peptide (1)..(488): Ceres Seq. ID no. 13579479

SEQ ID NO: 98098 - protein, 417 aa, Arabidopsis thaliana; identical to SEQ ID NO: 27925
  peptide (1)..(417): Ceres Seq. ID no. 13579480

SEQ ID NO: 98099 - DNA, 1131 bp, Arabidopsis thaliana
  misc_feature (1)..(1131): Ceres Seq. ID no. 13579481
  misc_feature (1)..(1131): Ortholog of  Ceres SEQ ID NO 15170881 as cited in SEQ ID NO 54654
tggatttaagggtttttgttcttagtaaaaaaaagtaaggatttgtgtccatggcagctttgcaaacgcttcgtgaatggatcggtatccagcagttcccacctgctactcaatctaaattgctcgagatccttgggaagtataaagaagaggatgtgagctcgctaacggtccttgtaatggggaaaggtggtgttggaaagtcatcaactgtgaattcagttataggcgagaaagctgctgcagttagtactttccagtctgaaggactgaggcctaccttggtctctcgcacaagatcgggatttacattgaatatcatcgacactcctggtcttattgagggaggatatgtgaatgatcaagccatcaacattataaaacgatttctcctcaacatgactatagatgtgctactatacgtagaccgtttggatgtgtaccgggtggatgaccttgataggcaagttgtcggtgctataactgatgcatttggtaaagagatatggaagaagtctgctcttgttctcacccatgctcagttctctccaccagacgggttaaattataaccactttgtctccaaaagatctaatgctcttctaaaagttatccagacaggcgctcaactgaagaaacaggatttgcagggtttttctattcctgtcattcttgttgagaacagcggaagatgccataagaacgaaagcgatgaaaagattcttccatgcgggactagttggattcccaatctgttcaacaaaatcacagagatctcttttaatggcaacaaggcgattcatgttgacaagaaactggtcgaagggccaaacccaaacgaaagaggaaaaaaactgattcctttaatgtttgcattccaatacttgctggtgatgaagccattggttcgagcaatcaagtccgatgtttcgagagagagtaaaccggcgtgggagctgcgagactccggtttagcaagtcgaaggtcttgagttgtggacacgagttttgtttggtttgtttgtctatctgagagattgttctgtagttgaaattgtgatacaactcgagaaatgtggttcacagataattactgtcgcaaagttctctcatcttaattacatcttcttt

SEQ ID NO: 98100 - protein, 313 aa, Arabidopsis thaliana
  peptide (1)..(313): Ceres Seq. ID no. 13579482
MAALQTLREWIGIQQFPPATQSKLLEILGKYKEEDVSSLTVLVMGKGGVGKSSTVNSVIGEKAAAVSTFQSEGLRPTLVSRTRSGFTLNIIDTPGLIEGGYVNDQAINIIKRFLLNMTIDVLLYVDRLDVYRVDDLDRQVVGAITDAFGKEIWKKSALVLTHAQFSPPDGLNYNHFVSKRSNALLKVIQTGAQLKKQDLQGFSIPVILVENSGRCHKNESDEKILPCGTSWIPNLFNKITEISFNGNKAIHVDKKLVEGPNPNERGKKLIPLMFAFQYLLVMKPLVRAIKSDVSRESKPAWELRDSGLASRRS

SEQ ID NO: 98101 - protein, 270 aa, Arabidopsis thaliana
  peptide (1)..(270): Ceres Seq. ID no. 13579483
MGKGGVGKSSTVNSVIGEKAAAVSTFQSEGLRPTLVSRTRSGFTLNIIDTPGLIEGGYVNDQAINIIKRFLLNMTIDVLLYVDRLDVYRVDDLDRQVVGAITDAFGKEIWKKSALVLTHAQFSPPDGLNYNHFVSKRSNALLKVIQTGAQLKKQDLQGFSIPVILVENSGRCHKNESDEKILPCGTSWIPNLFNKITEISFNGNKAIHVDKKLVEGPNPNERGKKLIPLMFAFQYLLVMKPLVRAIKSDVSRESKPAWELRDSGLASRRS

SEQ ID NO: 98102 - protein, 197 aa, Arabidopsis thaliana; identical to SEQ ID NO: 27602
  peptide (1)..(197): Ceres Seq. ID no. 13579484

SEQ ID NO: 98103 - DNA, 935 bp, Arabidopsis thaliana
  misc_feature (1)..(935): Ceres Seq. ID no. 13579485
  misc_feature (1)..(935): Ortholog of  Ceres SEQ ID NO 13597542 as cited in SEQ ID NO 64986
tcatcatcactcagatctagtagttccacaaactcacattgggtcgttgaccagaaaaacacacagagaaaggagaaaaacatggaggagttggcgcatccgtacgttccgagagatctgaacctacccggatacgtaccaatctcaatgtcaatgtcctccatcgtctctatctacctcggttcttccctccttgttgtctccctcgtctggcttctcttcgggaggaagaaagctaaacttgataagttgcttatgtgttggtggacattcactggtctcactcatgttattctcgagggctatttcgttttctcccctgagtttttcaaggacaacacttctgcttatcttgctgaagtttggaaagaatatagcaaaggtgattcgagatacgtaggtagagattctgcagttgtatctgttgaagggatcactgctgttatcgttggcccagcttctctcctagctatttatgccattgctaaggagaagtcgtatagctacgtgcttcagcttgcgatttcggtttgccagctctacggatgtttggtttatttcattactgctatcttggaaggagacaactttgccacaaactctttctactattactcctactacatcggggctaactgttggtgggtcttgataccttcactcatttctttccgttgctggaaaaagatttgtgcagctgctgccattgccaacaacaacgtcgagacaaagacgaagaagaaaacccgttgaaccaaggatcaaagactcttttatctcttcaggttactgctgttatagcaaatgaacatgagtctccttttgcggataatttatccattttaaaaactttagctatgttgtctgtctctcttacagcaataaacttgtgaggataatttatccatttttcatatgatatttgcacttttgtt

SEQ ID NO: 98104 - protein, 250 aa, Arabidopsis thaliana
  peptide (1)..(250): Ceres Seq. ID no. 13579486
SSSLRSSSSTNSHWVVDQKNTQRKEKNMEELAHPYVPRDLNLPGYVPISMSMSSIVSIYLGSSLLVVSLVWLLFGRKKAKLDKLLMCWWTFTGLTHVILEGYFVFSPEFFKDNTSAYLAEVWKEYSKGDSRYVGRDSAVVSVEGITAVIVGPASLLAIYAIAKEKSYSYVLQLAISVCQLYGCLVYFITAILEGDNFATNSFYYYSYYIGANCWWVLIPSLISFRCWKKICAAAAIANNNVETKTKKKTR

SEQ ID NO: 98105 - protein, 223 aa, Arabidopsis thaliana; identical to SEQ ID NO: 76370
  peptide (1)..(223): Ceres Seq. ID no. 13579487

SEQ ID NO: 98106 - protein, 201 aa, Arabidopsis thaliana; identical to SEQ ID NO: 26204
  peptide (1)..(201): Ceres Seq. ID no. 13579488

SEQ ID NO: 98107 - DNA, 1512 bp, Arabidopsis thaliana
  misc_feature (1)..(1512): Ceres Seq. ID no. 13579489
  misc_feature (1)..(1512): Ortholog of  Ceres SEQ ID NO 15179926 as cited in SEQ ID NO 57010
  misc_feature (1)..(1512): Ortholog of  Ceres SEQ ID NO 14316075 as cited in SEQ ID NO 60059
ttcgctttcaacttcaccttcccttctccgccattgttactttctcagaagcttccaagtcaaccaatagagacttacttgtttgacttcttcctctcttacctcataatcctccttttggacttttcaataaaaccgcctacttgaatctgtacgacttcttctcatttttccattctttaagtcttcccgttgattcattccgatctgaaatctctctctagatttctctatttttcgaattttaaatgaacgatttgttttccagctcattctctcgcttccgcagcggagaaccatcccctcgccgagacgttgccggcggtggcgacggagttcagatggcgaatcccgcgggatcaaccggtggtgtgaacctcgacaagttcttcgaagatgttgaatctgtgaaagaagagctaaaggagctagatcggctcaacgaaacactctcttcatgtcacgagcagagcaagacgcttcacaatgctaaagccgttaaagatctccggtctaaaatggacggtgacgttggagtcgcgttgaagaaggcgaagatgattaaagttaaactcgaggcgctagatcgtgccaatgctgctaatcggagtctccctggctgtggacctggttcttcctccgatcgaaccaggacctctgtcctcaatggtctcaggaagaaattgatggactctatggatagtttcaaccgattgagggagcttatctcgtccgagtatagagaaactgtacagaggaggtacttcaccgtcaccggcgagaatccggatgaacgaaccctagatcgactgatttccactggagagagtgagagattcttgcagaaagcaatacaagaacaaggaagaggaagggtgttagacaccattaacgagattcaagaaaggcatgatgcggttaaagacattgagaagaatctcagggagcttcaccaggtgtttctagacatggccgtgctggtagagcaccagggagctcagcttgatgacatcgagagtcatgtgggtcgagctagctcctttatcagaggcggaactgaccagctacaaaccgctcgggtttaccagaagaacacgcgaaaatggacatgtattgccattattattctcatcatcatcataactgttgtggttcttgctgttttaaaaccgtggaacaacagcagtggcggcggcggcggtggtggtggtgggggtaccactggaggaagtcaaccaaattcagggacaccaccaaatcctcctcaggcaaggcgtctattgcgttgaagttgaagttgaagttgagtttcgttatttgcatatatattctttctttgaaaaaccttattatcaaaccagctttgtgttactactttctactgctggtttgttgttaatctcccgtttatttggtttttgtgaaagaatttaaaatgtgggttagatgagaaaattagtacaacattctcttgtatctatgtttgctatatgggttatatttacttgatgt

SEQ ID NO: 98108 - protein, 346 aa, Arabidopsis thaliana; identical to SEQ ID NO: 24734
  peptide (1)..(346): Ceres Seq. ID no. 13579490

SEQ ID NO: 98109 - protein, 315 aa, Arabidopsis thaliana; identical to SEQ ID NO: 24735
  peptide (1)..(315): Ceres Seq. ID no. 13579491

SEQ ID NO: 98110 - protein, 256 aa, Arabidopsis thaliana; identical to SEQ ID NO: 24736
  peptide (1)..(256): Ceres Seq. ID no. 13579492

SEQ ID NO: 98111 - DNA, 1506 bp, Arabidopsis thaliana
  misc_feature (1)..(1506): Ceres Seq. ID no. 13579493
  misc_feature (1)..(1506): Ortholog of  Ceres SEQ ID NO 15176959 as cited in SEQ ID NO 52610
acacctcttcttcttcttcttcttcttcttcttcttcaacctcttaaatctcaaaatctcaatcatcaagcttctccttcttcttcttctttccatcttcgcttcaacaacaatgtctaatttcacttatacatctgctttcaacttatccgacaactccccttttaatcccgccattggttcttcgtcttcttcttcctccgcgctcgtcgtagcttccgatgatgataataataccgatgatgcttgtagcatctgtctcgagcctttcaccctccaggatccttccactgtcaccagctgcaaacatgaatatcaccttcagtgcatcattgaatggtcacagagaagcaaagagtgtcctatttgctggcaattgtttgttttgagagaccctgctagccaagagcttttagctgctgtggaaaaggaaagacttttgaaaaccaggaatatatcttcatcctctccaatctctattcatcactctcatgacgattttcactctgaggaggaggaatcacagtttagcagctttgatgaacaattcttgaggcatcttactgaagctgcacatagacgttgtttgcttcgcagaagggatggtcaaatatcctctagtcttgtttcgtccagcgatcccactacgattcatcctactgatttggtcaatctttatcgtctctctgctatttcccatgttgaacatcaaaactcaaacccttgtccaagtcctggctcaatgactccatctcccgtctctggtcattcttccattcctgcagatagcaataacggatccagaatctctcctggcccttctccatctcgttcatctcaaagtccaaaatcacctgaagcatcctcgcttccggaagccattaaatcgaaactagctgctgcttctgcaaagtacaaggaatcgatctctaaaagtaaacaaggtcttaaagagaagctacttgctcgcaataactcagtgaaagaattgagcaaaggagtgcaacgtgagatgaatgcaggaatagctggtgttgcacgaatgatcgaacgcatggatttttcttcaaaacgttttggagggtctgctcatgtatcaacctccactgctactgcttctggattcaatttctcattcaaagggaaacgtgtagaagccaattctaagtctaacaacaatggagacaaaaccgaaccccaaaagctgcagggaggagaaacgtgctgaggcaatcagaaaaatggagagaggcctttaatgcaagcgatgtacgtttccattgaatcaacttacccgttggtcttcgcatcctgcattgttcagagctcacggtctcgtctctcgtctctctgttacctttgcgatgcgtacttttagatggctaaaataagcaactgagtaataattttattactcgattttgacggagccaaaactataatatttattaatttcaaaggataatgttttatgttttttcactaagaattggatcagtcctaacg

SEQ ID NO: 98112 - protein, 408 aa, Arabidopsis thaliana
  peptide (1)..(408): Ceres Seq. ID no. 13579494
HLFFFFFFFFFFNLLNLKISIIKLLLLLLLSIFASTTMSNFTYTSAFNLSDNSPFNPAIGSSSSSSSALVVASDDDNNTDDACSICLEPFTLQDPSTVTSCKHEYHLQCIIEWSQRSKECPICWQLFVLRDPASQELLAAVEKERLLKTRNISSSSPISIHHSHDDFHSEEEESQFSSFDEQFLRHLTEAAHRRCLLRRRDGQISSSLVSSSDPTTIHPTDLVNLYRLSAISHVEHQNSNPCPSPGSMTPSPVSGHSSIPADSNNGSRISPGPSPSRSSQSPKSPEASSLPEAIKSKLAAASAKYKESISKSKQGLKEKLLARNNSVKELSKGVQREMNAGIAGVARMIERMDFSSKRFGGSAHVSTSTATASGFNFSFKGKRVEANSKSNNNGDKTEPQKLQGGETC

SEQ ID NO: 98113 - protein, 371 aa, Arabidopsis thaliana
  peptide (1)..(371): Ceres Seq. ID no. 13579495
MSNFTYTSAFNLSDNSPFNPAIGSSSSSSSALVVASDDDNNTDDACSICLEPFTLQDPSTVTSCKHEYHLQCIIEWSQRSKECPICWQLFVLRDPASQELLAAVEKERLLKTRNISSSSPISIHHSHDDFHSEEEESQFSSFDEQFLRHLTEAAHRRCLLRRRDGQISSSLVSSSDPTTIHPTDLVNLYRLSAISHVEHQNSNPCPSPGSMTPSPVSGHSSIPADSNNGSRISPGPSPSRSSQSPKSPEASSLPEAIKSKLAAASAKYKESISKSKQGLKEKLLARNNSVKELSKGVQREMNAGIAGVARMIERMDFSSKRFGGSAHVSTSTATASGFNFSFKGKRVEANSKSNNNGDKTEPQKLQGGETC

SEQ ID NO: 98114 - DNA, 1128 bp, Arabidopsis thaliana
  misc_feature (1)..(1128): Ceres Seq. ID no. 13579496
  misc_feature (1)..(1128): Ortholog of  Ceres SEQ ID NO 15171289 as cited in SEQ ID NO 51570
tcttcttctctacaacaaacaaacaaaagatctgtttcaatggcggatcgtgttaaaggtccatggagtcaagaagaagatgagcagctacgaaggatggttgagaaatacggaccgaggaattggtctgcgattagcaaatcgattccaggtcgatctggtaaatcgtgtagattacggtggtgtaatcagttatctccggaggttgagcatcgtcctttctcgccggaggaagatgagactattgtaaccgcccgtgctcagtttggtaacaagtgggcgacgattgctcgtcttcttaacggtcgtacggataacgccgttaaaaatcactggaactctacgcttaagaggaaatgcagcggaggtgtggcggttacgacggtgacggagacggaggaagatcaggatcggccgaagaagaggagatctgttagctttgattctgcttttgctccggtggatactggattgtacatgagtcctgagagtcctaacggaatcgatgttagtgattctagcacgattccgtcaccgtcgtctcctgttgctcagctgtttaaaccaatgccgatttccggcggttttacggtggttccgcagccgttaccggttgaaatgtcttcgtcttcggaggatccacctacttcgttgagtttgtcactacctggagctgagaacacgagttcgagccataacaataacaacaacgcgttgatgtttccgagatttgagagtcagatgaagattaatgtagaggagagaggaggaggaggagaaggacgtagaggtgagtttatgacggtggtgcaggagatgataaaagctgaagtgaggagttacatggcggaaatgcagaaaacaagtggtggattcgtcgtcggaggtttatacgaatccggcggcaatggtggttttagggattgtggaataataacacctaaggttgagtagttttggtttagggttaaaacttgaatcgattggggattttcaagagcattcatttttggggtttatggtaaaattaaaaacaaaaaaaaaatgtacagaggaattaaaatttctatggaataatcttaaatctcaaatatttgttacttgttttggtgattcataaccaaaatc

SEQ ID NO: 98115 - protein, 317 aa, Arabidopsis thaliana
  peptide (1)..(317): Ceres Seq. ID no. 13579497
SSSLQQTNKRSVSMADRVKGPWSQEEDEQLRRMVEKYGPRNWSAISKSIPGRSGKSCRLRWCNQLSPEVEHRPFSPEEDETIVTARAQFGNKWATIARLLNGRTDNAVKNHWNSTLKRKCSGGVAVTTVTETEEDQDRPKKRRSVSFDSAFAPVDTGLYMSPESPNGIDVSDSSTIPSPSSPVAQLFKPMPISGGFTVVPQPLPVEMSSSSEDPPTSLSLSLPGAENTSSSHNNNNNALMFPRFESQMKINVEERGGGGEGRRGEFMTVVQEMIKAEVRSYMAEMQKTSGGFVVGGLYESGGNGGFRDCGIITPKVE

SEQ ID NO: 98116 - protein, 304 aa, Arabidopsis thaliana
  peptide (1)..(304): Ceres Seq. ID no. 13579498
MADRVKGPWSQEEDEQLRRMVEKYGPRNWSAISKSIPGRSGKSCRLRWCNQLSPEVEHRPFSPEEDETIVTARAQFGNKWATIARLLNGRTDNAVKNHWNSTLKRKCSGGVAVTTVTETEEDQDRPKKRRSVSFDSAFAPVDTGLYMSPESPNGIDVSDSSTIPSPSSPVAQLFKPMPISGGFTVVPQPLPVEMSSSSEDPPTSLSLSLPGAENTSSSHNNNNNALMFPRFESQMKINVEERGGGGEGRRGEFMTVVQEMIKAEVRSYMAEMQKTSGGFVVGGLYESGGNGGFRDCGIITPKVE

SEQ ID NO: 98117 - protein, 285 aa, Arabidopsis thaliana
  peptide (1)..(285): Ceres Seq. ID no. 13579499
MVEKYGPRNWSAISKSIPGRSGKSCRLRWCNQLSPEVEHRPFSPEEDETIVTARAQFGNKWATIARLLNGRTDNAVKNHWNSTLKRKCSGGVAVTTVTETEEDQDRPKKRRSVSFDSAFAPVDTGLYMSPESPNGIDVSDSSTIPSPSSPVAQLFKPMPISGGFTVVPQPLPVEMSSSSEDPPTSLSLSLPGAENTSSSHNNNNNALMFPRFESQMKINVEERGGGGEGRRGEFMTVVQEMIKAEVRSYMAEMQKTSGGFVVGGLYESGGNGGFRDCGIITPKVE

SEQ ID NO: 98118 - DNA, 1062 bp, Arabidopsis thaliana
  misc_feature (1)..(1062): Ceres Seq. ID no. 13579500
  misc_feature (1)..(1062): Ortholog of  Ceres SEQ ID NO 15178181 as cited in SEQ ID NO 58740
  misc_feature (1)..(1062): Ortholog of  Ceres SEQ ID NO 12614739 as cited in SEQ ID NO 68587
atggcttacgagaaagagcttgatgctgctaagaaagctgcttcactcgctgctcgtctctgtcagaaagttcaaaaggctttgttgcaatcagatgtgcaatcaaaatctgataaaagtccagtgaccgttgctgattatggttcacaagcagttgttagtttagtcttagaaaaagagctcagttctgaacccttttcattggtggctgaagaggactcaggcgatctacgcaaggatggttctcaggatactctggagcgcatcacaaaactcgtgaacgacactttggctaccgaggaatcgtttaatggctctactttgtctactgatgatctacttagagccattgactgtggaacatctgaaggtggtccaaatggtcgacactgggtcttggatccaattgatggcactaaaggatttctgaggggagatcaatacgcagtagcactaggattgctcgaggaagggaaagtagttttaggtgtgcttgcttgtccaaacttgccgttagcatccatagcaggaaacaacaagaacaaatcttcgtcagacgaaattggatgcctcttctttgctacaattggttcagggacatatatgcagctcctagattcaaaatcttctcctgtaaaagtgcaagtctctagtgttgagaatcctgaagaggcatcgttcttcgagtcattcgaaggagctcactctctacatgacttatccagctccattgccaataaactcggtgtcaaagctccaccagtccgtattgatagccaagcaaagtatggagctttatcaagaggagatggagctatatacttacggtttcctcataaaggataccgcgaaaagatttgggaccatgtcgctggtgctatagttgttacagaggcgggtggaatagtgacagatgcagcaggaaagccactggatttctcgaaagggaagtatcttgatttggacacaggcattatcgttgctaacgagaagctaatgcctctgcttttgaaagcagttcgtgactccatagctgagcaagagaaagcttcagctctctga

SEQ ID NO: 98119 - protein, 353 aa, Arabidopsis thaliana; identical to SEQ ID NO: 78395
  peptide (1)..(353): Ceres Seq. ID no. 13579501

SEQ ID NO: 98120 - DNA, 1168 bp, Arabidopsis thaliana
  misc_feature (1)..(1168): Ceres Seq. ID no. 13579510
  misc_feature (1)..(1168): Ortholog of  Ceres SEQ ID NO 14306201 as cited in SEQ ID NO 59956
gcacgagatttttttgtcgattcttcgtcgtcctcctttgaaattcacaccaatttgtctctcttcctagagaaacaaaagattattcgaaactcgggaaagtatcatccggtcaccggaaaattgattatttccgatgccaataggtgaccgtcagaatccgagtgtggagaagaagaagaacctcttcaggctatgtccgttttggcagaggagaagcaccacttcttcatcttcaacacagaatccaaaccaaaactaccgtagccgccatggaaatcggaatacagatatttccgccgtctctaagcctccgttgactatgtcttccgtcgccagatcacttcttccagctcgccgtcgtctccgactagatccttctagttatctgtatttcccttatgaacctggaaaacaagttcgcagcgcaataaagcttaagaacactagcaaatctcatactgcatttaagttccaaacaacggcacctaagagttgttatatgcgtcctcccggaggtgttttggctccaggagagagtgtttttgctactgtgttcaagtttgtggaacatccagagaacaatgaaaagcagccgttgaatcagaagagcaaggttaagtttaagattatgagcctgaaagttaaaccaggagtagagtatgtgcctgagttgtttgatgagcaaaaggatcaagtagcagtggagcaggttcttcgggtcatttttattgatgcggaccgcccaagtgctgcattggagaaactgaaacgtcaattggatgaagctgaagctgcagttgaagcaagaaagaagcctcccccagagacagggcctcgagttgtcggggagggtcttgtcatagacgaatggaaggagagaagagagaagtaccttgctcggcaacaagtcgaatccgtagattctttgtcctaaacgcagagagcaatgtggacttgttctgcagatcatgtacataatttattatccctcgattatgtatttatctctagacgattactttgtggttcttgtatgtctctgtttgttgtgtgattcatgccggttttttctccttcatcaaattttgtttcggtcgtttttagttgatctagaatcgaaccagagtttgttcagtatttagttacaaatgaaaaatcctgttat

SEQ ID NO: 98121 - protein, 266 aa, Arabidopsis thaliana
  peptide (1)..(266): Ceres Seq. ID no. 13579511
MPIGDRQNPSVEKKKNLFRLCPFWQRRSTTSSSSTQNPNQNYRSRHGNRNTDISAVSKPPLTMSSVARSLLPARRRLRLDPSSYLYFPYEPGKQVRSAIKLKNTSKSHTAFKFQTTAPKSCYMRPPGGVLAPGESVFATVFKFVEHPENNEKQPLNQKSKVKFKIMSLKVKPGVEYVPELFDEQKDQVAVEQVLRVIFIDADRPSAALEKLKRQLDEAEAAVEARKKPPPETGPRVVGEGLVIDEWKERREKYLARQQVESVDSLS

SEQ ID NO: 98122 - protein, 204 aa, Arabidopsis thaliana; identical to SEQ ID NO: 23131
  peptide (1)..(204): Ceres Seq. ID no. 13579512

SEQ ID NO: 98123 - protein, 144 aa, Arabidopsis thaliana; identical to SEQ ID NO: 23132
  peptide (1)..(144): Ceres Seq. ID no. 13579513

SEQ ID NO: 98124 - DNA, 1638 bp, Arabidopsis thaliana
  misc_feature (1)..(1638): Ceres Seq. ID no. 13579514
  misc_feature (1)..(1638): Ortholog of  Ceres SEQ ID NO 13664362 as cited in SEQ ID NO 66523
tgagtaatttaggaagtcaatgagaagaaaagaacgatttttttttttaattcccaacttgtgttcgatctctgagcagctcttatctgatacaaccatttttttggatataatatctaaatttgtagtctttagtttaattcagatcccaattataataatgcccttttgatctgatccacattgcgtatcaaaggctattattattttattcccagagttcaattatttagttggtagaatctctctgtgttgttgtgaatctgtctgtttatgtaaatcaattcaaaaggttgtgacttttgtgtttgacttaggaaaatggaagtgaaagctagagctcctgggaagatcatacttgcaggggaacacgctgttgttcatggatccaccgctgtagctgccgccattgatctctacacttacgttactctccgctttcctcttccatcagctgagaacaatgataggcttacacttcagctcaaggacatttccttggagttttcatggtccttagccagaatcaaagaagcgattccttatgattcaagcactctctgccgttctacgccggcttcatgttcagaggagacccttaaatcaattgcagttttggttgaagagcaaaatcttccaaaggaaaagatgtggctctcctctgggatctccacgtttctctggttatacaccagaattatagggttcaatccggctacagtagtcattaactctgagcttccatacgggtctggcctcggttcatcagcagctttatgtgtagctctcacagctgctctccttgcttcttctatttcagagaaaacccgtggtaacggttggtcatctctcgatgaaaccaatcttgagttgctaaataaatgggctttcgaaggcgaaaagatcatccatgggaaaccttctgggatagacaacaccgtcagtgcatacggcaacatgatcaagttctgctcaggcgagataactcggttacaatccaacatgcctctgagaatgctaattaccaacactagagttgggcgaaacacaaaagctctggtctctggtgtgtcacagagagcggtaagacatcctgatgcgatgaagtcagtgttcaacgccgtggattctataagcaaagagctcgctgcgatcattcagtctaaagacgagacctcagttacagaaaaagaagagagaataaaagaactcatggagatgaaccaaggtctgctcctgtcaatgggggttagccacagctcaatcgaggctgtgattctaaccacggtcaagcacaagcttgtctccaaacttacaggagctggtggcggcggctgcgtcctcactctattaccaaccgggacggtggtggacaaagtggtggaggagctcgagtccagcggttttcagtgtttcacggcattgattggtggtaacggagctcagatttgctattgatcaggtcggaaaaatcatatttggcctctcaccattcttaaacttgctgacgtgtacgtcaagaaggctgcaattagaaattcaaagagtcgattttttcttataaatgatgtgttgaatgtaaaattgctttattattataccatgtgacaaataattgaaaaaagctaaattactcac

SEQ ID NO: 98125 - protein, 378 aa, Arabidopsis thaliana; identical to SEQ ID NO: 25905
  peptide (1)..(378): Ceres Seq. ID no. 13579515

SEQ ID NO: 98126 - protein, 269 aa, Arabidopsis thaliana; identical to SEQ ID NO: 25906
  peptide (1)..(269): Ceres Seq. ID no. 13579516

SEQ ID NO: 98127 - DNA, 838 bp, Arabidopsis thaliana
  misc_feature (1)..(838): Ceres Seq. ID no. 13579881
  misc_feature (1)..(838): Ortholog of  Ceres SEQ ID NO 13661994 as cited in SEQ ID NO 60568
  misc_feature (1)..(838): Ortholog of  Ceres SEQ ID NO 12584790 as cited in SEQ ID NO 62648
attcattcatcacttatacgatctcttcccaaattattgattttttttacccatttctctcatcgcacggtgatattgagaatcgccgacctgaatcgatcggaaaactttctctgattaccggcggtcaacaccgctgaacacatatgtttgtttgacgacctcttctctccgcgatctttacctcaacaacgagatctgtttccacgaaagaaaggaggatgtcgacgccagcaaggaagaggttaatgagggatttcaagaggttgcagcaagacccacctgcgggtattagtggtgctccacaggacaacaacattatgctctggaatgctgtcatatttgggcctgatgacacaccatgggatggaggtactttcaaactctcactgcagttctctgaagattatcccaataaaccaccaacagttcggtttgtgtcacggatgtttcatcctaatatttatgcagatgggagtatctgcttggacattctacaaaaccagtggagtccaatctatgatgttgctgctatacttacctccatccagtccttgctctgtgaccctaatccgaattctcctgcaaactcggaagctgctcggatgtacagcgaaagcaagcgcgagtacaacaggagagtgcgtgatgttgttgagcaaagctggactgctgactagtagtagtttgttgtaagcgttgtagctctctctactttctctcaatcacgattcagcaacagctttcttctcttttcattcatgtcttgtgtttccaaaactatttaagtgattccatgctttgatgtaacccaacatccttaaaaaaacaactttgt

SEQ ID NO: 98128 - protein, 152 aa, Arabidopsis thaliana; identical to SEQ ID NO: 30521
  peptide (1)..(152): Ceres Seq. ID no. 13579882

SEQ ID NO: 98129 - protein, 143 aa, Arabidopsis thaliana; identical to SEQ ID NO: 30522
  peptide (1)..(143): Ceres Seq. ID no. 13579883

SEQ ID NO: 98130 - protein, 121 aa, Arabidopsis thaliana; identical to SEQ ID NO: 30523
  peptide (1)..(121): Ceres Seq. ID no. 13579884

SEQ ID NO: 98131 - DNA, 1208 bp, Arabidopsis thaliana
  misc_feature (1)..(1208): Ceres Seq. ID no. 13580667
  misc_feature (1)..(1208): Ortholog of  Ceres SEQ ID NO 15177674 as cited in SEQ ID NO 52629
  misc_feature (1)..(1208): Ortholog of  Ceres SEQ ID NO 13596541 as cited in SEQ ID NO 62372
atggcagattccacgattaagctaacagtcaaattcggaggcaaatcaataccactttcggtatcaccagattgtacagtcaaagatcttaagtctcagttacaaccaatcaccaacgttcttcctcgtggccagaagctcatcttcaaaggtaaggttttggttgaaacgtcgactttgaaacaatctgatgtgggaagtggagctaaactcatgttaatggcttctcaaggtctgcatcaaggggaaggtccaatacttaaggaagctagtataaggccaatctctagaactgttgtatctgataaagtagatcagagaaagcctagtgtacttgtagacaagaaccgcactgatcgatggaaagccacaggagttattgctttagctcaagccaatttgaaggaaatacctgaagaagtgtgggactgtggatctggagtcagagtacttgacattagtgaaaacttcattaaagaagtacctgccaaaatcagctcctttggttctatgcagaaattgttccttcaaggaaatggtctgtccgatgaatccattcaatgggaagggatagcatctctgaagcgcctgatgcttctgtccattagccataacaatctaactgttctgccatcagcaatgggttcactgacgtctcttagacagcttgatgtcaccaacaacaagttgacaagtctaccgaatgagttaggacttctgacgcagcttgagattttgaaagccaacaacaacagaataactagtcttcctgagagtatcggaaactgttcattcctcatggaggttgatctttcagctaatattatatcagaacttcccgagacattcaccaaactgcgtaatctaaagacgctggagctgaataacacgggattgaagacgctgccatcggctttatttaagatgtgtttgcagctctcaactttaggtctccacaacacagagataaccgttgaatttctccgccagttcgagggatatgatgattttgatgaaagaagacgtaccaagcatcaaaagcagcttgattttcgtgttgtgggatctggccaattcgacgaaggcgctgataaatcttggtgatcaagccaagtcgagtctcgaatcgtcagtactcttaatatatttgtggcactttcagtgaaaaaatctttctccttcatgcctatatattgtttgcttactcc

SEQ ID NO: 98132 - protein, 367 aa, Arabidopsis thaliana
  peptide (1)..(367): Ceres Seq. ID no. 13580668
MADSTIKLTVKFGGKSIPLSVSPDCTVKDLKSQLQPITNVLPRGQKLIFKGKVLVETSTLKQSDVGSGAKLMLMASQGLHQGEGPILKEASIRPISRTVVSDKVDQRKPSVLVDKNRTDRWKATGVIALAQANLKEIPEEVWDCGSGVRVLDISENFIKEVPAKISSFGSMQKLFLQGNGLSDESIQWEGIASLKRLMLLSISHNNLTVLPSAMGSLTSLRQLDVTNNKLTSLPNELGLLTQLEILKANNNRITSLPESIGNCSFLMEVDLSANIISELPETFTKLRNLKTLELNNTGLKTLPSALFKMCLQLSTLGLHNTEITVEFLRQFEGYDDFDERRRTKHQKQLDFRVVGSGQFDEGADKSW

SEQ ID NO: 98133 - protein, 296 aa, Arabidopsis thaliana
  peptide (1)..(296): Ceres Seq. ID no. 13580669
MLMASQGLHQGEGPILKEASIRPISRTVVSDKVDQRKPSVLVDKNRTDRWKATGVIALAQANLKEIPEEVWDCGSGVRVLDISENFIKEVPAKISSFGSMQKLFLQGNGLSDESIQWEGIASLKRLMLLSISHNNLTVLPSAMGSLTSLRQLDVTNNKLTSLPNELGLLTQLEILKANNNRITSLPESIGNCSFLMEVDLSANIISELPETFTKLRNLKTLELNNTGLKTLPSALFKMCLQLSTLGLHNTEITVEFLRQFEGYDDFDERRRTKHQKQLDFRVVGSGQFDEGADKSW

SEQ ID NO: 98134 - protein, 294 aa, Arabidopsis thaliana
  peptide (1)..(294): Ceres Seq. ID no. 13580670
MASQGLHQGEGPILKEASIRPISRTVVSDKVDQRKPSVLVDKNRTDRWKATGVIALAQANLKEIPEEVWDCGSGVRVLDISENFIKEVPAKISSFGSMQKLFLQGNGLSDESIQWEGIASLKRLMLLSISHNNLTVLPSAMGSLTSLRQLDVTNNKLTSLPNELGLLTQLEILKANNNRITSLPESIGNCSFLMEVDLSANIISELPETFTKLRNLKTLELNNTGLKTLPSALFKMCLQLSTLGLHNTEITVEFLRQFEGYDDFDERRRTKHQKQLDFRVVGSGQFDEGADKSW

SEQ ID NO: 98135 - DNA, 1313 bp, Arabidopsis thaliana
  misc_feature (1)..(1313): Ceres Seq. ID no. 13580671
  misc_feature (1)..(1313): Ortholog of  Ceres SEQ ID NO 15174890 as cited in SEQ ID NO 53624
agacaaaacaaacaaacaaaacttcagtctctgcaaagctccatcctttgtggttgtgtcgtagatagccattcgagtggttaaaagttaaaaacttttatgtccacttgaatccttttttgtttctttttggattttatctgatcactcgttttgtgtctctgaatctctatcccgtggattcgcatctggatttgtttttttttcatttttattcgagcggctaacctttctcggatccatctgatatcgattggattctctctaatcaatcgttgaaatggcggatgcgtggaaggatttagcttcagggactgttggaggagctgctcaactagttgttggtcatccatttgacactatcaaggtcaaacttcagagccaaccgactccagcaccaggccaacttccaaggtacaccggtgcaatcgatgcggttaaacagaccgttgcttctgaaggaaccaaaggtttgtataaaggtatgggagctccacttgcaaccgttgctgccttcaatgcggttttgttcactgtgagaggtcaaatggaagggctgcttaggtctgaagctggagttcctttgaccattagtcaacagtttgtggccggtgcaggcgctggtttcgctgtttcgttccttgcttgtcctaccgagttgatcaagtgcaggttgcaagcacaaggtgcattagctggtgcctctactacaagctcagtggttgcagccgtgaaatacggtggaccaatggatgtagcccgtcatgtcctacgatcagaaggaggagcacgaggtctattcaaaggtttattccctacattcgcccgtgaagtcccgggaaatgcaacaatgtttgcagcctacgaagctttcaagcggtttttagccggtggttcagacacttcaagcttaggacaagggtcattgatcatggcgggtggagtcgctggtgcttctttttggggaatagtatatccgacagatgttgtgaagagtgttcttcaagtcgacgattacaaaaacccgagatacacggggtcgatggatgcttttcggaagattctgaaatctgaaggagttaaaggtttgtataaaggatttggtccagctatggctaggagtgttcctgctaatgctgcttgcttcttggcttatgagatgacaaggtcaagcttgggataaaccggttcggtttgggtttaactgttggttcgatttctgaatgttccattgcgattaacctctctgtttttagatttgattcttaaaaaatttctgcaaaatttatgtaccatttacacagtttatttca

SEQ ID NO: 98136 - protein, 300 aa, Arabidopsis thaliana
  peptide (1)..(300): Ceres Seq. ID no. 13580672
MADAWKDLASGTVGGAAQLVVGHPFDTIKVKLQSQPTPAPGQLPRYTGAIDAVKQTVASEGTKGLYKGMGAPLATVAAFNAVLFTVRGQMEGLLRSEAGVPLTISQQFVAGAGAGFAVSFLACPTELIKCRLQAQGALAGASTTSSVVAAVKYGGPMDVARHVLRSEGGARGLFKGLFPTFAREVPGNATMFAAYEAFKRFLAGGSDTSSLGQGSLIMAGGVAGASFWGIVYPTDVVKSVLQVDDYKNPRYTGSMDAFRKILKSEGVKGLYKGFGPAMARSVPANAACFLAYEMTRSSLG

SEQ ID NO: 98137 - protein, 232 aa, Arabidopsis thaliana
  peptide (1)..(232): Ceres Seq. ID no. 13580673
MGAPLATVAAFNAVLFTVRGQMEGLLRSEAGVPLTISQQFVAGAGAGFAVSFLACPTELIKCRLQAQGALAGASTTSSVVAAVKYGGPMDVARHVLRSEGGARGLFKGLFPTFAREVPGNATMFAAYEAFKRFLAGGSDTSSLGQGSLIMAGGVAGASFWGIVYPTDVVKSVLQVDDYKNPRYTGSMDAFRKILKSEGVKGLYKGFGPAMARSVPANAACFLAYEMTRSSLG

SEQ ID NO: 98138 - protein, 211 aa, Arabidopsis thaliana
  peptide (1)..(211): Ceres Seq. ID no. 13580674
MEGLLRSEAGVPLTISQQFVAGAGAGFAVSFLACPTELIKCRLQAQGALAGASTTSSVVAAVKYGGPMDVARHVLRSEGGARGLFKGLFPTFAREVPGNATMFAAYEAFKRFLAGGSDTSSLGQGSLIMAGGVAGASFWGIVYPTDVVKSVLQVDDYKNPRYTGSMDAFRKILKSEGVKGLYKGFGPAMARSVPANAACFLAYEMTRSSLG

SEQ ID NO: 98139 - DNA, 1198 bp, Arabidopsis thaliana
  misc_feature (1)..(1198): Ceres Seq. ID no. 13580678
  misc_feature (1)..(1198): Ortholog of  Ceres SEQ ID NO 14315440 as cited in SEQ ID NO 57161
acctctttcccattcactcatcttctcttccttatctccttaaaaatcttctgctgttttcttttttatatttagagctcctctgtttcttctccaataaccaaaaaaaaaaaaaaactcttcctctgtttgttttcaagttctgacatcataaattcagaccgagaaaacataaaaatttgagtcttttgatgatcggaaactgatgactcccgttctctgcgaaatcctgctctctgggctcacggtcaaatctgctctctgccgtagaacccatctcgttcaatctttctccgtcgtcttcctctactggttttacaacgtttcatgaattgctacaaactctaattaattttttcagacagatcataaaaaaaaaccaaacataaaacataaaactctgtcctttttttgtcttcttgtaacttttcttgttaaaaatcaatggcgtcatctagcagcacataccggagctcaagctcttccgacggtggtaataataacccgtcggactccgtcgtcaccgtcgacgaacgaaaacgtaaaagaatgttatcgaacagagaatctgcacgtaggtcaaggatgcgtaaacagaaacacgttgatgatctaacggctcagatcaatcagctatcaaacgacaaccgtcagatcttgaacagcctcaccgtaacatctcagctttacatgaagatccaagccgagaactctgttctcaccgctcagatggaggagcttagcaccagactccaatctctcaacgagatcgttgatcttgttcaatccaacggtgcaggatttggtgttgaccagatcgacggctgtggttttgatgatcgtacggttgggatcgacggatattacgatgatatgaatatgatgagtaatgttaatcattggggtggttcggtttacactaaccaacccattatggctaatgatatcaatatgtattgattaataaaattaattaaaataattagatgccccttttttgtctttttattttaaaatttagcccattttggtgtttttgggttggtgtgatgatgtaattatagtacatgcatctttgattggttggaaggataaatataaactttatatatatattggggcatatatatatgagttgtactttgtcatgtattggtgtgtgttttgttataattatatgattatatatgtttatgtt

SEQ ID NO: 98140 - protein, 171 aa, Arabidopsis thaliana; identical to SEQ ID NO: 30637
  peptide (1)..(171): Ceres Seq. ID no. 13580679

SEQ ID NO: 98141 - protein, 136 aa, Arabidopsis thaliana; identical to SEQ ID NO: 30638
  peptide (1)..(136): Ceres Seq. ID no. 13580680

SEQ ID NO: 98142 - protein, 124 aa, Arabidopsis thaliana; identical to SEQ ID NO: 30639
  peptide (1)..(124): Ceres Seq. ID no. 13580681

SEQ ID NO: 98143 - DNA, 874 bp, Arabidopsis thaliana
  misc_feature (1)..(874): Ceres Seq. ID no. 13580690
  misc_feature (1)..(874): Ortholog of  Ceres SEQ ID NO 13581804 as cited in SEQ ID NO 51424
  misc_feature (1)..(874): Ortholog of  Ceres SEQ ID NO 13663874 as cited in SEQ ID NO 67003
aaaaaaagctgaattgagttgggtgaagcaaattctcaggatgggaagaggaaagatagaaataaagaggatagagaactcaacaaatcgacaagtgacgttttgcaaaagaagaaatggacttctgaagaaagcctatgagctttcggtcctttgcgatgcagaagttgcgctcattgttttctccactcgtggccgtctctatgaatacgccaataacaacataagatcaaccattgagaggtacaagaaagcttgttctgatagcaccaacactagcactgtccaagaaatcaatgccgcgtactatcaacaagaatctgctaagctgagacaacagatccaaacgattcaaaactccaacaggaatctgatgggagactctttgagttccttaagtgtcaaggaactaaaacaagttgagaatcgccttgagaaagctatctctaggatcaggtccaagaaggagattgagcttgacaatgagaacatctatctaagaactaaggtagcagaagtggagaggtatcaacaacaccatcatcaaatggttagtggttcagagattaatgcaattgaagctttagcctcacgcaattactttgctcatagcattatgactgctggttctggatctggtaatggaggttcttactctgatcccgacaagaaaattcttcatctcggataatctcgtctgcgaaaaaccgagctgcaataactctctgcatgcatctggggattctttgctcagatttatctctacataaaatatgttttggtgcaaaataattcaaagtacaatgaaggtattggtccttcaagactcattgcaatttgtgttgtgtaatgattaagacatactctagttttt

SEQ ID NO: 98144 - protein, 229 aa, Arabidopsis thaliana
  peptide (1)..(229): Ceres Seq. ID no. 13580691
KKAELSWVKQILRMGRGKIEIKRIENSTNRQVTFCKRRNGLLKKAYELSVLCDAEVALIVFSTRGRLYEYANNNIRSTIERYKKACSDSTNTSTVQEINAAYYQQESAKLRQQIQTIQNSNRNLMGDSLSSLSVKELKQVENRLEKAISRIRSKKEIELDNENIYLRTKVAEVERYQQHHHQMVSGSEINAIEALASRNYFAHSIMTAGSGSGNGGSYSDPDKKILHLG

SEQ ID NO: 98145 - protein, 216 aa, Arabidopsis thaliana
  peptide (1)..(216): Ceres Seq. ID no. 13580692
MGRGKIEIKRIENSTNRQVTFCKRRNGLLKKAYELSVLCDAEVALIVFSTRGRLYEYANNNIRSTIERYKKACSDSTNTSTVQEINAAYYQQESAKLRQQIQTIQNSNRNLMGDSLSSLSVKELKQVENRLEKAISRIRSKKEIELDNENIYLRTKVAEVERYQQHHHQMVSGSEINAIEALASRNYFAHSIMTAGSGSGNGGSYSDPDKKILHLG

SEQ ID NO: 98146 - DNA, 3362 bp, Arabidopsis thaliana
  misc_feature (1)..(3362): Ceres Seq. ID no. 13580709
  misc_feature (1)..(3362): Ortholog of  Ceres SEQ ID NO 15170151 as cited in SEQ ID NO 53069
  misc_feature (1)..(3362): Ortholog of  Ceres SEQ ID NO 13594209 as cited in SEQ ID NO 59089
  misc_feature (1)..(3362): Ortholog of  Ceres SEQ ID NO 14313084 as cited in SEQ ID NO 59183
  misc_feature (1)..(3362): Ortholog of  Ceres SEQ ID NO 14308041 as cited in SEQ ID NO 62601
  misc_feature (1)..(3362): Ortholog of  Ceres SEQ ID NO 14303546 as cited in SEQ ID NO 64893
  misc_feature (1)..(3362): Ortholog of  Ceres SEQ ID NO 14308007 as cited in SEQ ID NO 65760
  misc_feature (1)..(3362): Ortholog of  Ceres SEQ ID NO 15170163 as cited in SEQ ID NO 66262
  misc_feature (1)..(3362): Ortholog of  Ceres SEQ ID NO 13502874 as cited in SEQ ID NO 66298
  misc_feature (1)..(3362): Ortholog of  Ceres SEQ ID NO 12614124 as cited in SEQ ID NO 68392
ataggaaacttacatcagatcggagaattaccgcatcagactctatggaaactctcaaagaagtatggtccggtgatgcatttgatgcttggaagagtcccaacagtcgtagtttcttcttcggatacagcaagacaagttttgagagttcatgacctccattgttgtactcgtccaagcttgtcagggccaagagagctttcgtacaactatctggacattgctttctctccttatgatgattattggaaagaagttaggaagctctgtgttcaagaacttttcagtactaaacaagttcactcgattcaacctattaaggacgaggaggtcaagaaaatgatcgattcaattgcggaatcagcctctcagaagaatccggttaacttgaacaataagtgtcttgaattaacagtaagtgtagtatgcaggacagcttttggggttagttttgagggaactgtgctcaacagtgacagattcaacaaaatagtccgcgaggcgctcgagatgttgggaagcttttctgccgcggattttattccgtatgtcggatggatcatcgatgtgttgacgggtttgcaaggaaggagagaaagaagcaagagagatctcaatgcattctttgaacaaatgtttgatttgcataaagagggaaagaaagaagggaatgaagattttgtggacttgctcttaaggttggagaaagaagaggcagttcttggaaatgataaacttacaagaaaccatatcaaagcaatcttgctggtaactaaaacaagatttagctaacaatcctttatgtaatgtagtagtaccaaagagtctgatatgttttgaatgagacaggatgttctacttgcgggaatcgatacttctgcaataacaatgacatgggcaatgacagaacttgcaagaaatccacgagtgatgaagaaagttcaatctgaaataagaactcaaatggggaacagatcaatgataagtttcgaagacatggatcagctagagtatctgaaaatggtgatcaaagaaacatggaggctacatcctacaacacctcttttgcttccaagagaagcaatgtctgaatttgatatcaacggctacactattcctgtcaagacacggcttcatgtgaatgtttgggctattggtcgtgatcctgatacttggaaagaccctgaagtgtttctcccggagaggtttatggataataacattgatgcaaaaggacaacattttgagctgttaccgtttgggggcggtcggagaatctgtcctgcaatatacatggggacaacaatggttgagtttggtctagctaatctcttgtatcattttgactggaagttaccagaaggcgtggaggttaaagatatcgacgtggaagaagctcctggactcactgtaaacaagaaaaacgagctcctacttgtgccagagatgagaagatcgtgtggttgagattagagctgactcatcatatcgacggttatgttgttgttcttgtttgacttttcaaacctaaaaagtatatcttatgaatataaaattaagtttaacgttacgtactacgtagcagagaatatatattgtaagataataataattgaagagagcagcaatgtactagtataatataaagactacacttatggagccactttaattgcaattaaatcagaaatgacaaacatttggcttctgtcacttatcttcgtcatttgtattcttgtagccgtgttcaaccacaagaatcggaggaattatcaacggacaccaccgtctcctcctggctgtcctatcatcggaaacttgcatcaactcggagaattaccacatcaatctctatggaaactctccaaaaagtatggccctgtgatgcttttaaagcttggaagagtaccaacagtcatagtttcttcctctgaaacagcaaaacaagctttgaaaatccatgacctccattgttgtagtcgtccaggctttgcaggggcaagagagctctcttacaactatctagacattgctttttctccttatgatgattattggaaagaagtaaggaagctcgctgttcaagaacttttcagtagtaaacaagttcactctatacaaccgataaaggacgaggaggtcaagaaactgatcgattcaatctccgaatcagctgctcagaagactccgatcaacttgaacaagacattgctggctttaactgttagtgtggtctgcaggacagcgtttagtgtgaattttgagggaactgtgctcaacagtgaacgattcaataacatagtccgtgaggcgctcgagatgttgggaagcttttctgcctcagatttcattccgtatgtcggaaggatcatcgacttgttgacgggtttgcaaggacggcgagagagaagcatgagagatctcgatgctttctatgaacaaatgtttgatctgcataaacagaaaaaggaagaaggtagtgaagactttgtggacttgctgttgaggttggagaaagaagaagctgttcttggaaatgacaagctcactagaaaccatatcaaagcgatattgatggatgttcttctagcaggaatggatacttctgcaataaccatgacatgggcaatggcagaactcgcaaagaatccacgagtgatgaaaaaagttcaatccgaaatcagaagtcaaatcaagaacaaagaaagaatcagctttgatgacactgataagcttgagtacctcaaaatggttatcaaagaaacatggaggttacatcctacaacacctcttctaatcccaagggaagcaatgtctgaatttgagatcaacggctacacgattccagttaagacacggcttcacgtgaatgtatgggctattggtcgtgatcccgatacctggaaagaccctgaagtgtttctcccggagaggtttacggataataatattgatgcaaaaggacagcattttgagctgttaccgtttggaggcggccggagaatgtgtcctgcagtttatatggggacaacaatggtcgagtttggtttggctaatcttttgtatcattttgattggaagttaccagaaggcatgaaggttgacgatattgacatggaagaagctcccggactcactgtcaacaagaaaaacgagcttatacttgtgccaacgaagtttctagatccttaaaataatgtcatcacatggaatatataaaaacatcgcatcttcctttgatgtttaatcagacaggacaaaaaaaaagagtttcttctttttaaataaaatgttttaacgcattacgttttgtaatattgtgctctcaagaatttggttctaagatgggatgatcttgtact

SEQ ID NO: 98147 - protein, 500 aa, Arabidopsis thaliana; identical to SEQ ID NO: 72389
  peptide (1)..(500): Ceres Seq. ID no. 13580710

SEQ ID NO: 98148 - protein, 435 aa, Arabidopsis thaliana; identical to SEQ ID NO: 72390
  peptide (1)..(435): Ceres Seq. ID no. 13580711

SEQ ID NO: 98149 - protein, 290 aa, Arabidopsis thaliana; identical to SEQ ID NO: 72391
  peptide (1)..(290): Ceres Seq. ID no. 13580712

SEQ ID NO: 98150 - DNA, 1414 bp, Arabidopsis thaliana
  misc_feature (1)..(1414): Ceres Seq. ID no. 13580721
  misc_feature (1)..(1414): Ortholog of  Ceres SEQ ID NO 15171386 as cited in SEQ ID NO 51479
tggatttgtgagagaagaaaaaaaagcacaatctttgaatggactggaatttcaaacttagctctggttatttatctggattcgatcaagaaccagatttatcaccaatggatggttcgatctcgtttggtgggtcgtcacagtcaaaagcggatttttcatttgatctaaaacttggaagaaacattggaaactcttcctctgtttttggtgatacagagcaagtgattagtcttagtaagtggaaagatagtgctttagctaaaccagaaggttcaagaagctcgagttcaaagagaacaagagggaatggtgttggaaccaaccagatgccgatttgtcttgttgatggatgtgattctgattttagtaattgtagagagtatcataagagacataaagtttgtgatgttcattcaaaaactcctgtggttactattaatggtcataaacagaggttttgtcaacaatgcagcaggtaagattgtgtgttaatggtttaagcttcttgttgggttggtgaagatgttaacatttgtgtctaattaggtttcatgctttggaggagtttgatgaagggaagagaagttgtaggaaacgtcttgatggacataatcgaagacgacggaagccgcagcctgaacatatcggtcgtcctgccaacttctttacgggttttcaaggtttctgttttaagaaaagttagttagtttcttgaatccaatagaccgttccttgttgatgaagaagcattgttttatgttttcaggtagcaaattgctagagttttctggtggttcacatgtgtttccaactacatctgtgttgaacccgagctggggaaatagtcttgtaagcgttgctgtagccgccaatggttcgagttatgggcagagccagagctatgttgttggttcttctcctgcaaagacagggataatgtttccaatctcttcttctccaaacagtaccagaagcatagcaaaacaattccctttcttgcaagaagaagaaagctcgagaaccgcatcgttgtgtgagagaatgacgagttgcatccatgactctgattgtgctctctctcttctgtcatcctcctcgtcgtcagtccctcatttgcttcaaccaccactttctttgtcccaagaagcagttgagacagttttttacgggtcgggattgtttgagaatgcgagtgcagtctctgatggatcggttatatccggtaacgaggctgtccgtcttccgcagacattcccgtttcattgggagtagtagaagaagaagtaggtagatagatagaatcagaaagatctatttgtgtctcttctcttctccctcatttttcaatgttctttatcatcatcattgttcttgttaacactacaagaaatatggacattcttaacacacc

SEQ ID NO: 98151 - protein, 177 aa, Arabidopsis thaliana
  peptide (1)..(177): Ceres Seq. ID no. 13580722
MKKHCFMFSGSKLLEFSGGSHVFPTTSVLNPSWGNSLVSVAVAANGSSYGQSQSYVVGSSPAKTGIMFPISSSPNSTRSIAKQFPFLQEEESSRTASLCERMTSCIHDSDCALSLLSSSSSSVPHLLQPPLSLSQEAVETVFYGSGLFENASAVSDGSVISGNEAVRLPQTFPFHWE

SEQ ID NO: 98152 - protein, 171 aa, Arabidopsis thaliana
  peptide (1)..(171): Ceres Seq. ID no. 13580723
MFSGSKLLEFSGGSHVFPTTSVLNPSWGNSLVSVAVAANGSSYGQSQSYVVGSSPAKTGIMFPISSSPNSTRSIAKQFPFLQEEESSRTASLCERMTSCIHDSDCALSLLSSSSSSVPHLLQPPLSLSQEAVETVFYGSGLFENASAVSDGSVISGNEAVRLPQTFPFHWE

SEQ ID NO: 98153 - protein, 147 aa, Arabidopsis thaliana
  peptide (1)..(147): Ceres Seq. ID no. 13580724
MDWNFKLSSGYLSGFDQEPDLSPMDGSISFGGSSQSKADFSFDLKLGRNIGNSSSVFGDTEQVISLSKWKDSALAKPEGSRSSSSKRTRGNGVGTNQMPICLVDGCDSDFSNCREYHKRHKVCDVHSKTPVVTINGHKQRFCQQCSR

SEQ ID NO: 98154 - DNA, 1959 bp, Arabidopsis thaliana
  misc_feature (1)..(1959): Ceres Seq. ID no. 13580725
  misc_feature (1)..(1959): Ortholog of  Ceres SEQ ID NO 14316459 as cited in SEQ ID NO 57754
aatgtccattacaaacaacaacagcatcataaatctcatcacgacgaactttcttctctttctccgtcgattcaatcctccacttcccgattccttcctccgccgccggagaaaccttcacaacctccgtctcaaacctaaccatctcctcaatcccaaactccttagcgaaatctttcaaatacgccaaaacttcgccatgactcggaaacctcctccgatctctagacacaccggaacgaaccacgaacgggaaatctctgtatccggtacactctcgtgtaccgttgattcgtagagatctatagacgcttgaatgaacaacggatcgggtcgggtcaacacttaacggatccgattcgacttcatcggtgtaaatccaggttcctcccacttgtttttgtttctcgaaaacgaccactgagtgaccttctcgtcgaagctctcgtgccgctactagtccggcgggtccagcaccgataaccgccacgtggtgtgatctgaagcaggtattgaagcaattggagccatggtgtgaacttaaagataaagtggttcttgtgacaggtgcttcctctggtatagggagagagatctgtcttgatctatgcaaagctggttgtaagattgtagcagcagctcgtcgtgttgatcgtctcaactctctctgttctgaaatcaacagctttggtgctatcggagtccaagccgtagcacttgagctagacgtttcatcagaagcagacactattcgaaaagcggttaaagaagcttgggaaacctttggaaagatcgatgttttgatcaataatgccggaatcagaggcaatgtcaagtcgagtttggatttgtcagaagaagaatgggacaaagtctttagaaccaacttaaccggatcttggttaatatccaaatacgtctgccttttgatgcgtgacgctgagcgcgggggctcggtgattaacgtctcgtcgatctctgggcttcatcgcggtttgttgcgcggtggactagcgtatgcttgttccaaaggtggtgttgacaccatgacgaggatgatggctattgagttagctgtttataagatcagagtgaactcgatcgcaccggggattttcaggtcagagatcacacaaggtcttttccagaaagagtggctcaagaaggttacggaaaaggttgtaccattaaagatgcaacagactgtggatccggggcttacatctcttgttcgctatctcattcacgattcttctcaatatgtcaccgggaatacatacattgtcgattccggaactacactgcccggtgtgcccattttttcttctctttctccgtagattcaattctccatttcccgcttccttcttccgccgccggagcaaccttcacaaccgccgtatcaaaccgaatcatctcctcgatcgcaaactccttagcgaaatcttgtaaatacgccaaaacttcaccatgactcggaaacctcctcggatctctagattccgatacaccggaacgaaccacgaacgggaagtccctgtatcccatacactcacgggggagattagttcggagagagccataaacgctcgaatgaacaacggatcgggtcgggtcaacgcttaatggatcgggttcgatatgatcggtgtatatccaggttcctccgacttgtttttgtctttcgaagacgaccaccgagtgaccttcccgtcgaagctctcgcgccgctactaatccggcggctccggcgccgataactgccgcgtggtgtgatctgattggtgataaggaaggcgccattggtttttttaacgagattcgttaacgatggtgaatatactacggcctttttataaatatgtggcccaaaaactcatgatccacacacaccacgacacaatgttaaaaaaacaaaaacaaattcctgagaaattatctaaacgctgcgttttatcg

SEQ ID NO: 98155 - protein, 136 aa, Arabidopsis thaliana; identical to SEQ ID NO: 79520
  peptide (1)..(136): Ceres Seq. ID no. 13580726

SEQ ID NO: 98156 - protein, 98 aa, Arabidopsis thaliana; identical to SEQ ID NO: 79521
  peptide (1)..(98): Ceres Seq. ID no. 13580727

SEQ ID NO: 98157 - protein, 97 aa, Arabidopsis thaliana; identical to SEQ ID NO: 79522
  peptide (1)..(97): Ceres Seq. ID no. 13580728

SEQ ID NO: 98158 - DNA, 3155 bp, Arabidopsis thaliana
  misc_feature (1)..(3155): Ceres Seq. ID no. 13580733
  misc_feature (1)..(3155): Ortholog of  Ceres SEQ ID NO 13599900 as cited in SEQ ID NO 531
  misc_feature (1)..(3155): Ortholog of  Ceres SEQ ID NO 12625335 as cited in SEQ ID NO 63326
  misc_feature (1)..(3155): Ortholog of  Ceres SEQ ID NO 13659971 as cited in SEQ ID NO 67565
  misc_feature (1)..(3155): Ortholog of  Ceres SEQ ID NO 13500385 as cited in SEQ ID NO 67583
  misc_feature (1434)..(1434): n is a, c, t, g, unknown, or other
  misc_feature (1436)..(1436): n is a, c, t, g, unknown, or other
  misc_feature (1438)..(1438): n is a, c, t, g, unknown, or other
atcaaaaaatagaaatttcttacttttttcaaaattcatttctccccaaaaaaaatatcttgtgaaaactgcaactgtgatccatggcggaggatatggctgccgacgaagttacggctcctcctcgtaaggttcttatcatctccgctggtgctagccactccgtcgctcttctctctggtgacattgtttgttcttggggtcgaggagaggatggacagttaggtcatggcgatgcagaggatcgaccttctccgactcagcttagcgctttagatggccaccaaattgtttccgttacctgtggtgctgatcacactgttgcttattcacaatcaggcatggaagtctacagttggggatggggtgattttgggagattaggccatggtaactcaagcgacttgtttactccgctaccaatcaaagcattgcacggtattcggatcaagcagattgcttgtggggatagtcattgtttggctgtcactatggaaggagaggtccagagttggggccgcaaccagaatggtcaacttggtctgggggacaccgaagattctctagtgcctcagaagattcaagcctttgagggaatacgaatcaaaatggttgctgctggtgcagaacacactgctgcagttacagaagatggtgacctctatggatggggctggggaagatacggaaatttgggattaggtgaccggactgaccgcttagttcctgaaagagttacctctactggtggtgagaaaatgtcaatggttgcttgtggatggcggcacacaatatcagtttcctactctggagcattgtatacttatggatggagcaaatatggacagctaggacatggagacttggaggatcaccttattcctcacaaactggaagcactgagcaacagttttatctcccagatttcgggaggttggagacatacaatggcattgacttcagatggaaaactatatggatggggttggaataagtttggacaagtaggagtcggcaataatttagatcagtgttctcctgtgcaagtgcgatttcccgatgatcagaaagtagttcaagtctcatgtggatggagacataccttggctgtcactgaaagaaataacgtgtttgcttggggtagaggtacaaatggacagctcggcattggagagtcggttgacaggaactttcccaagattatagaggcactcagcgtcgatggagcaagtggacaacatatagaatcttctaatatcgatccatcttcagggaaaagctgggtgtcgcctgcagagagatatgcagttgttcctgatgaaacgggcctaacggatggttcaagcaaaggtaatggaggtgatatcagtgttccacaaactgatgtcaagcgtgtacgaatttgagcctgagtcaattccgtttttttttccnananatctcttgttgctccttgtattagcccatcatttttttatttctcctgcgaattctccgccatagattttcttttgaatttctcctgctaactcttgagctccccaaaggcggctacatcggttttgtcacctctactcgctcacttttctccgtccaattttgcagcttttgaagatcaagaggtgaacattcggagtgatgaatcggccaaaggttcagcgtcgtgttggaaagtatgaggttggaaagacgcttggacaaggcacttttgcgaaagttcggtgtgctgttaatactgagacaggagaacgcgtggctctcaaaatacttgataaggagaaggttcttaagcataagatggctgaacagataaggagagaaatttgtactatgaagctgataaaccatccaaatgtagtgcggctgtatgaggttttggcgagcaagactaagatatatattgttctagagttcggcactggtggagagctttttgacaaaattgtacatgatgggcgcttgaaagaagagaatgcacggaaatattttcagcagcttattaatgcagttgattactgccatagcaggggaagtgtaccaccgggacttaaagccggaaaaacttgcttctagatgctcaaggaaatctgaaagtctctgattttggattgagtgcgttgtcccgacaagtcaggggtgatggtcttcttcacactgcatgcggaactccaaactatgctgctcctgaggttcttaatgatcaaggttatgacggggcaaccgcagacttgtggtcctgtggagtgatactctttgtactacttgctggctacttgcctttcgaggattctaatctcatgacgctgtataaaaagataatagctggtgaatatcattgtcctccttggctctctcctggtgctaagaacttgattgtccgaatcttggatccaaaccctatgactcgtatcacaattccagaggttctgggagatgcgtggttcaagaaaaattacaagccagctgttttcgaggagaaggaagaagccaacttggatgatgtggacgctgttttcaaagattcagaagagcatcatgtcacagaaaagaaagaggagcaaccaacttcaatgaatgcctttgagttgatatcaatgtcgagagctctggatctcgggaatttgtttgaagaagaagagggattcaagcgagaaacgagatttgctgctaaaggtgctgctaatgatttagtccaaaagattgaagaagcttctaagccgcttggtttcgatattcaaaagaaaaactataagatgagacttgaaaacgtgactgctggaaggaaaggaaacctaagagttgcaactgagatatttcaagtatcaccgtctcttcatatgatcgaagtccggaaaacgaaaggggatacactagaattccataagttctacaagaagctctcaacctcacttaacgatgtggtttggaaatctggcgagagctctggtctaagcaaataagaaaaaagactgatgattcaagtccttgctttgactatcttttatttagctttttgctgatactttctttcaagactcaattcttttaaatattagagacaaaaagccatgagattgatgactctgtagatatcgaagcatgtgcagtaagtttatgctgttcatataattgcaaacttcgattgtgttgtgtct

SEQ ID NO: 98159 - protein, 440 aa, Arabidopsis thaliana
  peptide (1)..(440): Ceres Seq. ID no. 13580734
MAEDMAADEVTAPPRKVLIISAGASHSVALLSGDIVCSWGRGEDGQLGHGDAEDRPSPTQLSALDGHQIVSVTCGADHTVAYSQSGMEVYSWGWGDFGRLGHGNSSDLFTPLPIKALHGIRIKQIACGDSHCLAVTMEGEVQSWGRNQNGQLGLGDTEDSLVPQKIQAFEGIRIKMVAAGAEHTAAVTEDGDLYGWGWGRYGNLGLGDRTDRLVPERVTSTGGEKMSMVACGWRHTISVSYSGALYTYGWSKYGQLGHGDLEDHLIPHKLEALSNSFISQISGGWRHTMALTSDGKLYGWGWNKFGQVGVGNNLDQCSPVQVRFPDDQKVVQVSCGWRHTLAVTERNNVFAWGRGTNGQLGIGESVDRNFPKIIEALSVDGASGQHIESSNIDPSSGKSWVSPAERYAVVPDETGLTDGSSKGNGGDISVPQTDVKRVRI

SEQ ID NO: 98160 - protein, 436 aa, Arabidopsis thaliana
  peptide (1)..(436): Ceres Seq. ID no. 13580735
MAADEVTAPPRKVLIISAGASHSVALLSGDIVCSWGRGEDGQLGHGDAEDRPSPTQLSALDGHQIVSVTCGADHTVAYSQSGMEVYSWGWGDFGRLGHGNSSDLFTPLPIKALHGIRIKQIACGDSHCLAVTMEGEVQSWGRNQNGQLGLGDTEDSLVPQKIQAFEGIRIKMVAAGAEHTAAVTEDGDLYGWGWGRYGNLGLGDRTDRLVPERVTSTGGEKMSMVACGWRHTISVSYSGALYTYGWSKYGQLGHGDLEDHLIPHKLEALSNSFISQISGGWRHTMALTSDGKLYGWGWNKFGQVGVGNNLDQCSPVQVRFPDDQKVVQVSCGWRHTLAVTERNNVFAWGRGTNGQLGIGESVDRNFPKIIEALSVDGASGQHIESSNIDPSSGKSWVSPAERYAVVPDETGLTDGSSKGNGGDISVPQTDVKRVRI

SEQ ID NO: 98161 - protein, 354 aa, Arabidopsis thaliana
  peptide (1)..(354): Ceres Seq. ID no. 13580736
MEVYSWGWGDFGRLGHGNSSDLFTPLPIKALHGIRIKQIACGDSHCLAVTMEGEVQSWGRNQNGQLGLGDTEDSLVPQKIQAFEGIRIKMVAAGAEHTAAVTEDGDLYGWGWGRYGNLGLGDRTDRLVPERVTSTGGEKMSMVACGWRHTISVSYSGALYTYGWSKYGQLGHGDLEDHLIPHKLEALSNSFISQISGGWRHTMALTSDGKLYGWGWNKFGQVGVGNNLDQCSPVQVRFPDDQKVVQVSCGWRHTLAVTERNNVFAWGRGTNGQLGIGESVDRNFPKIIEALSVDGASGQHIESSNIDPSSGKSWVSPAERYAVVPDETGLTDGSSKGNGGDISVPQTDVKRVRI

SEQ ID NO: 98162 - DNA, 3309 bp, Arabidopsis thaliana
  misc_feature (1)..(3309): Ceres Seq. ID no. 13580737
  misc_feature (1)..(3309): Ortholog of  Ceres SEQ ID NO 15170524 as cited in SEQ ID NO 55695
atggcgatgctttctactgcttccgtttcggggagcgtcgaccttcctcgaggaaccatgaaggttgactcgtctgcgtctccggaggtcgtatccgatctcccaccatcttccccaaagggctcacctgatcgccatgacccttccacttcttctccgagccccagtcgtggtggtgacaatcagtctgaagtcatatccaagagtgaagagtatcggcaattgtttcggcttccagctgacgaaatccttgttcaagattttaactgtgcttgtcaggagagtattcttatgcagggtcatatgtacctcttcatccattatatctgcttttactccaacatctttggttatgagaccaagaaaattatcccatttgctgaaatatcttgtgttaaacgagccaagactgctggtatttttcctaatgccattgagattttagctggagggaagaagtacttttttgcatcgtttctttcccgcgatgaagctttcaagcttatccatgatggatggttggaatatggtagtgctgtcaaatcagaaggcgagattctggtgaccgaaccgcaggtaagcgatggagttgttaaaagggcacgcagttccatggatttggccaatgaactagatattccagtaagggatgaaactcttcatctttccagcagttccagtcttcctgtcattagtcagaatggcgttccaccttcatccgttcagcggcacgctgaaccagatgtagatgttgtggcggccaatactttcaactggaagcctgaagatacagatgcacctaaattgtcatctgactttacaaaggtagcagaggcaaagttttcgattccagtagaagagttctttagattgtttttttcagatggtgctgtcagttttgttgaatctttccataaaaattgtggagacaaagagtttaggtgtacctcttggcaacctcatgaaaagcttggacacacccgcaatgtctcatttcaacatccgataaaaatttattttggtgcaaagtttggtggctgccaggagtcacagaaatttcggatgtacagaaatagccatctggttattgaaacatcacacagatcagcgatgtgccttatgcagattattttacggtagagggagtctgggacttgaaaagagattgcagagactcggtagaaggtggatttgcccctatatttccagacatctgttatcacttaacccattacaagcccgctgccgcagatattcccgtggcgagcgataacccagcgcactatgcggatgccattcgttataatgctcgaacgcctctgcaaggttctttgctgccgttaacccgtctggtttgggcatgatactgatgtagtcacgctttatcgttttcacgaagctctctgctattccgttactctccggactccgcaccgccgtgttcttcggttcaagtcccaacatccgggcgaactggcgtgtttcattagcccggtagcatgaaccattatccgtcagccactccactggagacgacggaagatcgttgccgaagcggcgttccaccgctcccagcatgacgtcctgtactgtttcactgttgaagccgccggtagtgaccgcccagtgcagtgcctcacgatcacagcagtccagcgcgaacgtgacacgcagtctctctccgttatcacagcagaactcgaacccgtcagagcaccatcgctgattgctttctttcacggccactctgcctgtatgtgcccgtttcgatggcggtacagcaggttttcgctcaagcaacagcgcattctggcgcatgatccggtaaacacgtttggcattgatcgcaggcataccatcaagttctgcctgtctgcgaagcagcgcccatacccgacgataaccatacgttggcagctctccgataacatggtgtatacggagaagcacatccgtatcatcagtgtgacgactgcggcggccatccatccagtcatcggttcgtctgagaatgacgtgcaactgcgcacgcgacacccggagacaacggctgactaagcttactccccatccccgggcaataagggcgcgtgcgctatccacttttttgcccgtccatattcaacggcttctttgaggagttcattttccatcgttttcttgccgagcaggcgctggagttctttaatctgcttcatggcggcagcaagttcagaggcaggaacaacctgttctccggcggcgacagcagtaagacttccttcctggtattgcttacgccagagaaataactggctggctgctacaccatgttgccgggcaacgagggagaccgtcatccccggttcaaagctctgctgaacaattgcgatcttttcctgtgtggtacgccgtctgcgtttctccggccctaagacatcaatcatctgttctccaatgactagtctaaaaactagtattaagactatcacttatttaagtgatattggttgtctggagattcagggggccagtctagaaggttgtatattggatgtttatgtcaatgtggccttctctaaaagaacagtgtggaaagggaaaatagtgcagtctactttagaagaatgtagagaagcttatgcacattggataagaatggcacatgaactgttgaagcagaagaagctggagaaccaagaagggaataagttgattgaggatggtgaaccgctagcagcaagggaagaaagagtatctgaatgtgacgaggaggggaaggtggaaatggtgggcgaaggggtagttaaaaaaagcttaaaggaagcatgggtgaatctgacttcatttgtgaagaggcaaagcgggacaaggcaggttatagtattagcgtttgcagtaatcttactgatgcaggtgacgatagtggtgctactgaaaaaaggaggaggggggcaagtggagtatcatgagaggtacgacgagtacagtgtaaacggggagactttggggtggttagagaagagaatgcatttcctgagggaagagatgatgatggttgaggatcgtttgcagaggatgcgacaagaccatgccgccttgaaggctcagttccaccatttggaacgcctcctccgccgcaacaaacagtaaatttgctacaccctactctctgtttgtgcagaatgcggatggatatatgcatgtatgtatgtaatgtattatcggacgttactttgcaaagttgttgttatacctacctactcatatgaatatgagcagagactctgttaaacgaaatgatgtaatcaattgtattcgtgttgcacc

SEQ ID NO: 98163 - protein, 379 aa, Arabidopsis thaliana
  peptide (1)..(379): Ceres Seq. ID no. 13580738
MAMLSTASVSGSVDLPRGTMKVDSSASPEVVSDLPPSSPKGSPDRHDPSTSSPSPSRGGDNQSEVISKSEEYRQLFRLPADEILVQDFNCACQESILMQGHMYLFIHYICFYSNIFGYETKKIIPFAEISCVKRAKTAGIFPNAIEILAGGKKYFFASFLSRDEAFKLIHDGWLEYGSAVKSEGEILVTEPQVSDGVVKRARSSMDLANELDIPVRDETLHLSSSSSLPVISQNGVPPSSVQRHAEPDVDVVAANTFNWKPEDTDAPKLSSDFTKVAEAKFSIPVEEFFRLFFSDGAVSFVESFHKNCGDKEFRCTSWQPHEKLGHTRNVSFQHPIKIYFGAKFGGCQESQKFRMYRNSHLVIETSHRSAMCLMQIILR

SEQ ID NO: 98164 - protein, 377 aa, Arabidopsis thaliana
  peptide (1)..(377): Ceres Seq. ID no. 13580739
MLSTASVSGSVDLPRGTMKVDSSASPEVVSDLPPSSPKGSPDRHDPSTSSPSPSRGGDNQSEVISKSEEYRQLFRLPADEILVQDFNCACQESILMQGHMYLFIHYICFYSNIFGYETKKIIPFAEISCVKRAKTAGIFPNAIEILAGGKKYFFASFLSRDEAFKLIHDGWLEYGSAVKSEGEILVTEPQVSDGVVKRARSSMDLANELDIPVRDETLHLSSSSSLPVISQNGVPPSSVQRHAEPDVDVVAANTFNWKPEDTDAPKLSSDFTKVAEAKFSIPVEEFFRLFFSDGAVSFVESFHKNCGDKEFRCTSWQPHEKLGHTRNVSFQHPIKIYFGAKFGGCQESQKFRMYRNSHLVIETSHRSAMCLMQIILR

SEQ ID NO: 98165 - protein, 360 aa, Arabidopsis thaliana
  peptide (1)..(360): Ceres Seq. ID no. 13580740
MKVDSSASPEVVSDLPPSSPKGSPDRHDPSTSSPSPSRGGDNQSEVISKSEEYRQLFRLPADEILVQDFNCACQESILMQGHMYLFIHYICFYSNIFGYETKKIIPFAEISCVKRAKTAGIFPNAIEILAGGKKYFFASFLSRDEAFKLIHDGWLEYGSAVKSEGEILVTEPQVSDGVVKRARSSMDLANELDIPVRDETLHLSSSSSLPVISQNGVPPSSVQRHAEPDVDVVAANTFNWKPEDTDAPKLSSDFTKVAEAKFSIPVEEFFRLFFSDGAVSFVESFHKNCGDKEFRCTSWQPHEKLGHTRNVSFQHPIKIYFGAKFGGCQESQKFRMYRNSHLVIETSHRSAMCLMQIILR

SEQ ID NO: 98166 - DNA, 1492 bp, Arabidopsis thaliana
  misc_feature (1)..(1492): Ceres Seq. ID no. 13580741
  misc_feature (1)..(1492): Ortholog of  Ceres SEQ ID NO 14310740 as cited in SEQ ID NO 53755
  misc_feature (1)..(1492): Ortholog of  Ceres SEQ ID NO 13596202 as cited in SEQ ID NO 68492
aagataacagaaaaacaaaaacaaaaatttctgctttgaagaagaagagtcgatccataatcgccactttcagatttccagattctggggaaacatctctaaactcttcaacgatggcgactgagaatctcaccgataagaatgttgttttcagaaagctgaaatcaaaatccgagaacaaggtttgctttgattgtagtgcgaagaatccaacatgggcttctgttccttatgggatcttcctatgcatcgattgttctgctgttcatcgaagtctaggtgttcatatcagcttcgtcaggtcaacgaacttagactcgtggagtcctgagcagctaagaacaatgatgtttggagggaacaatcgagctcaggtgttttttaagcaacatggatggaatgatggtggtaagattgaggctaagtatacttcaagagctgctgatatgtatagacagactcttgctaaagaagttgctaaagccatggctgaagaaactgttttaccgtcgttatcctctgttgctacttctcagccagtggaatcatctgaaaatgggtttacttctgaatctccgaaagagagttctttgaagcaagaagcagctgttgtctcttcaccaaaagcttctcagaaagttgttgctagtacgtttaagaaacctcttgtttcgcgaaagtctgggaagactggtggtcttggtgctcgtaagcttactactaagtcaaaggataacctctatgagcagaagcctgaagaacctgtacctgtgattcctgctgcttctccaaccaatgacacatcagcagctggatcatcatttgcctctcgatttgagtactttgatgatgagcaatctggtgggcaaagtggcacacgggtgcttagccatgttgctccaccaaagtcatcaaatttctttaatgaatttggaatggacagtgctttccccaagaagtcaagctcaagctcatccaaagctcaggttgaagaaacagatgaagcaagaaagaagttttcaaacgccaaatcgatttcctctgcccaatttttcggaaatcagaacagagatgccgatcttgactcaaaagctacccttcagaagttctcgggttcagcagctatttcaagttctgatctttttggccacggaccagatgattccaacatcgatatcactgcaagcgatctcatcaaccgaatttctttccaggcgcagcaagatatgtcatctattgctaacttagctgaggaaacaaagaataagctgggaacatttgcctctagtatattcagtgatcttcaggatagaatgctgtaagaaacatacaaaggatcttgtcttttgatttacagagaacaaattgttggatataaatgtcatttttatttttggtttgactttgtagttgaaagagtgatttttgaggtaaattgttaaatgtggaatttgataatttgatgtggatatggtagaatatgttacagtat

SEQ ID NO: 98167 - protein, 439 aa, Arabidopsis thaliana
  peptide (1)..(439): Ceres Seq. ID no. 13580742
DNRKTKTKISALKKKSRSIIATFRFPDSGETSLNSSTMATENLTDKNVVFRKLKSKSENKVCFDCSAKNPTWASVPYGIFLCIDCSAVHRSLGVHISFVRSTNLDSWSPEQLRTMMFGGNNRAQVFFKQHGWNDGGKIEAKYTSRAADMYRQTLAKEVAKAMAEETVLPSLSSVATSQPVESSENGFTSESPKESSLKQEAAVVSSPKASQKVVASTFKKPLVSRKSGKTGGLGARKLTTKSKDNLYEQKPEEPVPVIPAASPTNDTSAAGSSFASRFEYFDDEQSGGQSGTRVLSHVAPPKSSNFFNEFGMDSAFPKKSSSSSSKAQVEETDEARKKFSNAKSISSAQFFGNQNRDADLDSKATLQKFSGSAAISSSDLFGHGPDDSNIDITASDLINRISFQAQQDMSSIANLAEETKNKLGTFASSIFSDLQDRML

SEQ ID NO: 98168 - protein, 402 aa, Arabidopsis thaliana; identical to SEQ ID NO: 78261
  peptide (1)..(402): Ceres Seq. ID no. 13580743

SEQ ID NO: 98169 - protein, 325 aa, Arabidopsis thaliana; identical to SEQ ID NO: 78262
  peptide (1)..(325): Ceres Seq. ID no. 13580744

SEQ ID NO: 98170 - DNA, 1008 bp, Arabidopsis thaliana
  misc_feature (1)..(1008): Ceres Seq. ID no. 13580749
  misc_feature (1)..(1008): Ortholog of  Ceres SEQ ID NO 15172070 as cited in SEQ ID NO 59663
ataagcttgagaacacttgaaaagacaagattcgcgagttcttcgttctgcctttttttttttttttgtgtgttcgagagatgtctgcctttgaagacgattccttcgtcatactcaacgatgatgcgtctgagtctgttccagtctcaggctcttttgacgccactgattctttctcagctttcgacggctcactccaagtcgaggactccgtcgacgatgtttttgcagcgccgtcttctgactacggtgcttactccaacggtgacggcatcttcggatccaacggggatcacgacggtcctatcttgccaccaccgtcggagatggaatcagatgagggatttgctcttagagaatggagaagacaaaatgcaattcaacttgaggagaaggagaagagagaaaaggaattgttgaagcaaattattgaggaagctgatcaatacaaagaagagtttcataagaagattgaagtaacttgtgaaaacaacaaagcagctaacagagagaaggaaaagctgtatctggagaaccaagagaagttctacgcggaatccagcaagaattactggaaggcaatagcagagctagttcctaaagaagttccaacaatagagaaaaggagaggaaaaaaagagcaacaagatcctaagaagccaacagtctctgtgattcaaggtccaaagcccggtaagccaaccgatctaacaagaatgagacaaatattggtgaagctcaaacacaacccaccttctcacctgaaactcacttctcaacctccatcggaggaggcggctgctcctccaaagaatgttcccgaaaccaagcccactgaggcagttactgctgcttaaaaacctcctttgttttcttattcgttgcttacatctgtgtgaattcagtctttgcatttcattatgtgttataaacagctgagagattttatggttcatgtgtgttattaacataattatgtcatattggaatgataactttttatgtttt

SEQ ID NO: 98171 - protein, 258 aa, Arabidopsis thaliana
  peptide (1)..(258): Ceres Seq. ID no. 13580750
MSAFEDDSFVILNDDASESVPVSGSFDATDSFSAFDGSLQVEDSVDDVFAAPSSDYGAYSNGDGIFGSNGDHDGPILPPPSEMESDEGFALREWRRQNAIQLEEKEKREKELLKQIIEEADQYKEEFHKKIEVTCENNKAANREKEKLYLENQEKFYAESSKNYWKAIAELVPKEVPTIEKRRGKKEQQDPKKPTVSVIQGPKPGKPTDLTRMRQILVKLKHNPPSHLKLTSQPPSEEAAAPPKNVPETKPTEAVTAA

SEQ ID NO: 98172 - protein, 176 aa, Arabidopsis thaliana; identical to SEQ ID NO: 27014
  peptide (1)..(176): Ceres Seq. ID no. 13580751

SEQ ID NO: 98173 - protein, 139 aa, Arabidopsis thaliana
  peptide (1)..(139): Ceres Seq. ID no. 13580752
ISLRTLEKTRFASSSFCLFFFFCVFERCLPLKTIPSSYSTMMRLSLFQSQALLTPLILSQLSTAHSKSRTPSTMFLQRRLLTTVLTPTVTASSDPTGITTVLSCHHRRRWNQMRDLLLENGEDKMQFNLRRRRREKRNC

SEQ ID NO: 98174 - DNA, 1814 bp, Arabidopsis thaliana
  misc_feature (1)..(1814): Ceres Seq. ID no. 13580753
  misc_feature (1)..(1814): Ortholog of  Ceres SEQ ID NO 14308698 as cited in SEQ ID NO 58663
atgcatcattttgtccctgacttcgataccgatgatgattatgtcaacaaccataattcttctttgaatcatcttcctagaaaatccattactactatgggtgaagatgatgatcttatggagcttttatggcagaacggtcaagttgttgttcaaaaccagagacttcacaccaagaaaccttcttcttctccaccgaagcttcttccttctatggatcctcagcagcaaccttcttcagatcagaatctttttattcaagaagatgaaatgacttcttggcttcattatcctctccgtgacgatgatttctgctcagatcttctcttctccgccgcacctactgcgacggctaccgcgacggtgagtcaagtcaccgccgcgagaccgccagtatcttcgacgaatgagtcgaggccgccggtgaggaacttcatgaatttctcgaggctgagaggggattttaataacggtagaggtggtgaatctggaccgttgctttcgaaggcggttgtgagagaatctacgcaggtaagtcctagcgcaacaccgtcggcggcggcgagtgaatccggtttaacacggcggacggatggtactgacagttccgccgtagctggaggcggcgcgtataatcggaagggaaaagcagtggctatgacggcgccggcgatcgagataaccggtacatcgtcatctgtagtgtcaaagagcgaaatcgaaccggagaagacgaacgtcgatgataggaaacgaaaagagagagaagccaccactactgatgaaactgaatcccgtagcgaggaaacaaaacaagcacgtgtatcaacaacatctaccaagagatctcgtgctgctgaagttcataatctctctgaaagaaaacggagagataggatcaatgagagaatgaaagctttgcaagaacttatacctcgctgcaacaagtcagataaagcttcgatgctagatgaagctattgagtacatgaaatctcttcagcttcaaatacagatgatgtcaatgggatgtggaatgatgccaatgatgtatccgggcatgcaacagtacatgcctcatatggcgatgggtatgggtatgaaccagcctattcctcctccttccttcatgccattccccaacatgttagccgctcaaagacctttgcctacacaaactcacatggccgggtcaggaccgcaataccctgttcatgcttctgacccgtcaagagtctttgtaccgaaccagcagtatgatccaacctcgggccagcctcagtatccagctggttacacggatccatatcagcagttccgcggtctccacccgacccaaccacctcagtttcagaatcaagcaacatcgtacccaagttcgagcagggtgagtagtagtaaggaatctgaggatcacggaaaccacacaacaggttaataatgtccatggagcaacaagaagatctgttttcacaagcaaacacaatttcttatccgacccgacccaaccacctcagtttcagaatcaagcaacatcgtatccaagttcgagcagggtgagtagtagtaaggaatctgaggatcacggaaaccacacaacaggttaataatgtccatggagcaacaagaagatctgttttcacaagcaaacacaattttgagaaattgacagagagacctaacatgtatatatatcgccatctgtttcttgtttttctttggtttgttttgtcctctcttctcaggttgtatacttagagagctgtacatgtaatgatccagagatctaggaatcaatacatagaggttgcagag

SEQ ID NO: 98175 - protein, 478 aa, Arabidopsis thaliana; identical to SEQ ID NO: 88103
  peptide (1)..(478): Ceres Seq. ID no. 13580754

SEQ ID NO: 98176 - protein, 446 aa, Arabidopsis thaliana; identical to SEQ ID NO: 88104
  peptide (1)..(446): Ceres Seq. ID no. 13580755

SEQ ID NO: 98177 - protein, 439 aa, Arabidopsis thaliana; identical to SEQ ID NO: 88105
  peptide (1)..(439): Ceres Seq. ID no. 13580756

SEQ ID NO: 98178 - DNA, 1438 bp, Arabidopsis thaliana
  misc_feature (1)..(1438): Ceres Seq. ID no. 13580769
  misc_feature (1)..(1438): Ortholog of  Ceres SEQ ID NO 13598387 as cited in SEQ ID NO 62757
  misc_feature (1)..(1438): Ortholog of  Ceres SEQ ID NO 13662984 as cited in SEQ ID NO 64419
cttcttcttcgtcgtcgtcctcaacaagctcttctttctgactcataacccaaatttctgagaatcagagccttattcaagagaacaccaagagtttggtggaagttgttgaaattcgaagccgatcgcggactcgtttgctcttgattacgtcgcaatccgtacgattttccgatcaaacttaagagtgaaggagatagatttgtagaaaaaggaagagaataagagtgagcttgtggccaaaaaagggatgcctttgaacttaggcaacgatggcgatgggtcttcccggattattttgactgagcctcgcggatctactgctgaggtgcttctatttggaggacaagtcatttcttggaaaaatgaaaggagggaagaactgctttatatgagcagcaaggctcaatataagccacccaaggcgatcagaggaggaatacctgtttgctttccacagtttggaaactttggtggacttgagcgacatggatttgcccggaacaaattctggtcacatgatgaagatccttcgcctctacctcctgctaacaaacaatcatctgttgatctgatattgaagtccacagaagatgacttgaagacctggccgcatagttttgaactccgtattcgcatttctattagccctgggaagcttactttgatccctcgtgtgaggaacattgactcaaaggcattctcctttatgtttgcactgcgaaactacttatatgtatctgacataagtgaagttcgagttgagggtttggagacactggattatctagacaacttgattggtaaagaaagattcactgagcaagcagacgcgattacctttgacggggaggtcgatagagtgtacttgaacacaccaacaaagattgcggtcatagatcatgagcgaaagaggaccatcgagttgcgaaaggaaggcatgcccaatgcagttgtgtggaacccctgggacaaaaaggcaaagaccatagctgatatgggagatgaagattacaaaacaatgctttgtgtagattctggagtaatcgaacctctggtattgttaaagcctcgtgaagagtggaaaggcagacaagaactatccatcgtctcatcaagttactgcagcggacagcttgatccacgcaaggttctttacggagatatctgatccttttgggggtttatcttacttagtaaaaaaacagtaataagccatgatctcattatcactaccacccagaaacaactctctaagagtcttgtcttgaacttggagattttatccttttgacttgtgttttgagtgagttctgattgttgttgttacacagagaggtcacggtaatattttgtaacgttgactctgtgtttgaccgtcaaacagtgtatcggtttctttgttcggaaatttagtagaatatatcatcaatttagt

SEQ ID NO: 98179 - protein, 306 aa, Arabidopsis thaliana; identical to SEQ ID NO: 37477
  peptide (1)..(306): Ceres Seq. ID no. 13580770

SEQ ID NO: 98180 - protein, 259 aa, Arabidopsis thaliana; identical to SEQ ID NO: 37478
  peptide (1)..(259): Ceres Seq. ID no. 13580771

SEQ ID NO: 98181 - protein, 153 aa, Arabidopsis thaliana; identical to SEQ ID NO: 37479
  peptide (1)..(153): Ceres Seq. ID no. 13580772

SEQ ID NO: 98182 - DNA, 786 bp, Arabidopsis thaliana
  misc_feature (1)..(786): Ceres Seq. ID no. 13580773
  misc_feature (1)..(786): Ortholog of  Ceres SEQ ID NO 13598227 as cited in SEQ ID NO 61591
  misc_feature (1)..(786): Ortholog of  Ceres SEQ ID NO 12584790 as cited in SEQ ID NO 62648
  misc_feature (1)..(786): Ortholog of  Ceres SEQ ID NO 13545965 as cited in SEQ ID NO 67378
ccgtttcttaaagcataaaaaccaaaactttctctttcgttttgctttcttccaatcatctgcaggagtgaatcgcaaaaccaaatttggaggattctttctgaggggtttctcagtgagaaaatggcttcgaaacggatcttgaaggagctgaaggatctccagaaagaccctccaacctcctgcagtgcaggtccagttgctgaagacatgtttcattggcaagctacaattatgggtcctgcagagagtccgtattcaggcggtgtgtttctcgttaccattcacttccctccggactatccattcaaaccaccaaaggttgcatttaggacgaaggtgtttcaccctaatatcaacagcaacggaagcatttgccttgacattttgaaagaacaatggagccctgccctcaccatttccaaggtgttgctctcgatatgttcgctgttaacagatccaaatccagatgaccctttggtaccagagattgcacacatgtacaaaaccgacagagccaaatacgaggctactgcaagaaactggactcagaagtatgccatgggctaaacaaagattcgtatgcttcagcacctgtttatgttttcatgtctgtttctttcttcttcttgttttaactttaataaaaatgtctaaaatatcaactttttcgtctgtactatatatgtttatgggttttattatcatcatctttatctgaaatttgaagatggaattctaaagcttgaaggttatttgttaaagtttatttactagtgagtgatg

SEQ ID NO: 98183 - protein, 148 aa, Arabidopsis thaliana
  peptide (1)..(148): Ceres Seq. ID no. 13580774
MASKRILKELKDLQKDPPTSCSAGPVAEDMFHWQATIMGPAESPYSGGVFLVTIHFPPDYPFKPPKVAFRTKVFHPNINSNGSICLDILKEQWSPALTISKVLLSICSLLTDPNPDDPLVPEIAHMYKTDRAKYEATARNWTQKYAMG

SEQ ID NO: 98184 - protein, 119 aa, Arabidopsis thaliana
  peptide (1)..(119): Ceres Seq. ID no. 13580775
MFHWQATIMGPAESPYSGGVFLVTIHFPPDYPFKPPKVAFRTKVFHPNINSNGSICLDILKEQWSPALTISKVLLSICSLLTDPNPDDPLVPEIAHMYKTDRAKYEATARNWTQKYAMG

SEQ ID NO: 98185 - protein, 111 aa, Arabidopsis thaliana
  peptide (1)..(111): Ceres Seq. ID no. 13580776
MGPAESPYSGGVFLVTIHFPPDYPFKPPKVAFRTKVFHPNINSNGSICLDILKEQWSPALTISKVLLSICSLLTDPNPDDPLVPEIAHMYKTDRAKYEATARNWTQKYAMG

SEQ ID NO: 98186 - DNA, 639 bp, Arabidopsis thaliana
  misc_feature (1)..(639): Ceres Seq. ID no. 13580783
  misc_feature (1)..(639): Ortholog of  Ceres SEQ ID NO 15172828 as cited in SEQ ID NO 60174
catttgcattaaaatataataaaaagatgtaagattctctccgcctccttctctctataagaaccgacacagagacgaagaagaataatcactcgaaaactcatcaaatcaaaaatcaaacacagagaagagaaaatggccgcagaaggagaagttatcgcttgccacaccgttgaagattggaccgagaagctcaaagccgccaacgaatccaagaaactgattgtgatagacttcactgcaacatggtgcccaccttgccgtttcattgcacccgtctttgctgacttagccaagaagcacctcgacgtagtcttcttcaaggtcgatgttgacgaattgaacactgttgctgaggagtttaaagttcaggcaatgccaacgtttatcttcatgaaagaaggagagatcaaggagactgtggttggtgctgctaaagaagaaatcattgccaatctcgagaagcacaagacagttgttgctgctgcttgatttgcttttctctcttacctattttgctaaaatatgtttggtgttttaataaatcctttgttcgcccgagtcttttcaccttaaatgtgctcttatgtgtggtggtgaataaatgttgttgcaaacttgattactcgcagctatgct

SEQ ID NO: 98187 - protein, 118 aa, Arabidopsis thaliana; identical to SEQ ID NO: 29115
  peptide (1)..(118): Ceres Seq. ID no. 13580784

SEQ ID NO: 98188 - DNA, 890 bp, Arabidopsis thaliana
  misc_feature (1)..(890): Ceres Seq. ID no. 13580791
  misc_feature (1)..(890): Ortholog of  Ceres SEQ ID NO 12780822 as cited in SEQ ID NO 67471
aacaaaattttgccttggcttgcgaaaaaaggagatcaagtgatcatatggaggaagaacaagtaagagcaattaagataatagtatttggagtcatctcatggggtgtggccttcattctcacccggagaatcttctcaagctactcattcagcttcagcaaccgtcttctctccacggctcacgcgactatcgctgtcactttagcaacactctctgttcaagatttgtcttgccctgtttgtccccttgcttctaagccatctcataaacagatggacgtgatggcgttttcgttgtcgtacatgatctacgatctaatatgttgtcatttcgatcaagtgtttagcattgataacgcggttcatcatttcgttagcattcttggttttatagctggacttgcataccaaaagtctggatctgagatcgtggctacactgtgggtagcagagatatcaagtccttttttccaccttagggagattctcaaagagattggatacaaagacaccaaactcaatctagctgccgatgtgtgttttgccactatattcacattggcgagaattgtgtgtggacctttcctcgtttacgtcagtctatcagctgataatcccatcttcatcaaggcaatgggatcaggattacaactcgtgagcatcttttggttctataaaattttcgggatgatgagatataaactttttaagaagccaaagtcaaacaaaaagtctacttagcttagttagagatatacaaaagctgattcaatccaaatatttttttcttatttttatttatggtcatttatctattttattaataaaataataataaaaaaataaaaaaaaaatggagagagacccactcgtgaaacaaccgacttt

SEQ ID NO: 98189 - protein, 246 aa, Arabidopsis thaliana; identical to SEQ ID NO: 76739
  peptide (1)..(246): Ceres Seq. ID no. 13580792

SEQ ID NO: 98190 - protein, 231 aa, Arabidopsis thaliana; identical to SEQ ID NO: 34728
  peptide (1)..(231): Ceres Seq. ID no. 13580793

SEQ ID NO: 98191 - protein, 155 aa, Arabidopsis thaliana; identical to SEQ ID NO: 34729
  peptide (1)..(155): Ceres Seq. ID no. 13580794

SEQ ID NO: 98192 - DNA, 858 bp, Arabidopsis thaliana
  misc_feature (1)..(858): Ceres Seq. ID no. 13580795
  misc_feature (1)..(858): Ortholog of  Ceres SEQ ID NO 13504237 as cited in SEQ ID NO 100
  misc_feature (1)..(858): Ortholog of  Ceres SEQ ID NO 15176643 as cited in SEQ ID NO 57825
  misc_feature (1)..(858): Ortholog of  Ceres SEQ ID NO 12598265 as cited in SEQ ID NO 65873
  misc_feature (1)..(858): Ortholog of  Ceres SEQ ID NO 15180736 as cited in SEQ ID NO 0
tttagggtttattcttcattgcttgagcttccttctcttcttcttcttcaagccgcggctaaagatccctacttctctcgacacttatagagtttcagtcatggccgcctccgcagaaatcgacgctgagattcaacagcagcttaccaatgaggttaagctcttcaaccgttggagctttgatgacgtttcggttacggatattagtcttgtggactacattggtgttcagccatcgaagcacgcaacttttgttccccatactgctggacgatactctgtgaagaggttcagaaaggcgcagtgcccaattgttgagaggctcactaactctctcatgatgcacggaagaaacaatggtaagaagttgatggctgtcaggatcgtcaagcatgccatggagattatccacctcttgtctgacttgaacccgattcaagttatcattgatgccattgttaacagtggtccacgtgaagatgctaccaggattggatctgctggtgtggttaggaggcaggctgttgatatctctcctctaagacgtgtgaaccaagcgatcttcttgcttacaactggtgcacgtgaagctgcctttagaaacatcaagacaatcgctgagtgccttgctgatgaactcatcaatgctgcaaagggatcttccaacagctatgccatcaagaagaaagatgagattgagagagttgctaaggccaatcgttaagggatctccctttcctctaagtttgcattatatcaaagagtttttgtgttgtttccattagctttggatatgtttcagatgatctctctatctttaatgaaattttgacgcttataatcgacttgggatcttga

SEQ ID NO: 98193 - protein, 240 aa, Arabidopsis thaliana
  peptide (1)..(240): Ceres Seq. ID no. 13580796
LGFILHCLSFLLFFFFKPRLKIPTSLDTYRVSVMAASAEIDAEIQQQLTNEVKLFNRWSFDDVSVTDISLVDYIGVQPSKHATFVPHTAGRYSVKRFRKAQCPIVERLTNSLMMHGRNNGKKLMAVRIVKHAMEIIHLLSDLNPIQVIIDAIVNSGPREDATRIGSAGVVRRQAVDISPLRRVNQAIFLLTTGAREAAFRNIKTIAECLADELINAAKGSSNSYAIKKKDEIERVAKANR

SEQ ID NO: 98194 - protein, 207 aa, Arabidopsis thaliana [sequence omitted]

SEQ ID NO: 98195 - protein, 128 aa, Arabidopsis thaliana; identical to SEQ ID NO: 43944
  peptide (1)..(128): Ceres Seq. ID no. 13580798

SEQ ID NO: 98196 - DNA, 1605 bp, Arabidopsis thaliana
  misc_feature (1)..(1605): Ceres Seq. ID no. 13580806
  misc_feature (1)..(1605): Ortholog of  Ceres SEQ ID NO 13597533 as cited in SEQ ID NO 64942
aaatcaatggcaaaaaattagcttttagaattccccaagaacaaaaacaaaaaatgtccgagagaaattagggaaaaacaaaacaaataaaatctgggtgtaggggagagagagctcgtgctcgtgattttgatatctatctcttcgttatcgattttgaacatccacattgttcttagatctgaagaaaaaaaacacgggttctgttattacgatttgctcggcgattttgacaccaggctttcaattcttttcgttggaggtgattcgatttcagatccatcggatctaatctcggcgagtcgattcgtggtcgacatttttcaaaaactgctcgcgtggatctgaagaagagacattgttgtcttttgtatatcggcactgaatttttctgggaatctgtgtaaagatggatccaatatcagcggttagcgaagagctggctgagatcgaaggacaaatcaatgacatcttccgtgctttatcaaatggattccagaagctggagaagatcaaagatgctaataggcagagtaggcagctggaagaactcactgacaaaatgcgtgactgtaagagccttattaaagatttcgatagggaaatcaaaagcttggaaagcggtaatgatgccagcactaaccggatgttgaacgatagacgacaatctatggttaaggaactcaactcatatgttgctcttaagaagaaatactcatcaaacctagcaagcaataacaagcgagtagatcttttcgatggacctggagaagaacacatggaagaaaatgtcttattagcttcaaacatgtccaatcaagagttaatggataaaggaaactcaatgatggatgacacagatcaagctattgagagagggaaaaagattgtacaagaaactataaatgtgggaacagatacttcagcagctctcaaggctcagaccgagcaaatgagtagagttgtcaatgagctcgattctattcatttctcactcaagaaagcctccaagctggtcaaggaaattggtaggcaggttgccactgacaaatgtattatggcatttcttttccttatcgtcattggtgtcatagcaatcatcatcgtcaagattgtgaacccaaacaacaaagacattcgcgacataccgggtgtgggcctagctccaccagccatgaacagacgtctgctctggaaccattactgaaaaaaaaatatctcattttcacaccattcaaaatactggtacgttgcacacttttttgtcccatacacatcttgatcctccccttagtcatgttgttgtagatgaaaccgcctcacttgagaaagtaaccagtttcgattcacatggctcttggctgctgcacatttgagcagtcacaggaatcaaattccctttcgttaaaaacccaggatcaaaaccatcttttttagctcatgtgtttgtataaggatgactcttttgtgttctatcatatgtacgtgtatttttaaaacgtcttctctgtttcatgttctggtaataaaaacttgtttcactggttcaaagttgtaactgagttgtatcatatccgatatatattagtatatgacttcactctc

SEQ ID NO: 98197 - protein, 265 aa, Arabidopsis thaliana; identical to SEQ ID NO: 22091
  peptide (1)..(265): Ceres Seq. ID no. 13580807

SEQ ID NO: 98198 - protein, 214 aa, Arabidopsis thaliana; identical to SEQ ID NO: 22092
  peptide (1)..(214): Ceres Seq. ID no. 13580808

SEQ ID NO: 98199 - protein, 186 aa, Arabidopsis thaliana; identical to SEQ ID NO: 22093
  peptide (1)..(186): Ceres Seq. ID no. 13580809

SEQ ID NO: 98200 - DNA, 1756 bp, Arabidopsis thaliana
  misc_feature (1)..(1756): Ceres Seq. ID no. 13580810
  misc_feature (1)..(1756): Ortholog of  Ceres SEQ ID NO 15177368 as cited in SEQ ID NO 57336
atggcgagaacgagaattataacgaaccgatttgaatctcgctttttgattcgtttccttgaatctccgactctattcgcctcttgtttcacgagttccagatctcttcaaaccctagcctacgaagaagtccgaacctccggtgatcgggagtctgaatctacagctctcatccttcatggcctcctcggttccggtcgcaactggagatcgttttctcgctcccttgcatcatctctctccgtctcctctgcttctgattggaagatgatattggttgatctgaggaaccatgggagatctgcggaagtggaagggcttaatccgcctcatgatcttgtgaattcagctaaggatttagctgatttggttaaagcaagtggctggaattggcctgatgtggtcattggtcactctttgggaggtaaagtggcgttgcagttcatggagagttgtgctcgtggtgattttggtgaatctgcttctcctcctaaacagctatgggtactagactctgtccctggggaagtcaaggcagaaaaaagtgatggtgaagtagagaaagttctgaagactttgcagagtttaccttcatcaatcccttctcgcaagtggcttgttgatcgtatggtcgaacttgggttttcaagatcattatccgagtggattggcagcaatctcaagagatctggagactcagagacatggacctttaaccttgacggagctgtccaaatgttcaactcttacagagagacttcttactggtctttgctagagaacccgccaaaagagacagagataaattttgtgattgcagaaaagagtgaccgatgggacaacgatacaaccaagcggcttgaaacaatagctaaccagagacagaatgtagccgaagggaaggttgcgactcatcttcttcgtaactctggccattgggtacacacagacaatccaaagggactcctagagattactattaaagcaaattctgatccgtctctttcgctagctaaaggtaaaaggcggaacaacaaaagaaaccctagcttccctttgtacctctctctgttccaaaccatgtcgaagagaaagaccaaagagccaaaggttgagaatgtgactcttggaccagctgttcgtgaaggagagcaagtctttggagttgttcacgtctttgcttcattcaacgacactttcattcacgtgactgatttgtctggacgggaaacacttgttcgcatcactggtggaatgaaggtgaaagccgacagagatgagtcctcaccttatgctgctatgcttgcggcacaagatgttgctcagcgatgcaaggaacttggaatcactgccatacatgtgaaactccgtgccactggtggtaacaagaccaagacccctggacctggtgctcagtctgctctaagagcccttgcccgttctggcatgaaaattggtcgcattgaggatgtgactccaatcccaaccgacagtacccgcagaaagggtggaagaagaggaaggaggctctgagttatttggcctctcgttggatctccttatgtagctttctcaatgtttcattttgttttttcttagtttgaaaagagttttggaattactatgctttgttatagtctcaactctgaacagctttggatctttttctgtatgaccataagatattcaaaaattggtagtcattttatctcacaaaaaaaccttgaatttgtgctgtatgattttgtaaagtctt

SEQ ID NO: 98201 - protein, 510 aa, Arabidopsis thaliana
  peptide (1)..(510): Ceres Seq. ID no. 13580811
MARTRIITNRFESRFLIRFLESPTLFASCFTSSRSLQTLAYEEVRTSGDRESESTALILHGLLGSGRNWRSFSRSLASSLSVSSASDWKMILVDLRNHGRSAEVEGLNPPHDLVNSAKDLADLVKASGWNWPDVVIGHSLGGKVALQFMESCARGDFGESASPPKQLWVLDSVPGEVKAEKSDGEVEKVLKTLQSLPSSIPSRKWLVDRMVELGFSRSLSEWIGSNLKRSGDSETWTFNLDGAVQMFNSYRETSYWSLLENPPKETEINFVIAEKSDRWDNDTTKRLETIANQRQNVAEGKVATHLLRNSGHWVHTDNPKGLLEITIKANSDPSLSLAKGKRRNNKRNPSFPLYLSLFQTMSKRKTKEPKVENVTLGPAVREGEQVFGVVHVFASFNDTFIHVTDLSGRETLVRITGGMKVKADRDESSPYAAMLAAQDVAQRCKELGITAIHVKLRATGGNKTKTPGPGAQSALRALARSGMKIGRIEDVTPIPTDSTRRKGGRRGRRL

SEQ ID NO: 98202 - protein, 421 aa, Arabidopsis thaliana
  peptide (1)..(421): Ceres Seq. ID no. 13580812
MILVDLRNHGRSAEVEGLNPPHDLVNSAKDLADLVKASGWNWPDVVIGHSLGGKVALQFMESCARGDFGESASPPKQLWVLDSVPGEVKAEKSDGEVEKVLKTLQSLPSSIPSRKWLVDRMVELGFSRSLSEWIGSNLKRSGDSETWTFNLDGAVQMFNSYRETSYWSLLENPPKETEINFVIAEKSDRWDNDTTKRLETIANQRQNVAEGKVATHLLRNSGHWVHTDNPKGLLEITIKANSDPSLSLAKGKRRNNKRNPSFPLYLSLFQTMSKRKTKEPKVENVTLGPAVREGEQVFGVVHVFASFNDTFIHVTDLSGRETLVRITGGMKVKADRDESSPYAAMLAAQDVAQRCKELGITAIHVKLRATGGNKTKTPGPGAQSALRALARSGMKIGRIEDVTPIPTDSTRRKGGRRGRRL

SEQ ID NO: 98203 - protein, 362 aa, Arabidopsis thaliana
  peptide (1)..(362): Ceres Seq. ID no. 13580813
MESCARGDFGESASPPKQLWVLDSVPGEVKAEKSDGEVEKVLKTLQSLPSSIPSRKWLVDRMVELGFSRSLSEWIGSNLKRSGDSETWTFNLDGAVQMFNSYRETSYWSLLENPPKETEINFVIAEKSDRWDNDTTKRLETIANQRQNVAEGKVATHLLRNSGHWVHTDNPKGLLEITIKANSDPSLSLAKGKRRNNKRNPSFPLYLSLFQTMSKRKTKEPKVENVTLGPAVREGEQVFGVVHVFASFNDTFIHVTDLSGRETLVRITGGMKVKADRDESSPYAAMLAAQDVAQRCKELGITAIHVKLRATGGNKTKTPGPGAQSALRALARSGMKIGRIEDVTPIPTDSTRRKGGRRGRRL

SEQ ID NO: 98204 - DNA, 1175 bp, Arabidopsis thaliana
  misc_feature (1)..(1175): Ceres Seq. ID no. 13580824
  misc_feature (1)..(1175): Ortholog of  Ceres SEQ ID NO 13594252 as cited in SEQ ID NO 57528
  misc_feature (1)..(1175): Ortholog of  Ceres SEQ ID NO 14305682 as cited in SEQ ID NO 59267
  misc_feature (1)..(1175): Ortholog of  Ceres SEQ ID NO 13594430 as cited in SEQ ID NO 60181
  misc_feature (1)..(1175): Ortholog of  Ceres SEQ ID NO 13597809 as cited in SEQ ID NO 64598
  misc_feature (1)..(1175): Ortholog of  Ceres SEQ ID NO 14313544 as cited in SEQ ID NO 68424
  misc_feature (1)..(1175): Ortholog of  Ceres SEQ ID NO 12617960 as cited in SEQ ID NO 69051
  misc_feature (1)..(1175): Ortholog of  Ceres SEQ ID NO 13589401 as cited in SEQ ID NO 0
  misc_feature (1)..(1175): Ortholog of  Ceres SEQ ID NO 15179361 as cited in SEQ ID NO 0
aaaaggtaaaaactttgggaagcagctaaaatactgtgttctttgtttcttccatcgaaatcgaaaaaagctaagatctttgcgttttgaaacgatggcggaagaacataagcatgatgaatctgtgatcgctcctgagccagctgttgaggttgtggagagagaatcgttgatggataagatatcggagaagatccatcacggtggtgattcttcttcgtcttcttcatcttctgatgatgaagacgagaagaagaagactaagaagccctcttctccttcgtcttctatgaaatcgaaagtttaccgcttgttcggacgagagcagcctgttcataaggttctcggcggtggaaagccggctgatatattcatgtggaagaacaagaagatgtctggtggtgtacttggtggtgctacagctgcttgggttgtgtttgaattgatggagtaccatcttctcactctgctttgccacgtgatgattgttgttctcgctgtgctgtttttgtggtctaatgccactatgttcattaacaagtcccctccaaagattcctgaagttcatatccctgaagaacctattcttcagcttgcgtctgggctcagaatcgagatcaaccgtggattctcttctctccgtgaaattgcatcaggaagggatctcaagaaattcctcattgctattgccgggttatgggttctctcaatcttgggcggttgcttcaacttcttgacattggcatacatagctcttgtgttgctcttcacggttcctcttgcctacgacaagtatgaagacaaagtcgacccattaggtgagaaagcaatgatcgagctcaagaagcagtatgcagtgttggatgagaaggtgttgagcaagatcccacttgggccgttgaagaacaagaagaaagattaggggtttacacaaggttgtccgtggctagcaaaacgggtgttgtgaaatggtatcgaagtaatgtgttttgggcgtttttttaggtggctctttcggttatgtgaatgaacttggaattttcctgactggtttgttctgttgtttatgtcattgttgatcagcgtcgagggataaaagtagtgatatttcttctctctctaagcctctatataactaagaatttcaagatatttgaattttgcaatctcgtggt

SEQ ID NO: 98205 - protein, 306 aa, Arabidopsis thaliana
  peptide (1)..(306): Ceres Seq. ID no. 13580825
KGKNFGKQLKYCVLCFFHRNRKKLRSLRFETMAEEHKHDESVIAPEPAVEVVERESLMDKISEKIHHGGDSSSSSSSSDDEDEKKKTKKPSSPSSSMKSKVYRLFGREQPVHKVLGGGKPADIFMWKNKKMSGGVLGGATAAWVVFELMEYHLLTLLCHVMIVVLAVLFLWSNATMFINKSPPKIPEVHIPEEPILQLASGLRIEINRGFSSLREIASGRDLKKFLIAIAGLWVLSILGGCFNFLTLAYIALVLLFTVPLAYDKYEDKVDPLGEKAMIELKKQYAVLDEKVLSKIPLGPLKNKKKD

SEQ ID NO: 98206 - protein, 275 aa, Arabidopsis thaliana; identical to SEQ ID NO: 24857
  peptide (1)..(275): Ceres Seq. ID no. 13580826

SEQ ID NO: 98207 - protein, 249 aa, Arabidopsis thaliana; identical to SEQ ID NO: 24858
  peptide (1)..(249): Ceres Seq. ID no. 13580827

SEQ ID NO: 98208 - DNA, 1830 bp, Arabidopsis thaliana
  misc_feature (1)..(1830): Ceres Seq. ID no. 13580828
  misc_feature (1)..(1830): Ortholog of  Ceres SEQ ID NO 13584573 as cited in SEQ ID NO 60711
  misc_feature (1)..(1830): Ortholog of  Ceres SEQ ID NO 15180548 as cited in SEQ ID NO 0
aaggtgaccttcgtctttggttgaccatcaaaaactacaacgctctttctccgtaggaaaggggaagcaaataaattatcgaagcccactggtttcggagctgatcggtctctatttctctcttcatacatatctcaagcagataaagttgatcggatactagaatgggaggaggatttagagttttgcatttggtgaggccattcttggcttttctgcctgaggttcagagtgctgataggaaggttccattcagagagaaggttatctacactgtcatctctctcttcatctttcttgtctgcagtcagcttcctctttatggaatccattccaccaccggtgcggatccattctattggatgcgtgtcattcttgcgtccaaccgtggaactgtcatggagctcggtattactcctattgttacatctggacttgtgatgcaactcttggctggttccaagattattgaggttgacaacaatgttcgtgaggatcgtgccctcttgaatggtgctcagaagcttctaggtattctgattgccattggtgaggctgttgcatatgttctttctggaatgtatggtcccgttggacagcttggtgttggaaatgccattctgatcatccttcagcttttctttgctggaatcattgttatctgccttgatgaactccttcagaagggatatggtctcggatcaggaatctcccttttcattgccaccaacatttgtgaaagcattatctggaaggcatttagcccaactaccatcaacaccgggcgtggagctgagtttgaaggtgctgttattgcactgttccatatgctgataaccaagtccaacaaggttgcggctctccgccaagctttctaccggcaaaaccttccaaatgttaccaacttgcttgccacagtcttgatcttcctgattgtgatctacttccaaggtttccgtgtggttttgcctgtgagatcaaagaatgcccgtggacaacagggttcttacccaatcaagctgttctacacctctaacatgcccatcatcctccaatccgccctcgtctcaaatctttacttcatttctcagcttctctaccggaagttcagcggaaatttctttgtaaaccttttgggacaatggaaagaatctgagtacagtggacaatctattccagttagtggtctggcttacctcatcacagctccagcaagtttctctgacatggcagctcacccgttccatgcactgttctacatcgtcttcatgctcactgcttgtgctcttttctcaaagacatggattgaagtctctggatcttctgctagggatgtagctaagcagctaaaggaacaacaaatggtgatgccaggacacagagaatcaaacttacagaaggaactgaacagatacatcccaacagcagcagcttttggaggagtttgtatcggtgcacttaccgttttggctgatttcatgggagccatcgggtcgggaaccggaattctgttggcggtcacgatcatataccagtatttcgagacctttgagaaggaaaaagccagtgaactcggcttcttcgggttctaagttagcttaaagaaggtgtaaactttgcctgaggcaaaaaagcagagcagaagaggctttagcttctgtgcccacctcaaacacagacaatttgtggtggcacttgggttagactacttttttttgttgttgttgaaacgaaattttctctttagtcatttatgtttttttgttactttttacaagttaaaaaacttatgtgatagacgcttttctaatgtatgtttctaggaatttc

SEQ ID NO: 98209 - protein, 475 aa, Arabidopsis thaliana; identical to SEQ ID NO: 26949
  peptide (1)..(475): Ceres Seq. ID no. 13580829

SEQ ID NO: 98210 - protein, 409 aa, Arabidopsis thaliana; identical to SEQ ID NO: 26950
  peptide (1)..(409): Ceres Seq. ID no. 13580830

SEQ ID NO: 98211 - protein, 397 aa, Arabidopsis thaliana; identical to SEQ ID NO: 26951
  peptide (1)..(397): Ceres Seq. ID no. 13580831

SEQ ID NO: 98212 - DNA, 754 bp, Arabidopsis thaliana
  misc_feature (1)..(754): Ceres Seq. ID no. 13580838
  misc_feature (1)..(754): Ortholog of  Ceres SEQ ID NO 15176693 as cited in SEQ ID NO 1078
  misc_feature (1)..(754): Ortholog of  Ceres SEQ ID NO 12615074 as cited in SEQ ID NO 62676
  misc_feature (1)..(754): Ortholog of  Ceres SEQ ID NO 13598819 as cited in SEQ ID NO 0
  misc_feature (1)..(754): Ortholog of  Ceres SEQ ID NO 13600371 as cited in SEQ ID NO 0
aagtctacaaaccaaaagcacgctacagaagaagaggaagaagaagaagaagcagagacaacaagaagaagaagaaacagtctcatctcgccggagaagaagaaagatgtcgtggcaatcatacgtcgatgaccatctcatgtgcgaggtcgaaggcaaccacctcacacacgccgccatcttcggccaagacggcagtgtctgggctcagagctcagctttccctcagttgaagcctgcagagatagcaggaatcaacaaagactttgaagaagccggacatcttgccccaaccgggctattccttggcggtgagaagtacatggttgtccaaggtgaggctggagccgtcatccgagggaaaaagggacctggtggagtcactatcaagaagactactcaagctctagtctttggtatctatgatgaaccgatgaccggagggcaatgcaacttggtcgtggagaggctcggcgattaccttatcgagtctggtctctaagttcactcaaagtgcttcaaacaaatttcatttttcgggttctttcttcactagagaagcacccttctgccatgtattgtgatttgattgttgttgtgcatcaaacaaagttattatactcttaaaaagaacaaagaaacaatcatatttgttatggttttgatcctctcctatgatggctcttatgtttttctcttgtactgtatttcgtaatgtataattacgctttggaataaaaatttgagtttgtga

SEQ ID NO: 98213 - protein, 166 aa, Arabidopsis thaliana; identical to SEQ ID NO: 36054
  peptide (1)..(166): Ceres Seq. ID no. 13580839

SEQ ID NO: 98214 - protein, 131 aa, Arabidopsis thaliana; identical to SEQ ID NO: 30808
  peptide (1)..(131): Ceres Seq. ID no. 13580840

SEQ ID NO: 98215 - protein, 120 aa, Arabidopsis thaliana; identical to SEQ ID NO: 30809
  peptide (1)..(120): Ceres Seq. ID no. 13580841

SEQ ID NO: 98216 - DNA, 1908 bp, Arabidopsis thaliana
  misc_feature (1)..(1908): Ceres Seq. ID no. 13588938
  misc_feature (1)..(1908): Ortholog of  Ceres SEQ ID NO 13593854 as cited in SEQ ID NO 53403
  misc_feature (1)..(1908): Ortholog of  Ceres SEQ ID NO 12581680 as cited in SEQ ID NO 55019
  misc_feature (1)..(1908): Ortholog of  Ceres SEQ ID NO 15172112 as cited in SEQ ID NO 59632
gaaaagaaagatcattagtttctgaggggataaccatttttttttcttcttaaaaagtttttttttttgtcaattggtcttcttcttcctcatccgctcgcttatatttaatttaataataataaaaatcggtgttcatttttatataaaagtataaattttgtgtttggttgatccatccgtagtcgtagtagatctacaagctctgaaattccacgcccacatctcctccgtcctcttgagatccttctcttcattcattttcttgctcaacttgagttgcttccaacatcttgcaagattgtctttgagttcattcaggtcttgaagaagagcactcttttaagctgtgtgaaacttgcgccgttcctgtgaagaactacttttggcattgcagatttcagagagctgtgatttgtgctatcttaaaaacggacaagttctatgttgtggcggatgagatgagggatgctatctgggttgatgaattttctgaatgcctgtctctggccacggtcagatcagcaggctcgttctgcctcagattctggtggccgccaagagggtttgctctggttcagagactccggccagcacgtctttggtgacttctccatggccgtcgttcaagccaacagcttgctagaggaccagagccagctcgagtctggctctcttagctcccacgactctggtccctttggcacctttgttggcgtctacgacggccacggtgggcctgagacatctcgcttcatcaatgatcatatgttccaccacctcaagaggtttactgcagagcaacagtgtatgtcatcagaggtgataaaaaaagcgttccaagccactgaagaaggcttcttatccatagttacaaatcaatttcaaactagacctcagatagccacagtgggatcatgctgtcttgtaagtgtcatctgcgatgggaagctatacgtggccaacgcaggggactcacgggccgttctgggacaagtcatgagggtaacaggtgaagctcatgccactcagctctcagcagagcacaacgcatctatagagtcagtgagacgggaacttcaggccctgcatccggatcatccagatattgtggttctgaaacataacgtctggcgagtaaaaggcatcattcaggtttcaagatccattggtgatgtgtatttgaaaaggtcagagttcaacagggaaccactgtatgcaaaattccggctgaggtcaccgttcagcaagccattactgagtgcagagccggcgatcacggtgcatacactggagccgcacgatcagttcattatatgtgcatcagatggactgtgggaacatatgagcaaccaagaagcagtagacatagtccagaatcatccgcgaaacgggatagcaaagcggctggtgaaagtagcgctacaagaagcggcaaagaagagagagatgagatactcagacctgaaaaagatagacagaggagtgaggagacatttccacgatgacataacagtgattgttgtcttctttgatacaaacctagtgagcagaggaagtatgttgagaggaccagccgtgtcagtgagaggagcgggtgtgaatctacctcacaacaccctggcgccttgcaccacgcccactcaagctgctgctgctggcgcctcctgactattgaatttttacggtgtccttaaaattctttccaagatccttcctgtaactatatataaatatatatatttgattattattatcattgactgggaaaggatatatcatcatcaagtgggaaaggatatatcataatcaagtggttagttttgtttgttccctttgttagctgtgtactggagaaagaaaggtgacaagaattcttcttcttcttcattaattttcattgcttgc

SEQ ID NO: 98217 - protein, 400 aa, Arabidopsis thaliana
  peptide (1)..(400): Ceres Seq. ID no. 13588939
MLSGLMNFLNACLWPRSDQQARSASDSGGRQEGLLWFRDSGQHVFGDFSMAVVQANSLLEDQSQLESGSLSSHDSGPFGTFVGVYDGHGGPETSRFINDHMFHHLKRFTAEQQCMSSEVIKKAFQATEEGFLSIVTNQFQTRPQIATVGSCCLVSVICDGKLYVANAGDSRAVLGQVMRVTGEAHATQLSAEHNASIESVRRELQALHPDHPDIVVLKHNVWRVKGIIQVSRSIGDVYLKRSEFNREPLYAKFRLRSPFSKPLLSAEPAITVHTLEPHDQFIICASDGLWEHMSNQEAVDIVQNHPRNGIAKRLVKVALQEAAKKREMRYSDLKKIDRGVRRHFHDDITVIVVFFDTNLVSRGSMLRGPAVSVRGAGVNLPHNTLAPCTTPTQAAAAGAS

SEQ ID NO: 98218 - protein, 395 aa, Arabidopsis thaliana
  peptide (1)..(395): Ceres Seq. ID no. 13588940
MNFLNACLWPRSDQQARSASDSGGRQEGLLWFRDSGQHVFGDFSMAVVQANSLLEDQSQLESGSLSSHDSGPFGTFVGVYDGHGGPETSRFINDHMFHHLKRFTAEQQCMSSEVIKKAFQATEEGFLSIVTNQFQTRPQIATVGSCCLVSVICDGKLYVANAGDSRAVLGQVMRVTGEAHATQLSAEHNASIESVRRELQALHPDHPDIVVLKHNVWRVKGIIQVSRSIGDVYLKRSEFNREPLYAKFRLRSPFSKPLLSAEPAITVHTLEPHDQFIICASDGLWEHMSNQEAVDIVQNHPRNGIAKRLVKVALQEAAKKREMRYSDLKKIDRGVRRHFHDDITVIVVFFDTNLVSRGSMLRGPAVSVRGAGVNLPHNTLAPCTTPTQAAAAGAS

SEQ ID NO: 98219 - protein, 351 aa, Arabidopsis thaliana
  peptide (1)..(351): Ceres Seq. ID no. 13588941
MAVVQANSLLEDQSQLESGSLSSHDSGPFGTFVGVYDGHGGPETSRFINDHMFHHLKRFTAEQQCMSSEVIKKAFQATEEGFLSIVTNQFQTRPQIATVGSCCLVSVICDGKLYVANAGDSRAVLGQVMRVTGEAHATQLSAEHNASIESVRRELQALHPDHPDIVVLKHNVWRVKGIIQVSRSIGDVYLKRSEFNREPLYAKFRLRSPFSKPLLSAEPAITVHTLEPHDQFIICASDGLWEHMSNQEAVDIVQNHPRNGIAKRLVKVALQEAAKKREMRYSDLKKIDRGVRRHFHDDITVIVVFFDTNLVSRGSMLRGPAVSVRGAGVNLPHNTLAPCTTPTQAAAAGAS

SEQ ID NO: 98220 - DNA, 1381 bp, Arabidopsis thaliana
  misc_feature (1)..(1381): Ceres Seq. ID no. 13591537
  misc_feature (1)..(1381): Ortholog of  Ceres SEQ ID NO 13598548 as cited in SEQ ID NO 65227
atcggaaaaaattaaaaaccctaatttgagcagatctttccaattgaaagcgaaccgtgaattttgagtctctttaccggcggcgaaaaaatgcttggtggattatacggagatcttcctccaccgaccgatgatgagaaacccagtggaaactcctcttccgtctggtcaagcagtaccaaaatggctccacctacacttcgcaaaccaccagcttttgctcccccgcaaacaatcttaagacctctcaacaaacctaaacctatcgtttcggctccgtacaagcctcctcctccttcgaattcatcgcaatcggtgcttattccggcgaacgaatcagcaccttcgcatcagcctgcattggttggtgtgacttcatcggtgattgaagagtacgatccagcgagacctaacgattacgaggagtataagagggagaagaagaggaaagctacggaagctgagatgaaacgagagatggataagagaaggcaagaggatgaggaaagagataagagagaaagagaagagagggagaaggagagagagagagataacagtgatccgtctcggttgaatatctccggtgaggaagcgtggaagagacgcgctgctatgagtggtggtggaagtggtgggaagggaagatcttcgtctccgccggggaatgttgatgggtttagtattgggaaatcggagacgagtgggttaggagtaggagcaggtggacagatgacagctgctcagaggatgatggcgaagatgggatggaaacaaggacaagggcttgggaaatcagagcaagggattactacgccattgatggctaagaagactgatcgtagagctggtgtcattgtcaatgctagtgagaataaatcttcttcggcggagaagaaggttgttaagagtgttaatatcaatggtgaaccaaccagggttttgcttcttagaaacatggttgggccaggacaagtagatgatgagctagaagatgaggtaggaggcgagtgtggcaaatacggtacagtcactcgtgtactgatattcgagatcactgaaccgaacttccctgtacacgaagcagtaagaatctttgttcagttttcaagacccgaggaaacaactaaagcccttgtagacctcgatgggagatactttggaggaagaaccgtacgtgcaacgttctatgatgaagagaaattcagtaagaacgagttggctccagttccaggtgaaatccctggctattaataactcctaagacaaagaagaaacttcatcttctaggagattcttgttagagaaagaaaccatagatgaggttttaaaaacatttgtaaagtacttagaaatcttgggattatctctttattgttgt

SEQ ID NO: 98221 - protein, 387 aa, Arabidopsis thaliana; identical to SEQ ID NO: 45982
  peptide (1)..(387): Ceres Seq. ID no. 13591538

SEQ ID NO: 98222 - protein, 356 aa, Arabidopsis thaliana; identical to SEQ ID NO: 45983
  peptide (1)..(356): Ceres Seq. ID no. 13591539

SEQ ID NO: 98223 - protein, 262 aa, Arabidopsis thaliana; identical to SEQ ID NO: 45984
  peptide (1)..(262): Ceres Seq. ID no. 13591540

SEQ ID NO: 98224 - DNA, 1755 bp, Arabidopsis thaliana
  misc_feature (1)..(1755): Ceres Seq. ID no. 13591919
  misc_feature (1)..(1755): Ortholog of  Ceres SEQ ID NO 14309993 as cited in SEQ ID NO 213
  misc_feature (1)..(1755): Ortholog of  Ceres SEQ ID NO 14307460 as cited in SEQ ID NO 54091
  misc_feature (1)..(1755): Ortholog of  Ceres SEQ ID NO 14304851 as cited in SEQ ID NO 54837
acagttagaaccaaagcaaaaaaaactaaaaagctcaagaagaaaaggatagagacgacaaaactccattgaagaacttattagagaagaagaacaacaacaaggaagataacgaaagtcactaaaatctttcaagacccatgaactctcaaatcactcttttcttcttcttcttctcaatcctctccctctcccaaatctcaaattcatcatcactactaaaaccacacccatgtccaattttacccctcccatcctcccaacagctccaatggcaactcggatccatggccatgttcctccattttggacccaacactttcaccgactccgaatggggcaccggaaaagctaacccatccattttcaacccgacccatctcaacgcaagtcaatgggtccaaatcgctaaagactcaggcttttcccgcgttatcctcacagctaagcaccatgatggattctgtctctggcctagcgaatacactgattactccgtcaaatctagccaatggagaaacggagccggcgatgtagtggctgaactagcttctgcggcaaaggaagctggaattggacttggtctttacctttctccatgggatcgacatgaacagtgttatggcaagacattggagtataacgagttctatctgagtcaaatgaccgagttactaacaaagtatggagagattaaggaagtttggttagatggagctaaaggagacggagagaaagatatggaatatttctttgatacttggtttagtttgatccatcagcttcagcctaaagctgttatattctctgacgctggtcctgatgtcaggtggattggtgatgaagctggtctagctggctctacttgctggtcactctttaacagaaccaatgcaaagattggtgacactgagccttcgtattctcaagaaggtgatggctatgggcaagattgggtaccagcggaatgtgatgtatcgattcgacccggttggttttggcatgcgtcggagtcgcctaaaccggctgttcagcttttggatatatactataactcagttggaagaaactgtctcttcttgcttaatgtacctcctaattcttcaggattgatatctgagcaagacattaaggttcttgaagagttcagcgaaatgaagaactccattttctcgaacaatctcgcccgtaaagcattcgttaactcgagcagtattcgtggcgatcaaagttcacagtttggtcctaagaatgttttggaagaaggattagacaagtactgggcgccagaagagaatcaaaacgaatgggtgttatacttagagtttaaagatttggttagcttcaatgtgttggagattcgagaaccaatccatatgggtcaaaggatcgcatctttccatctcgagacacggaagactggaagcggtgagtgggagagagttgtgagcggcacgacggttggtaacaaaaggcttttacggtttctgaatgttgttgagtcgcggtctctaaagcttgtggtggacaaagcgaggaccgacccacttatatcgtacctcggactctacatggataagttttcgggttctagtagaaacacaacaaagataacaatcacaaggacactaaaggaagagcagcaactacatgatttgtaagaaataactctcaaggattcatcacataagtgttaggtattcttgagaatatctatgtgcatcaagtcatatatgtgtcactatcaattcttgc

SEQ ID NO: 98225 - protein, 506 aa, Arabidopsis thaliana; identical to SEQ ID NO: 72670
  peptide (1)..(506): Ceres Seq. ID no. 13591920

SEQ ID NO: 98226 - protein, 457 aa, Arabidopsis thaliana; identical to SEQ ID NO: 72671
  peptide (1)..(457): Ceres Seq. ID no. 13591921

SEQ ID NO: 98227 - protein, 455 aa, Arabidopsis thaliana; identical to SEQ ID NO: 72672
  peptide (1)..(455): Ceres Seq. ID no. 13591922

SEQ ID NO: 98228 - DNA, 1556 bp, Arabidopsis thaliana
  misc_feature (1)..(1556): Ceres Seq. ID no. 13592516
  misc_feature (1)..(1556): Ortholog of  Ceres SEQ ID NO 12636863 as cited in SEQ ID NO 0
gaaaccacatgacacatgtgctccctaaacgtcgccgtgaccagatagctccggtcagagtcattatctctctctcgctcgctctctccatcttcatctctcttgctgaaaaatggcgaactcgagaactgtcttaatcttgtgcggtgactacatggaagactacgaggtgatggttccgttccaagctttacaagctttcggaatcaccgtccacaccgtctgccccggaaagaaagctggtgactcttgccccaccgccgttcacgatttttgtggccaccagacatattttgagtcacgaggtcacaatttcacgctcaatgcaacgtttgatgaagttgaccttagcaagtatgatggattggttataccaggaggacgtgctccagaatacctggccttgactgcatctgttgttgagctggttaaagagttctcaagatctggcaagcccattgcctctatttgccatgggcagttgatattggcagctgcagacacagtcaatggtcgaaaatgtacagcttatgcaactgttggaccttcccttgttgctgcaggtgccaagtgggtcgaaccgataactccggatgtctgtgttgttgatggtagtttgattactgcagctacatatgagggtcatcctgaatttatccagctttttgtcaaggctcttggcggtaaaataactggagcaaataaaaggatcttgtttctttgtggggattatatggaagactatgaagtcaaagtgcctttccagtcccttcaagctttgggatgtcaagttgatgcggtttgtccagagaagaaggctggtgatcgctgcccaactgcaatccatgactttgagggtgaccaaacttacagtgagaaaccaggccacacttttgctttaactactaactttgatgacctagtttcctcgagttatgatgctctggtcattcctggaggcagagcaccagaatatctggccttgaacgaacatgtccttaacatagttaaagagttcatgaattctgagaaaccagttgcgtctatttgccacggacaacagatcttagctgctgctggtgtcctcaagggaaggaaatgcactgcttatccagccgtgaaactgaacgtggtacttggaggaggaacttggctagaaccagatccaatcgacaggtgcttcactgacgggaatctagtaactggcgcagcatggcctggacacccggagtttgtttcacaactaatggctttgttgggcattcaggtttcattctaagttccatgttatgtaaacatcgttatcaagcagaacccatccaacacacttgtctactatggtatatgttactgccatcttttctatctcgtcttttgactagcttactgtcaagtcaatcacttgtgtttcataaagaaccccactgttgatgctttatgtaaagaatgaattctataagacttgtgctagttctcacaattgtaattcataactttcaaactatatccccaattaaaaatacaaacttgctagtgcacattgcaccgaatcttcc

SEQ ID NO: 98229 - protein, 388 aa, Arabidopsis thaliana
  peptide (1)..(388): Ceres Seq. ID no. 13592517
MANSRTVLILCGDYMEDYEVMVPFQALQAFGITVHTVCPGKKAGDSCPTAVHDFCGHQTYFESRGHNFTLNATFDEVDLSKYDGLVIPGGRAPEYLALTASVVELVKEFSRSGKPIASICHGQLILAAADTVNGRKCTAYATVGPSLVAAGAKWVEPITPDVCVVDGSLITAATYEGHPEFIQLFVKALGGKITGANKRILFLCGDYMEDYEVKVPFQSLQALGCQVDAVCPEKKAGDRCPTAIHDFEGDQTYSEKPGHTFALTTNFDDLVSSSYDALVIPGGRAPEYLALNEHVLNIVKEFMNSEKPVASICHGQQILAAAGVLKGRKCTAYPAVKLNVVLGGGTWLEPDPIDRCFTDGNLVTGAAWPGHPEFVSQLMALLGIQVSF

SEQ ID NO: 98230 - protein, 374 aa, Arabidopsis thaliana
  peptide (1)..(374): Ceres Seq. ID no. 13592518
MEDYEVMVPFQALQAFGITVHTVCPGKKAGDSCPTAVHDFCGHQTYFESRGHNFTLNATFDEVDLSKYDGLVIPGGRAPEYLALTASVVELVKEFSRSGKPIASICHGQLILAAADTVNGRKCTAYATVGPSLVAAGAKWVEPITPDVCVVDGSLITAATYEGHPEFIQLFVKALGGKITGANKRILFLCGDYMEDYEVKVPFQSLQALGCQVDAVCPEKKAGDRCPTAIHDFEGDQTYSEKPGHTFALTTNFDDLVSSSYDALVIPGGRAPEYLALNEHVLNIVKEFMNSEKPVASICHGQQILAAAGVLKGRKCTAYPAVKLNVVLGGGTWLEPDPIDRCFTDGNLVTGAAWPGHPEFVSQLMALLGIQVSF

SEQ ID NO: 98231 - protein, 368 aa, Arabidopsis thaliana
  peptide (1)..(368): Ceres Seq. ID no. 13592519
MVPFQALQAFGITVHTVCPGKKAGDSCPTAVHDFCGHQTYFESRGHNFTLNATFDEVDLSKYDGLVIPGGRAPEYLALTASVVELVKEFSRSGKPIASICHGQLILAAADTVNGRKCTAYATVGPSLVAAGAKWVEPITPDVCVVDGSLITAATYEGHPEFIQLFVKALGGKITGANKRILFLCGDYMEDYEVKVPFQSLQALGCQVDAVCPEKKAGDRCPTAIHDFEGDQTYSEKPGHTFALTTNFDDLVSSSYDALVIPGGRAPEYLALNEHVLNIVKEFMNSEKPVASICHGQQILAAAGVLKGRKCTAYPAVKLNVVLGGGTWLEPDPIDRCFTDGNLVTGAAWPGHPEFVSQLMALLGIQVSF

SEQ ID NO: 98232 - DNA, 3304 bp, Arabidopsis thaliana
  misc_feature (1)..(3304): Ceres Seq. ID no. 13592702
  misc_feature (1)..(3304): Ortholog of  Ceres SEQ ID NO 15169623 as cited in SEQ ID NO 67523
atcaatggagtcttcactcttttctccatcttcctcttcttactcttctctcttcactgcaaaacctacgcgtcttttatcaccaaaacccaaattcacattctccatcagatcctccattgagaaacccaaacccaaactcgagaccaattcatcgaaatcccaatcatgggtcagtcccgattggctcacaacactcactcgtaccctttcctcaggaaaaaacgacgagtcaggtataccaatcgcgaacgcgaagctcgacgatgtcgctgatctcctcggaggtgctctcttcttacctctctacaaatggatgaatgagtacggacccatttaccgtctcgctgctggtcctcgtaatttcgtaattgtgagcgacccagcgatagctaaacatgttttgaggaattatccaaagtacgctaaaggcttagtcgctgaagtctctgaatttctatttggttcgggtttcgctatcgctgaaggacctctttggacagcgaggcgtagagcggtggttccatcgcttcacaggaggtatttgtctgtgattgtggagagagtattctgcaaatgtgcagagaggcttgttgagaagttgcagccttatgcagaagacggaagtgctgtgaatatggaagcgaagttctctcagatgacacttgatgtcattgggttgtctctttttaactacaatttcgattctttgactactgatagtcctgtcattgaagctgtttacactgctcttaaagaagctgagcttcgttctactgatcttctgccatattggaagatcgatgcattgtgtaagatagtcccgagacaggtgaaagctgaaaaggctgtaactttgataagggaaactgttgaagaccttattgctaagtgtaaagaaattgtcgaaagagaaggcgaaagaatcaatgatgaggagtatgtaaatgatgctgacccaagtatcctgcgtttcttgcttgcaagcagagaagaggtatcaagtgtgcagttacgggatgatcttctctcaatgctcgtagcgggtcatgaaaccactggatctgtcctcacttggacactttatctcctaagtaagaactcatctgcattaaggaaagcacaagaagaagtagacagagtgttagaaggaagaaacccggctttcgaggatataaaggagttgaagtacatcactcgttgtataaacgagtcaatgcgtctctatcctcatcctcctgtcttgataagaagagctcaagttcctgacattcttcctgggaactataaggtcaataccggacaagacattatgatttcagtctataacatccatcgttcttccgaggtatgggaaaaagctgaggaatttctgcctgaacgattcgacatagatggcgcaatccctaacgaaacaaacactgatttcaaattcatcccattcagtggagggcctagaaaatgtgtaggcgatcagtttgcattgatggaggcaattgtggcactcgcggtgtttcttcagcggttaaacgttgagctggttcctgatcagaccattagcatgaccacaggagcaaccatacacaccaccaatggattgtatatgaaggtgagccaaaggtaaaaaccagaatttatgttttcatgataattgattggtgtgaatggacttgtttcatagtactcttgagaaataaccacaaaaaaatgaattatggaaaatagttgtaccatcggaaatgtgaattttgaacagtgagatgctagtaccattaaagtttggtaattgtgttatcatttcaaatcaaactttcatacagcttgtgtttgttctccatttttcagtaattacgaaaatcaaaattttatttttttttgaatttctaaataatagactaaggtctaaaaccatcccattccatatggaccacacgtaacattaaccttaaaaaccatataaaaccatataaaaccaatactagtgggttctatagcgatgtgtagtttcactttcacgtacgaggaagattaaaaaaaatggagaacgaaagctcagagagtagaaacagagctcgtcttgccattatggagcttgctaacatgattagcgttcccatgtctctcaatgccgccgtgcgactaggcattgccgacgccatttggaacggcggagccaattctcctctctctgccgccgagatcctccctcgcctccacctaccatctcacactaccattggtggcgaccccgagaatcttcagcgtatacttcggatgctcaccagctacggtgtcttctccgaacaccttgttggatccattgagaggaaatactctcttacggacgtcggaaaaactcttgtaaccgactccggcggcctctcttacgctgcctacgtcctccaacatcaccaggaggcgttgatgcgagcatggccactagttcacacggcagtggtggagccggagacagagccgtacgtgaaagcaaacggcgaggcggcatacgctcagtatgggaaaagtgaggagatgaatggtctaatgcaaaaggcaatgtctggcgtatctgtaccgttcatgaaagctatattagacggctacgatgggtttaaatcagtggatattttggttgacgtaggaggtagtgcaggggattgtctgcgtatgatccttcaacaatttcctaacgtccgtgaagggattaatttcgatttacctgaagttgttgccaaagcccccaatattcctggagtgactcacgtgggtggggatatgttccaatcagttcctagcgctgacgctatcttcatgaagtgggtgttaacgacatggacggatgaagaatgcaagcagataatgaagaattgctacaacgcgttaccagttggaggaaagctgattgcgtgtgagccggtcttgcctaaggaaaccgatgaaagtcaccggactcgtgccttgttagaaggtgacatctttgtcatgaccatctatagaaccaaaggtaagcatagaaccgaagaagagtttatagagcttggtctctccgcgggattccctacttttcgacctttctacattgattacttctacaccatcttagagtttcagaagtaatattcaagcatttttcttctcatatttctaaaagcttcaaaataatgaatcaaaagacctctttgttaattgagttgagatatctagtgaagacattaatattttcatcaagatgtaataatctaaagtctatattctaagtgcatccttaaaaggcattttccatatatataagtttcatctttcg

SEQ ID NO: 98233 - protein, 540 aa, Arabidopsis thaliana
  peptide (1)..(540): Ceres Seq. ID no. 13592703
SMESSLFSPSSSSYSSLFTAKPTRLLSPKPKFTFSIRSSIEKPKPKLETNSSKSQSWVSPDWLTTLTRTLSSGKNDESGIPIANAKLDDVADLLGGALFLPLYKWMNEYGPIYRLAAGPRNFVIVSDPAIAKHVLRNYPKYAKGLVAEVSEFLFGSGFAIAEGPLWTARRRAVVPSLHRRYLSVIVERVFCKCAERLVEKLQPYAEDGSAVNMEAKFSQMTLDVIGLSLFNYNFDSLTTDSPVIEAVYTALKEAELRSTDLLPYWKIDALCKIVPRQVKAEKAVTLIRETVEDLIAKCKEIVEREGERINDEEYVNDADPSILRFLLASREEVSSVQLRDDLLSMLVAGHETTGSVLTWTLYLLSKNSSALRKAQEEVDRVLEGRNPAFEDIKELKYITRCINESMRLYPHPPVLIRRAQVPDILPGNYKVNTGQDIMISVYNIHRSSEVWEKAEEFLPERFDIDGAIPNETNTDFKFIPFSGGPRKCVGDQFALMEAIVALAVFLQRLNVELVPDQTISMTTGATIHTTNGLYMKVSQR

SEQ ID NO: 98234 - protein, 539 aa, Arabidopsis thaliana; identical to SEQ ID NO: 25563
  peptide (1)..(539): Ceres Seq. ID no. 13592704

SEQ ID NO: 98235 - protein, 435 aa, Arabidopsis thaliana; identical to SEQ ID NO: 25564
  peptide (1)..(435): Ceres Seq. ID no. 13592705

SEQ ID NO: 98236 - DNA, 952 bp, Arabidopsis thaliana
  misc_feature (1)..(952): Ceres Seq. ID no. 13592727
  misc_feature (1)..(952): Ortholog of  Ceres SEQ ID NO 14303553 as cited in SEQ ID NO 65318
ggtgaaggagaaggagaatgggagatctctacgctttggacttcgatggagttctctgtgatagttgtggagaaagctctctatctgctgttaaggcagccaaagtgagatggcctgatttgttcgaaggagttgattccgctttagaggaatggatcgtcgatcaaatgcatattgtgagacctgtggttgaaactggctatgaaaatcttctacttgtgcggctgttattggagaccaagataccgtctattcgaaaatcttcagttgcagaggggttgacggttgatgggatactggagagctgggcaaagtttaagcccgtgatcatggaagcttgggatgaagatagagatgctttggtagatttgtttggaaaagttagagatgattggattaacaaggacttgacaacttggattggtgccaatagattctacccaggagtttcagatgcactgaaatttgccagctcaaagatttatatcgttaccacgaaacagggccgctttgcagaagcgttactgcgtgaaatagcaggtgtaatcataccatcagaaaggatttatggtttgggttcagggccaaaggtggaagttctaaagctacttcaagataaaccagaacatcagggcttgacgctgcatttcgtggaagacagactcgcaacgctgaaaaatgtcataaaagagcctgaattagacaaatggagtttatacctaggaacctggggatacaacactgagaaagagagagctgaagcagcaggcattcccaggattcaggttattgagctctccacgtttagcaataagcttaaatgagtgcatatactcattggaaaagaaacaaagctttcctctttattgtattctacggcattcaacggaaactaaaaaccaaacatgtttaggtaagattcagtaaaagagttgaactttcagtactaccc

SEQ ID NO: 98237 - protein, 268 aa, Arabidopsis thaliana
  peptide (1)..(268): Ceres Seq. ID no. 13592728
MGDLYALDFDGVLCDSCGESSLSAVKAAKVRWPDLFEGVDSALEEWIVDQMHIVRPVVETGYENLLLVRLLLETKIPSIRKSSVAEGLTVDGILESWAKFKPVIMEAWDEDRDALVDLFGKVRDDWINKDLTTWIGANRFYPGVSDALKFASSKIYIVTTKQGRFAEALLREIAGVIIPSERIYGLGSGPKVEVLKLLQDKPEHQGLTLHFVEDRLATLKNVIKEPELDKWSLYLGTWGYNTEKERAEAAGIPRIQVIELSTFSNKLK

SEQ ID NO: 98238 - protein, 218 aa, Arabidopsis thaliana
  peptide (1)..(218): Ceres Seq. ID no. 13592729
MHIVRPVVETGYENLLLVRLLLETKIPSIRKSSVAEGLTVDGILESWAKFKPVIMEAWDEDRDALVDLFGKVRDDWINKDLTTWIGANRFYPGVSDALKFASSKIYIVTTKQGRFAEALLREIAGVIIPSERIYGLGSGPKVEVLKLLQDKPEHQGLTLHFVEDRLATLKNVIKEPELDKWSLYLGTWGYNTEKERAEAAGIPRIQVIELSTFSNKLK

SEQ ID NO: 98239 - protein, 164 aa, Arabidopsis thaliana
  peptide (1)..(164): Ceres Seq. ID no. 13592730
MEAWDEDRDALVDLFGKVRDDWINKDLTTWIGANRFYPGVSDALKFASSKIYIVTTKQGRFAEALLREIAGVIIPSERIYGLGSGPKVEVLKLLQDKPEHQGLTLHFVEDRLATLKNVIKEPELDKWSLYLGTWGYNTEKERAEAAGIPRIQVIELSTFSNKLK

SEQ ID NO: 98240 - DNA, 848 bp, Arabidopsis thaliana
  misc_feature (1)..(848): Ceres Seq. ID no. 13592748
  misc_feature (1)..(848): Ortholog of  Ceres SEQ ID NO 13638609 as cited in SEQ ID NO 52110
attgtcccaaaatacaagcaaaatacaaagatgacgtttcacaaaatcttttttgtaatctctctgatgctcgttgtctcattagttaatgctgttgactactcggtcgtcgacaattccggtgactctaccggaggaaggagattccggggagagatcggtggcataagctacggcacacagacactaagatctgcgacagactttgtgtggcgtttgttccaacaaaccaacccttcagacagaaagtcagttacaaagatcacactgttcatggagaacggtgacggagtagcgtacaactctgcaaacgagatacatttcaacgtgggatatctcgcgggtgtatcgggagatgtaaagagggaatttaccggtgtagtttatcatgaggtggtccattcttggcagtggaacggtgcgggtcgggctccgggtgggcttatcgaagggatagcggattacgtgaggctgaaagcgggttacgctccaagtcattgggtcgggcctggtcgtggtgataggtgggatcaaggttatgacgttaccgcgaggttcttggattattgtaacggtttgaggaatgggtttgtggccgagctgaacaagaagatgaggaatggttatagtgatggcttcttcgttgatttgcttgggaaagacgtgaatcaattatggagagagtacaaggccaagtatggtcaatgaatacaaacgatacaaaataatctcaatatggtaatgaaaataaaataaaatggtgaataaaatgaaaaatatggtgttgttaagtttctattggaaaacacatacattacactctttgtattaaaatataagctcttgct

SEQ ID NO: 98241 - protein, 235 aa, Arabidopsis thaliana
  peptide (1)..(235): Ceres Seq. ID no. 13592749
IVPKYKQNTKMTFHKIFFVISLMLVVSLVNAVDYSVVDNSGDSTGGRRFRGEIGGISYGTQTLRSATDFVWRLFQQTNPSDRKSVTKITLFMENGDGVAYNSANEIHFNVGYLAGVSGDVKREFTGVVYHEVVHSWQWNGAGRAPGGLIEGIADYVRLKAGYAPSHWVGPGRGDRWDQGYDVTARFLDYCNGLRNGFVAELNKKMRNGYSDGFFVDLLGKDVNQLWREYKAKYGQ

SEQ ID NO: 98242 - protein, 225 aa, Arabidopsis thaliana
  peptide (1)..(225): Ceres Seq. ID no. 13592750
MTFHKIFFVISLMLVVSLVNAVDYSVVDNSGDSTGGRRFRGEIGGISYGTQTLRSATDFVWRLFQQTNPSDRKSVTKITLFMENGDGVAYNSANEIHFNVGYLAGVSGDVKREFTGVVYHEVVHSWQWNGAGRAPGGLIEGIADYVRLKAGYAPSHWVGPGRGDRWDQGYDVTARFLDYCNGLRNGFVAELNKKMRNGYSDGFFVDLLGKDVNQLWREYKAKYGQ

SEQ ID NO: 98243 - protein, 213 aa, Arabidopsis thaliana
  peptide (1)..(213): Ceres Seq. ID no. 13592751
MLVVSLVNAVDYSVVDNSGDSTGGRRFRGEIGGISYGTQTLRSATDFVWRLFQQTNPSDRKSVTKITLFMENGDGVAYNSANEIHFNVGYLAGVSGDVKREFTGVVYHEVVHSWQWNGAGRAPGGLIEGIADYVRLKAGYAPSHWVGPGRGDRWDQGYDVTARFLDYCNGLRNGFVAELNKKMRNGYSDGFFVDLLGKDVNQLWREYKAKYGQ

SEQ ID NO: 98244 - DNA, 1588 bp, Arabidopsis thaliana
  misc_feature (1)..(1588): Ceres Seq. ID no. 13592796
  misc_feature (1)..(1588): Ortholog of  Ceres SEQ ID NO 15176057 as cited in SEQ ID NO 56363
  misc_feature (1)..(1588): Ortholog of  Ceres SEQ ID NO 14316269 as cited in SEQ ID NO 60082
atctctgaatcactcataaaccctttcttcttccttgttcaaatccactcactcttggagagagacgactcaaacgcatagtctctcctctgtatttactcgttatcgtcactgtgagagagagagagagagagagcgcgcgcattcccccaattaaagcctctctgctccaaaccgtgatatactctttacgtwstttgtttttgcctttatccttccctagttgtgtataattttgttcttttcttatggagatggatctcagcaaggttactcttgacattttcacaaagcttgaacagaaatggctctctcactgcgactcctcccggaagactcgtatccttagcatcgacggtggcggtaccactggcattgtcgccgctgcttctattctccacctcgagcaccagatccgccttcaaaccggcgaccctcacgctcacatctctgatttcttcgacattgtcgccggaactggcatcggaggcattctcgccgccctccttgtcgccgacgacggctccggcaggccgatgttcactgccagagacgcggttaagtttgtcgcggagaagaactcggagctcttcgagatcaggtacaccggagttttcaggaggaacaagagatactcggggaagagcatggagagggttttggagacggcgtttaggagagaggacggtaaggtgttgacgatgaaggacacgtgtaagcctctccttgttccttgctacgacctcaaaacctctgctcctttcgttttctcacgcgccggcgcgtctgagtctccgagcttcgacttcgagctgtggaaagtctgccgtgccacgtcagcaacaccaagcctcttcaagccgttcagtgtagtgtcggtggacgggaaaacctcatgctcagccgtagacggcggtttggtgatgaacaatccaacagcagctgccgtcacgcacgtgctacacaacaaacgagatttcccgtcagtaaacggcgtagatgacttgcttgtactgtcgttgggaaacggtccgtcgaccatgtcatcatcaccagggaggaaactccgtcgtaacggagactgttcgacgtcaagtgtggtggacatagtggttgacggcgtttccgataccgtcgatcagatgctggggaacgctttctgctggaaccgtactgattacgttagaatccaggcgaacggtttgacgagcggcggagcggaggagttgctgaaagagagaggtgtggaaacggcgccgtttggggtaaaacggatactaacggagagtaacggagaaagaatagagggtttcgtgcaacgtcttgttgcgtcaggaaagtcaagtctacctccaagtccttgcaaggaatctgccgttaaccctctcgctgacggccgttaagtttcctttattattataaccctccccgtccgtgatgtaagaagtttgtaaccaaacccctgggttaattttttaaccccagccagcatcttcgagttaattaattagcctttctttttttctaatgactttagttgaggaattaataatggttaatgaatgatagtctttacttatttatcact

SEQ ID NO: 98245 - protein, 384 aa, Arabidopsis thaliana; identical to SEQ ID NO: 43536
  peptide (1)..(384): Ceres Seq. ID no. 15221154

SEQ ID NO: 98246 - protein, 382 aa, Arabidopsis thaliana; identical to SEQ ID NO: 43537
  peptide (1)..(382): Ceres Seq. ID no. 15221155

SEQ ID NO: 98247 - protein, 288 aa, Arabidopsis thaliana; identical to SEQ ID NO: 43538
  peptide (1)..(288): Ceres Seq. ID no. 15221156

SEQ ID NO: 98248 - DNA, 1297 bp, Arabidopsis thaliana
  misc_feature (1)..(1297): Ceres Seq. ID no. 13592809
  misc_feature (1)..(1297): Ortholog of  Ceres SEQ ID NO 13595414 as cited in SEQ ID NO 56539
  misc_feature (1)..(1297): Ortholog of  Ceres SEQ ID NO 14314396 as cited in SEQ ID NO 60048
cattattcacttaagtatatagtagcttccataagagtcttagttctaactataaatacacatatctcactctctctgatctccgcttctcttcgccaacaaatgtcgaccgctcctctctccggcttctttctcacttcactttctccttctcaatcttctctccagaaactctctcttcgtacttcttccaccgtcgcttgcctcccacccgcctcttcttcttcctcatcttcctcctcctcgtcttcccgttccgttccaacgcttatccgtaacgagccagtttttgccgctcctgctcctatcattgccccttattggagtgaagagatgggaaccgaagcatacgacgaggctattgaagctctcaagaagcttctcatcgagaaggaagagctaaagacggttgcagcggcaaaggtggagcagatcacagcggctcttcagacaggtacttcatccgacaagaaagctttcgaccccgtcgaaaccattaagcagggcttcatcaaattcaagaaggagaaatacgaaaccaaccctgctttgtacggtgagctcgcaaagggtcaaagtcctaagtacatggtgtttgcttgttcagactcacgtgtgtgtccatcacacgttctggactttcagccaggagatgccttcgtggtccgtaacatagccaacatggttcctcctttcgacaaggtcaaatacggtggcgttggagcagccattgaatacgcggtcttacaccttaaggtggagaacattgtggtgataggacacagtgcatgtggtgggatcaaagggcttatgtctttccccttagatggaaacaactccactgacttcatagaggactgggtcaaaatctgtttaccagccaagtcaaaggttatatcagaacttggagattcagcctttgaagatcaatgtggccgatgtgaaagggaggcggtgaatgtttcactagcaaacctattgacatatccatttgtgagagaaggacttgtgaagggaacacttgctttgaagggaggctactatgacttcgtcaagggtgcttttgagctttggggacttgaatttggcctctccgaaactagctctgtatgaaccaatccatcatcatcatcatcatcatgaccatccatcatcatcatcattattatcatcgtatataatatatatctaccccatatgtaatttgtaatgtgcctttgactgtgatgagttatctctccctctctaccaactttcttcatatatataaaacaaaaaggaaaagcagatgatatag

SEQ ID NO: 98249 - protein, 370 aa, Arabidopsis thaliana; identical to SEQ ID NO: 35084
  peptide (1)..(370): Ceres Seq. ID no. 13592810

SEQ ID NO: 98250 - protein, 336 aa, Arabidopsis thaliana; identical to SEQ ID NO: 35085
  peptide (1)..(336): Ceres Seq. ID no. 13592811

SEQ ID NO: 98251 - protein, 259 aa, Arabidopsis thaliana; identical to SEQ ID NO: 35086
  peptide (1)..(259): Ceres Seq. ID no. 13592812

SEQ ID NO: 98252 - DNA, 1004 bp, Arabidopsis thaliana
  misc_feature (1)..(1004): Ceres Seq. ID no. 13592861
  misc_feature (1)..(1004): Ortholog of  Ceres SEQ ID NO 12582036 as cited in SEQ ID NO 50981
  misc_feature (1)..(1004): Ortholog of  Ceres SEQ ID NO 15173523 as cited in SEQ ID NO 61797
aggatttgctctagattgttgaatcgaagatgtcgacaagggaagagaatgtttacatggcgaaattagccgaacaagctgaacgttacgaagaaatggttgaattcatggagaaagttgcgaaaactgttgatgttgaggaactttcagttgaagagaggaatcttctctctgttgcttacaagaacgtgattggagcgagaagagcttcgtggagaatcatttcttcgattgagcagaaagaagagagcaaagggaacgaagatcatgttgctattatcaaggattacagaggaaagattgaatccgagcttagcaaaatctgtgatgggattttgaatgttcttgaagctcatcttattccttctgcttcaccagctgaatctaaagtgttttatcttaagatgaagggtgattatcataggtatcttgctgagtttaaggctggtgctgaaaggaaagaagctgctgaaagcactttggttgcttacaagtctgcttccgacattgccactgctgagttagctcctactcacccgataaggcttggtcttgcactcaacttctctgtgttttactatgaaatcctcaactcgcctgatcgtgcttgcagcctcgcaaagcaggcgtttgatgatgcaatcgctgagttagatacattgggtgaggaatcatacaaggacagtacactgattatgcagcttcttagagacaatctcactctctggacttcagatatgactgacgaagcaggagatgagattaaggaggcatcaaagcccgatggtgccgagtaaacccgaagaagaggaagagtcattttataatggtagaaaactttcatgtgataatctgagtgagggatagctcaggattcttataagagacacagttttattgttgtttgtttgttttgaaactacttgcgatttatcattcctcctttagcttcctcaatatttcctattctcctttctaatgaaatcaaaacttggttatttctg

SEQ ID NO: 98253 - protein, 255 aa, Arabidopsis thaliana; identical to SEQ ID NO: 27717
  peptide (1)..(255): Ceres Seq. ID no. 13592862

SEQ ID NO: 98254 - protein, 246 aa, Arabidopsis thaliana; identical to SEQ ID NO: 27718
  peptide (1)..(246): Ceres Seq. ID no. 13592863

SEQ ID NO: 98255 - protein, 233 aa, Arabidopsis thaliana; identical to SEQ ID NO: 27719
  peptide (1)..(233): Ceres Seq. ID no. 13592864

SEQ ID NO: 98256 - DNA, 1137 bp, Arabidopsis thaliana
  misc_feature (1)..(1137): Ceres Seq. ID no. 13592902
  misc_feature (1)..(1137): Ortholog of  Ceres SEQ ID NO 12616162 as cited in SEQ ID NO 63260
atagaccaatacagagatacaaagcaatagaacaacaagaacaagaaaacagagaaaaaaacaatggctgccttgtcggataagttagcggatgcttaccagaacgcaaggccgagatatccgatcgattggttcacgaaacttgctgctcgaaccggtcagcacaaatcagcttgggatgttggtactggcaacggtcaagcagctattggtcttgcagagtatttcgagaaagttacagcaaccgacataaacgaagcacagttaaaacgagcggtaaaacacgaaagaatcagttaccatcacactcccacaacaatgtccgaagaccaaatggttgctctagtcggcggagataactccgttgatctaatcgtggcagcacaagccgttcactacttcgatctcgcaccattctacaacgtagcaaaacgtgttcttcgcaaagaaggaggattaatcgcagtttttgtctacaacgacataatcatctctcctgaagttgattccatcatgaaacgtcttgtggactccacgttcccgtttagaactcctgtaatgaatcttgctttcgacggttataaaacgttgccgtttccgtttgaaagtatagggatgggatcagaagggaagcctataatgcttgacattcctcataagctatcgcttaaagggtttatcggtttcttgagatcgtggcagcccgcaatgaaagctaaagaacgtggagttgagcttgtgactgaagatttgatctccaaatttgaagatgcttggggtgatgatgatgatgttaaagatattttctacaaagctcatatgattgttggaaaactttcggcttcagatatagagcggcatcgaaagagatttgatacgaactgcgtagttacaacactaaaggatcataacaactcggctgttattgcttcagtgactgctgctgcatttgctggagtggcggcttactgtgcttactctgcaaggaagaacagttagatcctttgaaggacaaagaaacggttttctgaatctagtgaatgaaatcttttttattttacatgttgacatgttgtcatgtatttatttatgtcattgatatgagatggttaagtaatatctaaagatttaagagtc

SEQ ID NO: 98257 - protein, 311 aa, Arabidopsis thaliana
  peptide (1)..(311): Ceres Seq. ID no. 13592903
MAALSDKLADAYQNARPRYPIDWFTKLAARTGQHKSAWDVGTGNGQAAIGLAEYFEKVTATDINEAQLKRAVKHERISYHHTPTTMSEDQMVALVGGDNSVDLIVAAQAVHYFDLAPFYNVAKRVLRKEGGLIAVFVYNDIIISPEVDSIMKRLVDSTFPFRTPVMNLAFDGYKTLPFPFESIGMGSEGKPIMLDIPHKLSLKGFIGFLRSWQPAMKAKERGVELVTEDLISKFEDAWGDDDDVKDIFYKAHMIVGKLSASDIERHRKRFDTNCVVTTLKDHNNSAVIASVTAAAFAGVAAYCAYSARKNS

SEQ ID NO: 98258 - protein, 226 aa, Arabidopsis thaliana; identical to SEQ ID NO: 37193
  peptide (1)..(226): Ceres Seq. ID no. 13592904

SEQ ID NO: 98259 - protein, 221 aa, Arabidopsis thaliana; identical to SEQ ID NO: 37194
  peptide (1)..(221): Ceres Seq. ID no. 13592905

SEQ ID NO: 98260 - DNA, 861 bp, Arabidopsis thaliana
  misc_feature (1)..(861): Ceres Seq. ID no. 13592969
  misc_feature (1)..(861): Ortholog of  Ceres SEQ ID NO 14313170 as cited in SEQ ID NO 20674
agagacaaaaatggagtgtgtagaagcatttctcggtgatttttccgtcgacgatcttctcgacctctctaacgccgacacttctttagagtcgtcttcgtcacaaagaaaagaagacgaacaagaacgtgagaaatttaagagcttttctgaccaaagtacccgtctttcaccgccagaggatctcttatcttttcccggcgacgctccggttggtgatttggaggacttagagtggttatccaacttcgtggaggattctttctcagaatcgtatatttcgagtgatttcccggtgaatccagtcgcgtcggtggaggttcggagacagtgcgttcctgttaaacctagaagcaaacgccgccgcaccaacggccgtatctggtctatggagtctccatctcctctgctatccaccgctgttgccagaaggaagaagagagggagacagaaggtggatgcatcgtacggtggcgtagtccagcagcagcagctgaggcggtgctgcagccattgtggagtccagaagacgcctcaatggagaatgggtccattaggtgcgaagacactgtgtaatgcttgtggggtccggtttaagtcgggtcgacttttacccgaatatagacccgcttgtagcccaacattcaccaacgagattcactctaactctcaccggaaagtgttggagctacggctcatgaaagtggcggatccggctcgggtttaagccatttttttctatcttgaaattttatcaatgccatgtgcattgtgtaatcttgtaaacagagaatcagagagagatccgtagactgttttcacattcatgaagttaagctataattagagacaattttattt

SEQ ID NO: 98261 - protein, 241 aa, Arabidopsis thaliana
  peptide (1)..(241): Ceres Seq. ID no. 13592970
ETKMECVEAFLGDFSVDDLLDLSNADTSLESSSSQRKEDEQEREKFKSFSDQSTRLSPPEDLLSFPGDAPVGDLEDLEWLSNFVEDSFSESYISSDFPVNPVASVEVRRQCVPVKPRSKRRRTNGRIWSMESPSPLLSTAVARRKKRGRQKVDASYGGVVQQQQLRRCCSHCGVQKTPQWRMGPLGAKTLCNACGVRFKSGRLLPEYRPACSPTFTNEIHSNSHRKVLELRLMKVADPARV

SEQ ID NO: 98262 - protein, 238 aa, Arabidopsis thaliana
  peptide (1)..(238): Ceres Seq. ID no. 13592971
MECVEAFLGDFSVDDLLDLSNADTSLESSSSQRKEDEQEREKFKSFSDQSTRLSPPEDLLSFPGDAPVGDLEDLEWLSNFVEDSFSESYISSDFPVNPVASVEVRRQCVPVKPRSKRRRTNGRIWSMESPSPLLSTAVARRKKRGRQKVDASYGGVVQQQQLRRCCSHCGVQKTPQWRMGPLGAKTLCNACGVRFKSGRLLPEYRPACSPTFTNEIHSNSHRKVLELRLMKVADPARV

SEQ ID NO: 98263 - DNA, 1146 bp, Arabidopsis thaliana
  misc_feature (1)..(1146): Ceres Seq. ID no. 13592985
  misc_feature (1)..(1146): Ortholog of  Ceres SEQ ID NO 13594809 as cited in SEQ ID NO 51847
  misc_feature (1)..(1146): Ortholog of  Ceres SEQ ID NO 12563124 as cited in SEQ ID NO 57104
  misc_feature (1)..(1146): Ortholog of  Ceres SEQ ID NO 15226273 as cited in SEQ ID NO 64934
  misc_feature (1)..(1146): Ortholog of  Ceres SEQ ID NO 12617639 as cited in SEQ ID NO 65219
  misc_feature (1)..(1146): Ortholog of  Ceres SEQ ID NO 15173998 as cited in SEQ ID NO 0
  misc_feature (1)..(1146): Ortholog of  Ceres SEQ ID NO 15178333 as cited in SEQ ID NO 0
aagttttaacggacgcgagaaatcacagaggaagcgaagtcagtgtagagatatctaattgcgatggcttttttgagtaaattcgggaacatattgaagcagaccacaaacaagcaactcaatgctcaggtttctttatcaagcccttcgctttttcaagcaataaggtgtatgtcatcttctaagctctttattggaggtatggcttatagcatggatgaggatagcttaagagaagctttcaccaaatacggtgaagttgtcgatactagagttattttggatcgtgaaactggtaggtcaaggggatttggatttgttacattcacctcttcagaagcggcatctagtgctatccaggctttggatggccgggatctccatggccgggttgttaaagtaaactatgcaaatgatagaacaagtggtggtggttttggaggtggtggctatggaggcggtggtggtggttatggtggtagtggtggctacggaggaggtgctggtggctacggaggaagtggtggctatggaggcggtgctggtggctacggaggtaattctggtggtggctacggaggtaatgctgctggtggatatggaggcagtggtgctggtggctatggaggcgatgctactggtcacggaggtgctggtggaggttatggttcaagcggtggctttggatctagcggcaacacttatggggagggttcaagtgcaagcgcaggtgctgttggtgactataatggaagtagtggttatggtagcgccaatacttatggtagcagcaatggtggattcgctggagacagccagtttggaggaagccctgttggcaacagctctcagttcggtggtgacaatacccagtttactgctggtggccaatttggcggtgaggatcaatttggaagcatggagaaaagtgaaacgaagatggaagatggaccaataggtggagaattcgaagatgttgccaaaagagcttgaaggaactagcaaaaaatgttgtcaagactgtcttttcatattaaatcctatgattagtagtagctagctattctacattgcttcctgaattaaacactttatcaagaaacaatctgcttttgctatctttgaaaataatttgtagctcaattt

SEQ ID NO: 98264 - protein, 309 aa, Arabidopsis thaliana
  peptide (1)..(309): Ceres Seq. ID no. 13592986
MAFLSKFGNILKQTTNKQLNAQVSLSSPSLFQAIRCMSSSKLFIGGMAYSMDEDSLREAFTKYGEVVDTRVILDRETGRSRGFGFVTFTSSEAASSAIQALDGRDLHGRVVKVNYANDRTSGGGFGGGGYGGGGGGYGGSGGYGGGAGGYGGSGGYGGGAGGYGGNSGGGYGGNAAGGYGGSGAGGYGGDATGHGGAGGGYGSSGGFGSSGNTYGEGSSASAGAVGDYNGSSGYGSANTYGSSNGGFAGDSQFGGSPVGNSSQFGGDNTQFTAGGQFGGEDQFGSMEKSETKMEDGPIGGEFEDVAKRA

SEQ ID NO: 98265 - protein, 273 aa, Arabidopsis thaliana
  peptide (1)..(273): Ceres Seq. ID no. 13592987
MSSSKLFIGGMAYSMDEDSLREAFTKYGEVVDTRVILDRETGRSRGFGFVTFTSSEAASSAIQALDGRDLHGRVVKVNYANDRTSGGGFGGGGYGGGGGGYGGSGGYGGGAGGYGGSGGYGGGAGGYGGNSGGGYGGNAAGGYGGSGAGGYGGDATGHGGAGGGYGSSGGFGSSGNTYGEGSSASAGAVGDYNGSSGYGSANTYGSSNGGFAGDSQFGGSPVGNSSQFGGDNTQFTAGGQFGGEDQFGSMEKSETKMEDGPIGGEFEDVAKRA

SEQ ID NO: 98266 - protein, 263 aa, Arabidopsis thaliana
  peptide (1)..(263): Ceres Seq. ID no. 13592988
MAYSMDEDSLREAFTKYGEVVDTRVILDRETGRSRGFGFVTFTSSEAASSAIQALDGRDLHGRVVKVNYANDRTSGGGFGGGGYGGGGGGYGGSGGYGGGAGGYGGSGGYGGGAGGYGGNSGGGYGGNAAGGYGGSGAGGYGGDATGHGGAGGGYGSSGGFGSSGNTYGEGSSASAGAVGDYNGSSGYGSANTYGSSNGGFAGDSQFGGSPVGNSSQFGGDNTQFTAGGQFGGEDQFGSMEKSETKMEDGPIGGEFEDVAKRA

SEQ ID NO: 98267 - DNA, 1008 bp, Arabidopsis thaliana
  misc_feature (1)..(1008): Ceres Seq. ID no. 13592999
  misc_feature (1)..(1008): Ortholog of  Ceres SEQ ID NO 14301994 as cited in SEQ ID NO 56653
  misc_feature (1)..(1008): Ortholog of  Ceres SEQ ID NO 13595658 as cited in SEQ ID NO 59888
  misc_feature (1)..(1008): Ortholog of  Ceres SEQ ID NO 13661330 as cited in SEQ ID NO 61614
  misc_feature (1)..(1008): Ortholog of  Ceres SEQ ID NO 13596025 as cited in SEQ ID NO 62024
  misc_feature (1)..(1008): Ortholog of  Ceres SEQ ID NO 13662324 as cited in SEQ ID NO 62162
  misc_feature (1)..(1008): Ortholog of  Ceres SEQ ID NO 12625713 as cited in SEQ ID NO 64160
  misc_feature (1)..(1008): Ortholog of  Ceres SEQ ID NO 14301782 as cited in SEQ ID NO 66788
  misc_feature (1)..(1008): Ortholog of  Ceres SEQ ID NO 14302860 as cited in SEQ ID NO 67667
  misc_feature (1)..(1008): Ortholog of  Ceres SEQ ID NO 15174373 as cited in SEQ ID NO 0
gttgattcagtctcactcttgctcagtagagctcccatcaatggcttcaatcaacctcttcctcttcgctttccttcttcttctctctcacgcttcagcttcaacggtaatcttctacaacaaatgcaaacacccagtttggccaggtatccaacccagcgccggtcaaaacttactcgccggcggtggttttaagcttccagctaacaaagcccactctcttcaactcccaccactctggtccggccgtttctggggtcgccacggctgcaccttcgacagatctggccgtggtcactgcgccaccggagattgcggcggttctctctcctgcaacggtgccggcggtgaacctccggccactctcgccgaaatcactctcggccctgagctagacttctatgacgtcagcctcgtcgacggttataacctggccatgtcgattatgccggttaaaggttcaggtcaatgtagctacgccggttgtgttagcgatctaaaccagatgtgtccggttggtttacaagtccggtcacgtaacgggaaacgtgtagtagcctgtaaaagtgcttgctctgccttcaattcaccacagtactgttgcaccggcttgttcggtaacccacagtcttgcaaaccaacggcttactccaaaatcttcaaagtcgcttgcccaaaagcttactcttatgcttacgacgacccaaccagtatcgccacatgttccaaggctaactacatcgtcaccttttgccctcatcatcgccattaaattagccagtaaagaagaagaaacatttctctattagcaacaaactcttgtcatgtttcgaattcttgagtttctatatctacttttgtaacactatgattgaatgcagatcctattatcaatatcaatggaactcaaccaacttagtgatgtgtcttgtgagtgttaatctccaaattctaaatccttttatgttcagtggcttatgtactagacaatgcaagattaatgctatt

SEQ ID NO: 98268 - protein, 256 aa, Arabidopsis thaliana
  peptide (1)..(256): Ceres Seq. ID no. 13593000
LIQSHSCSVELPSMASINLFLFAFLLLLSHASASTVIFYNKCKHPVWPGIQPSAGQNLLAGGGFKLPANKAHSLQLPPLWSGRFWGRHGCTFDRSGRGHCATGDCGGSLSCNGAGGEPPATLAEITLGPELDFYDVSLVDGYNLAMSIMPVKGSGQCSYAGCVSDLNQMCPVGLQVRSRNGKRVVACKSACSAFNSPQYCCTGLFGNPQSCKPTAYSKIFKVACPKAYSYAYDDPTSIATCSKANYIVTFCPHHRH

SEQ ID NO: 98269 - protein, 243 aa, Arabidopsis thaliana
  peptide (1)..(243): Ceres Seq. ID no. 13593001
MASINLFLFAFLLLLSHASASTVIFYNKCKHPVWPGIQPSAGQNLLAGGGFKLPANKAHSLQLPPLWSGRFWGRHGCTFDRSGRGHCATGDCGGSLSCNGAGGEPPATLAEITLGPELDFYDVSLVDGYNLAMSIMPVKGSGQCSYAGCVSDLNQMCPVGLQVRSRNGKRVVACKSACSAFNSPQYCCTGLFGNPQSCKPTAYSKIFKVACPKAYSYAYDDPTSIATCSKANYIVTFCPHHRH

SEQ ID NO: 98270 - DNA, 1590 bp, Arabidopsis thaliana
  misc_feature (1)..(1590): Ceres Seq. ID no. 13593006
  misc_feature (1)..(1590): Ortholog of  Ceres SEQ ID NO 13646221 as cited in SEQ ID NO 20310
atgtggtgtttgtcctgctttaaaccttccactaaacatgatccctctgaggatcgttttgaagaagaaacaaatatcgttacaggtatttctctgtatgaagatgtcatcttacgtcagagaagatcagaagctgatcagatagaatgggctattcaagatagcttcaacccgcaagaaacttctcgttgtcgtcagcgagaggaggatgatcagatagcgcgtggtttgcaatatgtggaagaaactgagcttgataaatcagttgtggacgaagaagatcagcagctttctaagattgttgaggagagtttgaaggagaaaggcaaaagtaagcaatttgaagatgatcaagtggaaaatgatgaacagcaagctctgatggttcaggagagtctatacatggtggagctttctgctcaacttgaagaagataaaaacatttcaacaatacctccgctgaatgaagatgcgcagcttcagaaggttatttgggaaagcgcgaagggtaaaggccaaatagagcatttcaaagatccagtggaagaagatggaaatcttccaagggtagatctcaacgttaaccatcctcatagcatatgtgatggttgcaaatctgcgattgaatatggaagatctgttcatgccttgggtgttaattggcatcctgaatgtttctgttgtcgttattgcgacaaaccaatcgctatgcacgagtataaagaacatcccttctggaaggaaaagtactgcccttttcatgaagttgatggaactcccaagtgttgcagttgtgaaagattagagccctggggaacgaagtatgtaatgcttgctgacaatcggtggctatgcgtaaaatgtatggaatgcgcggttatggatacttatgagtgccaaccattgcactttgaaatccgtgaattcttcggaagcttaaacatgaaggttgagaaagaattccctcttcttttggtggagaaagaagcgctgaaaaaagctgaggcgcaagaaaagatcgacaatcagcatggggttgtaaccagaggtatttgcctgtctgaagggcagattgtcaatagtgtctttaaaaagccaaccatggggccaaacggcgagctagtaagcttgggtacagaacctcaaaaggttgttggtggatgtgaggtcactgcaattctcatcctatatggacttcctaggttactaactggatatatcttggctcatgagatgatgcatgcttggcttagactcaatggttataggaatcttaagttagagctggaagaaggaatatgccaagtgctaggccacatgtggttggagtcacagacatactccagttctgcagctgcatcatcagcttcttcttcttcgaggactccagctgctaatgcatcaaagaaaggtgctcaatctgattacgagaagaaactggtggaattttgcaaggatcagatagaaacagacgattcaccggtctacggtgttggattcaggaaagttaaccagatggtctcagactccagcctccataaaatcctgaaaagtattcaacactggacgaaaccagattcaaatctttga

SEQ ID NO: 98271 - protein, 529 aa, Arabidopsis thaliana
  peptide (1)..(529): Ceres Seq. ID no. 13593007
MWCLSCFKPSTKHDPSEDRFEEETNIVTGISLYEDVILRQRRSEADQIEWAIQDSFNPQETSRCRQREEDDQIARGLQYVEETELDKSVVDEEDQQLSKIVEESLKEKGKSKQFEDDQVENDEQQALMVQESLYMVELSAQLEEDKNISTIPPLNEDAQLQKVIWESAKGKGQIEHFKDPVEEDGNLPRVDLNVNHPHSICDGCKSAIEYGRSVHALGVNWHPECFCCRYCDKPIAMHEYKEHPFWKEKYCPFHEVDGTPKCCSCERLEPWGTKYVMLADNRWLCVKCMECAVMDTYECQPLHFEIREFFGSLNMKVEKEFPLLLVEKEALKKAEAQEKIDNQHGVVTRGICLSEGQIVNSVFKKPTMGPNGELVSLGTEPQKVVGGCEVTAILILYGLPRLLTGYILAHEMMHAWLRLNGYRNLKLELEEGICQVLGHMWLESQTYSSSAAASSASSSSRTPAANASKKGAQSDYEKKLVEFCKDQIETDDSPVYGVGFRKVNQMVSDSSLHKILKSIQHWTKPDSNL

SEQ ID NO: 98272 - protein, 402 aa, Arabidopsis thaliana
  peptide (1)..(402): Ceres Seq. ID no. 13593008
MVQESLYMVELSAQLEEDKNISTIPPLNEDAQLQKVIWESAKGKGQIEHFKDPVEEDGNLPRVDLNVNHPHSICDGCKSAIEYGRSVHALGVNWHPECFCCRYCDKPIAMHEYKEHPFWKEKYCPFHEVDGTPKCCSCERLEPWGTKYVMLADNRWLCVKCMECAVMDTYECQPLHFEIREFFGSLNMKVEKEFPLLLVEKEALKKAEAQEKIDNQHGVVTRGICLSEGQIVNSVFKKPTMGPNGELVSLGTEPQKVVGGCEVTAILILYGLPRLLTGYILAHEMMHAWLRLNGYRNLKLELEEGICQVLGHMWLESQTYSSSAAASSASSSSRTPAANASKKGAQSDYEKKLVEFCKDQIETDDSPVYGVGFRKVNQMVSDSSLHKILKSIQHWTKPDSNL

SEQ ID NO: 98273 - protein, 395 aa, Arabidopsis thaliana
  peptide (1)..(395): Ceres Seq. ID no. 13593009
MVELSAQLEEDKNISTIPPLNEDAQLQKVIWESAKGKGQIEHFKDPVEEDGNLPRVDLNVNHPHSICDGCKSAIEYGRSVHALGVNWHPECFCCRYCDKPIAMHEYKEHPFWKEKYCPFHEVDGTPKCCSCERLEPWGTKYVMLADNRWLCVKCMECAVMDTYECQPLHFEIREFFGSLNMKVEKEFPLLLVEKEALKKAEAQEKIDNQHGVVTRGICLSEGQIVNSVFKKPTMGPNGELVSLGTEPQKVVGGCEVTAILILYGLPRLLTGYILAHEMMHAWLRLNGYRNLKLELEEGICQVLGHMWLESQTYSSSAAASSASSSSRTPAANASKKGAQSDYEKKLVEFCKDQIETDDSPVYGVGFRKVNQMVSDSSLHKILKSIQHWTKPDSNL

SEQ ID NO: 98274 - DNA, 1631 bp, Arabidopsis thaliana
  misc_feature (1)..(1631): Ceres Seq. ID no. 13593017
  misc_feature (1)..(1631): Ortholog of  Ceres SEQ ID NO 13593831 as cited in SEQ ID NO 53828
acacacgagaaagaaaaagctcacaactttaacctttctggagagagaagaacaaaagagggagagggagagaaatggaaggcaaagaagaagatgtacgagtgggagctaacaagttcccggagaggcaacccatcggtacatcggctcagtccaccgacaaggactacaaagagccacctcctgcgccactgttcgagcccggcgagctcagctcatggtctttctacagagccggaatagctgagtttatcgctactttcttgtttctctacatcactgttttgactgtaatgggagttaagagagcaccaaacatgtgtgcttctgttggaatccaaggtatcgcttgggcttttggtggcatgatctttgctcttgtctactgtactgctggaatttcaggtggacacatcaaccctgctgtaacattcggtctgttcttggctcggaagttatctctgaccagagcagtgttctacatgattatgcaatgtcttggagccatctgtggtgccggagtcgtcaaaggtttccagccaacgccgtaccagactctcggtggtggtgctaacaccgttgctcatggctacaccaaaggttctggccttggtgctgaaatcatcggaacattcgttctcgtctacactgtcttctccgccaccgacgccaagagaagcgcccgtgactcacacgtcccgattttggcgccgctcccaatcggatttgcagtgttcttggtacacttggcaacaataccgatcaccgggaccggaatcaacccagctagaagtcttggagccgcaattatctacaacaaggaccactcttgggatgaccattggattttctgggttggaccattcattggagcagctctagcagcactatatcaccagattgtcatcagagcgattcctttcaagagcaagagttagagacacacagaaagattccacggtccagaatttgttctttagtagtttctttgcttatctatctaatgtagcttgtgttttgcaatgtaatgagcctttcaagaatatgtatttgggatttctaatcagcttttgtctatgtaaaaactatgtgtttcttttttcttcctatactcgtctcagatgctttatggcaaagggtctctgaagtctaaggtgattagtgctccggttattgatgttttgaatagtttgttcgacgaatataaaataaacatagtcaaccctcattctgtatcaacatcaagttctcgggttggttttgagagacatgattatgaagatgatcatgacttcgtgaatgtgggggttgaaggattggcctctgtttatgacaagatggtgaatgaagagcttgactattgtgtacttgcaagaaagtgttgaaaacacaagggccaatacattggaaacagaatatgatgtgtttcatactagaagctcagtagtcttaagcttccggttttatttgtactagctagagatattctagctatgcaagtttcttctgtagcttctgattcttgttttagcaccagtggtcggatcttagagccacagaaaagttgcttaacacattatatgattgaggtcttgttgtgtactgaacaatagatgatttaaataattttt

SEQ ID NO: 98275 - protein, 287 aa, Arabidopsis thaliana; identical to SEQ ID NO: 29005
  peptide (1)..(287): Ceres Seq. ID no. 13593018

SEQ ID NO: 98276 - protein, 214 aa, Arabidopsis thaliana; identical to SEQ ID NO: 29006
  peptide (1)..(214): Ceres Seq. ID no. 13593019

SEQ ID NO: 98277 - protein, 206 aa, Arabidopsis thaliana; identical to SEQ ID NO: 29007
  peptide (1)..(206): Ceres Seq. ID no. 13593020

SEQ ID NO: 98278 - DNA, 1468 bp, Arabidopsis thaliana
  misc_feature (1)..(1468): Ceres Seq. ID no. 13593033
  misc_feature (1)..(1468): Ortholog of  Ceres SEQ ID NO 14303596 as cited in SEQ ID NO 65356
aaacttttgtctctttttaactctcttaactttcgtttcttctcctaccttcttttaccaacctttcctttctcttacacacatatatatatacatatatagagagagagaagaggacaaagagttgaaagatgaagactctcatgtcttcatagaaacaagtgatatgtgcgctaagaaagaagaagaagaagaagaagaagaagacagttctgaagccatgaacaacatacaaaattaccaaaatgacctcttctttcaccaactcatctctcatcatcaccatcatcatcatgatccttctcaatctgaaactttgggagcatccggtaacgttggatctggtttcactatcttctctcaagattccgtctctccaatatggtctctacctccacctacctcgatccaaccaccatttgatcagtttcctcctccttcttcttctccagcatctttctacggaagtttcttcaacagaagtcgagctcatcatcagggattacagtttgggtacgagggttttggtggagccacgtcagcagcacatcatcatcatgaacaacttcggatcttgtcggaagctttaggtccggtagtacaagccgggtccggtccttttgggttacaagctgagttagggaagatgacagcacaagagatcatggacgctaaagctttggctgcttcaaagagtcatagtgaagctgagagaagaagaagagagagaatcaataatcatctcgctaagctccgtagcatattacccaacaccaccaaaacggataaagcgtcgttactagctgaagtgatccaacatgtgaaagagttgaagagagagacttcagtgatctcagagacaaatcttgtcccaacggaaagcgatgagttaacggtagctttcacggaggaggaagaaaccggagatggcagatttgtaattaaagcgtcgctttgctgtgaagacaggtcggatctcttgcctgacatgattaaaacattgaaagctatgcgtctcaaaacgctcaaggcggagataaccaccgttgggggacgagtcaagaacgttttgtttgttaccggagaagagagctccggtgaggaagtggaggaagagtactgtatagggacgattgaggaagctttgaaagcggtgatggagaagagcaatgtagaggaatcatcttcttctggaaatgctaagagacagagaatgagtagtcacaacactatcactatcgtcgaacaacaacaacaatataatcagaggtaatcaattttttacttaaatcgctttttttttcttactttcggtgtatctactacgtgtgttgtttgctggttatggaaatgaatgttgtacgtcacgttatactatagatatatgtgtgtttgtgtgtatgtataacggaagtatttgtatccgttgtggtcttggacttttggtttggttctaagatacttattt

SEQ ID NO: 98279 - protein, 423 aa, Arabidopsis thaliana
  peptide (1)..(423): Ceres Seq. ID no. 13593034
NFCLFLTLLTFVSSPTFFYQPFLSLTHIYIYIYREREEDKELKDEDSHVFIETSDMCAKKEEEEEEEEDSSEAMNNIQNYQNDLFFHQLISHHHHHHHDPSQSETLGASGNVGSGFTIFSQDSVSPIWSLPPPTSIQPPFDQFPPPSSSPASFYGSFFNRSRAHHQGLQFGYEGFGGATSAAHHHHEQLRILSEALGPVVQAGSGPFGLQAELGKMTAQEIMDAKALAASKSHSEAERRRRERINNHLAKLRSILPNTTKTDKASLLAEVIQHVKELKRETSVISETNLVPTESDELTVAFTEEEETGDGRFVIKASLCCEDRSDLLPDMIKTLKAMRLKTLKAEITTVGGRVKNVLFVTGEESSGEEVEEEYCIGTIEEALKAVMEKSNVEESSSSGNAKRQRMSSHNTITIVEQQQQYNQR

SEQ ID NO: 98280 - protein, 368 aa, Arabidopsis thaliana
  peptide (1)..(368): Ceres Seq. ID no. 13593035
MCAKKEEEEEEEEDSSEAMNNIQNYQNDLFFHQLISHHHHHHHDPSQSETLGASGNVGSGFTIFSQDSVSPIWSLPPPTSIQPPFDQFPPPSSSPASFYGSFFNRSRAHHQGLQFGYEGFGGATSAAHHHHEQLRILSEALGPVVQAGSGPFGLQAELGKMTAQEIMDAKALAASKSHSEAERRRRERINNHLAKLRSILPNTTKTDKASLLAEVIQHVKELKRETSVISETNLVPTESDELTVAFTEEEETGDGRFVIKASLCCEDRSDLLPDMIKTLKAMRLKTLKAEITTVGGRVKNVLFVTGEESSGEEVEEEYCIGTIEEALKAVMEKSNVEESSSSGNAKRQRMSSHNTITIVEQQQQYNQR

SEQ ID NO: 98281 - protein, 350 aa, Arabidopsis thaliana
  peptide (1)..(350): Ceres Seq. ID no. 13593036
MNNIQNYQNDLFFHQLISHHHHHHHDPSQSETLGASGNVGSGFTIFSQDSVSPIWSLPPPTSIQPPFDQFPPPSSSPASFYGSFFNRSRAHHQGLQFGYEGFGGATSAAHHHHEQLRILSEALGPVVQAGSGPFGLQAELGKMTAQEIMDAKALAASKSHSEAERRRRERINNHLAKLRSILPNTTKTDKASLLAEVIQHVKELKRETSVISETNLVPTESDELTVAFTEEEETGDGRFVIKASLCCEDRSDLLPDMIKTLKAMRLKTLKAEITTVGGRVKNVLFVTGEESSGEEVEEEYCIGTIEEALKAVMEKSNVEESSSSGNAKRQRMSSHNTITIVEQQQQYNQR

SEQ ID NO: 98282 - DNA, 1272 bp, Arabidopsis thaliana
  misc_feature (1)..(1272): Ceres Seq. ID no. 13593041
  misc_feature (1)..(1272): Ortholog of  Ceres SEQ ID NO 15171268 as cited in SEQ ID NO 51297
  misc_feature (1)..(1272): Ortholog of  Ceres SEQ ID NO 15170521 as cited in SEQ ID NO 55668
  misc_feature (1)..(1272): Ortholog of  Ceres SEQ ID NO 13598249 as cited in SEQ ID NO 62509
  misc_feature (1)..(1272): Ortholog of  Ceres SEQ ID NO 13598595 as cited in SEQ ID NO 64671
  misc_feature (1)..(1272): Ortholog of  Ceres SEQ ID NO 13654241 as cited in SEQ ID NO 68348
gaagaagcaaaaccctagagctcaaggtaatcgccgtcgatttctcaatctctcaccggcgattacatgccgatgaaagttgtacaatagctgctgtaagagagagatttatcaggtatttttagaatcatgtatagagacagaggaacggtgaattcgagacctgaagttgtggatcgtaaacggatcaacgacgctcttgaacgtccttctccttcaacctctcgtcaagttaacggcaaaggcaaaggaaccgttacggcggcgacgacgacggcgaacttgattgggaagcagcagtcgaataacatcaaccatagagattctcgttctgcttctctctcgaagaacaatacggtttctgatgatgaatcagacacagatagtgaagaatcagatgtgagtggttctgatggagaggacacttcatggatatcttggttttgtaatctaagaggaaacgagttcttttgtgaagttgatgatgattacattcaagatgacttcaacttgtgtggactcagcagtctagttccctactacgagtacgctcttgatttgattttggatgttgaatcttctcaaggagagatgtttacagaggaacagaatgaattgatcgagtcagcagctgagatgttgtatggactgattcatgctcgttacatattgactagcaaaggattggcagcaatgttagacaaatacaaaaactatgactttggaagatgtccaagagtttattgctgtggccaaccttgtcttccggttggtcaatcagacttaccgcgatctagcactgtgaagatatattgcccgaaatgcgaagacatttattacccacgatcaaagtatcaaggcaacattgatggagcttactttgggacaacgtttccacatctgttcctgatgacttatgggcatctcaagccagcgaaggcaacacaaaactatgttcaaagagtgtttgggttcaaattacacaaaccgtgaaggaagtttgacgacaaaacccaaggatcaagatcatggcgttggaatggaactgagaaaagaagagacgtgtgtgaacagaaacggaaaataaaacgcactgtaatcacacgaatggtgaagagagcattcatgtctctatttgtcttcaggtacatacacattagaagaaagcaaaagcatggttagaaagaaaaaaaacacgaaaatcttttaatgagtttgttaaacttgaacatgtatttttctaccttctgtaaacttttttattttgtttct

SEQ ID NO: 98283 - protein, 287 aa, Arabidopsis thaliana; identical to SEQ ID NO: 76582
  peptide (1)..(287): Ceres Seq. ID no. 13593042

SEQ ID NO: 98284 - DNA, 1779 bp, Arabidopsis thaliana
  misc_feature (1)..(1779): Ceres Seq. ID no. 13593043
  misc_feature (1)..(1779): Ortholog of  Ceres SEQ ID NO 13646415 as cited in SEQ ID NO 20579
atgtcatcggagattgaggtggtggaagaaatccaatcgaatcccaaggagaatggggaatcgagttctaaagggattgaagaagagagcttgaagaacgatgtctatactgctgccgcttatggtgatttggagaagcttcatagattggttgagtgtgagggttcctctgtttccgagcctgatgctcttggctactatgctcttcagtggtctgccttgaacaaccgcgtcgccgttgcccagtaccttatcgagcatggtggagatgtaaacgcgacggatcatactggacagactgcattgcattggagtgctgttcgtggtgcgatacaagttgcagaactgttattacaagagggtgcaagagtagatgcaacggatatgtatggctatcaggcaacacatgttgccgcacagtatggccagactgcttttctttgtcacgttgtctcaaagtggaatgctgatcctgacgtgcctgataatgatggaagaagccccttgcattgggctgcatataaaggttttgcagattccattcgcctacttttatttctagatgcatatagaggacgacaagacaaagaaggttgcactcctctgcattgggctgccatccgaggtaatttggaggcttgcactgtcttggtgcaggctggaaagaaagaggatttgatgattactgacaagactgggctaacccctgcgcaacttgctgctgaaaagaatcacagacaatcccctcggaagattgtcaaagttgggactcgctccagttctttggatcatgatcctgctgcttctgctccatccaatctgccaaagttaacgactgggattggtgcgcttgcatggctgggattcattcttgcaactgcaggattatttttgttctaccgctgtagcaggaaggatccaggttacatcagaatgaatatccatgatccgcaaaccatgaaagatgatgaaccactcttaaaaatagagctaaacaatcctgctttgcttgctgggaattggacacagctctgtgcaacatgcaagattatcagacctcttcgagctaagcactgttccacctgtgatcgttgtgtagagcaatttgatcaccattgtccttgggtatcaaattgtgttggaaaaaaaaacaagtgggaattttttctttttcttctacttgaagttctagcgatgctgataactggtggcgtcactcttgcaagagtcttgagtgacccttcagctccatcttcttttggagcatggatgagccatgtcgctagtaatcatgtgggtgctttatcctttctgctagtggaattctgcctcttcttttctgtcgccgtcttaacagtcatacaagcgtcacaaatatcaaggaacataaccacaaatgaaatggccaacgccctgcggtacagctacctaagaggtccaggtggtcggtttaggaatccttatgatctcgggtgcagaagaaactgctcggacttcttagtaaaaggttataacgaagatattgagtgtcatgaagaagacgcaacacagagaccagagggtattagcatgatgcagatgcagcggaatccaaatcttcaaaatggcaatggccatgttgctatcgatgttaacccgacacataattcacagtcagcacatgttcattctgccaactgcagccatagccataatagtaagtcaaagagtgacaatgttcctttgggtttgggacttggtcttagccgcaacccaacccgacctgttgtatctccataa

SEQ ID NO: 98285 - protein, 592 aa, Arabidopsis thaliana
  peptide (1)..(592): Ceres Seq. ID no. 13593044
MSSEIEVVEEIQSNPKENGESSSKGIEEESLKNDVYTAAAYGDLEKLHRLVECEGSSVSEPDALGYYALQWSALNNRVAVAQYLIEHGGDVNATDHTGQTALHWSAVRGAIQVAELLLQEGARVDATDMYGYQATHVAAQYGQTAFLCHVVSKWNADPDVPDNDGRSPLHWAAYKGFADSIRLLLFLDAYRGRQDKEGCTPLHWAAIRGNLEACTVLVQAGKKEDLMITDKTGLTPAQLAAEKNHRQSPRKIVKVGTRSSSLDHDPAASAPSNLPKLTTGIGALAWLGFILATAGLFLFYRCSRKDPGYIRMNIHDPQTMKDDEPLLKIELNNPALLAGNWTQLCATCKIIRPLRAKHCSTCDRCVEQFDHHCPWVSNCVGKKNKWEFFLFLLLEVLAMLITGGVTLARVLSDPSAPSSFGAWMSHVASNHVGALSFLLVEFCLFFSVAVLTVIQASQISRNITTNEMANALRYSYLRGPGGRFRNPYDLGCRRNCSDFLVKGYNEDIECHEEDATQRPEGISMMQMQRNPNLQNGNGHVAIDVNPTHNSQSAHVHSANCSHSHNSKSKSDNVPLGLGLGLSRNPTRPVVSP

SEQ ID NO: 98286 - protein, 464 aa, Arabidopsis thaliana
  peptide (1)..(464): Ceres Seq. ID no. 13593045
MYGYQATHVAAQYGQTAFLCHVVSKWNADPDVPDNDGRSPLHWAAYKGFADSIRLLLFLDAYRGRQDKEGCTPLHWAAIRGNLEACTVLVQAGKKEDLMITDKTGLTPAQLAAEKNHRQSPRKIVKVGTRSSSLDHDPAASAPSNLPKLTTGIGALAWLGFILATAGLFLFYRCSRKDPGYIRMNIHDPQTMKDDEPLLKIELNNPALLAGNWTQLCATCKIIRPLRAKHCSTCDRCVEQFDHHCPWVSNCVGKKNKWEFFLFLLLEVLAMLITGGVTLARVLSDPSAPSSFGAWMSHVASNHVGALSFLLVEFCLFFSVAVLTVIQASQISRNITTNEMANALRYSYLRGPGGRFRNPYDLGCRRNCSDFLVKGYNEDIECHEEDATQRPEGISMMQMQRNPNLQNGNGHVAIDVNPTHNSQSAHVHSANCSHSHNSKSKSDNVPLGLGLGLSRNPTRPVVSP

SEQ ID NO: 98287 - protein, 366 aa, Arabidopsis thaliana
  peptide (1)..(366): Ceres Seq. ID no. 13593046
MITDKTGLTPAQLAAEKNHRQSPRKIVKVGTRSSSLDHDPAASAPSNLPKLTTGIGALAWLGFILATAGLFLFYRCSRKDPGYIRMNIHDPQTMKDDEPLLKIELNNPALLAGNWTQLCATCKIIRPLRAKHCSTCDRCVEQFDHHCPWVSNCVGKKNKWEFFLFLLLEVLAMLITGGVTLARVLSDPSAPSSFGAWMSHVASNHVGALSFLLVEFCLFFSVAVLTVIQASQISRNITTNEMANALRYSYLRGPGGRFRNPYDLGCRRNCSDFLVKGYNEDIECHEEDATQRPEGISMMQMQRNPNLQNGNGHVAIDVNPTHNSQSAHVHSANCSHSHNSKSKSDNVPLGLGLGLSRNPTRPVVSP

SEQ ID NO: 98288 - DNA, 1627 bp, Arabidopsis thaliana
  misc_feature (1)..(1627): Ceres Seq. ID no. 13593066
  misc_feature (1)..(1627): Ortholog of  Ceres SEQ ID NO 12609146 as cited in SEQ ID NO 52118
  misc_feature (1)..(1627): Ortholog of  Ceres SEQ ID NO 13638136 as cited in SEQ ID NO 58644
  misc_feature (1)..(1627): Ortholog of  Ceres SEQ ID NO 13596868 as cited in SEQ ID NO 62806
  misc_feature (1)..(1627): Ortholog of  Ceres SEQ ID NO 14302836 as cited in SEQ ID NO 65013
aaagcttccatggctaatcttgtttaagcttctcttcttcttctctctcctgtgtctcgttcactagttttttttcgggggagagtgatggagtgtgtttgttgaatagttttgacgatcacatggctgagatttgttacgagaacgagactatgatgattgaaacgacggcgacggtggtgaagaaggcaacgacgacaacgaggagacgagaacggagctcgtctcaagcagcgagaagaaggagaatggagatccggaggtttaagtttgtttccggcgaacaagaacctgtcttcgtcgacggtgacttacagaggcggaggagaagagaatccaccgtcgcagcctccacctccaccgtgttttacgaaacggcgaaggaagttgtcgtcctatgcgagtctcttagttcaacggttgtggcattgcctgatcctgaagcttatcctaaatacggcgtcgcttcagtctgtggaagaagacgtgaaatggaagacgccgtcgctgtgcatccgtttttttcccgtcatcagacggaatattcatccaccggatttcactattgcggcgtttacgatggccatggctgttcccatgtagcgatgaaatgtagagaaagactacacgagctagtccgtgaagagtttgaagctgatgctgactgggaaaagtcaatggcgcgtagcttcacgcgcatggacatggaggttgttgcgttgaacgccgatggtgcggcaaaatgccggtgcgagcttcagaggccggactgcgacgcggtgggatccactgcggttgtgtctgtccttacgccggagaaaatcatcgtggcgaattgcggtgactcacgtgccgttctctgtcgtaacggcaaagccattgctttatcctccgatcataagccagaccgtccggacgagctagaccggattcaagcagcgggtggtcgtgttatctactgggatggcccacgtgtccttggagtacttgcaatgtcacgagccattggagataattacttgaagccgtatgtaatcagcagaccggaggtaaccgtgacggaccgggccaacggagacgattttcttattctcgcaagtgacggtctttgggacgttgtttcaaacgaaactgcatgtagcgtcgttcgaatgtgtttgagaggaaaagtcaatggtcaagtatcatcatcaccggaaagggaaatgacaggtgtcggcgccgggaatgtggtggttggaggaggagatttgccagataaagcgtgtgaggaggcgtcgctgttgctgacgaggcttgcgttggctagacaaagttcggacaacgtaagtgttgtggtggttgatctacgacgagacacgtagttgtatttgtctctctcgtaatgtttgttgttttttgtcctgagtcatcgacttttgggctttttcttttaaccttttttgctcttcggtgtaagacaacgaagggtttttaatttagcttgactatgggttatgtcagtcactgtgttgaatcgcggtttagatctacaaagattttcaccagtagtgaaaatggtaaaaagccgtgaaatgtgaaagacttgagttcaatttaattttaaatttaatagaatcagttgatc

SEQ ID NO: 98289 - protein, 413 aa, Arabidopsis thaliana
  peptide (1)..(413): Ceres Seq. ID no. 13593067
MAEICYENETMMIETTATVVKKATTTTRRRERSSSQAARRRRMEIRRFKFVSGEQEPVFVDGDLQRRRRRESTVAASTSTVFYETAKEVVVLCESLSSTVVALPDPEAYPKYGVASVCGRRREMEDAVAVHPFFSRHQTEYSSTGFHYCGVYDGHGCSHVAMKCRERLHELVREEFEADADWEKSMARSFTRMDMEVVALNADGAAKCRCELQRPDCDAVGSTAVVSVLTPEKIIVANCGDSRAVLCRNGKAIALSSDHKPDRPDELDRIQAAGGRVIYWDGPRVLGVLAMSRAIGDNYLKPYVISRPEVTVTDRANGDDFLILASDGLWDVVSNETACSVVRMCLRGKVNGQVSSSPEREMTGVGAGNVVVGGGDLPDKACEEASLLLTRLALARQSSDNVSVVVVDLRRDT

SEQ ID NO: 98290 - protein, 403 aa, Arabidopsis thaliana
  peptide (1)..(403): Ceres Seq. ID no. 13593068
MMIETTATVVKKATTTTRRRERSSSQAARRRRMEIRRFKFVSGEQEPVFVDGDLQRRRRRESTVAASTSTVFYETAKEVVVLCESLSSTVVALPDPEAYPKYGVASVCGRRREMEDAVAVHPFFSRHQTEYSSTGFHYCGVYDGHGCSHVAMKCRERLHELVREEFEADADWEKSMARSFTRMDMEVVALNADGAAKCRCELQRPDCDAVGSTAVVSVLTPEKIIVANCGDSRAVLCRNGKAIALSSDHKPDRPDELDRIQAAGGRVIYWDGPRVLGVLAMSRAIGDNYLKPYVISRPEVTVTDRANGDDFLILASDGLWDVVSNETACSVVRMCLRGKVNGQVSSSPEREMTGVGAGNVVVGGGDLPDKACEEASLLLTRLALARQSSDNVSVVVVDLRRDT

SEQ ID NO: 98291 - protein, 402 aa, Arabidopsis thaliana
  peptide (1)..(402): Ceres Seq. ID no. 13593069
MIETTATVVKKATTTTRRRERSSSQAARRRRMEIRRFKFVSGEQEPVFVDGDLQRRRRRESTVAASTSTVFYETAKEVVVLCESLSSTVVALPDPEAYPKYGVASVCGRRREMEDAVAVHPFFSRHQTEYSSTGFHYCGVYDGHGCSHVAMKCRERLHELVREEFEADADWEKSMARSFTRMDMEVVALNADGAAKCRCELQRPDCDAVGSTAVVSVLTPEKIIVANCGDSRAVLCRNGKAIALSSDHKPDRPDELDRIQAAGGRVIYWDGPRVLGVLAMSRAIGDNYLKPYVISRPEVTVTDRANGDDFLILASDGLWDVVSNETACSVVRMCLRGKVNGQVSSSPEREMTGVGAGNVVVGGGDLPDKACEEASLLLTRLALARQSSDNVSVVVVDLRRDT

SEQ ID NO: 98292 - DNA, 1737 bp, Arabidopsis thaliana
  misc_feature (1)..(1737): Ceres Seq. ID no. 13593086
  misc_feature (1)..(1737): Ortholog of  Ceres SEQ ID NO 13655463 as cited in SEQ ID NO 69035
  misc_feature (1)..(1737): Ortholog of  Ceres SEQ ID NO 15180063 as cited in SEQ ID NO 0
atgagagatagacagagagggaaaacaactacacaagtcaaaatttctgttctaaaaaagtaaaagaagtatggtggaggaaacgagctctggtggtggctcatcggcttctccgatcaaaaccatcgtcgttttggttcaggagaacaggtcgttcgatcacatgttaggttggttcaaggagcttaacccagaaatcgatggagtatccgaatccgaaccaagatccaacccactttctacatctgacccgaactctgctcaaatcttcttcggcaaagaatctcagaacattgatcctgatcccggtcactcttttcaggcgatctacgaacaagtgtttggaaaaccattcagcgacgagagtccgtacccggatccgaagatgaacgggttcgtacaaaacgcagaggcgataacaaaagggatgtcggagaaagtagtgatgcaaggttttccgccggagaaacttccggtattcaaggaactagttcaagaattcgctgtctgcgatcggtggttctcgtcgttgccctcgtccacgcagcctaaccgactctacgtccacgcggcgacatcaaacggtgcgtttagtaatgacactaacacgcttgttcgtggctttcctcagaggacagtgttcgaatcacttgaagagagcggtttcacatttggaatttattaccaatcctttcctaattgcctcttttacaggaacatgaggaaactgaagtacgtggacaacttccatcaataccacttaagcttcaagaggcattgcaaagaagggaagcttccaaactatgtggttatagaaccaaggtacttcaagattttgtcggctccagctaatgatgaccatcccaaaaacgacgtcgttgaaggccaaaatctagtcaaagaaatctacgaagccttaagagctagtcctcagtggaacgagattctcttcgttgttgtttatgatgaacatggtggttattatgaccacgtccctactccagtcattggtgtcccaaatcctgatggtctagttggacctgagccctataactttaagtttgaccggcttggtgttagggttcctgctttgctaatctcgccttggatcgaacctggaacggtgttacacgagccaaatggaccagagccaacgtcgcagttcgaacattcatcaattccggcaacactgaagaaaatattcaacctcaagagctttcttacaaagcgtgacgaatgggctggaacactcgatgctgtcatcaaccggaccagcccaaggacggactgccccgtcacattaccggaacttcctagggcaagagacatagacattggaacacaagaagaagacgaagatctcactgattttcaaatcgaactgattcaagcagcggctgtactaaaaggagatcatatcaaagacatttacccgtttaagctcgcagataaaatgaaggttttggatgcggctaggtacgtagaagaagctttcactagattccatggtgagtccaagaaggctaaagaagaaggccgtgatgagcatgagatcgttgatctttctaaaggatctactcgtcactcgactcctaagtcttttgttcagaagttattctcgtgtttgatttgtgataattgatcttgagttgaaacagatttgatctctgtgagatttggtgtatttctcggattttatgtgaagagcgtttgaaatttgatatttgtttgttttcc

SEQ ID NO: 98293 - protein, 523 aa, Arabidopsis thaliana; identical to SEQ ID NO: 45629
  peptide (1)..(523): Ceres Seq. ID no. 13593087

SEQ ID NO: 98294 - protein, 492 aa, Arabidopsis thaliana; identical to SEQ ID NO: 45630
  peptide (1)..(492): Ceres Seq. ID no. 13593088

SEQ ID NO: 98295 - protein, 418 aa, Arabidopsis thaliana; identical to SEQ ID NO: 45631
  peptide (1)..(418): Ceres Seq. ID no. 13593089

SEQ ID NO: 98296 - DNA, 972 bp, Arabidopsis thaliana
  misc_feature (1)..(972): Ceres Seq. ID no. 13593100
  misc_feature (1)..(972): Ortholog of  Ceres SEQ ID NO 13654431 as cited in SEQ ID NO 67761
atgggagacgaccagctagatttcgagctcccagaagaggttttgtcggtgattccgatggacccttttgagcagctggatctcgcgaggaagattacatcaatggcgatagcttcaagggtgtcgaatctggactctgaggtggttgaattgagacagaagcttctgggtaaggaaagtgttgtccgtgagcttgaggagaaagcgtctcgcctggagagagactgccgcgaggctgattcgagattgaaggtcgttctcgaagataatatgaacctgacaaaggagaaggattcactggcaatgactgtaacgaaactcacccgtgatttggctaagacattcaagcggcagttaatcaaatccctgagcgatgagagtggtccgcaaacagaacctgttgatattaggacatgcgaccagccaggatcatatccaggcaaagatggaaggatcaatgcacactcaattaaacaagcttacagtggatctacagacacgaacaatccagttgttgaagcttcaaaatacactggaaacaaattttcaatgacatcatacatatctccacgtcttaccccaaccgcaacaccaaagatcatctccacaagtgtgtctcctcgaggctattctgcagcaggttctcctaaaagaacatcaggtgcagtttctcccacaaaggcaacactctggtacccgtcaagtcagcaatcatcggctgcgaattctcctcctcgcaaccgcacactcccagctcgtacaccgcggatggatggtaaagaattcttccggcaagccaggagccgattatcctatgaacaattcagttccttcttagctaacatcaaagagctcaacgcccagaagcaaacccgagaggaaactctgaggaaagcagatgagatatttggggaagagaacaaagatctttatttatctttccaaggtctccttaacagaaacatgcgttaa

SEQ ID NO: 98297 - protein, 323 aa, Arabidopsis thaliana
  peptide (1)..(323): Ceres Seq. ID no. 13593101
MGDDQLDFELPEEVLSVIPMDPFEQLDLARKITSMAIASRVSNLDSEVVELRQKLLGKESVVRELEEKASRLERDCREADSRLKVVLEDNMNLTKEKDSLAMTVTKLTRDLAKTFKRQLIKSLSDESGPQTEPVDIRTCDQPGSYPGKDGRINAHSIKQAYSGSTDTNNPVVEASKYTGNKFSMTSYISPRLTPTATPKIISTSVSPRGYSAAGSPKRTSGAVSPTKATLWYPSSQQSSAANSPPRNRTLPARTPRMDGKEFFRQARSRLSYEQFSSFLANIKELNAQKQTREETLRKADEIFGEENKDLYLSFQGLLNRNMR

SEQ ID NO: 98298 - protein, 304 aa, Arabidopsis thaliana
  peptide (1)..(304): Ceres Seq. ID no. 13593102
MDPFEQLDLARKITSMAIASRVSNLDSEVVELRQKLLGKESVVRELEEKASRLERDCREADSRLKVVLEDNMNLTKEKDSLAMTVTKLTRDLAKTFKRQLIKSLSDESGPQTEPVDIRTCDQPGSYPGKDGRINAHSIKQAYSGSTDTNNPVVEASKYTGNKFSMTSYISPRLTPTATPKIISTSVSPRGYSAAGSPKRTSGAVSPTKATLWYPSSQQSSAANSPPRNRTLPARTPRMDGKEFFRQARSRLSYEQFSSFLANIKELNAQKQTREETLRKADEIFGEENKDLYLSFQGLLNRNMR

SEQ ID NO: 98299 - protein, 289 aa, Arabidopsis thaliana
  peptide (1)..(289): Ceres Seq. ID no. 13593103
MAIASRVSNLDSEVVELRQKLLGKESVVRELEEKASRLERDCREADSRLKVVLEDNMNLTKEKDSLAMTVTKLTRDLAKTFKRQLIKSLSDESGPQTEPVDIRTCDQPGSYPGKDGRINAHSIKQAYSGSTDTNNPVVEASKYTGNKFSMTSYISPRLTPTATPKIISTSVSPRGYSAAGSPKRTSGAVSPTKATLWYPSSQQSSAANSPPRNRTLPARTPRMDGKEFFRQARSRLSYEQFSSFLANIKELNAQKQTREETLRKADEIFGEENKDLYLSFQGLLNRNMR

SEQ ID NO: 98300 - DNA, 1450 bp, Arabidopsis thaliana
  misc_feature (1)..(1450): Ceres Seq. ID no. 13593112
  misc_feature (1)..(1450): Ortholog of  Ceres SEQ ID NO 12608060 as cited in SEQ ID NO 59263
gcagccaagaaatgcgggacgatggtgatgctcggtgtgctccagcttccctgccgcctccatcactctctcttttactcctcttcccaaattgcttcttctcgccctcaaggtgttgctaaagtggttctgaaaaaaggcaagacacagctcttcaaagacggaagtccaatggtgtacagtggagctgtcgacaggatcatcggaaaaccacctcctcagacaggagatgttgtcattgtagctgatggcactgagaatcccattggttggggtttgtataactctgtttctatgttctgtgttcgccttatgcagcttcaacacgaatccaccagagatccttcttgtgcattgaacattgagaagcttctccaaacaagaatcgctgaagcagttcagttgcgaaagagtttggcacttccctcggctaatactaatgcttatcgtcttgtcaacagtgaaggagatagattgtctggattgattgtggatgtgtttggagatatagctgtggtagcatcctctgctgcttggcttgaaaagtacaggattgaagtggagagttgcttaagatcaattgacggaattaatcatataaactggagaccttctcttgatgttcttaaagaagatggttttgacatctcaagtctgaaacagacacaatcatctactctcccacagagatcaatggtacggtgtgtggtgcccttaatcaggttgtggaaaatgggatctcatacgcaatttcgctagagggacagaagacagggttctacacggatcagcgcgaaaaccgtcacttcatatcaaccatctctgctggtaaaagagttcttgatctttgctgctatagtggtggatttgcactgaatgcagcgagaggaggtgctaccagtgttatcggaattgattcatctttacctgctttggagctcgccagagagaatgtaatcctcaacaatatggatccagagaaggttgttttctttaaacaagattcaacagaattcatgaagggtgcactgtcaagagaagagacatgggacatcgtgatcctagaccctcctaagctagctccgcggaaaaaggttttgcacaacgcttcaggaatgtacagaaatctcaactcgttggcaatgcgattgacaaggagtggcggtcttatgatgacatgctcatgttcaggggcaatgacacagagcgggaagttcttggggatacttcagagtgctgcagcaatgtcaggaaggaagatcacagtggtgcgggaggcaggagctgcgtctgaccacccactcgacccatcttaccctcaaggccaatatctctccaaccttctgcttcgggtgctgtgagcgcacggaagtttggtttgttagttcaacttttttttgtccgtagtttgtaaccatacatagaagacttataaaaggcagatttgggg

SEQ ID NO: 98301 - protein, 252 aa, Arabidopsis thaliana
  peptide (1)..(252): Ceres Seq. ID no. 13593113
AAKKCGTMVMLGVLQLPCRLHHSLFYSSSQIASSRPQGVAKVVLKKGKTQLFKDGSPMVYSGAVDRIIGKPPPQTGDVVIVADGTENPIGWGLYNSVSMFCVRLMQLQHESTRDPSCALNIEKLLQTRIAEAVQLRKSLALPSANTNAYRLVNSEGDRLSGLIVDVFGDIAVVASSAAWLEKYRIEVESCLRSIDGINHINWRPSLDVLKEDGFDISSLKQTQSSTLPQRSMVRCVVPLIRLWKMGSHTQFR

SEQ ID NO: 98302 - protein, 245 aa, Arabidopsis thaliana
  peptide (1)..(245): Ceres Seq. ID no. 13593114
MVMLGVLQLPCRLHHSLFYSSSQIASSRPQGVAKVVLKKGKTQLFKDGSPMVYSGAVDRIIGKPPPQTGDVVIVADGTENPIGWGLYNSVSMFCVRLMQLQHESTRDPSCALNIEKLLQTRIAEAVQLRKSLALPSANTNAYRLVNSEGDRLSGLIVDVFGDIAVVASSAAWLEKYRIEVESCLRSIDGINHINWRPSLDVLKEDGFDISSLKQTQSSTLPQRSMVRCVVPLIRLWKMGSHTQFR

SEQ ID NO: 98303 - protein, 243 aa, Arabidopsis thaliana
  peptide (1)..(243): Ceres Seq. ID no. 13593115
MLGVLQLPCRLHHSLFYSSSQIASSRPQGVAKVVLKKGKTQLFKDGSPMVYSGAVDRIIGKPPPQTGDVVIVADGTENPIGWGLYNSVSMFCVRLMQLQHESTRDPSCALNIEKLLQTRIAEAVQLRKSLALPSANTNAYRLVNSEGDRLSGLIVDVFGDIAVVASSAAWLEKYRIEVESCLRSIDGINHINWRPSLDVLKEDGFDISSLKQTQSSTLPQRSMVRCVVPLIRLWKMGSHTQFR

SEQ ID NO: 98304 - DNA, 1199 bp, Arabidopsis thaliana
  misc_feature (1)..(1199): Ceres Seq. ID no. 13593116
  misc_feature (1)..(1199): Ortholog of  Ceres SEQ ID NO 14311683 as cited in SEQ ID NO 51263
  misc_feature (1)..(1199): Ortholog of  Ceres SEQ ID NO 15177862 as cited in SEQ ID NO 56033
  misc_feature (1)..(1199): Ortholog of  Ceres SEQ ID NO 13661430 as cited in SEQ ID NO 61258
  misc_feature (1)..(1199): Ortholog of  Ceres SEQ ID NO 13590940 as cited in SEQ ID NO 68653
  misc_feature (1)..(1199): Ortholog of  Ceres SEQ ID NO 14301982 as cited in SEQ ID NO 0
  misc_feature (1)..(1199): Ortholog of  Ceres SEQ ID NO 15179001 as cited in SEQ ID NO 0
  misc_feature (1)..(1199): Ortholog of  Ceres SEQ ID NO 15180040 as cited in SEQ ID NO 0
ttcctcttcttttctcttctccttccacttccacttcttctatctctcacaattcagcaatggcttcttctatagttacctctagcttgaagcctttagccatggccgattcttcctcttctaccattttctcccatccttccatctcctctaccatctcttcctccagaattcgcagctccagtgtttccctccttaccggacgcattaacctgcccctctctttctctcgcgtctctctatctcttaaaaccaaaacccaccttaaaaaatccccctttgtctccttcgttgcccagacttcggattgggctgaagaaggtggagaaggaagcgtcgctgttgaggagaccgagaacagtttagagtcacaagatgtgagcgaaggagatgagagcgaaggagatgcgagcgaaggagatgtgagcgaaggagatgagagcgaaggagatgtgagcgaaggagctgtgagcgaaagagctgagttcccggagccatcggaagaagccaagcttttcgtcggaaatttggcttatgatgttaatagccaagctttggctatgctctttgagcaagccggtactgttgaaatcgccgaggttatatacaatagggaaactgaccagagtcgtgggtttggatttgtgacaatgagttctgtggacgaagctgagacagctgtggagaagttcaaccgttatgatcttaacggacgtctactaactgtaaacaaggcagctccaagaggatcacgtccagaacgtgcgcctcgggtatatgaacctgcattcagagtatatgtagggaatctaccatgggatgtggacaatggccgtctagaacagcttttcagtgagcatggtaaagttgtggaagctagggtggtttacgaccgtgagacaggtcgttcacgtggattcgggtttgtcacaatgtctgacgtggatgaactcaacgaagccatctctgccctcgatggacagaacttggagggtagagcaatcagagtgaatgtagcggaagagcgtcctccaaggcgtggatattaaagctgagatctagctgtgccctctctctctccctatcttgcattttgtttagacgagattcttacactcttcaacgattgtttttggctgaactctgaatgtgaaagttaagctgcttctaaagtaatttgtatcgcttgtttttgatga

SEQ ID NO: 98305 - protein, 348 aa, Arabidopsis thaliana
  peptide (1)..(348): Ceres Seq. ID no. 13593117
PLLFSSPSTSTSSISHNSAMASSIVTSSLKPLAMADSSSSTIFSHPSISSTISSSRIRSSSVSLLTGRINLPLSFSRVSLSLKTKTHLKKSPFVSFVAQTSDWAEEGGEGSVAVEETENSLESQDVSEGDESEGDASEGDVSEGDESEGDVSEGAVSERAEFPEPSEEAKLFVGNLAYDVNSQALAMLFEQAGTVEIAEVIYNRETDQSRGFGFVTMSSVDEAETAVEKFNRYDLNGRLLTVNKAAPRGSRPERAPRVYEPAFRVYVGNLPWDVDNGRLEQLFSEHGKVVEARVVYDRETGRSRGFGFVTMSDVDELNEAISALDGQNLEGRAIRVNVAEERPPRRGY

SEQ ID NO: 98306 - protein, 329 aa, Arabidopsis thaliana
  peptide (1)..(329): Ceres Seq. ID no. 13593118
MASSIVTSSLKPLAMADSSSSTIFSHPSISSTISSSRIRSSSVSLLTGRINLPLSFSRVSLSLKTKTHLKKSPFVSFVAQTSDWAEEGGEGSVAVEETENSLESQDVSEGDESEGDASEGDVSEGDESEGDVSEGAVSERAEFPEPSEEAKLFVGNLAYDVNSQALAMLFEQAGTVEIAEVIYNRETDQSRGFGFVTMSSVDEAETAVEKFNRYDLNGRLLTVNKAAPRGSRPERAPRVYEPAFRVYVGNLPWDVDNGRLEQLFSEHGKVVEARVVYDRETGRSRGFGFVTMSDVDELNEAISALDGQNLEGRAIRVNVAEERPPRRGY

SEQ ID NO: 98307 - protein, 315 aa, Arabidopsis thaliana
  peptide (1)..(315): Ceres Seq. ID no. 13593119
MADSSSSTIFSHPSISSTISSSRIRSSSVSLLTGRINLPLSFSRVSLSLKTKTHLKKSPFVSFVAQTSDWAEEGGEGSVAVEETENSLESQDVSEGDESEGDASEGDVSEGDESEGDVSEGAVSERAEFPEPSEEAKLFVGNLAYDVNSQALAMLFEQAGTVEIAEVIYNRETDQSRGFGFVTMSSVDEAETAVEKFNRYDLNGRLLTVNKAAPRGSRPERAPRVYEPAFRVYVGNLPWDVDNGRLEQLFSEHGKVVEARVVYDRETGRSRGFGFVTMSDVDELNEAISALDGQNLEGRAIRVNVAEERPPRRGY

SEQ ID NO: 98308 - DNA, 3181 bp, Arabidopsis thaliana
  misc_feature (1)..(3181): Ceres Seq. ID no. 13593125
  misc_feature (1)..(3181): Ortholog of  Ceres SEQ ID NO 13593889 as cited in SEQ ID NO 53305
gtcttcatcactttcctcaaatcccatcactctctttctttcgtttggtccctcaaaaactatataaaatcccaatttcccagctctattaaaaaaaccatatacgtacacacatacaaatactctctgattattttttgtatgtgtgtacgaaaacgcatagctctttgttgtctttgatcgagatttttgctgaatctatcttcgcagtgagatcgattttgttatttgatttcgtttactcgtcaatcggaagttcgatcggaaattgaatgcgtggatctgattacgatcaaatgacctccagcttaagggctactgacattaaggaaattggcaatgggagagacgggagatgatgctgggccatcagagcaaggaccttctaatcaaacctggtggccttcagaatttgtggagaaatttggttctgtttatctgggatcgcaagaagagacatctagtactaaagactcacctagaaatcttgggcaagatgggctgccatctagtactgcttcgaatattctttggagtactggttcactttctgagcccatcccaaatggcttctactctgtgatcccggataatagattgaagcagctatttaataacattcctacattggaagatcttcatgctctgggtgacgaaggtcttaaggctgatgtgattctagttgattttcagaaagataaaaagcttttcaggcagaagcagttgattaccaaacttgtcagtggattgaactcaaagccagctactattattaagaaaattgctggactggtagcagatgtttataagcaatcaactctgcagagtccagcaaaaagtacgcagtcatttgaaaactgtggtattcaactgctaggacagatcaagcatggttcttgtcgtcctcgagcaatcttgttcaaagtcttagctgatactgttggcctgcaaagtcgacttgtagtgggtttgccaagtgatggagctgctgagagtgtggactcatatagtcatatttctgtcactgttttgctgaattctgtggaaatgctggttgacctaatgcgatttcctggtcagcttattcctctatcaaccaaagcaatttttatgagtcatatctcagcggcaggggaaagtgattctgcagagaatgactcttgtgattcacctttggagccaaacagtcccatgtttggttatccagagaaatttgaccatgaaaatgcagaaaaagatgaaaacctttcgttgcacaggaaactggatgggtctccaaatacgtctggtccaccatcaaggaatatgctgttacgatctgcctctgcgctagagaggaaattaagtttctcacagagcgagtcaaacatggctaacgagttttggcggcagagccggaggaaggtcattgctgatcagcggactgctagttccagtcccgaacatctttccttccgagcccgtacaaagtccatgctaagtggcgacaagaacttggcacgagatttcaccggggatgttgccacatcaagctgcaaatctgttggaggagcaaaaatggaaactaagagaataaggaggagaagcatcagtataactcctgagattggcgatgatattgtcagggcagtacgagcgatgaatgaagccttgaagcagaatcgcctctcaaaagagcaaggggatgatgattcatctcctaactctccaaatgacagaaccgagagctctcatctccagaaaaatgtctctggttttcatcttgatgcccatgaccaagtttctggtggaaggtcgacactttcaagggaaccactagatccgcagaaggcaatctcactaccttcttctccccagaactaccgaagccaatatgaacagagtggatcgtcacatcgcaatataagccacatctgggataaagtattgggatctcccatgttccagaataagccattattaccttatgaagaatggaacatagacttctctgagctgactgttgggacacgtgtcggaattggatttttcggagaagtattccgtgggatctggaacgggacagacgttgctatcaaagtgttccttgagcaagaccttacagctgagaacatggaggatttctgcaatgagatatcaattcttagccgacttagacatcccaatgttatactgttccttggagcatgcacaaagcctccacgattatcactgatcactgagtacatggaaatgggatctttgtattacttgctccacttgagtggacaaaaaaagaggttaagctggcggaggaagctaaagatgctgcgggacatttgcaggggattgatgtgtatacaccggatggggatagtacaccgtgatataaagagtgcaaactgtcttttgagcaacaaatggacagtcaagatctgtgattttgggctgtcgagaataatgacagggacaacaatgagagacacagtctctgcaggaactccagagtggatggctcctgaacttatccgcaatgagcccttctcagaaaagtgtgatatcttcagtttaggtgtaataatgtgggagctatgcactttaaccagaccttgggaaggagtaccgcctgaacgggttgtttatgctattgcttacgagggagctcggcttgagattcctgaaggaccactgggaaagcttattgcagattgttggacagaaccggaacaaagaccgagttgcaatgagatactctctcgtttgctggattgtgagtattcgctttgctaactttctctcaatcatattttccttctgtgaatataaaactttgcagcgagagaggtttttgttttcttcgtttcttttttttgaatattgttggctttctcctttgagtttgtacaaaagaactttggcgctttcacatccacaaaaagctttgtggaactcttttccgtttaatcatttgcaaattcgtaaatttcaaaacctctgaaacaaaaaagtaagtcttataaattttacaaaaggtgagaagagttgctcattctttcagtttaaatgatcaagcttgctactctttttcgtaccataaggtttgttccctgctttgcatttgctataagaaaattacggacaaatacatgtacttttcgtttatatttcgtgccttaagaaatgaaaaggagctttgattgac

SEQ ID NO: 98309 - protein, 809 aa, Arabidopsis thaliana; identical to SEQ ID NO: 76093
  peptide (1)..(809): Ceres Seq. ID no. 13593126

SEQ ID NO: 98310 - protein, 573 aa, Arabidopsis thaliana; identical to SEQ ID NO: 76094
  peptide (1)..(573): Ceres Seq. ID no. 13593127

SEQ ID NO: 98311 - protein, 568 aa, Arabidopsis thaliana; identical to SEQ ID NO: 76095
  peptide (1)..(568): Ceres Seq. ID no. 13593128

SEQ ID NO: 98312 - DNA, 1540 bp, Arabidopsis thaliana
  misc_feature (1)..(1540): Ceres Seq. ID no. 13593139
  misc_feature (1)..(1540): Ortholog of  Ceres SEQ ID NO 15170209 as cited in SEQ ID NO 58562
  misc_feature (1)..(1540): Ortholog of  Ceres SEQ ID NO 12616332 as cited in SEQ ID NO 63449
  misc_feature (1)..(1540): Ortholog of  Ceres SEQ ID NO 13597498 as cited in SEQ ID NO 64648
aattttgaatctgagaattcgtgcctccgatctctctccctctcgccgtggatagagatggagagcttaccaacgacggtctcagggaaatcagaccggcgaggtaggttttccaagtctcagaacacctccaagccctctcttatcttggccttcttctcttgtcttgcttggctctacgtcgctggccggttatggcaagatgcgcagtacagagcagcactcaatactgtgcttaagatgaattatgatcagaggcctaaggttcttacggtggaggacaaacttgtggtccttggatgcaaagatcttgagaggagaattgttgaaactgaaatggagttggcacaggcaaagagtcaaggctatcttaaaaaacagaaaagtgtctcttcttcagggaagaaaatgctagctgttattggagtttacacaggctttggaagtcacttgaagcgcaataaatttagaggctcttggatgccacgagatgatgctcttaaaaaacttgaggaaagaggagttgtcatacgctttgtgattggtcggagtgctaaccgaggtgatagcctagatagaaaaattgacgaagaaaatcgtgcaactaaagactttttgattcttgagaatcacgaggaagcccaagaagagttaccgaagaaagtgaagttcttctacagtgctgctgttcagaattgggacgcagagttttatgtcaaagttgatgacaacgttgacttggatcttgaggggatgattgcgcttcttgaaagtcgtcgtagtcaagatggtgcttacattgggtgcatgaaatctggagatgtgattactgaagagggaagtcaatggtatgagcctgagtggtggaaatttggggacgacaaatcgtatttccgtcatgcaactggttcgctggtaatactctcaaagaatctggctcagtatgtcaatataaacagtggattgttgaagacatatgcgtttgatgataccaccattggatcatggatgattggcgtccaggcaacatatatagacgacaatcgcctttgctgcagcagcacaagacaagaaaaagtgtgttccatggcatgatcactgcatagatgatcctcttgtcccagagcaaagacggcggtttctcatcgcattcatggcgctccgatactcttttggggcagattcttggaccggatactgaacttatcattagttttgttagaatgggagtatgattaggccattcattacagtttatgattagaggcatgcgtatcccttgagctttggagtaagaaaatggggaaatggtatagatgtgaatgaagtataatttttcctttggtatcatatcaccatcatttgtccgtccattctagcccaatctctggcaggcgtttaatgttcgaaccttaagtttgcatttttggttgctggtttttaaaaatgtgttagttaagacttaagaggacaaaagaaaatcgtctgctttaagctcataaacacttcggaccaatacgtggttaaaaatacttcattg

SEQ ID NO: 98313 - protein, 364 aa, Arabidopsis thaliana
  peptide (1)..(364): Ceres Seq. ID no. 13593140
NFESENSCLRSLSLSPWIEMESLPTTVSGKSDRRGRFSKSQNTSKPSLILAFFSCLAWLYVAGRLWQDAQYRAALNTVLKMNYDQRPKVLTVEDKLVVLGCKDLERRIVETEMELAQAKSQGYLKKQKSVSSSGKKMLAVIGVYTGFGSHLKRNKFRGSWMPRDDALKKLEERGVVIRFVIGRSANRGDSLDRKIDEENRATKDFLILENHEEAQEELPKKVKFFYSAAVQNWDAEFYVKVDDNVDLDLEGMIALLESRRSQDGAYIGCMKSGDVITEEGSQWYEPEWWKFGDDKSYFRHATGSLVILSKNLAQYVNINSGLLKTYAFDDTTIGSWMIGVQATYIDDNRLCCSSTRQEKVCSMA

SEQ ID NO: 98314 - protein, 345 aa, Arabidopsis thaliana
  peptide (1)..(345): Ceres Seq. ID no. 13593141
MESLPTTVSGKSDRRGRFSKSQNTSKPSLILAFFSCLAWLYVAGRLWQDAQYRAALNTVLKMNYDQRPKVLTVEDKLVVLGCKDLERRIVETEMELAQAKSQGYLKKQKSVSSSGKKMLAVIGVYTGFGSHLKRNKFRGSWMPRDDALKKLEERGVVIRFVIGRSANRGDSLDRKIDEENRATKDFLILENHEEAQEELPKKVKFFYSAAVQNWDAEFYVKVDDNVDLDLEGMIALLESRRSQDGAYIGCMKSGDVITEEGSQWYEPEWWKFGDDKSYFRHATGSLVILSKNLAQYVNINSGLLKTYAFDDTTIGSWMIGVQATYIDDNRLCCSSTRQEKVCSMA

SEQ ID NO: 98315 - protein, 284 aa, Arabidopsis thaliana
  peptide (1)..(284): Ceres Seq. ID no. 13593142
MNYDQRPKVLTVEDKLVVLGCKDLERRIVETEMELAQAKSQGYLKKQKSVSSSGKKMLAVIGVYTGFGSHLKRNKFRGSWMPRDDALKKLEERGVVIRFVIGRSANRGDSLDRKIDEENRATKDFLILENHEEAQEELPKKVKFFYSAAVQNWDAEFYVKVDDNVDLDLEGMIALLESRRSQDGAYIGCMKSGDVITEEGSQWYEPEWWKFGDDKSYFRHATGSLVILSKNLAQYVNINSGLLKTYAFDDTTIGSWMIGVQATYIDDNRLCCSSTRQEKVCSMA

SEQ ID NO: 98316 - DNA, 1805 bp, Arabidopsis thaliana
  misc_feature (1)..(1805): Ceres Seq. ID no. 13593143
  misc_feature (1)..(1805): Ortholog of  Ceres SEQ ID NO 14316344 as cited in SEQ ID NO 60120
actctctctctctctcacattttctcattctctcctacaacaagtttccgccgctaagccactcactacgcagccatggcaaatcctgaccatgtttcagatgtgctacataatttgtcgattgatccaacaaccaaggctttagctcctgattctgaaacaaagggggcttatggcggaaacggtaatgacttcttgctcaatgatgagttagtggaggctaccaaaattggtaaacctagtcttttgtctaaagatggaggtgtgaccaaagacaagggatccaaccttaagaaactcgggtaccaaagtgcagcttataacgcaaagggttcatatgggaagggtgcctatgcttatgggtactatcccccagcatatcagtacccaagacatggttacactgggagctatgcttcagggaaaaccaatcttcagtatcagtacctgactcagcagggaagatcagctggtaatggtcaatcttatggaggatacatggacaacatttactccaattatgggatgtgtggaccttacacgaatggctatgggtatggctcttacggttatgactcatggaaatacatgcccaattggtatgcggttaacaatacctacaagccaagaaacgggtatcatggatatggcaaagaaaacattgaggggttaaatgagatgaatagaggtccacgagctaagggtttcaacagccaagatggttccaaggtgatggctgtgtctttgaaggagcagagagtgactgagactgagaaactcagtgaagatgtgtctcttttagatcccaaggactacaataagatagatttccctgagacctacacagaagcaaagttttatgtaatcaaatcgtacagtgaagatgatattcataaaagtatcaaatacagtgtttggtccagcactcctaatggtaacaagaagctggatgcctcatataacgaggcaaaacagaagtcagatggctgtcccgtgtttctacttttctctgtaaacactagtggacaatttgttggtttagccgagatggtaggccctgttgatttcaataagactgttgaatactggcaacaggacaaatggattggttgcttccctgttaagtggcatttcgttaaagatatccctaatagctccttgaggcatataactctggagaacaatgagaacaagccggttactaatagcagagacacacaggaagtaaagctcgagcaaggcattaaagtcatcaagattttcaaggaccacgcaagcaagacatgcatcctcgatgattttgagttctatgagaatcgtcaaaagattatccaagaaaggaaaagcaaacacctgcagatcaaaaaacagacattggtggccaatgcagacaaaggtgtaatgtcaaaaattaatcttgtgaaacctcaagagtctactacagcctcagaagatgcagcagcactaggagttgcggctgaagtgactaaagaatcgaaagtggtgaaagagaccgagttacctgtggagaaaaatgctgttgctactgcctgctgaaccaacctttggttttaagtgggaactgggtgggctgttttaggctatttagagcgtttctctagttttgtttccattcctgaatttgcagacttttttttttttttttttggaaccgagttgagagggtagtggcttagtagatgaagttttggcatgagcattcatcatcttgcagttattctctatccctttagtaatggtccaacatatgaggatatgggtaaaagattggtattgaatcagct

SEQ ID NO: 98317 - protein, 493 aa, Arabidopsis thaliana
  peptide (1)..(493): Ceres Seq. ID no. 13593144
MANPDHVSDVLHNLSIDPTTKALAPDSETKGAYGGNGNDFLLNDELVEATKIGKPSLLSKDGGVTKDKGSNLKKLGYQSAAYNAKGSYGKGAYAYGYYPPAYQYPRHGYTGSYASGKTNLQYQYLTQQGRSAGNGQSYGGYMDNIYSNYGMCGPYTNGYGYGSYGYDSWKYMPNWYAVNNTYKPRNGYHGYGKENIEGLNEMNRGPRAKGFNSQDGSKVMAVSLKEQRVTETEKLSEDVSLLDPKDYNKIDFPETYTEAKFYVIKSYSEDDIHKSIKYSVWSSTPNGNKKLDASYNEAKQKSDGCPVFLLFSVNTSGQFVGLAEMVGPVDFNKTVEYWQQDKWIGCFPVKWHFVKDIPNSSLRHITLENNENKPVTNSRDTQEVKLEQGIKVIKIFKDHASKTCILDDFEFYENRQKIIQERKSKHLQIKKQTLVANADKGVMSKINLVKPQESTTASEDAAALGVAAEVTKESKVVKETELPVEKNAVATAC

SEQ ID NO: 98318 - protein, 352 aa, Arabidopsis thaliana; identical to SEQ ID NO: 40623
  peptide (1)..(352): Ceres Seq. ID no. 13593145

SEQ ID NO: 98319 - protein, 343 aa, Arabidopsis thaliana; identical to SEQ ID NO: 40624
  peptide (1)..(343): Ceres Seq. ID no. 13593146

SEQ ID NO: 98320 - DNA, 2445 bp, Arabidopsis thaliana
  misc_feature (1)..(2445): Ceres Seq. ID no. 13593147
  misc_feature (1)..(2445): Ortholog of  Ceres SEQ ID NO 14315774 as cited in SEQ ID NO 20630
atcccgcgcaactttttcttctcagtttcagtttctctacatcgattcatcgattccactctcttgattgctgtttagatcaatccgtctcgaacccaggggttagtatatagtggatcaaactgatccgacccgacccgacccgaattattaatgtcggaagttaatgagatgagtggtggttctattggcggcgaattgttgagagcgtcgccgaaggttttaacggccggtgatcggaaattactcaaggtggagcttcggccaggggatacgacgtatgtttcgtggaagaagcttatgagggatgctggtaaggtcaatggtttatcggcttcggttcccgacccgcctcctaatgctaaccctaaccttgagtttcgaattgcaccggggcatccagtagagattgaaacgaatgaacaacctcattctaaccgtttcaacgctgttattgagaagatagagaggctctataaggggaacgatagcagtgatggggaagagttagacggtgctcctgatgatgatgagtatgacactgaagattcatttatagatgatgctgaactggatgagtatttcgaagttgataattcaacagttaaacatgatggattttatgtaaatagaggcaagttggagcggatggaaccttcaacaacatctaaccagcaacccaaaaaacggcgacgaaaagattcagcaaaaccctgtcgtgatgcagttgacgtatccgataaacacaccaagttgtctataacagctaggaaaaaggatcaatcaactgctcctgggtcctggaaaacacaggagtcacctttgccttctggagcgcaagatgcaaatacttcagtacctctggatgatgtgaagcattctgatagagcaaatcatcagtctaggaatgatacaagtcacaagtcaagggaaactggatcctctagtgcccttcatcagaaatacagcaacaaaagcttacaccaacaatctacgtccctgctaggaaaatctccccccaatgtctttgcagaggtaacagtagtccgtcagaaagaaaacaatggtatgcatcagctggcaaatgtaacgggaagcagacaatctagtcaagcgtctaaaaaagatggttctaatgtgaagtctaaaacctcaatcctcgagaaagccataagggaactggagaaggtggttgtggaatcaaggcctcctgctatcactgaaaatcaagaagctgatacctcatcccaggcagtgaagagaagattgcccagggatgttaaattgaaacttgctaaagttgctaggattgcgcaggcaagccagggaaaacattcaacagagttaatcaaccgtcttatgagcattgttggtcacctaatccagcttaggtctcttaagaggaacttgaaaatcatgattgatatgggagattctgcaacccgagaaaaggatactaggttcaagcaaatcaacaatgaagttcttgatatgataaaggccaaagtttctttgatggaatcacaggcaatcaaaccagaaggtgcaacatcagacgattttcaggactcagtagaaaagccatctttgaagaagtttgtcatggatgcggcattggaggataaattgtgtgacctatatgacatatttatcgacggattggatgaagatcaaggtccacaaacaaaaaagctatatgtcaatttggctgaactctggccaaatagattgatggattatcgtgggatcaaacatgcaattttccgggcaaaggagagacgaaaagcattgtatggaaaccttgcgaaagagatggatcaaacaaagatgaagaagagtatgaagcagttggtaccaagaacagactgtactgctcagcccaacaccgaattagtggttcagagacaacacagtggggaaaaaaaattgattgttgatccaaatgcaaccagcacttccgtggtcactagtcaaactatggttgacagatcaaatcagcagcagcctgagaagctaaagggaatctcaagctcttgcaatcctacagaggaaacaagagtggtcaagagaaagaacgaggctgtaatggctgagaaacaagtcgttcttgccctgaagaagcccgaacatccacagacacgtgtaatcccagctcctcagaatctgaacatcccacgaacaaccccggacctgaacttgccaagttgacatcacgattgacaaaggagctcttagaaacgccggagacaataacctctggcctcttccttccttgtattttgaggtggcacggcattagtcctggcgatgccgatgcttggtttttttagctacaaagcatggtttataaagttgtctgtattccagtttggctcttattaagttagttactctatttacgtgtcctttttcaaaactctaatgtataaagttatgattttacgg

SEQ ID NO: 98321 - protein, 684 aa, Arabidopsis thaliana
  peptide (1)..(684): Ceres Seq. ID no. 13593148
MSEVNEMSGGSIGGELLRASPKVLTAGDRKLLKVELRPGDTTYVSWKKLMRDAGKVNGLSASVPDPPPNANPNLEFRIAPGHPVEIETNEQPHSNRFNAVIEKIERLYKGNDSSDGEELDGAPDDDEYDTEDSFIDDAELDEYFEVDNSTVKHDGFYVNRGKLERMEPSTTSNQQPKKRRRKDSAKPCRDAVDVSDKHTKLSITARKKDQSTAPGSWKTQESPLPSGAQDANTSVPLDDVKHSDRANHQSRNDTSHKSRETGSSSALHQKYSNKSLHQQSTSLLGKSPPNVFAEVTVVRQKENNGMHQLANVTGSRQSSQASKKDGSNVKSKTSILEKAIRELEKVVVESRPPAITENQEADTSSQAVKRRLPRDVKLKLAKVARIAQASQGKHSTELINRLMSIVGHLIQLRSLKRNLKIMIDMGDSATREKDTRFKQINNEVLDMIKAKVSLMESQAIKPEGATSDDFQDSVEKPSLKKFVMDAALEDKLCDLYDIFIDGLDEDQGPQTKKLYVNLAELWPNRLMDYRGIKHAIFRAKERRKALYGNLAKEMDQTKMKKSMKQLVPRTDCTAQPNTELVVQRQHSGEKKLIVDPNATSTSVVTSQTMVDRSNQQQPEKLKGISSSCNPTEETRVVKRKNEAVMAEKQVVLALKKPEHPQTRVIPAPQNLNIPRTTPDLNLPS

SEQ ID NO: 98322 - protein, 678 aa, Arabidopsis thaliana
  peptide (1)..(678): Ceres Seq. ID no. 13593149
MSGGSIGGELLRASPKVLTAGDRKLLKVELRPGDTTYVSWKKLMRDAGKVNGLSASVPDPPPNANPNLEFRIAPGHPVEIETNEQPHSNRFNAVIEKIERLYKGNDSSDGEELDGAPDDDEYDTEDSFIDDAELDEYFEVDNSTVKHDGFYVNRGKLERMEPSTTSNQQPKKRRRKDSAKPCRDAVDVSDKHTKLSITARKKDQSTAPGSWKTQESPLPSGAQDANTSVPLDDVKHSDRANHQSRNDTSHKSRETGSSSALHQKYSNKSLHQQSTSLLGKSPPNVFAEVTVVRQKENNGMHQLANVTGSRQSSQASKKDGSNVKSKTSILEKAIRELEKVVVESRPPAITENQEADTSSQAVKRRLPRDVKLKLAKVARIAQASQGKHSTELINRLMSIVGHLIQLRSLKRNLKIMIDMGDSATREKDTRFKQINNEVLDMIKAKVSLMESQAIKPEGATSDDFQDSVEKPSLKKFVMDAALEDKLCDLYDIFIDGLDEDQGPQTKKLYVNLAELWPNRLMDYRGIKHAIFRAKERRKALYGNLAKEMDQTKMKKSMKQLVPRTDCTAQPNTELVVQRQHSGEKKLIVDPNATSTSVVTSQTMVDRSNQQQPEKLKGISSSCNPTEETRVVKRKNEAVMAEKQVVLALKKPEHPQTRVIPAPQNLNIPRTTPDLNLPS

SEQ ID NO: 98323 - protein, 635 aa, Arabidopsis thaliana
  peptide (1)..(635): Ceres Seq. ID no. 13593150
MRDAGKVNGLSASVPDPPPNANPNLEFRIAPGHPVEIETNEQPHSNRFNAVIEKIERLYKGNDSSDGEELDGAPDDDEYDTEDSFIDDAELDEYFEVDNSTVKHDGFYVNRGKLERMEPSTTSNQQPKKRRRKDSAKPCRDAVDVSDKHTKLSITARKKDQSTAPGSWKTQESPLPSGAQDANTSVPLDDVKHSDRANHQSRNDTSHKSRETGSSSALHQKYSNKSLHQQSTSLLGKSPPNVFAEVTVVRQKENNGMHQLANVTGSRQSSQASKKDGSNVKSKTSILEKAIRELEKVVVESRPPAITENQEADTSSQAVKRRLPRDVKLKLAKVARIAQASQGKHSTELINRLMSIVGHLIQLRSLKRNLKIMIDMGDSATREKDTRFKQINNEVLDMIKAKVSLMESQAIKPEGATSDDFQDSVEKPSLKKFVMDAALEDKLCDLYDIFIDGLDEDQGPQTKKLYVNLAELWPNRLMDYRGIKHAIFRAKERRKALYGNLAKEMDQTKMKKSMKQLVPRTDCTAQPNTELVVQRQHSGEKKLIVDPNATSTSVVTSQTMVDRSNQQQPEKLKGISSSCNPTEETRVVKRKNEAVMAEKQVVLALKKPEHPQTRVIPAPQNLNIPRTTPDLNLPS

SEQ ID NO: 98324 - DNA, 1966 bp, Arabidopsis thaliana
  misc_feature (1)..(1966): Ceres Seq. ID no. 13593151
  misc_feature (1)..(1966): Ortholog of  Ceres SEQ ID NO 13660790 as cited in SEQ ID NO 67460
aaacctaacagcatttttctccaattccttcttcttcttcttcttcttctgtaacctcgtcttcttcagcttatactcatagctataccaaagaaaacctcttaaaacccttcttctctcgatccatcgatcagcaacaattcacttctaatcgatcaagagctttccgatctcgtcgatcccaattaacatggcttccaacggcgcttctccgagaattgttgatgctactgagaacagcttggataagatcaagcgacaattggcatctggctctggtcggaacttgctacaaggacctcttttcaagcgatctgaaactctgagaaaatggaacgaacgatgggtgatacttgatccaacaacagggaaaatggagtataagacgaggcgaaatgagccaactatcaagggaacaattttgtttgacgaaaatagcacaatctccatctctcctgtcaacttccaggggcttccaaaatataatggttgctgtatttatattggtaccccacagaagaaagattactttttgtgtgcagagactcctggtgcagctaaagcttgggtcacaaccttacatgcgacacagctagttctaaaggcccataaggaggctgtcgaatctctaagtggaagtggttctgcaacacttggtaccgttgcaaccgttgttgccgctgccaattcaacagcattggaatgttccagagaaattcaagcagcaatgcagatctctttgaggaatgcattgaaaataacgccaaataaaccgattgatggaccactagatgatttgacaataatgaaggaaactctgcgtgtcaaagatgaagaattacataatttagccagggaacttcgttctcgtgactcaatgataaaggaaatagcagataagctatctgagactgctgaagcagctgtagctgcagcatctgctgctcatacaatggatgaacaaaggaaaatcgtttgtgtggaatttgagcgcttgactacagactcacagagacagcaagaagccacaaaattaaagctcaaggaattggaagagaagacctttactttgagtaaggaaaaagatcaattggttaaggaaagagacgctgctctccaagaggcacatatgtggcggtctgagcttgggaaagccagagagcgtgttgtcatacttgaaggagctgttgtgagggccgaagagaaagtgagggttgcagaagcaagcggtgaagcaaaatcaaaagaggcttctcagagagaagcaactgcttggacagagaagcaagagcttttagcatatgtgaatatgttacaaactcagcttcaaaggcagcaactagagacaaagcaagtgtgtgaggagaagactgagtctactaacggcgaagcttctcttccaatgacaaaggaaacagaaaagaatgtggataaagcatgtctgagcatttcaagaacagcctctataccgggagagaatgtagtccatatgagtgaagagcaggtagtaaacgctcagcctccggtgggagaaaacgaatggaatgatattcaggcaacagaggcaagagtttctgatgtaagagaaatatctgcagagactgaacgggacagaagaaacagcttggatatcccggtagtgtctcctgaacctaacgttccacgcaatgatccgccttccgaatcatttcatcaccagccttgaataaagattggtagatcttcgtacattttaatatactctttgatggtctggtaatgtttggagagttgattcttctaacaacaaaaagaatttgtctttttagttttcttgtacattcaagagttgttatgtatctgccgctcttgaatttgtctgactagggaatgattctttttcccttttattacaacatgaagaacagagagatatgtgttaaactttgacttatgtttttggattcatataaaccagttttcatat

SEQ ID NO: 98325 - protein, 504 aa, Arabidopsis thaliana; identical to SEQ ID NO: 45556
  peptide (1)..(504): Ceres Seq. ID no. 13593152

SEQ ID NO: 98326 - protein, 443 aa, Arabidopsis thaliana; identical to SEQ ID NO: 45557
  peptide (1)..(443): Ceres Seq. ID no. 13593153

SEQ ID NO: 98327 - protein, 325 aa, Arabidopsis thaliana; identical to SEQ ID NO: 45558
  peptide (1)..(325): Ceres Seq. ID no. 13593154

SEQ ID NO: 98328 - DNA, 915 bp, Arabidopsis thaliana
  misc_feature (1)..(915): Ceres Seq. ID no. 13593155
  misc_feature (1)..(915): Ortholog of  Ceres SEQ ID NO 14310291 as cited in SEQ ID NO 20682
  misc_feature (1)..(915): Ortholog of  Ceres SEQ ID NO 14311256 as cited in SEQ ID NO 59050
  misc_feature (1)..(915): Ortholog of  Ceres SEQ ID NO 13656079 as cited in SEQ ID NO 64220
atgaaagggcttacgaggcttctcaattctctttcgcgacatacagcttccgtaacttgttctccatcttcttcttctcttctgatatcacgtcgctctctgtttatctcggcggcgacacactttccggtgaatttctcggagtcgataacaactaatgcttctcgtaactgttcgagatcttcttcatttcccttcaattggatcgagcaaaggaggacaatgtttatccaaacacaatcaacaccaaacccctcttctctaatgtttagtcctggtaaaccagttatggagattggaagtgctgacttccctaattctcgctctgctatgagttcacctttagctaaagccattttcgccattgatggtattcctcgtcttttgctacaacatacaattgtttcctcctcatataatccgtgttttgtgactaagattgtctctgttgatgcaggtgtagttcgagttttctatgggtcagattttgttactgtaacaaagtcagatgatgtaacatgggatatactcaagcctgatatctttgcagtggtaatggacttttactcttctggtcagcctttgtttctcgactcacaagctacagctgccaaggataccgctattcatgaggatgactctgaaactgtagcaatgattaaggaactcttggagacgcgtatccgaccatcagtccaagatgatggaggggacatcgagtattgtggattcgatacggaaactggtatagtgaagcttagaatgcaaggagcttgtagcggttgtccaagttcatctgttactttgaaatccggaattgagaatatgcttatgcattatgtttccgaggtcaaaggtgttgagcaagaattcgatggtgaagaggagggaacatcttctggtccaatggagtag

SEQ ID NO: 98329 - protein, 304 aa, Arabidopsis thaliana
  peptide (1)..(304): Ceres Seq. ID no. 13593156
MKGLTRLLNSLSRHTASVTCSPSSSSLLISRRSLFISAATHFPVNFSESITTNASRNCSRSSSFPFNWIEQRRTMFIQTQSTPNPSSLMFSPGKPVMEIGSADFPNSRSAMSSPLAKAIFAIDGIPRLLLQHTIVSSSYNPCFVTKIVSVDAGVVRVFYGSDFVTVTKSDDVTWDILKPDIFAVVMDFYSSGQPLFLDSQATAAKDTAIHEDDSETVAMIKELLETRIRPSVQDDGGDIEYCGFDTETGIVKLRMQGACSGCPSSSVTLKSGIENMLMHYVSEVKGVEQEFDGEEEGTSSGPME

SEQ ID NO: 98330 - protein, 230 aa, Arabidopsis thaliana
  peptide (1)..(230): Ceres Seq. ID no. 13593157
MFIQTQSTPNPSSLMFSPGKPVMEIGSADFPNSRSAMSSPLAKAIFAIDGIPRLLLQHTIVSSSYNPCFVTKIVSVDAGVVRVFYGSDFVTVTKSDDVTWDILKPDIFAVVMDFYSSGQPLFLDSQATAAKDTAIHEDDSETVAMIKELLETRIRPSVQDDGGDIEYCGFDTETGIVKLRMQGACSGCPSSSVTLKSGIENMLMHYVSEVKGVEQEFDGEEEGTSSGPME

SEQ ID NO: 98331 - protein, 216 aa, Arabidopsis thaliana
  peptide (1)..(216): Ceres Seq. ID no. 13593158
MFSPGKPVMEIGSADFPNSRSAMSSPLAKAIFAIDGIPRLLLQHTIVSSSYNPCFVTKIVSVDAGVVRVFYGSDFVTVTKSDDVTWDILKPDIFAVVMDFYSSGQPLFLDSQATAAKDTAIHEDDSETVAMIKELLETRIRPSVQDDGGDIEYCGFDTETGIVKLRMQGACSGCPSSSVTLKSGIENMLMHYVSEVKGVEQEFDGEEEGTSSGPME

SEQ ID NO: 98332 - DNA, 1703 bp, Arabidopsis thaliana
  misc_feature (1)..(1703): Ceres Seq. ID no. 13593159
  misc_feature (1)..(1703): Ortholog of  Ceres SEQ ID NO 15178096 as cited in SEQ ID NO 52497
tatcacaacacactacactctaatggctcgtgcgacggaatttcaaggctcattcctgagtcgaatcagcatccgccgtaatcagatcgtctccatggatgtcaatcacgagcaagagctcgaagaactcgagtatttccagaaacacgtagccgaacgtttctcggatttaatcacatctccatctccgcctccttcctcctcctcttccgccgtctctcagccgtctgatccgattctctcgatcccttggttacagaatcttctagatgtttttatgtcctgtgaagcagagttcaaggcggtgttgagcacgacccagatctcgaaatcgccgtctttagaaagggttttgccggaaatgcttgatcggattttaaaggcgttagatttatgtaacgccgtcgttaacgggattgattccgttagacagagccgacgttttgcggagatagctgtcacggcgcttaagcaacggccgttatgtgacggaagcgttcgtagagctaagcgtgctttaacaagtctcctcattggcttaaacgctgatgagaggagagatagaaacagtggaggaagtggttgcagtaaccaaagaaggacgacgtcacggtcttggtcgtttggaacgcgtagcaatgtcaccggaggaggattatatggccaagtcgtcagcaagaattggtctgcttcgaagcagattcaggcgatggtggccaatctggtgctgccacgtggagctgaagcttccggaccggcaatgccggtttacataatgagcagtgttatggttctggtgatgtgggtgctagtggcggcggttccttgtcagacaagcagtgttcttgtggcgccattgccgcttccaaaacaccagaattgggctagcgccgctatgagtattcaggagaggattggtgaagagataaaacggaaggagaagcgttgtggtggtggtggattgatggaggagatgcagaggatggagaagattgggttatctttaatggaattcgcggagaggtttaggtttccggcagatgaagaagaggaggtggaagttgcggagaaggtggatgagatggaggagatttgccggcgaatggaagtgggattggaggatttgcagagacaagtgaggcaagtgttccatagattggtgagaagcaggattgagattgtttcactgcttgagcaagctcctgcaatctaatcttgtaaatcctcaataacaacaaaaacttttctcttttttcttttctttggcgatttttagtcttaaaaactaatctttcaaaaatattgatgtgtataatctacaaatcgtatacgtacacaccaatgttactgtttttggtatatgatgatcactgcaaaactctattactgagattagattcatgttgctttcctgaatctgttcttctgtggctttcgtgtctcttttcctgacttgtgattgtttccagaagcttccctttgttttccgaagcttctgttaccggggcgctgtggtcctgttctactttgattaatgtcggaagcaggtgtgtgttgttgatatgttctcttttgccgtttgaatttgttgccatcttgtttggctgtagtttctgatgaagcttctctgtaatttcttttccgcggcctgtaagaaagaaccaattgttattttgtatgcatataatgagcaagcagtgatt

SEQ ID NO: 98333 - protein, 403 aa, Arabidopsis thaliana
  peptide (1)..(403): Ceres Seq. ID no. 13593160
ITTHYTLMARATEFQGSFLSRISIRRNQIVSMDVNHEQELEELEYFQKHVAERFSDLITSPSPPPSSSSSAVSQPSDPILSIPWLQNLLDVFMSCEAEFKAVLSTTQISKSPSLERVLPEMLDRILKALDLCNAVVNGIDSVRQSRRFAEIAVTALKQRPLCDGSVRRAKRALTSLLIGLNADERRDRNSGGSGCSNQRRTTSRSWSFGTRSNVTGGGLYGQVVSKNWSASKQIQAMVANLVLPRGAEASGPAMPVYIMSSVMVLVMWVLVAAVPCQTSSVLVAPLPLPKHQNWASAAMSIQERIGEEIKRKEKRCGGGGLMEEMQRMEKIGLSLMEFAERFRFPADEEEEVEVAEKVDEMEEICRRMEVGLEDLQRQVRQVFHRLVRSRIEIVSLLEQAPAI

SEQ ID NO: 98334 - protein, 396 aa, Arabidopsis thaliana
  peptide (1)..(396): Ceres Seq. ID no. 13593161
MARATEFQGSFLSRISIRRNQIVSMDVNHEQELEELEYFQKHVAERFSDLITSPSPPPSSSSSAVSQPSDPILSIPWLQNLLDVFMSCEAEFKAVLSTTQISKSPSLERVLPEMLDRILKALDLCNAVVNGIDSVRQSRRFAEIAVTALKQRPLCDGSVRRAKRALTSLLIGLNADERRDRNSGGSGCSNQRRTTSRSWSFGTRSNVTGGGLYGQVVSKNWSASKQIQAMVANLVLPRGAEASGPAMPVYIMSSVMVLVMWVLVAAVPCQTSSVLVAPLPLPKHQNWASAAMSIQERIGEEIKRKEKRCGGGGLMEEMQRMEKIGLSLMEFAERFRFPADEEEEVEVAEKVDEMEEICRRMEVGLEDLQRQVRQVFHRLVRSRIEIVSLLEQAPAI

SEQ ID NO: 98335 - protein, 372 aa, Arabidopsis thaliana
  peptide (1)..(372): Ceres Seq. ID no. 13593162
MDVNHEQELEELEYFQKHVAERFSDLITSPSPPPSSSSSAVSQPSDPILSIPWLQNLLDVFMSCEAEFKAVLSTTQISKSPSLERVLPEMLDRILKALDLCNAVVNGIDSVRQSRRFAEIAVTALKQRPLCDGSVRRAKRALTSLLIGLNADERRDRNSGGSGCSNQRRTTSRSWSFGTRSNVTGGGLYGQVVSKNWSASKQIQAMVANLVLPRGAEASGPAMPVYIMSSVMVLVMWVLVAAVPCQTSSVLVAPLPLPKHQNWASAAMSIQERIGEEIKRKEKRCGGGGLMEEMQRMEKIGLSLMEFAERFRFPADEEEEVEVAEKVDEMEEICRRMEVGLEDLQRQVRQVFHRLVRSRIEIVSLLEQAPAI

SEQ ID NO: 98336 - DNA, 1323 bp, Arabidopsis thaliana
  misc_feature (1)..(1323): Ceres Seq. ID no. 13593171
  misc_feature (1)..(1323): Ortholog of  Ceres SEQ ID NO 13584612 as cited in SEQ ID NO 65223
atggggaagaagaacaagagaagtcaagacgagtctgagctcgaattggagccagagctaacgaaaataatcgatggagactctaaaaagaagaaaaataagaataagaagaagagaagccatgaagatacggagatagaaccggagcaaaagatgagtctcgacggagactcgaaggaggagaagataaagaagaagaggaagaacaagaaccaagaggaggagccagagcttgtgacggagaaaacgaaagtccaagaggaggaaaagggaaatgtagaagagggtagagccactgttagcatagccatagctggttcaatcatccacaacactcaatcacttgagctcgccacacgcgtaatctctctttctctctatctctcccttcgtttctctgtttttccattcccagataatttaaagtccccttcttccatttctaacatttctcagctcgccggccaaattgctcgtgcagctacaattttccgaatcgacgagatcgtagtgttcgacaataagagcagctcagaaatcgaatcagctgctacgaatgcttctgatagcaatgaaagtggtgcctcctttctcgttcgtatcttgaagtatctagagacaccacaatatttgaggaaatctctcttccccaagcaaaatgatcttagatatgtgggtatgttgccacctcttgatgctcctcaccatctgcgtaagcacgagtgggaacaataccgtgaaggtgtgacactgagtgaaaaggctccaaattctgagggtacattggttgatgtgggtttaagcaagattgacctttattcgatgctcgtgatgcagagtgttgttgttgatcaagtgctgggtccaggaattagagtcacggtagccatgggaactgaccacgatttagatttggtacgccagattgttccaccctctaagccaagggaagaagcaggaatgtattggggatacaaagtacgatatgcatcacaattaagttcagtattcaaggaatgccctttcgagggtggttacgattatttgattggtacctcggagcacggcctggtaattagttcatctgagctgaaaataccaacatttaggcacctattgattgcatttggtggacttgctgggcttgaagaaagtattgaagatgataatcagtataaggggaaaaacgttcgagatgtgtttaatgtatacttgaatacttgtccacatcaaggtagccgaaccattcgagcagaggaagcgatgtttatatcacttcagtacttccaggaacccatcagcagggcagtgagaagactttaa

SEQ ID NO: 98337 - protein, 440 aa, Arabidopsis thaliana
  peptide (1)..(440): Ceres Seq. ID no. 13593172
MGKKNKRSQDESELELEPELTKIIDGDSKKKKNKNKKKRSHEDTEIEPEQKMSLDGDSKEEKIKKKRKNKNQEEEPELVTEKTKVQEEEKGNVEEGRATVSIAIAGSIIHNTQSLELATRVISLSLYLSLRFSVFPFPDNLKSPSSISNISQLAGQIARAATIFRIDEIVVFDNKSSSEIESAATNASDSNESGASFLVRILKYLETPQYLRKSLFPKQNDLRYVGMLPPLDAPHHLRKHEWEQYREGVTLSEKAPNSEGTLVDVGLSKIDLYSMLVMQSVVVDQVLGPGIRVTVAMGTDHDLDLVRQIVPPSKPREEAGMYWGYKVRYASQLSSVFKECPFEGGYDYLIGTSEHGLVISSSELKIPTFRHLLIAFGGLAGLEESIEDDNQYKGKNVRDVFNVYLNTCPHQGSRTIRAEEAMFISLQYFQEPISRAVRRL

SEQ ID NO: 98338 - protein, 389 aa, Arabidopsis thaliana
  peptide (1)..(389): Ceres Seq. ID no. 13593173
MSLDGDSKEEKIKKKRKNKNQEEEPELVTEKTKVQEEEKGNVEEGRATVSIAIAGSIIHNTQSLELATRVISLSLYLSLRFSVFPFPDNLKSPSSISNISQLAGQIARAATIFRIDEIVVFDNKSSSEIESAATNASDSNESGASFLVRILKYLETPQYLRKSLFPKQNDLRYVGMLPPLDAPHHLRKHEWEQYREGVTLSEKAPNSEGTLVDVGLSKIDLYSMLVMQSVVVDQVLGPGIRVTVAMGTDHDLDLVRQIVPPSKPREEAGMYWGYKVRYASQLSSVFKECPFEGGYDYLIGTSEHGLVISSSELKIPTFRHLLIAFGGLAGLEESIEDDNQYKGKNVRDVFNVYLNTCPHQGSRTIRAEEAMFISLQYFQEPISRAVRRL

SEQ ID NO: 98339 - DNA, 1796 bp, Arabidopsis thaliana
  misc_feature (1)..(1796): Ceres Seq. ID no. 13593202
  misc_feature (1)..(1796): Ortholog of  Ceres SEQ ID NO 13597580 as cited in SEQ ID NO 65322
ggaacccagaaaaaagattcataaaaccaggcaatagaaatttcatctgaagaaaagaaaaagtaaagctattaaaaatcaaagccacgagaagaaagtagaaaaagttacagtctctgtctatcaaaatcccaacggtaactgaaaatcgccggaaccgaatctgcggcgagccaaaacttgtggatcttttaatgaaaacttgaagattcctctttccacggttgcttctagggttttctcttcgattcaccacatcgtcatgaaccaaatctctttctggtgcctttctttactccttacggtggtgattgctgcagaagagactcctatcactcgtatagccttcggatcatgcgctaatcaaagtgctccacagccgatatgggatgcgataaacaagtttgatccgcaactgtttatttggttgggtgataacatctacggagatataagaagaccacttacagtcattgggaaagagagaacttttgggccatggaggaattcaccgaggtttgtaccttcttcagaggaagaaatgaaactaagatacgctaaagccaaagctaatcctggatattctcgtattcagagaaaagctaaggttattggtacatgggatgatcatgattacggattgaatgacgctggaaaagagtttgatcgtaaagtcattaaccaaaaacttatgcttgatttcttgaatgagcctcttgatagtcctaggagaaagcaagctggtgtttatgcttcttatacttatggtccgcctaatcggaaagttaaggttatagttttagatactagatatcatagagaccctttaagaagtgacgggagcatattgggtgatacgcagtgggactggctcgaaaatgaattgagcggtccccgaagcgaaatcactatcataggatcctctgttcaggtgatatcaaatctttctgctaccactggacctctcttttatatggaatcatggggtcgttttccaaaggaaaggaaacgtctttttaaactgatagcagatactaagagagatggagttatattcatcagtggagatgtacattttggagaaatcacgagatatgattgttctgttgggtacccattatatgatgtcacctccagtggtctagtacaatctgttgagaaagttgtccctcgtcccttgcgttccatagttaggcttcttttttggtatactccaagcacgatgagagttatcaatgataactgcaaattcaaatcttgcacatacggacaacaaaattttggagcaatatcgatagattggaatgcaaatccggttaccataaagctcgagatcagagatgttaacggagacactgtactaggcacgaatgtttcattatctgaactccaaccaggaggctcgaattctttaaaagatacaacaactaagggaaagtctcaacgatattgcacactcgaaattgaattaccaggaacgaccagataccgattggcagttctcatctacttcaccattgctgtcttggcaatggcgatattaggacttatcattggagctgtattggccataacagcatgcgtttataaatgcaaggtcgattgattgttgatgacattaatcaactttttttggtccaacaaaagtgtctttatgacttataatctgtattagttggattattcagggattacaattcggatgtagcttataatgttaaaaattgttgaacacatggattttgatcttgtgatgggaattctaagcttgagctgttattaattaaacttctttg

SEQ ID NO: 98340 - protein, 447 aa, Arabidopsis thaliana; identical to SEQ ID NO: 45740
  peptide (1)..(447): Ceres Seq. ID no. 13593203

SEQ ID NO: 98341 - protein, 354 aa, Arabidopsis thaliana; identical to SEQ ID NO: 45741
  peptide (1)..(354): Ceres Seq. ID no. 13593204

SEQ ID NO: 98342 - protein, 304 aa, Arabidopsis thaliana; identical to SEQ ID NO: 45742
  peptide (1)..(304): Ceres Seq. ID no. 13593205

SEQ ID NO: 98343 - DNA, 2228 bp, Arabidopsis thaliana
  misc_feature (1)..(2228): Ceres Seq. ID no. 13593238
  misc_feature (1)..(2228): Ortholog of  Ceres SEQ ID NO 13595870 as cited in SEQ ID NO 62101
  misc_feature (1)..(2228): Ortholog of  Ceres SEQ ID NO 13590241 as cited in SEQ ID NO 63878
  misc_feature (1)..(2228): Ortholog of  Ceres SEQ ID NO 13657939 as cited in SEQ ID NO 66349
aaacaatctctttctcttcttctgccaaattccacagatggctgcttcatcggcttgtcttctcggaaatggattatctgtctacacaaccaaacagaggttccaaaagcttgggcttgataggacatctaaagttacagttgtgaaggcttctttggatgagaagaaacatgaagggagaagaggtttctttaaactcttactaggaaacgctgctgctggagttggtttgcttgcaagtggaaacgctaatgcagacgaacaaggacaaggggtttcttcgtctagaatgtcttattctaggttcctagagtatttagacaagggaagggttgagaaagtagatttgtatgagaatgggactatagctattgtggaggccgtttctcctgagttgggtaaccggattcagcgtgtacgtgtgcagctacctggattgagtcaggagcttctccagaagttgagggctaagaatattgatttcgcagcacataatgctcaggaggaccaaggttctccaatactcaacttgattgggaatcttgcattccctgttattttgattggcggtttgttccttctctcgagaagatcctctggtggaatgggtggccctggtggtcctggcttcccactccaaattggtcagtcgaaagcaaagtttcagatggaaccaaacactggtgtaacttttgatgatgttgctggagtcgatgaagccaagcaagatttcatggaagtggtggagtttctgaagaagcctgagaggttcactgcggttggtgcccggatcccaaaaggtgttcttcttgttggtcctcctggtaccgggaaaaccctgttggcaaaagccattgctggtgaagctggtgtgcccttcttttccatctcgggttctgagtttgttgagatgtttgtcggtgttggtgcatcaagggtccgcgatcttttcaaaaaagccaaagaaaatgctccatgcattgttttcgtggatgaaatagatgctgttggtaggcaaagaggaactggaattggtggaggtaatgatgaaagagaacagacccttaatcagctcctgactgagatggatggttttgagggtaacactggtgttatcgtagttgctgcaaccaacagagcagacattcttgactccgctttgctaagaccagggcgttttgaccggcaggtatctgttgacgttccagacgttaagggaagaacagatatactcaaggttcactcggggaataagaaatttgaaagcggtgtttcacttgaagtaatagccatgagaacacctggatttagcggagctgatcttgcaaacctcttgaacgaggctgccatattggccggccgccgtggaaagactgcaatatcatcaaaagagattgatgactcaattgacagaattgtagctggcatggaaggaacagtcatgacagatgggaagagcaaaagcttggttgcttaccatgaagttggccatgccatatgtggaacattgactccagggcatgatgctgttcaaaaggtcacgttgataccacgaggccaggctagaggtctgacttggttcattccctcagatgacccaactctaatctccaaacagcaactctttgcaagaattgttggtggactcggtggtagagctgccgaagaagtcatctttggtgagtctgaggtgactactggtgcagttagtgacttgcaacagatcaccggtttggctaagcagatggtgacaacatttgggatgtctgaaatcggaccatggtcgctaatggattcatcggagcaaagcgatgtcattatgaggatgatggcaagaaactcaatgtctgagaagcttgcaaatgatattgatacagcggtgaagacattatcagacaaagcgtacgagatagctttgagccagattagaaacaatcgtgaagccatggacaagattgttgaaatacttcttgagaaagagactatgtcaggcgatgaattccgagcaatcctatctgaattcacagaaatcccacctgaaaaccgtgttgcttcttcaacatccacatcaacaccaacaccagcgtctgtctgagtaagagacctttgaatctctgtgtatattatcttgagatacttccccatactgtgtaacagcacatcttaatttccctagttggagtatatatgtatacgaattcgatatacaaggccttatttcaaactcg

SEQ ID NO: 98344 - protein, 697 aa, Arabidopsis thaliana
  peptide (1)..(697): Ceres Seq. ID no. 13593239
NNLFLFFCQIPQMAASSACLLGNGLSVYTTKQRFQKLGLDRTSKVTVVKASLDEKKHEGRRGFFKLLLGNAAAGVGLLASGNANADEQGQGVSSSRMSYSRFLEYLDKGRVEKVDLYENGTIAIVEAVSPELGNRIQRVRVQLPGLSQELLQKLRAKNIDFAAHNAQEDQGSPILNLIGNLAFPVILIGGLFLLSRRSSGGMGGPGGPGFPLQIGQSKAKFQMEPNTGVTFDDVAGVDEAKQDFMEVVEFLKKPERFTAVGARIPKGVLLVGPPGTGKTLLAKAIAGEAGVPFFSISGSEFVEMFVGVGASRVRDLFKKAKENAPCIVFVDEIDAVGRQRGTGIGGGNDEREQTLNQLLTEMDGFEGNTGVIVVAATNRADILDSALLRPGRFDRQVSVDVPDVKGRTDILKVHSGNKKFESGVSLEVIAMRTPGFSGADLANLLNEAAILAGRRGKTAISSKEIDDSIDRIVAGMEGTVMTDGKSKSLVAYHEVGHAICGTLTPGHDAVQKVTLIPRGQARGLTWFIPSDDPTLISKQQLFARIVGGLGGRAAEEVIFGESEVTTGAVSDLQQITGLAKQMVTTFGMSEIGPWSLMDSSEQSDVIMRMMARNSMSEKLANDIDTAVKTLSDKAYEIALSQIRNNREAMDKIVEILLEKETMSGDEFRAILSEFTEIPPENRVASSTSTSTPTPASV

SEQ ID NO: 98345 - protein, 685 aa, Arabidopsis thaliana; identical to SEQ ID NO: 45832
  peptide (1)..(685): Ceres Seq. ID no. 13593240

SEQ ID NO: 98346 - protein, 601 aa, Arabidopsis thaliana; identical to SEQ ID NO: 45833
  peptide (1)..(601): Ceres Seq. ID no. 13593241

SEQ ID NO: 98347 - DNA, 1816 bp, Arabidopsis thaliana
  misc_feature (1)..(1816): Ceres Seq. ID no. 13593246
  misc_feature (1)..(1816): Ortholog of  Ceres SEQ ID NO 13599965 as cited in SEQ ID NO 0
  misc_feature (1)..(1816): Ortholog of  Ceres SEQ ID NO 15180230 as cited in SEQ ID NO 0
ataaacccttttcttttaacctactcagtttttctgtttgcgtcgctctcatcccagggcgagaaagatggtgaaacggagtaaaaagagtaagagtaagagggtgaccttgaagcagaagcataaggtcctgaaaaaggtgaaggagcaccacaagaagaaggcaaaggatgctaaaaagcttggccttcaccgtaagccaagagtagagaaagacccaggtatacccaatgactggcctttcaaggaacaagagcttaaagcccttgaagttcgacgtgcccgtgctcttgaggagattgaacagaagaaagaagctcgcaaagaaagggccaaaaagaggaaacttggtttggttgatgatgaggataccaagacagaaggagagaccatagaggacttacctaaagttgtcaatgttcgagataactcggagagggctttctacaaggagctagttaaagtcattgaattgtctgatgtcattttggaggttcttgatgcccgtgatcctcttggcactcgttgtactgacatggagaggatggtgatgcaagccggtcccaataagcatcttgtgttgctgctgaacaagattgatcttgttccccgagaggctgctgagaaatggcttatgtaccttagggaagaatttccagctgttgccttcaagtgtagcacccaggaacagagatcaaacttgggttggaaatcatctaaggcatcaaaaccaagcaatatgttgcagacgagtgattgtcttggagcagacactcttatcaaattgttgaagaactactcaagaagtcatgagttaaaaaaatctatcacagttggtattattggactgcctaatgtcggcaagagtagtcttattaacagtctgaagagagcgcatgttgtcaatgttggtgccactcctggactgactagatctctgcaagaggttcacttggacaaaaacgtgaagttgctggattgtcctggagttgtgatgttgaaatcatcaggaaatgatgcttccatagctctccgaaattgtaaaagaatcgagaagttggatgacccagttagtccagtgaaggaaattctcaagctttgtcctaaagatatgctggtgactctctacaaaatcccgagcttcgaggcagttgatgatttcctttacaaagtcgccactgtaaggggtaaacttaaaaagggtggtcttgtggatattgatgctgctgccagaattgttttgcatgactggaatgaaggtaaaatcccatactatacaatgccgccaaagagggaccagggtggacatgcagagtcaaagattgtgactgagctggccaaggatttcaacatcgatgaggtttacagtggtgaatcctctttcattgggagcttgaagacggttaacgaattcaaccctgttattattccttcaaatggtcctctcaatttcgatgaaactatgatcgaggatgagtctaagacgcagacggaagaggaggctgagcatgagagtgatgatgatgagtcaatgggaggggaggaggaggaagaggcaggaaagacgaaggagaaatcagagacggggaggcagaacgtgaagctatacgcagcggaaagcatgttgaatacaaagaaacagaaagcagagaagaagaagaggaagaaagcaaagaaagcaggagctgatgaggaggatctgatggacggagattatgatttcaaagtggattataggaagaacaaagatggagaagacgaagaattccagattgatgctaaaatcccaatggctggacttttgcctgaagaatga

SEQ ID NO: 98348 - protein, 582 aa, Arabidopsis thaliana
  peptide (1)..(582): Ceres Seq. ID no. 13593247
MVKRSKKSKSKRVTLKQKHKVLKKVKEHHKKKAKDAKKLGLHRKPRVEKDPGIPNDWPFKEQELKALEVRRARALEEIEQKKEARKERAKKRKLGLVDDEDTKTEGETIEDLPKVVNVRDNSERAFYKELVKVIELSDVILEVLDARDPLGTRCTDMERMVMQAGPNKHLVLLLNKIDLVPREAAEKWLMYLREEFPAVAFKCSTQEQRSNLGWKSSKASKPSNMLQTSDCLGADTLIKLLKNYSRSHELKKSITVGIIGLPNVGKSSLINSLKRAHVVNVGATPGLTRSLQEVHLDKNVKLLDCPGVVMLKSSGNDASIALRNCKRIEKLDDPVSPVKEILKLCPKDMLVTLYKIPSFEAVDDFLYKVATVRGKLKKGGLVDIDAAARIVLHDWNEGKIPYYTMPPKRDQGGHAESKIVTELAKDFNIDEVYSGESSFIGSLKTVNEFNPVIIPSNGPLNFDETMIEDESKTQTEEEAEHESDDDESMGGEEEEEAGKTKEKSETGRQNVKLYAAESMLNTKKQKAEKKKRKKAKKAGADEEDLMDGDYDFKVDYRKNKDGEDEEFQIDAKIPMAGLLPEE

SEQ ID NO: 98349 - protein, 426 aa, Arabidopsis thaliana
  peptide (1)..(426): Ceres Seq. ID no. 13593248
MERMVMQAGPNKHLVLLLNKIDLVPREAAEKWLMYLREEFPAVAFKCSTQEQRSNLGWKSSKASKPSNMLQTSDCLGADTLIKLLKNYSRSHELKKSITVGIIGLPNVGKSSLINSLKRAHVVNVGATPGLTRSLQEVHLDKNVKLLDCPGVVMLKSSGNDASIALRNCKRIEKLDDPVSPVKEILKLCPKDMLVTLYKIPSFEAVDDFLYKVATVRGKLKKGGLVDIDAAARIVLHDWNEGKIPYYTMPPKRDQGGHAESKIVTELAKDFNIDEVYSGESSFIGSLKTVNEFNPVIIPSNGPLNFDETMIEDESKTQTEEEAEHESDDDESMGGEEEEEAGKTKEKSETGRQNVKLYAAESMLNTKKQKAEKKKRKKAKKAGADEEDLMDGDYDFKVDYRKNKDGEDEEFQIDAKIPMAGLLPEE

SEQ ID NO: 98350 - protein, 423 aa, Arabidopsis thaliana
  peptide (1)..(423): Ceres Seq. ID no. 13593249
MVMQAGPNKHLVLLLNKIDLVPREAAEKWLMYLREEFPAVAFKCSTQEQRSNLGWKSSKASKPSNMLQTSDCLGADTLIKLLKNYSRSHELKKSITVGIIGLPNVGKSSLINSLKRAHVVNVGATPGLTRSLQEVHLDKNVKLLDCPGVVMLKSSGNDASIALRNCKRIEKLDDPVSPVKEILKLCPKDMLVTLYKIPSFEAVDDFLYKVATVRGKLKKGGLVDIDAAARIVLHDWNEGKIPYYTMPPKRDQGGHAESKIVTELAKDFNIDEVYSGESSFIGSLKTVNEFNPVIIPSNGPLNFDETMIEDESKTQTEEEAEHESDDDESMGGEEEEEAGKTKEKSETGRQNVKLYAAESMLNTKKQKAEKKKRKKAKKAGADEEDLMDGDYDFKVDYRKNKDGEDEEFQIDAKIPMAGLLPEE

SEQ ID NO: 98351 - DNA, 963 bp, Arabidopsis thaliana
  misc_feature (1)..(963): Ceres Seq. ID no. 13593265
  misc_feature (1)..(963): Ortholog of  Ceres SEQ ID NO 15169976 as cited in SEQ ID NO 60438
atggaagatctatggaagagagcgaaatcgtttgcagaagaagcagcgaagaaatcacaaaccataacactacaatcatcttcaacaacattcgtcaatctcgtcaccgaaaccgctaaaaaatccaaagagttcgctctcgaagcttctaagaaagctgattcgatcaatgtctccgagttcgtcgccgagacggcgaagaagtcaaaggaattcgctgctgaggtttcaacgaaagcggatcagctcaaagtcgtagcattgaaacaagctgatcagatccagaatataaaatcgattgccgacattatacctggaggattaggaggatcaggatctggtggtggtggttctgagatttctgaatctgagcttgttagttttggtattactgatgatttgagagagtttgttaaaggtttgacatctgctacgttccaggcttttcctgaacaaggatttgaaatgtgttatggtaaatgtggattagatgaatcgtcggaagtttctgatttggaaacaagtgcgtcgaatgttcggaaggatctttctgagtggcaggagagacatgccactcttgttcttggttctgtcaagcaaatttcgaagttgagatatgaactatgcccacgagttatgaaagaaaggaggttctggaggatatactttaccttagtgagcactcatgttgcaccatatgaaaggaagtacatggaggaacttaggaacaaagcagagagtaaagatgaagaagctaagaagagtccagggcttggaaggacagaatcagctgaaaagaacagaatatctactgcatcgtctgagcaagatctcgatacattcctgctgggagatctagaagacagtgacgaagctcctgatgatggtgatggtgatgatggaggaagcctgggtgatgatgactttgacaagattggcaactctgtaagtgaaaacgtttga

SEQ ID NO: 98352 - protein, 320 aa, Arabidopsis thaliana
  peptide (1)..(320): Ceres Seq. ID no. 13593266
MEDLWKRAKSFAEEAAKKSQTITLQSSSTTFVNLVTETAKKSKEFALEASKKADSINVSEFVAETAKKSKEFAAEVSTKADQLKVVALKQADQIQNIKSIADIIPGGLGGSGSGGGGSEISESELVSFGITDDLREFVKGLTSATFQAFPEQGFEMCYGKCGLDESSEVSDLETSASNVRKDLSEWQERHATLVLGSVKQISKLRYELCPRVMKERRFWRIYFTLVSTHVAPYERKYMEELRNKAESKDEEAKKSPGLGRTESAEKNRISTASSEQDLDTFLLGDLEDSDEAPDDGDGDDGGSLGDDDFDKIGNSVSENV

SEQ ID NO: 98353 - protein, 165 aa, Arabidopsis thaliana
  peptide (1)..(165): Ceres Seq. ID no. 13593267
MCYGKCGLDESSEVSDLETSASNVRKDLSEWQERHATLVLGSVKQISKLRYELCPRVMKERRFWRIYFTLVSTHVAPYERKYMEELRNKAESKDEEAKKSPGLGRTESAEKNRISTASSEQDLDTFLLGDLEDSDEAPDDGDGDDGGSLGDDDFDKIGNSVSENV

SEQ ID NO: 98354 - DNA, 1896 bp, Arabidopsis thaliana
  misc_feature (1)..(1896): Ceres Seq. ID no. 13593272
  misc_feature (1)..(1896): Ortholog of  Ceres SEQ ID NO 13597798 as cited in SEQ ID NO 64311
accggaaaataatgctgctccggtcatttcgcaccgtcgagcttctccgccgaatctccacttcttcagtctctggatatcgaacttctccttcacttttacaacgttgcaatggcttccaaagctatttaccacacagagtaacaacaacagagagtcctttcccttcacacatctctcgattctgttcttctcagagcgcgaattcgcaaaatgagaatcgacacacgactctatcatcaccggtttcttcacggagggttaataacagaaagatttcacggcggaggaaggcgggaaaatcattatcaatctcgccggcggcggatgcggttgatttggcgttagactcagtggtgaagatctttactgtttctacaagtcctagttactttcttccttggcagaataagtctcaacgagaatctatgggctctggatttgtgatttctggaaggaagattataacgaatgcgcatgtcgtggctgatcactcctttgtgttagttagaaagcatggatcgtcgataaaacacagagcagaagttcaagcggttggtcatgaatgtgatttggctatattggtagttgatagtgaagtgttttgggaaggtatgaatgctttggagctaggagatataccgtttcttcaggaagctgtggctgtagttggctatcctcaaggtggtgacaacatttctgttacaaaaggtgttgtgtctcgagttgaaccgacacaatatgttcacggtgccacccagctaatggctatacaaatagatgctgctattaaccccggaaatagtggtggcccagctatcatgggaaacaaagtagctggtgtcgcatttcaaaatctttcaggtgctgagaatataggctatataattccaacaccagtgataaagcatttcataaatggcgttgaagaatgtggtaaatacattggtttttgttcaatgggtgtatcatgtcagcctatggagaatggtgaacttcgtagtggttttcagatgagttctgaaatgacaggggttcttgttagcaaaataaaccctctatcagatgctcacaaaattttgaagaaagatgatgttcttcttgcatttgatggtgttcctatagcaaatgatggaacagttccttttcggaacagggagagaatcactttcgaccatttggtttctatgaagaaaccagatgaaacagccttggttaaagttttgagagaggggaaagaacatgaattcagtatcacactaagacctctgcaaccactagttccagtgcatcaatttgatcagcttcccagttattatatatttgcgggcttcgtatttgtacctcttactcagccataccttcatgaatatggagaagattggtataacacttctccccgcacattgtgccatcgtgcattaaaagatttgcccaaaaaagccggtcaacaacttgtcattgtctctcaggtgttaatggatgatatcaacacaggatacgagcgtctcgcagaactacaagtgaataaagtgaacggagtagaagtgaataatctgagacatctatgtcagctcatagagaactgcaacaccgaaaagctgaggatagacttagacgatgagagtagggtaatcgtcttgaactaccaatccgcaaaaattgccacttctttgattttgaaacgacacagaatagcatcagcgatttccagcgatctgcttatcgaacaaaatctagaaaccgagttggcttcttgttctgcggtttgagctatcgccaacacgtatggcatgttgtacacttacaaattcattcataatttgtaaactacaatgttgtatactcataaacatttaggatttgataagtggcttgtcacgagcctgaattttg

SEQ ID NO: 98355 - protein, 589 aa, Arabidopsis thaliana
  peptide (1)..(589): Ceres Seq. ID no. 13593273
RKIMLLRSFRTVELLRRISTSSVSGYRTSPSLLQRCNGFQSYLPHRVTTTESPFPSHISRFCSSQSANSQNENRHTTLSSPVSSRRVNNRKISRRRKAGKSLSISPAADAVDLALDSVVKIFTVSTSPSYFLPWQNKSQRESMGSGFVISGRKIITNAHVVADHSFVLVRKHGSSIKHRAEVQAVGHECDLAILVVDSEVFWEGMNALELGDIPFLQEAVAVVGYPQGGDNISVTKGVVSRVEPTQYVHGATQLMAIQIDAAINPGNSGGPAIMGNKVAGVAFQNLSGAENIGYIIPTPVIKHFINGVEECGKYIGFCSMGVSCQPMENGELRSGFQMSSEMTGVLVSKINPLSDAHKILKKDDVLLAFDGVPIANDGTVPFRNRERITFDHLVSMKKPDETALVKVLREGKEHEFSITLRPLQPLVPVHQFDQLPSYYIFAGFVFVPLTQPYLHEYGEDWYNTSPRTLCHRALKDLPKKAGQQLVIVSQVLMDDINTGYERLAELQVNKVNGVEVNNLRHLCQLIENCNTEKLRIDLDDESRVIVLNYQSAKIATSLILKRHRIASAISSDLLIEQNLETELASCSAV

SEQ ID NO: 98356 - protein, 586 aa, Arabidopsis thaliana
  peptide (1)..(586): Ceres Seq. ID no. 13593274
MLLRSFRTVELLRRISTSSVSGYRTSPSLLQRCNGFQSYLPHRVTTTESPFPSHISRFCSSQSANSQNENRHTTLSSPVSSRRVNNRKISRRRKAGKSLSISPAADAVDLALDSVVKIFTVSTSPSYFLPWQNKSQRESMGSGFVISGRKIITNAHVVADHSFVLVRKHGSSIKHRAEVQAVGHECDLAILVVDSEVFWEGMNALELGDIPFLQEAVAVVGYPQGGDNISVTKGVVSRVEPTQYVHGATQLMAIQIDAAINPGNSGGPAIMGNKVAGVAFQNLSGAENIGYIIPTPVIKHFINGVEECGKYIGFCSMGVSCQPMENGELRSGFQMSSEMTGVLVSKINPLSDAHKILKKDDVLLAFDGVPIANDGTVPFRNRERITFDHLVSMKKPDETALVKVLREGKEHEFSITLRPLQPLVPVHQFDQLPSYYIFAGFVFVPLTQPYLHEYGEDWYNTSPRTLCHRALKDLPKKAGQQLVIVSQVLMDDINTGYERLAELQVNKVNGVEVNNLRHLCQLIENCNTEKLRIDLDDESRVIVLNYQSAKIATSLILKRHRIASAISSDLLIEQNLETELASCSAV

SEQ ID NO: 98357 - protein, 447 aa, Arabidopsis thaliana; identical to SEQ ID NO: 46883
  peptide (1)..(447): Ceres Seq. ID no. 13593275

SEQ ID NO: 98358 - DNA, 1686 bp, Arabidopsis thaliana
  misc_feature (1)..(1686): Ceres Seq. ID no. 13593302
  misc_feature (1)..(1686): Ortholog of  Ceres SEQ ID NO 13594209 as cited in SEQ ID NO 59089
  misc_feature (1)..(1686): Ortholog of  Ceres SEQ ID NO 13502874 as cited in SEQ ID NO 66298
  misc_feature (1)..(1686): Ortholog of  Ceres SEQ ID NO 12614124 as cited in SEQ ID NO 68392
aacactcaaaagtagtaacaactaagaatggaagatatcatcatcggcgtggtggctctcgccgcggttctccttttcttcctctaccaaaaaccgaaaaccaaacggtacaagctacctccagggccatcaccacttccggtgatcggaaacctccttcagcttcagaagcttaacccacaacgcttcttcgctggatgggccaaaaaatacggtccaatcttgtcatacaggataggaagcagaacaatggtggtgatatcttcagctgagctagctaaagagcttctcaagacgcaagatgtcaactttgcggaccggcctccacatcgtggccatgagttcatatcctacggcaggcgtgacatggcattaaaccactacacaccgtattaccgagagataaggaagatggggatgaaccacttgttctcaccaacacgtgtggccacctttaagcatgtacgagaggaagaggctaggaggatgatggataagatcaacaaggccgcggataaatccgaagtagtcgatataagtgagcttatgttgaccttcacgaactcggttgtgtgtagacaagcgttcgggaagaagtacaatgaagatggagaagagatgaagaggttcatcaagattctttatgggactcaaagcgttttggggaagatctttttctctgattttttcccatattgtggctttcttgatgatttatcaggcctcacagcttatatgaaagagtgtttcgaaagacaagacacttatattcaagaggttgtcaatgagacgcttgatcctaagagagtcaagcccgaaaccgagagcatgattgatctcttgatggggatctacaaagaacaacctttcgcttctgagtttactgtagataatgtcaaagccgtcatcttggatattgtagtggcgggaacagatactgcagctgcggcggttgtgtgggggatgacgtatctaatgaagtacccacaagtgttgaagaaagctcaagcagaagtgagagagtatatgaaagagaaaggttcaacgttcgttactgaagacgatgtcaagaaccttccttacttcagagccttagttaaagaaaccctaaggatcgaaccagtgattcctctccttatccctcgtgcttgcattcaagataccaagatcgccggttacgacatccccgcaggaacaacggtcaacgtcaacgcgtgggccgtgtcacgtgacgagaaagaatggggaccgaaccctgatgagtttaggcccgagaggtttcttgagaaggaagttgacttcaaaggcacggactacgagtttataccgttcgggtcaggccggagaatgtgcccgggaatgcgtcttggggccgcgatgcttgaggttccttatgcgaaccttctcctcagcttcaactttaaacttcctaatgggatgaaaccagatgatatcaatatggatgtcatgactggtcttgctatgcacaagtcgcagcatctcaagcttgttccagagaaagtgaacaagtattagctaatatatatcaaataaatctaccttctctgattatatagtatatgttcctccagtgtattctgtttcaatgtttggtttctttcttaaatggcaatcgtctctctatctttctcttcacattttgatatgaaggaagcaaattcacat

SEQ ID NO: 98359 - protein, 502 aa, Arabidopsis thaliana; identical to SEQ ID NO: 85413
  peptide (1)..(502): Ceres Seq. ID no. 13593303

SEQ ID NO: 98360 - protein, 428 aa, Arabidopsis thaliana; identical to SEQ ID NO: 85414
  peptide (1)..(428): Ceres Seq. ID no. 13593304

SEQ ID NO: 98361 - protein, 389 aa, Arabidopsis thaliana; identical to SEQ ID NO: 85415
  peptide (1)..(389): Ceres Seq. ID no. 13593305

SEQ ID NO: 98362 - DNA, 2472 bp, Arabidopsis thaliana
  misc_feature (1)..(2472): Ceres Seq. ID no. 13593380
  misc_feature (1)..(2472): Ortholog of  Ceres SEQ ID NO 13595870 as cited in SEQ ID NO 62101
  misc_feature (1)..(2472): Ortholog of  Ceres SEQ ID NO 13590241 as cited in SEQ ID NO 63878
  misc_feature (1)..(2472): Ortholog of  Ceres SEQ ID NO 13657939 as cited in SEQ ID NO 66349
tgcttaatctcctcttccttaaaaaccagaagatcctttgttccacgtttctcgtttgtagcttcttctctctcagaattcaattcgaattttgacaagtcttgacgaagaagaagaaacagagctgcttcaatggcttctaactcattactacgttcttcttcaaatttcttcttaggatcccatatcataatctcatctcccacccctaaaaccaccagaaaaccctctttccctttctccttcgtctcccgtgctaaataccaaatcactcgatcgtctcaagacgaaaattcgccaaatggtaaacccaattcgccattctcgtcgcaagtagccttagcagctattctactatcttcaatttcatcttcgccgctagctttagctgtagtggacgaaccagcttctccgtctgtcgttatagaatctcaagctgtgaagccatcgacgccatcgccattgttcattcagaacgagatacttaaggctcctagtcctaaatcatcggatctcccagaaggatcacagtggcgatacagcgagtttcttaacgctgtgaagaaagggaaagtcgagagagttagattcagcaaagatggttctgttgttcagcttactgccgtcgacaatcgccgtgcttcagtcatcgtccctaacgaccctgaccttattgatatcttggctatgaacggagttgatatatccgtctctgaaggagaatcctcaggcaatgacttgttcactgtcattggaaacttgattttcccgcttttggcctttggtggactcttcttgcttttcaggcgagctcagggaggccctggtggtggtcctggtggcttgggtggtcctatggatttcggacgttctaaatccaagttccaggaagtgcctgagactggtgtatcatttgcagatgttgctggggctgatcaagctaagttggagttacaggaagttgtggatttcttgaagaatcctgataagtacacagccttgggtgctaagattcctaaagggtgtttgcttgttggaccgcctggtacgggtaagacactcctggctagggcggtggctggggaagctggagtgccgttcttctcttgcgcggcctcggagttcgtagagctttttgtgggtgtgggtgcatcgagagttagggatttgttcgagaaggctaagtctaaagccccttgtattgtattcattgatgagattgacgctgtgggtaggcagagaggagctgggatgggaggaggaaatgatgagagagaacagactattaatcagctgttgacagagatggatggattttctggcaactctggtgtgatagttttggcagctacgaataggccggacgttcttgattcggctttgttgaggcctggaaggtttgatcgacaggtcacggtggataggcctgatgtggctggcagagtcaagattcttcaggttcattctagggggaaggcactcggtaaagatgtggactttgacaaggttgccagaaggacccctggtttcacgggtgctgacttacaaaacctgatgaatgaagcggcgattcttgcggctaggcgtgagcttaaggaaataagcaaggatgaaatctctgatgctcttgagaggatcattgctggacctgagaagaagaatgcagttgtctctgaagagaagaagagacttgttgcataccatgaggctggtcatgctctagtgggtgctcttatgccagaatatgatccggttgcaaagatttctatcattcctcgtggccaagctggtgggctcactttttttgctccaagcgaagaaagacttgagtctggattgtacagtaggagctaccttgagaatcaaatggctgttgcacttggcggaagggttgcagaggaggtgatctttggggatgagaatgtgacgactggagcatcaaatgatttcatgcaggtgtctcgtgtggcacgtcaaatgattgagagatttgggttcagcaaaaagattggacaagttgctgttggtggccctggtggaaatcccttcatgggtcaacaaatgtcatcacagaaagattactcaatggcaactgcggatattgtagatgctgaggtgcgagagttagttgagaaggcatacaagagagcaacggagatcataacaactcatattgatatcctacacaagcttgcacagctcctgatcgagaaagaaactgttgacggtgaagagttcatgagtctctttattgacggccaagctgagttgtatatttcttgattcctcaaagttgccattgcttagtgcttacaataccataagctaataagtatattcgtgttcatatgtgtcaccgattcagtactcaccaattcagtatatttgtgtatattccgttgttttagtgaatctaaatatactttgtaatgcaatgcaatttgtttaaagaaaagtaatttgatctggttt

SEQ ID NO: 98363 - protein, 716 aa, Arabidopsis thaliana
  peptide (1)..(716): Ceres Seq. ID no. 13593381
MASNSLLRSSSNFFLGSHIIISSPTPKTTRKPSFPFSFVSRAKYQITRSSQDENSPNGKPNSPFSSQVALAAILLSSISSSPLALAVVDEPASPSVVIESQAVKPSTPSPLFIQNEILKAPSPKSSDLPEGSQWRYSEFLNAVKKGKVERVRFSKDGSVVQLTAVDNRRASVIVPNDPDLIDILAMNGVDISVSEGESSGNDLFTVIGNLIFPLLAFGGLFLLFRRAQGGPGGGPGGLGGPMDFGRSKSKFQEVPETGVSFADVAGADQAKLELQEVVDFLKNPDKYTALGAKIPKGCLLVGPPGTGKTLLARAVAGEAGVPFFSCAASEFVELFVGVGASRVRDLFEKAKSKAPCIVFIDEIDAVGRQRGAGMGGGNDEREQTINQLLTEMDGFSGNSGVIVLAATNRPDVLDSALLRPGRFDRQVTVDRPDVAGRVKILQVHSRGKALGKDVDFDKVARRTPGFTGADLQNLMNEAAILAARRELKEISKDEISDALERIIAGPEKKNAVVSEEKKRLVAYHEAGHALVGALMPEYDPVAKISIIPRGQAGGLTFFAPSEERLESGLYSRSYLENQMAVALGGRVAEEVIFGDENVTTGASNDFMQVSRVARQMIERFGFSKKIGQVAVGGPGGNPFMGQQMSSQKDYSMATADIVDAEVRELVEKAYKRATEIITTHIDILHKLAQLLIEKETVDGEEFMSLFIDGQAELYIS

SEQ ID NO: 98364 - protein, 531 aa, Arabidopsis thaliana; identical to SEQ ID NO: 45525
  peptide (1)..(531): Ceres Seq. ID no. 13593382

SEQ ID NO: 98365 - protein, 475 aa, Arabidopsis thaliana; identical to SEQ ID NO: 45526
  peptide (1)..(475): Ceres Seq. ID no. 13593383

SEQ ID NO: 98366 - DNA, 1755 bp, Arabidopsis thaliana
  misc_feature (1)..(1755): Ceres Seq. ID no. 13593392
  misc_feature (1)..(1755): Ortholog of  Ceres SEQ ID NO 13595877 as cited in SEQ ID NO 67702
  misc_feature (1)..(1755): Ortholog of  Ceres SEQ ID NO 13654367 as cited in SEQ ID NO 67993
  misc_feature (1)..(1755): Ortholog of  Ceres SEQ ID NO 13622667 as cited in SEQ ID NO 0
atcccagtttttttttgtttttaatcactcaaccattaaaccccattttgatctctagttttttaaaagcaggagattttccttttcccagaaaagaaatttcccaaatcaaagtttcgagctttcacttctcgacttgcaaattctcgtcctttttactgaattcgatctgggtttttgtttttgattagtaaaataacaaaaaaaaaaaaaaggatttatcagaaatggctgcgagcgatgaagttaatcttattgagagcagaacagtggttcctctcaatacatgggttttaatatccaacttcaaagtagcctacaatatccttcgtcgccctgatggaacctttaaccgacacttagctgagtatctagaccgtaaagtcactgcaaacgccaatccggttgatggggttttctcgttcgatgtcttgattgatcgcaggatcaatcttctaagcagagtctatagaccagcttatgcagatcaagagcaacctcctagtattttagatctcgagaagcctgttgatggcgacattgtccctgttatattgttcttccatggaggtagctttgctcattcttctgcaaacagtgccatctacgatactctttgtcgcaggcttgttggtttgtgcaagtgtgttgttgtctctgtgaattatcggcgtgcaccagagaatccatacccttgtgcttatgatgatggttggattgctcttaattgggttaactcgagatcttggcttaaatccaagaaagactcaaaggtccatattttcttggctggtgatagctctggaggtaacatcgcgcataatgtggctttaagagcgggtgaatcgggaatcgatgttttggggaacattctgctgaatcctatgtttggtgggaatgagagaacggagtctgagaaaagtttggatgggaaatactttgtgacggttagagaccgcgattggtactggaaagcgtttttacccgagggagaagatagagagcatccagcgtgtaatccgtttagcccgagagggaaaagcttagaaggagtgagtttccccaagagtcttgtggttgtcgcgggtttggatttgattagagattggcagttggcatacgcggaagggctcaagaaagcgggtcaagaggttaagcttatgcatttagagaaagcaactgttgggttttacctcttgcctaataacaatcatttccataatgttatggatgagatttcggcgtttgtaaacgcggaatgttaacactgggttagagaaagaaggttgttttaacaaagccaagacatctttcaaactaacacacaggtgaatgtattgcctgtggattctctcgtttagttttgtttttgtgtttagtatctaagtgtgtggcggtctgcggcagcctttgtgatgactgtttaaacgctggattctgaaacgctaaagcttgtggaagaacagtgaggcgtttagagacttggaaaggaaccaagcactagtaaaaatttctcctttttttgtctgtaatatttggcatttagcttttacccttgagcctttttactaactaaaagctgattttttcagcatgagagtggtaattagatatctataaatatatatatttcaagaatgtaatgtttatacacaaattttagtgattttggtaaatgtatgtagggtctgcactctgcagttgtattgttgctcctctttttcattgtactctaatggattttacaaaaataag

SEQ ID NO: 98367 - protein, 345 aa, Arabidopsis thaliana; identical to SEQ ID NO: 29047
  peptide (1)..(345): Ceres Seq. ID no. 13593393

SEQ ID NO: 98368 - DNA, 1741 bp, Arabidopsis thaliana
  misc_feature (1)..(1741): Ceres Seq. ID no. 13593406
  misc_feature (1)..(1741): Ortholog of  Ceres SEQ ID NO 15171476 as cited in SEQ ID NO 55569
atgggaaagctcttggtgttaatgttagttgggatgttcttggcttttgaaagcttggaagctcttgaatatggagatgcacttaacaagtcaatcttgttctttgaaggccaacgatccggtaaactcccgactaaccaacgagttaaatggcgagccgattctgccctctctgatggttcacttgctaatgtgaatttaattggaggatattacgatgctggtgacaatgtaaaatttgtgtggccaatgtcatttaccacaaccttgttaagttgggctgcaattgaataccaaaatgagatttcttccgttaaccagctcggttatctccggtctactatcaaatggggaaccgatttcatcctacgcgctcatacatctcccaacatgctatatacccaggtgggagatggtaattcagatcatagttgttgggagaggccagaagatatggacacatcaagaactctctacagtatctcttcctcttcccctggttctgaagccgcgggtgaagccgcagccgctcttgcagcggcctcacttgttttcaaatcggtcgattctacttattcatccacactattaaaccatgcaaaaaccctatttgaatttgctgataagtacagaggttcttatcaagcatcttgccctttctactgctcctactccggctaccaggatgaattattatgggctgcggcttggctatataaagcaacaggagataaaatttacataaattatgttataagcaataaagattggagccaagccgttaatgaattcagttgggacaacaaattcgtcggcgctcaagctttactcgtatcggagttttacaacggggcaaatgacttggcaaaatttaagtccgatgttgaatccttcgtctgtgcaatgatgccaggaagtagctctcaacaaattaaaccaactcctggtggccttttgtttattagagacagtagcaacttacaatatgtaacaacggctacaactgttttgttccattactcaaaaactcttaccaaagccggggttggttcaatccagtgcggttcgaccaagttcaccgtatctcaaattcgaaattttgccaaatcacaggttgattatatccttggaaataatccaatgaaaatgtcttacatggtcggatttgggacaaagtatccaacacaacctcatcatagaggctcatctttaccatcgatccaatctaaaccggagaaaattgactgtaatggaggatattcatactacaattctgatacaccaaacccgaatgtgcatattggtgcaattgtgggcggaccgaattcatccgatcagtatagcgacaaaaaatcagattactctcatgctgagcccacaacttacatcaacgccgcctttattggacctgttgcagctctaatcagttcttccggataaactcacgtttagattggttgtggggaaacaaatattagcaaagaagaatcattactcatcaacaaactattatgactacaaacttaaataattagtcaggggatgtatcgtttgctttaaacatatatctctatatagatgtatatacctacacacatacacacactcacatatatatcattgaatcgtatatcttagctaaaatgaaaactatttaattacagatgtctatataggttttcttatatcattgtattgtatagattttttatgatacattatatatagttcattcttattt

SEQ ID NO: 98369 - protein, 479 aa, Arabidopsis thaliana
  peptide (1)..(479): Ceres Seq. ID no. 13593407
MGKLLVLMLVGMFLAFESLEALEYGDALNKSILFFEGQRSGKLPTNQRVKWRADSALSDGSLANVNLIGGYYDAGDNVKFVWPMSFTTTLLSWAAIEYQNEISSVNQLGYLRSTIKWGTDFILRAHTSPNMLYTQVGDGNSDHSCWERPEDMDTSRTLYSISSSSPGSEAAGEAAAALAAASLVFKSVDSTYSSTLLNHAKTLFEFADKYRGSYQASCPFYCSYSGYQDELLWAAAWLYKATGDKIYINYVISNKDWSQAVNEFSWDNKFVGAQALLVSEFYNGANDLAKFKSDVESFVCAMMPGSSSQQIKPTPGGLLFIRDSSNLQYVTTATTVLFHYSKTLTKAGVGSIQCGSTKFTVSQIRNFAKSQVDYILGNNPMKMSYMVGFGTKYPTQPHHRGSSLPSIQSKPEKIDCNGGYSYYNSDTPNPNVHIGAIVGGPNSSDQYSDKKSDYSHAEPTTYINAAFIGPVAALISSSG

SEQ ID NO: 98370 - protein, 472 aa, Arabidopsis thaliana
  peptide (1)..(472): Ceres Seq. ID no. 13593408
MLVGMFLAFESLEALEYGDALNKSILFFEGQRSGKLPTNQRVKWRADSALSDGSLANVNLIGGYYDAGDNVKFVWPMSFTTTLLSWAAIEYQNEISSVNQLGYLRSTIKWGTDFILRAHTSPNMLYTQVGDGNSDHSCWERPEDMDTSRTLYSISSSSPGSEAAGEAAAALAAASLVFKSVDSTYSSTLLNHAKTLFEFADKYRGSYQASCPFYCSYSGYQDELLWAAAWLYKATGDKIYINYVISNKDWSQAVNEFSWDNKFVGAQALLVSEFYNGANDLAKFKSDVESFVCAMMPGSSSQQIKPTPGGLLFIRDSSNLQYVTTATTVLFHYSKTLTKAGVGSIQCGSTKFTVSQIRNFAKSQVDYILGNNPMKMSYMVGFGTKYPTQPHHRGSSLPSIQSKPEKIDCNGGYSYYNSDTPNPNVHIGAIVGGPNSSDQYSDKKSDYSHAEPTTYINAAFIGPVAALISSSG

SEQ ID NO: 98371 - protein, 468 aa, Arabidopsis thaliana
  peptide (1)..(468): Ceres Seq. ID no. 13593409
MFLAFESLEALEYGDALNKSILFFEGQRSGKLPTNQRVKWRADSALSDGSLANVNLIGGYYDAGDNVKFVWPMSFTTTLLSWAAIEYQNEISSVNQLGYLRSTIKWGTDFILRAHTSPNMLYTQVGDGNSDHSCWERPEDMDTSRTLYSISSSSPGSEAAGEAAAALAAASLVFKSVDSTYSSTLLNHAKTLFEFADKYRGSYQASCPFYCSYSGYQDELLWAAAWLYKATGDKIYINYVISNKDWSQAVNEFSWDNKFVGAQALLVSEFYNGANDLAKFKSDVESFVCAMMPGSSSQQIKPTPGGLLFIRDSSNLQYVTTATTVLFHYSKTLTKAGVGSIQCGSTKFTVSQIRNFAKSQVDYILGNNPMKMSYMVGFGTKYPTQPHHRGSSLPSIQSKPEKIDCNGGYSYYNSDTPNPNVHIGAIVGGPNSSDQYSDKKSDYSHAEPTTYINAAFIGPVAALISSSG

SEQ ID NO: 98372 - DNA, 1538 bp, Arabidopsis thaliana
  misc_feature (1)..(1538): Ceres Seq. ID no. 13593435
  misc_feature (1)..(1538): Ortholog of  Ceres SEQ ID NO 14310547 as cited in SEQ ID NO 55132
  misc_feature (1)..(1538): Ortholog of  Ceres SEQ ID NO 13596261 as cited in SEQ ID NO 67817
  misc_feature (1)..(1538): Ortholog of  Ceres SEQ ID NO 13662360 as cited in SEQ ID NO 68830
gccggcaaattcttacgtttctccggcggttagaaaaatgacaccacagatcaaaactcatctcttgccgaagcaagaaccttcttcgtctgagaaccatggatcatcaacctccggcatcgttttcaacgtgtcaacgagtataatcggagccggaataatgtcgatgccggcggcgtttaaagttcttggaatagttccagcgtttttgattatcacgatcatagcttggctttccacaatttccgttggatttctgatgaaatcaactctcgccggagaatcaactacttacgccggagttatgaaagagtcgtttggtaaaacaggatccatcgctgtacagattgctacgatggttgctacttttggttgtatgattatattttcgattattataggagatgtgctttctggtaatgaaaatggtggtcctgaacatattggagttttgcaagaatggtttggttcttactggtggaacacgagaatcttcgctttgttatttgtctacggctttgtcttgcttccattggtcctgcgtagacgagtcgaaagactggcaattagttccgctgtatcgtttcttcttgcggttctatttgttgtcataagctcggtgctggcgatttccgcgctggtgaatggacaaacgaagaatccaagactgtttccggagttgagcaatggaggatcgttctggcaactcttcacagcttcccctgttatagttacagccttcacgtttcacttcaatgttcatccaattggattcgagctcaaagatccattacaagtgatcccagcaactaagatctctgtcatcttgtgtgctgctatctacttcgcaactggactctttggttaccttctctttggagatgcaactatgtcggatattctagtgaactttgaccagagctctggttcttccattggttctcttctcaacgacattgtcagactcagctacgtgcttcacctcatgctggtctttcctctcctgaacttctcattgagagcaaatctcgacgaactcttgtaccccaagaagccgtccttggaaaaagacacaaaaagattcatcggactcactctggctctactgatttgctgtttcttgtctgcaatcgctgtaccagacatttggtacttctttcagttcatgggatcaaccatcacagtctccatagcattcatatttccagccgccattgttctaaggaatatccatggtgtatcaacctcaagagagaagatcgtagctgcaataatgcttgttcttgctgttgccactagcattattgctatctcgacaaatttatacagcctcgcagcaaactagtcgttgaaaaaagttttgcaaacagtcccttccatgatcacttcaaagaaatctgtaaaattattagcttgccgtagcattcatatttatatctttgtgaaataggtttgtcagaaaatgcaatgtaatagctatacaaagtgcaatttttgttgctgcttgaaacagagaaagaggaaatgaacaactcttc

SEQ ID NO: 98373 - protein, 447 aa, Arabidopsis thaliana
  peptide (1)..(447): Ceres Seq. ID no. 13593436
PANSYVSPAVRKMTPQIKTHLLPKQEPSSSENHGSSTSGIVFNVSTSIIGAGIMSMPAAFKVLGIVPAFLIITIIAWLSTISVGFLMKSTLAGESTTYAGVMKESFGKTGSIAVQIATMVATFGCMIIFSIIIGDVLSGNENGGPEHIGVLQEWFGSYWWNTRIFALLFVYGFVLLPLVLRRRVERLAISSAVSFLLAVLFVVISSVLAISALVNGQTKNPRLFPELSNGGSFWQLFTASPVIVTAFTFHFNVHPIGFELKDPLQVIPATKISVILCAAIYFATGLFGYLLFGDATMSDILVNFDQSSGSSIGSLLNDIVRLSYVLHLMLVFPLLNFSLRANLDELLYPKKPSLEKDTKRFIGLTLALLICCFLSAIAVPDIWYFFQFMGSTITVSIAFIFPAAIVLRNIHGVSTSREKIVAAIMLVLAVATSIIAISTNLYSLAAN

SEQ ID NO: 98374 - protein, 435 aa, Arabidopsis thaliana; identical to SEQ ID NO: 48079
  peptide (1)..(435): Ceres Seq. ID no. 13593437

SEQ ID NO: 98375 - protein, 394 aa, Arabidopsis thaliana; identical to SEQ ID NO: 48080
  peptide (1)..(394): Ceres Seq. ID no. 13593438

SEQ ID NO: 98376 - DNA, 1682 bp, Arabidopsis thaliana
  misc_feature (1)..(1682): Ceres Seq. ID no. 13593475
  misc_feature (1)..(1682): Ortholog of  Ceres SEQ ID NO 14313491 as cited in SEQ ID NO 0
gatttcttcctctcttctctctagaaacatctttcatgcgttatcttctccaaaagctctgattctgattctgaatcatcctgaaaaaaacctagaaaaattctatcccacaaaatcttcaaagatccatggccgtaattatccctcgttcagatccaccgtcacgaatccatccggaaccaccacaaaccctagaaatcgaccatttcgatcatcttcctgactcaatcctcctcctcgttttcaacaaaatcggcgacgtcaaagctctcggaagatgctgcgtcgtttccagaagattccattctctcgttcctcaagtcgataacgtcgttgttcgtgtcgattgcgtaatctccgacgacgattcgtcatctttgtcatctatcaaatctcgctccggttcttccgctggttcgttctcggctatatttcgtcttgttgttggtggcattgttaagccgttacaagctttaggtcaattccttggtacgaagagatcatcatcatcatgtggtggttctggatcttcttcttcttcgttgtctattagtggagatgatgatggtggagagatcgaacaaggcggtgttacgcatcattcacctactcaggttttgaaaaacttcgatgagattcgttacttaagaattgagcttcctagtggtgaattagggattgatgatggagttttgttgaaatggagagctgaatttggttctactcttgataattgtgtgattctcggtgcttcttcagtgattccaccaaatccaatgagagtttctcaagcttgtgatactactacagtcgttgaagctcccggttctggctccgatgataatgggagtataccggaatcgttttacacaaacggaggtttgaaattgcgtgttgtatggacgattagctctttgattgctgcatcagcacgacattacttgttacaaccgataatcgcggagcataagacgcttgatagtttagtgctcactgattcagatgggcaaggtgtgctctgtatgaacagagatcagctagaagagcttagggtgaaaccattagcagcttcatcggcttcgaagaggacacttgtgcctgctctgaatatgagactatggtatgctccaaccttggaattgcctgatggaactgtgttaaaaggtgcgactttggttgcgataagaccgagtgaatcgaaaaaggaagtgtctgatatctcttgggtgtcttcggcttttgaggagccttatgagacggctgctaagatgctggttaaaagaaggacttactgtcttgaaatgaactcgttctagcttgaatggtttcagtcggaatctgagagaactggcaaccctgtggcgaattcaggaaattacaattaaaagcatataatggggagaagcagagaatgaaataaaatcgaagttttgatgaatcaagaaacaagttttgctgcctactactactgcatctgctagctagttttttcattgaagcatatgcctttgcaggatctcgcaatcatatataatatatatcaacaaattacagatatcatgtaagagtttttcttttcttttttctgtctttttcttctcctttgcttgctcttctctatttatgtgaatattgtaggtattgcttattcccctgtcattatacaagttatttaagattgt

SEQ ID NO: 98377 - protein, 395 aa, Arabidopsis thaliana; identical to SEQ ID NO: 49722
  peptide (1)..(395): Ceres Seq. ID no. 13593476

SEQ ID NO: 98378 - DNA, 899 bp, Arabidopsis thaliana
  misc_feature (1)..(899): Ceres Seq. ID no. 13593488
  misc_feature (1)..(899): Ortholog of  Ceres SEQ ID NO 13639267 as cited in SEQ ID NO 59777
  misc_feature (1)..(899): Ortholog of  Ceres SEQ ID NO 12624280 as cited in SEQ ID NO 61587
gaggagaagataaatccgatctaggtctcttcttccccaatctctctgtgtctctctcgatcgaagaaagaagacaatggacaaaggcaaagcagtgatgggtactggtcggagatgggccgtcgaattctccgatcaatctactgttccatcttcccgtgacatcctcgatccacctggcttctctcgtgcctctcaggaacaggatgattcagcaaacagccgccaaaagaaagacgctgaagctacttggaaacttcagaaagcgtgggaagtagcgcaatctccatttaagaatttgatgatgatgggtttcatgatgtggatggctggaaacacagttcatctttttagtattggtattactttctctgctctttggcagcctatcagtgctcttcagagtgttggaaagatttttgagccattcaaggataacaaagtggaactacttatgccgaaattagtgttccttgccctaaaccttggagggctagctttgggtgtctggaagcttaacactttggggcttcttccaacacatgcatcagattgggtttcatctctaccccctcctcaggaagttgaacactcgggcggaggatttgttttccactgatgaatcagcgtctcttgtattttaaaataatccgctaaaaccgcgcgacaacgacaacacttttgtgagataactgcaacagttacttaagtgatatgaacctccctcatcttatgatattcttgtagcattttcaaaactcagaaaccatagtttttacactttttagtatgatgctcattgttcatcataactatgaatgtattattggcactgaagggaccttatctcccagctttttgtttctcatctttttagacaggaatggataaaatatttc

SEQ ID NO: 98379 - protein, 180 aa, Arabidopsis thaliana; identical to SEQ ID NO: 50318
  peptide (1)..(180): Ceres Seq. ID no. 13593489

SEQ ID NO: 98380 - protein, 173 aa, Arabidopsis thaliana; identical to SEQ ID NO: 50319
  peptide (1)..(173): Ceres Seq. ID no. 13593490

SEQ ID NO: 98381 - protein, 105 aa, Arabidopsis thaliana; identical to SEQ ID NO: 50320
  peptide (1)..(105): Ceres Seq. ID no. 13593491

SEQ ID NO: 98382 - DNA, 1580 bp, Arabidopsis thaliana
  misc_feature (1)..(1580): Ceres Seq. ID no. 13593495
  misc_feature (1)..(1580): Ortholog of  Ceres SEQ ID NO 13654451 as cited in SEQ ID NO 67881
aaaccagaccaaaaatatattctctcggttttttccagagcgtatattcaaattcttccttaaaaagtaaaaattaatctgattctctctactactactactacgatgggtgagaaaaaggaagaaacggcgacgaaacctcaaggagagaagaaacctaccgatggtggaatcaccaccgtcgttatgaagcttgatatgcattgtgaaggttgcggcaaaaaaatcaaacgcatcttcaaacatttcaaaggtgtggaagatgtgaagattgattataagagtaacaaattgacggtgatcggaaacgtagatccagtggaagttcgtgataaagtggccgacaaaattaagagaccagtcgaacttgtctctacagtagcgccgccgaagaaagagacacctccttcatcaggcggtgcagagaagaagccttctccggcagcggaggagaaaccggctgagaagaaaccagccgccgttgagaaacccggtgagaaaaaagaagagaagaagaaagaggaaggagagaagaaagcttctcctccaccaccacctaaagagagtactgtggttttgaagaccaagttacattgtgaaggttgcgaacacaaaatcaaaagaatagtcaacaaaattaaaggggttaattcggttgctattgatagtgccaaggatttggttatagttaaggggatcattgacgtgaaacaactcactccttatcttaacgagaagcttaaacgcacggtggaagttgttccggccaaaaaggatgacggagcaccagtggcagctgcagcggcggctccagctggcggtgagaagaaggacaaagttgctggtgaaaagaaagagattaaagatgttggagaaaagaaagtcgacggtggtggtgagaagaagaaagaagttgctgttggcggcggtggaggaggaggtggaggtggaggagacggtggtgctatggatgtgaagaaatcggagtataacggttacggttatcctccacagccgatgtattactacccagaaggacaagtatacggtcaacaacattacatgatgcaaggtcaatcatcgcaatcgtatgtacaagaaccgtattcgaaccaaggatacgtgcaagaatcgtatatgaaccaaggttacggtcaagggtatggacaagaagctccaccaccaccatatatgaaccaacaaggttacgcagatccttatggtcacatgcgtgcgcctgagttgtttagtgatgagaatccaaatgggtgttctgtgatgtgagtaaaacaaatggggaggaaaatgtaaataactaaaacaatatagggtgagaatgttagctatgacaaaaatggtatactacgaaagcacggaaacttccgagtccggtaatctaaaccggcaagattggccggttagaaccggtttttgagaggcgtggattggttggttggtttatttcttctatataggtactataattttgtatcgtaataatcttctgttttataactttttgtgctatgtaattgtcaggtgatcataatgaaaagaaaacatattagttctgattaatt

SEQ ID NO: 98383 - protein, 392 aa, Arabidopsis thaliana; identical to SEQ ID NO: 50394
  peptide (1)..(392): Ceres Seq. ID no. 13593496

SEQ ID NO: 98384 - protein, 365 aa, Arabidopsis thaliana; identical to SEQ ID NO: 50395
  peptide (1)..(365): Ceres Seq. ID no. 13593497

SEQ ID NO: 98385 - protein, 361 aa, Arabidopsis thaliana
  peptide (1)..(361): Ceres Seq. ID no. 13593498
MHCEGCGKKIKRIFKHFKGVEDVKIDYKSNKLTVIGNVDPVEVRDKVADKIKRPVELVSTVAPPKKETPPSSGGAEKKPSPAAEEKPAEKKPAAVEKPGEKKEEKKKEEGEKKASPPPPPKESTVVLKTKLHCEGCEHKIKRIVNKIKGVNSVAIDSAKDLVIVKGIIDVKQLTPYLNEKLKRTVEVVPAKKDDGAPVAAAAAAPAGGEKKDKVAGEKKEIKDVGEKKVDGGGEKKKEVAVGGGGGGGGGGGDGGAMDVKKSEYNGYGYPPQPMYYYPEGQVYGQQHYMMQGQSSQSYVQEPYSNQGYVQESYMNQGYGQGYGQEAPPPPYMNQQGYADPYGHMRAPELFSDENPNGCSVM

SEQ ID NO: 98386 - DNA, 1451 bp, Arabidopsis thaliana
  misc_feature (1)..(1451): Ceres Seq. ID no. 13593503
  misc_feature (1)..(1451): Ortholog of  Ceres SEQ ID NO 14303487 as cited in SEQ ID NO 54521
  misc_feature (1)..(1451): Ortholog of  Ceres SEQ ID NO 14316302 as cited in SEQ ID NO 55232
  misc_feature (1)..(1451): Ortholog of  Ceres SEQ ID NO 14308274 as cited in SEQ ID NO 55597
  misc_feature (1)..(1451): Ortholog of  Ceres SEQ ID NO 13659710 as cited in SEQ ID NO 60808
aagctaacaacattcacaaggagagagaaacaataaagggcaaggaaaaagatcaaacctttttctttctttctttctcctgctctctgcaatttagaagaagatcgaagaatttgtttgttgtttatcttcttctataaaaacaaaccgtggggtctgttttcatttctggccttgcgattccgataaaactctcagcttcccattcaatccaatccaattccacttctcaaacatatatataattctatatttttgagagacagtttactttttctccttctctctctctctctctttctctttctctgtctctttggcttttctcctcctgttctcatggaagcttcacccaatgatcgacttcattttggcaaaatgggtttcgggtgtaagcattacaagaggagatgccaaatcagagctccatgttgcaacgaagtcttcgattgtcgccattgtcacaacgagagcactagcacattgcgcaatatctacgaccgtcacgatcttgttcgtcaagacgttaaacaagtgatttgttctgtttgcgatacagagcagccggcagctcaagtttgttcgaattgtggtgtcaacatgggagaatatttttgcagcatctgcatattctatgatgatgatactgaaaaacaacagtttcattgcgatgactgtggaatttgcagagttggtgggcgtgagaatttcttccattgcaagaagtgtggatcttgttatgcggttggtctgcgcaacaaccatcgctgcgttgagaattcaatgcgtcatcactgtcccatttgttacgagtacctttttgactctctaaaggacacaaatgtgatgaaatgcgggcacacaatgcacgtagaatgctacaacgagatgatcaaacgtgacaagttttgttgtccaatttgctcgaggtcagtgattgatatgtctaaaacatggcagagactcgatgaagagatcgaagccactgctatgccttcagattaccgtgacaagaaggtttggatactttgcaacgattgtaacgacacaacagaagtgcacttccacataatcggacagaaatgtggacattgcagatcatacaacacacgagcgattgcgcctcctgttcttcctcaatgacaaaaccaagatcttcccatgtattgcctccagaaagcaagcaagaactttttgttgctaaaaaaactgaggcatagattgatgatcataacaaagaaagaaaaagaaaaagattgatgatcaatttgatcattggtcacaaaagcaaaacacacatttgtcttcttcatttgatttgttgttgttcttatactgttacatttttccatttgtgtttgggtgttggaaatgcgaggattatgtataatatactctatattcttgatccaggaaaagttacctggataatatgttttcagggatttttt

SEQ ID NO: 98387 - protein, 267 aa, Arabidopsis thaliana
  peptide (1)..(267): Ceres Seq. ID no. 13593504
MEASPNDRLHFGKMGFGCKHYKRRCQIRAPCCNEVFDCRHCHNESTSTLRNIYDRHDLVRQDVKQVICSVCDTEQPAAQVCSNCGVNMGEYFCSICIFYDDDTEKQQFHCDDCGICRVGGRENFFHCKKCGSCYAVGLRNNHRCVENSMRHHCPICYEYLFDSLKDTNVMKCGHTMHVECYNEMIKRDKFCCPICSRSVIDMSKTWQRLDEEIEATAMPSDYRDKKVWILCNDCNDTTEVHFHIIGQKCGHCRSYNTRAIAPPVLPQ

SEQ ID NO: 98388 - protein, 254 aa, Arabidopsis thaliana
  peptide (1)..(254): Ceres Seq. ID no. 13593505
MGFGCKHYKRRCQIRAPCCNEVFDCRHCHNESTSTLRNIYDRHDLVRQDVKQVICSVCDTEQPAAQVCSNCGVNMGEYFCSICIFYDDDTEKQQFHCDDCGICRVGGRENFFHCKKCGSCYAVGLRNNHRCVENSMRHHCPICYEYLFDSLKDTNVMKCGHTMHVECYNEMIKRDKFCCPICSRSVIDMSKTWQRLDEEIEATAMPSDYRDKKVWILCNDCNDTTEVHFHIIGQKCGHCRSYNTRAIAPPVLPQ

SEQ ID NO: 98389 - protein, 180 aa, Arabidopsis thaliana
  peptide (1)..(180): Ceres Seq. ID no. 13593506
MGEYFCSICIFYDDDTEKQQFHCDDCGICRVGGRENFFHCKKCGSCYAVGLRNNHRCVENSMRHHCPICYEYLFDSLKDTNVMKCGHTMHVECYNEMIKRDKFCCPICSRSVIDMSKTWQRLDEEIEATAMPSDYRDKKVWILCNDCNDTTEVHFHIIGQKCGHCRSYNTRAIAPPVLPQ

SEQ ID NO: 98390 - DNA, 1242 bp, Arabidopsis thaliana
  misc_feature (1)..(1242): Ceres Seq. ID no. 13593507
  misc_feature (1)..(1242): Ortholog of  Ceres SEQ ID NO 14304502 as cited in SEQ ID NO 53212
  misc_feature (1)..(1242): Ortholog of  Ceres SEQ ID NO 15179323 as cited in SEQ ID NO 0
atgtttcagagattcaccttctttctaacagctcttctcattccatgtattctaattatccttagcccttcatatgccctcaaggaaggagaaacatgcatcgtgagcaagaattgtgatcggggattacactgtgaatcgtgtctcgccagcgatagtttccgacctagatgctcccgaatgcaacccattaacccgaccaccaaggtaaaagggttgccttacaacaagtactcatggttaacaacccacaattcatttgctcgaatgggtgcaaaatcaggcactggctctatgattcttgcaccttccaaccaacaagattcaatcacaagccaactccttaatggtgttagagggtttatgcttgacttgtacgacttccaaaacgatatatggctttgccattcttacggtggaaattgtttcaattacaccgcattccaacccgcggttaacattttaaaggagtttcaagtgtttctagacaagaacaaggatgttgttgtaacgcttatcctcgaggactatgtgaaatctcctaatggtttaaccagagtgtttgatgcatccggattacgaaacttcatgtttccggtatcaagaatgcctaaaaacggagaagattggcctactcttgatgatatgatatgtcagaaccaacgattgcttgttttcacgtctaatcctcaaaaagaagcgtcggagggaattgcgtttatgtggagatacatgatagagaatcaatatggagatggagggatgaaggctggagtgtgtaccaatagaccggaatcagttgcaatgggagatagatcaagatcacttattctagtcaattattttccggatactgcagatgtgatcggatcttgtaagcagaactctgctcctcttcttgacaccgtcaaaaactgtcaagaagcctcgggaaaacgttggcctaacttcattgcagtcgatttctacaagagaagcgatggtggaggagctccaaaagcagtggatgttgcaaacggtcatgcagtttgcggctgcgaagatatagccgcttgtaaagagaacatgccatatgggacgtgtgagaagcaagaagagaagaaaccggaatcaaacctaatgatgatagcaaaacttaccgcggaagcgactaaaggctatggccacccatctaccaaaccgaccctacttgggctttctgtgtttgttgtaacctttgtctcacttctctcaactttttga

SEQ ID NO: 98391 - protein, 413 aa, Arabidopsis thaliana
  peptide (1)..(413): Ceres Seq. ID no. 13593508
MFQRFTFFLTALLIPCILIILSPSYALKEGETCIVSKNCDRGLHCESCLASDSFRPRCSRMQPINPTTKVKGLPYNKYSWLTTHNSFARMGAKSGTGSMILAPSNQQDSITSQLLNGVRGFMLDLYDFQNDIWLCHSYGGNCFNYTAFQPAVNILKEFQVFLDKNKDVVVTLILEDYVKSPNGLTRVFDASGLRNFMFPVSRMPKNGEDWPTLDDMICQNQRLLVFTSNPQKEASEGIAFMWRYMIENQYGDGGMKAGVCTNRPESVAMGDRSRSLILVNYFPDTADVIGSCKQNSAPLLDTVKNCQEASGKRWPNFIAVDFYKRSDGGGAPKAVDVANGHAVCGCEDIAACKENMPYGTCEKQEEKKPESNLMMIAKLTAEATKGYGHPSTKPTLLGLSVFVVTFVSLLSTF

SEQ ID NO: 98392 - protein, 353 aa, Arabidopsis thaliana
  peptide (1)..(353): Ceres Seq. ID no. 13593509
MQPINPTTKVKGLPYNKYSWLTTHNSFARMGAKSGTGSMILAPSNQQDSITSQLLNGVRGFMLDLYDFQNDIWLCHSYGGNCFNYTAFQPAVNILKEFQVFLDKNKDVVVTLILEDYVKSPNGLTRVFDASGLRNFMFPVSRMPKNGEDWPTLDDMICQNQRLLVFTSNPQKEASEGIAFMWRYMIENQYGDGGMKAGVCTNRPESVAMGDRSRSLILVNYFPDTADVIGSCKQNSAPLLDTVKNCQEASGKRWPNFIAVDFYKRSDGGGAPKAVDVANGHAVCGCEDIAACKENMPYGTCEKQEEKKPESNLMMIAKLTAEATKGYGHPSTKPTLLGLSVFVVTFVSLLSTF

SEQ ID NO: 98393 - protein, 324 aa, Arabidopsis thaliana; identical to SEQ ID NO: 50550
  peptide (1)..(324): Ceres Seq. ID no. 13593510

SEQ ID NO: 98394 - DNA, 4114 bp, Arabidopsis thaliana
  misc_feature (1)..(4114): Ceres Seq. ID no. 13593532
  misc_feature (1)..(4114): Ortholog of  Ceres SEQ ID NO 15179695 as cited in SEQ ID NO 193
taggcatgaagacactctcattctctctctcttctcaccacttcaaaacaagacactcgtaaaagagttcttgaacttcacaaaacaattgtcagattttcaagaaaaactttataaaacaaaaaacatttcattctttctctctctctctctcactgctcaatgatctcgttttctcactaaaccaactcgtttcttcttactttctttaactcggatctacaaaaaaccatgtcggaaactaacacaaccgatgccaagactgttccagcagaagcagagaagaagaaagaacagagtttaccattctttaaactcttttctttcgctgataaatttgattatctcttaatgttcgttggttctcttggtgccattgttcatggctcttccatgcctgtcttctttttactctttggtcaaatggttaatggatttggtaaaaaccaaatggatttacatcaaatggttcatgaagtctctagatattctctatatttcgtctacttgggtttggtcgtttgcttctcttcttacgcagagatagcatgttggatgtattctggagaaagacaagtagcagcattaaggaagaaatatcttgaagcagtattaaaacaagacgttgggttctttgatactgatgctagaactggtgacattgtctttagtgtttctactgatactcttcttgttcaagatgccattagtgaaaaggttggaaactttatacattacctctcaacatttttggcgggattagtagttggatttgtatcagcatggaaattagctttgttaagtgttgctgtgattcccggaatcgctttcgccggaggtttatacgcttatacactcaccggaattacttcaaagagccgtgaatcttatgctaacgccggtgttatcgccgagcaggcaattgctcaagttcgaactgtttattcttatgttggagagagtaaggcacttaatgcgtattcggatgcgattcagtatacgcttaagctcggttataaagcggggatggctaaagggttgggtttaggatgtacttatggaatagcttgtatgtcatgggctttggtgttttggtatgctggagtttttattcggaatggacaaaccgatggaggaaaggcgtttactgctatattctctgctattgttggtggaatgagtttggggcaatctttctcgaatcttggggcgtttagtaaaggtaaagcggctggttataagttgatggagataattaaccagagaccgacgataattcaagacccgttggatggaaaatgtttggatcaagttcatgggaacattgagtttaaagatgtgacttttagctatccttcacggcctgatgttatgatcttcaggaactttaatattttcttcccttctgggaaaactgtggcggttgttggtgggagtggctctggaaagagtactgttgtttccctcattgagagattctatgatccaaacagcgggcaaattctgttggatggtgttgagataaagacgcttcagttgaagtttttgcgtgaacaaatcgggcttgtgaatcaagaacctgcgctctttgccactactatactagagaacatactctatggaaagcctgatgcaacaatggttgaagttgaagctgctgcttccgctgcgaatgcgcatagtttcattacattacttcctaaaggctacgacacacaggttggagaacgtggtgttcaactctcaggtggacagaagcagagaattgcaattgctagggcgatgttgaaagacccaaagattctgttactagatgaagctacaagcgctcttgatgctagctctgagagcattgttcaggaagctttagacagagtcatggtggggaggaccactgttgttgttgctcatcgtctctgcaccatcagaaatgttgattccattgccgtgatacagcaaggccaagttgttgaaaccggaacacatgaagaactcattgccaaatccggtgcttacgcatccctcatcaggtttcaggaaatggttggtactcgagatttctcaaacccgtcaactcgtcgcactcgttcaacccgtttgagccattcactgtcaacgaaatcactcagtttaagatcaggaagtttgaggaatctgagctattcttacagcactggagctgatggtcggatagagatgatttcaaatgcagagactgaccgaaagactcgtgcccctgaaaattacttctacaggcttctcaagcttaattcaccggaatggccttactcaatcatgggagcagtaggctcaattctttctggtttcattggtcctacatttgctattgtgatgagcaacatgatcgaagtcttctactacacagactatgattcaatggaaaggaaaacaaaagagtatgtcttcatctacattggtgctggtctctatgctgtgggtgcttatttgatccaacattacttctttagcatcatgggagaaaacctcacaacaagagtaagaagaatgatgctctcagctatcttgagaaacgaagttggttggttcgatgaggatgaacacaactcaagcctgatcgctgcacgtttagctactgatgcagcagatgttaaatccgctatagccgagagaatctcagtaattctacaaaacatgacttcacttctcacatccttcatagtcgccttcatagtagaatggagagtctcacttctcatcttaggcacattcccacttctagtcctcgctaactttgctcagcaactatctctgaagggttttgctggagacacagctaaggctcatgcaaagacttcaatgattgctggtgaaggagtcagtaacattagaaccgtagcagctttcaatgcacagagcaagattctctctttgttctgtcatgagcttcgtgtacctcagaaaagaagcttataccgaagtcaaacctcgggtttcctatttggcctctcgcagcttgctctctatggttctgaggctttaattctctggtatggtgcccaccttgtgagtaaaggcgtgtcaaccttttccaaagtgatcaaagtgtttgtggttttggtcattactgcaaactctgttgctgaaactgtcagtcttgctcctgaaattattcggggaggtgaagctgttggttcggttttctcggtcttggacaggcagaccaggattgacccggatgatgctgatgctgatcccgtggagacgatccgtggagacattgagtttaggcatgttgatttcgcttacccttcaagacccgacgtcatggttttcagggactttaacctcagaattcgagctggacatagccaagctcttgtgggcgcgagtgggtcagggaagagttctgtaattgcgatgatcgagcggttttacgaccctcttgctggaaaagtcatgattgatggcaaagacatccgccggctaaacctgaaatctctaaggctcaaaatcggtcttgttcaacaagaaccagctctcttcgcagcaacgatcttcgacaacatcgcctatggtaaagatggtgcaactgaatccgaggtaattgatgcagctcgagccgcaaatgctcacggtttcatcagtggtttacctgaaggttacaaaactccagtaggcgaaagaggagtgcagttatcaggtggacagaaacagaggatcgcgatagcaagagctgtgctcaagaaccctacagtgttgcttctagacgaagcaactagcgcactagatgcagaatcagaatgcgtgctgcaagaggcgttagagaggctcatgagaggtcggaccaccgtggtagttgctcaccgcttgtccaccataagaggtgttgattgcattggtgtgattcaagacgggcggattgtggagcaaggcagccattcagagctcgttagccgaccagagggagcttattcaaggctgttacagcttcaaacacataggatttgaagcttgatcatggattaaaaacaaaaaatcggtttgtgtaattttttttatattaaaactttaatttggaagatttctatggactataacgataatatgaataggtgtagataatgaagctttt

SEQ ID NO: 98395 - protein, 1252 aa, Arabidopsis thaliana
  peptide (1)..(1252): Ceres Seq. ID no. 13593533
MSETNTTDAKTVPAEAEKKKEQSLPFFKLFSFADKFDYLLMFVGSLGAIVHGSSMPVFFLLFGQMVNGFGKNQMDLHQMVHEVSRYSLYFVYLGLVVCFSSYAEIACWMYSGERQVAALRKKYLEAVLKQDVGFFDTDARTGDIVFSVSTDTLLVQDAISEKVGNFIHYLSTFLAGLVVGFVSAWKLALLSVAVIPGIAFAGGLYAYTLTGITSKSRESYANAGVIAEQAIAQVRTVYSYVGESKALNAYSDAIQYTLKLGYKAGMAKGLGLGCTYGIACMSWALVFWYAGVFIRNGQTDGGKAFTAIFSAIVGGMSLGQSFSNLGAFSKGKAAGYKLMEIINQRPTIIQDPLDGKCLDQVHGNIEFKDVTFSYPSRPDVMIFRNFNIFFPSGKTVAVVGGSGSGKSTVVSLIERFYDPNSGQILLDGVEIKTLQLKFLREQIGLVNQEPALFATTILENILYGKPDATMVEVEAAASAANAHSFITLLPKGYDTQVGERGVQLSGGQKQRIAIARAMLKDPKILLLDEATSALDASSESIVQEALDRVMVGRTTVVVAHRLCTIRNVDSIAVIQQGQVVETGTHEELIAKSGAYASLIRFQEMVGTRDFSNPSTRRTRSTRLSHSLSTKSLSLRSGSLRNLSYSYSTGADGRIEMISNAETDRKTRAPENYFYRLLKLNSPEWPYSIMGAVGSILSGFIGPTFAIVMSNMIEVFYYTDYDSMERKTKEYVFIYIGAGLYAVGAYLIQHYFFSIMGENLTTRVRRMMLSAILRNEVGWFDEDEHNSSLIAARLATDAADVKSAIAERISVILQNMTSLLTSFIVAFIVEWRVSLLILGTFPLLVLANFAQQLSLKGFAGDTAKAHAKTSMIAGEGVSNIRTVAAFNAQSKILSLFCHELRVPQKRSLYRSQTSGFLFGLSQLALYGSEALILWYGAHLVSKGVSTFSKVIKVFVVLVITANSVAETVSLAPEIIRGGEAVGSVFSVLDRQTRIDPDDADADPVETIRGDIEFRHVDFAYPSRPDVMVFRDFNLRIRAGHSQALVGASGSGKSSVIAMIERFYDPLAGKVMIDGKDIRRLNLKSLRLKIGLVQQEPALFAATIFDNIAYGKDGATESEVIDAARAANAHGFISGLPEGYKTPVGERGVQLSGGQKQRIAIARAVLKNPTVLLLDEATSALDAESECVLQEALERLMRGRTTVVVAHRLSTIRGVDCIGVIQDGRIVEQGSHSELVSRPEGAYSRLLQLQTHRI

SEQ ID NO: 98396 - protein, 1212 aa, Arabidopsis thaliana
  peptide (1)..(1212): Ceres Seq. ID no. 13593534
MFVGSLGAIVHGSSMPVFFLLFGQMVNGFGKNQMDLHQMVHEVSRYSLYFVYLGLVVCFSSYAEIACWMYSGERQVAALRKKYLEAVLKQDVGFFDTDARTGDIVFSVSTDTLLVQDAISEKVGNFIHYLSTFLAGLVVGFVSAWKLALLSVAVIPGIAFAGGLYAYTLTGITSKSRESYANAGVIAEQAIAQVRTVYSYVGESKALNAYSDAIQYTLKLGYKAGMAKGLGLGCTYGIACMSWALVFWYAGVFIRNGQTDGGKAFTAIFSAIVGGMSLGQSFSNLGAFSKGKAAGYKLMEIINQRPTIIQDPLDGKCLDQVHGNIEFKDVTFSYPSRPDVMIFRNFNIFFPSGKTVAVVGGSGSGKSTVVSLIERFYDPNSGQILLDGVEIKTLQLKFLREQIGLVNQEPALFATTILENILYGKPDATMVEVEAAASAANAHSFITLLPKGYDTQVGERGVQLSGGQKQRIAIARAMLKDPKILLLDEATSALDASSESIVQEALDRVMVGRTTVVVAHRLCTIRNVDSIAVIQQGQVVETGTHEELIAKSGAYASLIRFQEMVGTRDFSNPSTRRTRSTRLSHSLSTKSLSLRSGSLRNLSYSYSTGADGRIEMISNAETDRKTRAPENYFYRLLKLNSPEWPYSIMGAVGSILSGFIGPTFAIVMSNMIEVFYYTDYDSMERKTKEYVFIYIGAGLYAVGAYLIQHYFFSIMGENLTTRVRRMMLSAILRNEVGWFDEDEHNSSLIAARLATDAADVKSAIAERISVILQNMTSLLTSFIVAFIVEWRVSLLILGTFPLLVLANFAQQLSLKGFAGDTAKAHAKTSMIAGEGVSNIRTVAAFNAQSKILSLFCHELRVPQKRSLYRSQTSGFLFGLSQLALYGSEALILWYGAHLVSKGVSTFSKVIKVFVVLVITANSVAETVSLAPEIIRGGEAVGSVFSVLDRQTRIDPDDADADPVETIRGDIEFRHVDFAYPSRPDVMVFRDFNLRIRAGHSQALVGASGSGKSSVIAMIERFYDPLAGKVMIDGKDIRRLNLKSLRLKIGLVQQEPALFAATIFDNIAYGKDGATESEVIDAARAANAHGFISGLPEGYKTPVGERGVQLSGGQKQRIAIARAVLKNPTVLLLDEATSALDAESECVLQEALERLMRGRTTVVVAHRLSTIRGVDCIGVIQDGRIVEQGSHSELVSRPEGAYSRLLQLQTHRI

SEQ ID NO: 98397 - protein, 1198 aa, Arabidopsis thaliana
  peptide (1)..(1198): Ceres Seq. ID no. 13593535
MPVFFLLFGQMVNGFGKNQMDLHQMVHEVSRYSLYFVYLGLVVCFSSYAEIACWMYSGERQVAALRKKYLEAVLKQDVGFFDTDARTGDIVFSVSTDTLLVQDAISEKVGNFIHYLSTFLAGLVVGFVSAWKLALLSVAVIPGIAFAGGLYAYTLTGITSKSRESYANAGVIAEQAIAQVRTVYSYVGESKALNAYSDAIQYTLKLGYKAGMAKGLGLGCTYGIACMSWALVFWYAGVFIRNGQTDGGKAFTAIFSAIVGGMSLGQSFSNLGAFSKGKAAGYKLMEIINQRPTIIQDPLDGKCLDQVHGNIEFKDVTFSYPSRPDVMIFRNFNIFFPSGKTVAVVGGSGSGKSTVVSLIERFYDPNSGQILLDGVEIKTLQLKFLREQIGLVNQEPALFATTILENILYGKPDATMVEVEAAASAANAHSFITLLPKGYDTQVGERGVQLSGGQKQRIAIARAMLKDPKILLLDEATSALDASSESIVQEALDRVMVGRTTVVVAHRLCTIRNVDSIAVIQQGQVVETGTHEELIAKSGAYASLIRFQEMVGTRDFSNPSTRRTRSTRLSHSLSTKSLSLRSGSLRNLSYSYSTGADGRIEMISNAETDRKTRAPENYFYRLLKLNSPEWPYSIMGAVGSILSGFIGPTFAIVMSNMIEVFYYTDYDSMERKTKEYVFIYIGAGLYAVGAYLIQHYFFSIMGENLTTRVRRMMLSAILRNEVGWFDEDEHNSSLIAARLATDAADVKSAIAERISVILQNMTSLLTSFIVAFIVEWRVSLLILGTFPLLVLANFAQQLSLKGFAGDTAKAHAKTSMIAGEGVSNIRTVAAFNAQSKILSLFCHELRVPQKRSLYRSQTSGFLFGLSQLALYGSEALILWYGAHLVSKGVSTFSKVIKVFVVLVITANSVAETVSLAPEIIRGGEAVGSVFSVLDRQTRIDPDDADADPVETIRGDIEFRHVDFAYPSRPDVMVFRDFNLRIRAGHSQALVGASGSGKSSVIAMIERFYDPLAGKVMIDGKDIRRLNLKSLRLKIGLVQQEPALFAATIFDNIAYGKDGATESEVIDAARAANAHGFISGLPEGYKTPVGERGVQLSGGQKQRIAIARAVLKNPTVLLLDEATSALDAESECVLQEALERLMRGRTTVVVAHRLSTIRGVDCIGVIQDGRIVEQGSHSELVSRPEGAYSRLLQLQTHRI

SEQ ID NO: 98398 - DNA, 1077 bp, Arabidopsis thaliana
  misc_feature (1)..(1077): Ceres Seq. ID no. 13593536
  misc_feature (1)..(1077): Ortholog of  Ceres SEQ ID NO 13598416 as cited in SEQ ID NO 63371
  misc_feature (1)..(1077): Ortholog of  Ceres SEQ ID NO 13584271 as cited in SEQ ID NO 63893
aggaaaaaaaattctggaactttcgagcttctgttttgcggtgctctcaaagcttatatcggatctcgaatcttgaatcggactcagaacctcggatcttcgaaaatcgacgaacatgtcttctcctggcgaattctataactcacttccacctataaccaaggcttatggtacgttgtgctttttcactacagtagccacgcagcttggcttagttgctcccgttcacattgctttaattcctgaacttgtacttaagcagttccagatctggaggctgataacaaacttgtttttcctcggtggtttctctatcaattttggaatacgtcttttgatgatagcaagatatggagttcaactcgagaaagggccatttgaaaggcggacagcagactttttgtggatgatgatctttggatccttcactctattggtattatcagtcataccatttttctggacaccgtttcttggtgtttcacttgtgttcatgcttctttatctctggagccgagaatttccaaatgccaacatcagcctatacggtcttgtcactcttaaggctttctacctcccatgggcaatgctagcacttgatgttatcttcggttctccgatcatgccagatcttcttggcatcatagctggacatctatactacttcctaacagtccttcatcctcttgctaccggaaaaaactacctgaaaaccccaaaatgggttaataaaatcgtagcaagatggcgaattggagctccagttgcaagtgttcgacaagcaggtggtgtaggagcagcaggacccggagctggaggaggagtaggaggaggaggagcttattcaagcgctcgtgccccacccgagagttcaaacacagcattcagaggtcgatcatatcgtctcaccgactgaaatagaaatcttctcgagtttctttgttttcatcatatcaaatctttttcaaacaatgccactaactaatcccaggtagctttgtgttttcgaacagtacagtttttgaatatatgactctgtaggaagaatctttgaggttttaatacaatgttcttttc

SEQ ID NO: 98399 - protein, 266 aa, Arabidopsis thaliana; identical to SEQ ID NO: 47388
  peptide (1)..(266): Ceres Seq. ID no. 13593537

SEQ ID NO: 98400 - protein, 192 aa, Arabidopsis thaliana; identical to SEQ ID NO: 47389
  peptide (1)..(192): Ceres Seq. ID no. 13593538

SEQ ID NO: 98401 - protein, 169 aa, Arabidopsis thaliana; identical to SEQ ID NO: 47390
  peptide (1)..(169): Ceres Seq. ID no. 13593539

SEQ ID NO: 98402 - DNA, 1386 bp, Arabidopsis thaliana
  misc_feature (1)..(1386): Ceres Seq. ID no. 13593549
  misc_feature (1)..(1386): Ortholog of  Ceres SEQ ID NO 13595509 as cited in SEQ ID NO 59833
ccaaaatctagggttttcttctcgcccaatttcacttttcttctacgaaattctccattcctgccggctgtcgggttttctgaatcgattctccttcaccaacttcttctctggttctgttcgattctgattttttttcaaggtcaattttttcttctctttaaactctgcaaaatcgtgatcgattaaattcacctcagggttttttgatttctgaaagaagttaatcttcttcgaaggcgattgcaaaagagtgctctgctgtgaatttccactgagatgcaatcaaaaccgggaagagaaaacgaagaggaagtcaataatcaccatgctgttcagcagccgatgatgtatgcagagccctggtggaaaaacaactcctttggtgttgtacctcaagcgagaccttctggaattccatcaaattcctcttctttggattgccccaatggttccgagtcaaacgatgttcattcagcatctgaagacggtgcgttgaatggtgaaaacgatggcacttggaaggattcacaagctgcaacttcctctcgttcagtagataatcacggaatggaaggaaatgacccagcgctctctatccgtaacatgcatgatcagccacttgtacaaccaccagagcttgttggacactatatcgcttgtgtcccaaacccatatcaggatccatattatgggggattgatgggagcatatggtcatcagcaattgggttttcgtccatatcttggaatgcctcgtgaaagaacagctctgccacttgacatggcacaagagcccgtttatgtgaatgcaaagcagtacgagggaattctaaggcgaagaaaagcacgtgccaaggcagagctagagaggaaagtcatccgggacagaaagccatatcttcacgagtcaagacacaagcatgcaatgagaagggcacgagcgagtggaggccggtttgcgaagaaaagtgaggtagaagcgggagaggatgcaggagggagagacagagaaaggggttcagcaaccaactcatcaggctctgaacaagttgagacagactctaatgagaccctgaattcttctggtgcaccataataaaaaaagccaaagctctgagaggagagagagacacacactttggctaatataatccattgcctcaaaccggcaaatcattcttggctttttcgtttttgtgtttgctagttgttcttgtcagagtctcatattgtgtgggtttaacagttatgatgaatgtacaaagagcgagttatgttaggtgttagattttggagacaagagacaaaggaatagcaagtaggtcttgtttttattctttgaccttttttttctcttttgcaaaattgaaaaatacgtttgctt

SEQ ID NO: 98403 - protein, 272 aa, Arabidopsis thaliana
  peptide (1)..(272): Ceres Seq. ID no. 13593550
MQSKPGRENEEEVNNHHAVQQPMMYAEPWWKNNSFGVVPQARPSGIPSNSSSLDCPNGSESNDVHSASEDGALNGENDGTWKDSQAATSSRSVDNHGMEGNDPALSIRNMHDQPLVQPPELVGHYIACVPNPYQDPYYGGLMGAYGHQQLGFRPYLGMPRERTALPLDMAQEPVYVNAKQYEGILRRRKARAKAELERKVIRDRKPYLHESRHKHAMRRARASGGRFAKKSEVEAGEDAGGRDRERGSATNSSGSEQVETDSNETLNSSGAP

SEQ ID NO: 98404 - protein, 250 aa, Arabidopsis thaliana
  peptide (1)..(250): Ceres Seq. ID no. 13593551
MMYAEPWWKNNSFGVVPQARPSGIPSNSSSLDCPNGSESNDVHSASEDGALNGENDGTWKDSQAATSSRSVDNHGMEGNDPALSIRNMHDQPLVQPPELVGHYIACVPNPYQDPYYGGLMGAYGHQQLGFRPYLGMPRERTALPLDMAQEPVYVNAKQYEGILRRRKARAKAELERKVIRDRKPYLHESRHKHAMRRARASGGRFAKKSEVEAGEDAGGRDRERGSATNSSGSEQVETDSNETLNSSGAP

SEQ ID NO: 98405 - protein, 249 aa, Arabidopsis thaliana
  peptide (1)..(249): Ceres Seq. ID no. 13593552
MYAEPWWKNNSFGVVPQARPSGIPSNSSSLDCPNGSESNDVHSASEDGALNGENDGTWKDSQAATSSRSVDNHGMEGNDPALSIRNMHDQPLVQPPELVGHYIACVPNPYQDPYYGGLMGAYGHQQLGFRPYLGMPRERTALPLDMAQEPVYVNAKQYEGILRRRKARAKAELERKVIRDRKPYLHESRHKHAMRRARASGGRFAKKSEVEAGEDAGGRDRERGSATNSSGSEQVETDSNETLNSSGAP

SEQ ID NO: 98406 - DNA, 1556 bp, Arabidopsis thaliana
  misc_feature (1)..(1556): Ceres Seq. ID no. 13593553
  misc_feature (1)..(1556): Ortholog of  Ceres SEQ ID NO 12613795 as cited in SEQ ID NO 62089
gaacgacgtcgtcttttcttctccgattagcgtcggtcgtcttcttcgtcttctctctgtcgctgatctgggttttgcttcaacgtgaaacatctttgaggttgatgatgaggtttctgtttacttaatatcctgtgagagaaaactcttcttgacttgagtgttgctgacaaaaacgtataggtatatgtacatttgttttcgctgaggctaaagatggataagcttcttgagaatcatcagtttgcgacacatgccatcgctgcctcggcctctgtctcgttaggaactgctctcgcttatcctttagataccatcaaaaccattatccaggttggttcaggacccaataagaaattaagctcctttcaagtttttaatagagttcttcgattctctggctattcaggtctgtacagtggtcttggatcgttaactttaggaagaatttctggttttggtgcaaggtttggtgtctatgagattctaacagctttctacaaagatggtcgacatgataactacgtgagtgttggtgaagcttttctggctggtctggtgggaggtgcagcagaaacagtgatgacttctccatttgagctaatcaaagtccgaaaacaagtgactgctgcatcacgggctccaaatgcttccgctgttgcagagaccgcaccggtctcacccatgatcacaaaactgctaagaagatacactcttgatgtaaagtcattgacacaaacagtcagtctcttatccgtcttaaatcacaaacacccaaacatgacagctgctttgcaagagtacccttggatgatgactggaacaggaaacccaccatcagccatggatgttaagagaccgctcgatgttgcatcacttgaaggatatagagctttatggaggaatctacgttcaggtcttataagagattgtatttacggtggagtattcttttcaacatggcagtttcttcacgaggcaatggtcggttggaaagctgttgggatgaatcctctgcccagttctgaagaagaagttggacctttatctccggtagccattagccttgctgctgggatatctggtgccgttgcagctgcagcatcacatagctttgacacagcaagaacacgtgcacagtgtgtaatattgccaaagtatacagcaaaggagaggaagtttctaaaatggaataaaccagggaagagattagagagatggacaggaatccatcctacagacagaaatctcttgttccgaggtattgggatgaggatggctcgaagctctgttgcatcgactgtgatcgtaggaagctattacttagctgtcgatttattggttcccaagtgagaaaacaaacaatcacataagcctacaaatctgtctttagatcagattaacgataccgcaatagtgattgttttttagtagcctgcgttttgttatacagttaacagagaaatcatatgtgagtttttctcaatactctgaaataaataattaacatcattggctgtatctgtaagtttgatgattacaaattatcaatttcc

SEQ ID NO: 98407 - protein, 378 aa, Arabidopsis thaliana
  peptide (1)..(378): Ceres Seq. ID no. 13593554
MDKLLENHQFATHAIAASASVSLGTALAYPLDTIKTIIQVGSGPNKKLSSFQVFNRVLRFSGYSGLYSGLGSLTLGRISGFGARFGVYEILTAFYKDGRHDNYVSVGEAFLAGLVGGAAETVMTSPFELIKVRKQVTAASRAPNASAVAETAPVSPMITKLLRRYTLDVKSLTQTVSLLSVLNHKHPNMTAALQEYPWMMTGTGNPPSAMDVKRPLDVASLEGYRALWRNLRSGLIRDCIYGGVFFSTWQFLHEAMVGWKAVGMNPLPSSEEEVGPLSPVAISLAAGISGAVAAAASHSFDTARTRAQCVILPKYTAKERKFLKWNKPGKRLERWTGIHPTDRNLLFRGIGMRMARSSVASTVIVGSYYLAVDLLVPK

SEQ ID NO: 98408 - protein, 256 aa, Arabidopsis thaliana
  peptide (1)..(256): Ceres Seq. ID no. 13593555
MTSPFELIKVRKQVTAASRAPNASAVAETAPVSPMITKLLRRYTLDVKSLTQTVSLLSVLNHKHPNMTAALQEYPWMMTGTGNPPSAMDVKRPLDVASLEGYRALWRNLRSGLIRDCIYGGVFFSTWQFLHEAMVGWKAVGMNPLPSSEEEVGPLSPVAISLAAGISGAVAAAASHSFDTARTRAQCVILPKYTAKERKFLKWNKPGKRLERWTGIHPTDRNLLFRGIGMRMARSSVASTVIVGSYYLAVDLLVPK

SEQ ID NO: 98409 - protein, 222 aa, Arabidopsis thaliana
  peptide (1)..(222): Ceres Seq. ID no. 13593556
MITKLLRRYTLDVKSLTQTVSLLSVLNHKHPNMTAALQEYPWMMTGTGNPPSAMDVKRPLDVASLEGYRALWRNLRSGLIRDCIYGGVFFSTWQFLHEAMVGWKAVGMNPLPSSEEEVGPLSPVAISLAAGISGAVAAAASHSFDTARTRAQCVILPKYTAKERKFLKWNKPGKRLERWTGIHPTDRNLLFRGIGMRMARSSVASTVIVGSYYLAVDLLVPK

SEQ ID NO: 98410 - DNA, 1650 bp, Arabidopsis thaliana
  misc_feature (1)..(1650): Ceres Seq. ID no. 13593565
  misc_feature (1)..(1650): Ortholog of  Ceres SEQ ID NO 13523550 as cited in SEQ ID NO 58816
acagttctcatgctaaaccatattttttgctctctgttccttcaaaatcatttctttctcttctttgattcccaaagatcacttctttgtctttgatttttgattttttttctctctggcgtgaaggaagaagctttatttcatggagtctctgctctctagttcttctcttgtttccgctgctggtgggttttgttggaagaagcagaatctaaagctccactctttatcagaaatccgagttctgcgttgtgattcgagtaaagttgtcgcaaaaccgaagtttaggaacaatcttgttaggcctgatggtcaaggatcttcattgttgttgtatccaaaacataagtcgagatttcgggttaatgccactgcgggtcagcctgaggctttcgactcgaatagcaaacagaagtcttttagagactcgttagatgcgttttacaggttttctaggcctcatacagttattggcacagtgcttagcattttatctgtatctttcttagcagtagagaaggtttctgatatatctcctttacttttcactggcatcttggaggctgttgttgcagctctcatgatgaacatttacatagttgggctaaatcagttgtctgatgttgaaatagataaggttaacaagccctatcttccattggcatcaggagaatattctgttaacaccggcattgcaatagtagcttccttctccatcatgagtttctggcttgggtggattgttggttcatggccattgttctgggctctttttgtgagtttcatgctcggtactgcatactctatcaatttgccacttttacggtggaaaagatttgcattggttgcagcaatgtgtatcctcgctgtccgagctattattgttcaaatcgccttttatctacatattcagacacatgtgtttggaagaccaatcttgttcactaggcctcttattttcgccactgcgtttatgagctttttctctgtcgttattgcattgtttaaggatatacctgatatcgaaggggataagatattcggaatccgatcattctctgtaactctgggtcagaaacgggtgttttggacatgtgttacactacttcaaatggcttacgctgttgcaattctagttggagccacatctccattcatatggagcaaagtcatctcggttgtgggtcatgttatactcgcaacaactttgtgggctcgagctaagtccgttgatctgagtagcaaaaccgaaataacttcatgttatatgttcatatggaagctcttttatgcagagtacttgctgttaccttttttgaagtgactgacattagaagagaagaagatggagataaaagaataagtcatcactatgcttctgtttttattacaagttcatgaaattaggtagtgaactagtgaattagagttttattctgaaacatggcagactgcaaaaatatgtcaaagatatgaatttctgttgggtaaagaagtctctgcttgggcaaaatcttaaggttcggtgtgttgatataatgctaagcgaagaaatcgattctatgtagaaatttccgaaactatgtgtaaacatgtcagaacatctccattctatatcttcttctgcaagaaagctctgtttttatcacc

SEQ ID NO: 98411 - protein, 393 aa, Arabidopsis thaliana; identical to SEQ ID NO: 47454
  peptide (1)..(393): Ceres Seq. ID no. 13593566

SEQ ID NO: 98412 - protein, 247 aa, Arabidopsis thaliana; identical to SEQ ID NO: 47455
  peptide (1)..(247): Ceres Seq. ID no. 13593567

SEQ ID NO: 98413 - protein, 246 aa, Arabidopsis thaliana; identical to SEQ ID NO: 47456
  peptide (1)..(246): Ceres Seq. ID no. 13593568

SEQ ID NO: 98414 - DNA, 1074 bp, Arabidopsis thaliana
  misc_feature (1)..(1074): Ceres Seq. ID no. 13593579
  misc_feature (1)..(1074): Ortholog of  Ceres SEQ ID NO 14301916 as cited in SEQ ID NO 69281
atgtataagaatcagttgcaagagcttgcacagaggagttgtttcagtctcccatcatatacatgcacaagagaaggaccagatcatgctccaagattcaaagctagtgtaaacttcaatggtgagatatttgaaagcccaacttactgttctactctcagacaagctgagcattcagctgctgaagttgctcttagtgctctctcttccaaaggtccttcaaagtctctaactgctagagatgagactgggatctacaagaatctgcttcaagagacagcacacagagctggtcttgatctaccggtttacacaagtgtgagatcaggacctggtcacatcccaacattctcttgtactgtggagcttgctggaatgagttttaatggagaatcagcaaagactaagaaacaagctgagaagaatgcagccattgcagcttggttctccttgagaaaaatgccaagattggacccattgagaggtgaagagaaggaacaagagatagttgcaagagtcctctcaagatttagacccaaagaagtgaaaagaagagaaccaaaccagtcaagaagaagaacagtcatcagaacaattcgccaaaacacaacaacaacaacaacaaccacaggagacttgttgtgtgagaaactcagatccatcaatctatataccaatgaagcttcatcatcatcaccaccaccacagagattctggccttcaagaacaaatctcacacaagaacaatccaaagtcaaatcattgctagagaaatgtcaagaatatgcagagaagaaacagagcctagatgatcctaagccagagatgagaatcaaaacatcatcaccatcaccattatcatcatcagtggagagaaactgttatagtaagctcttaccctttccaagttttgtgttaaaccatcagaaactagctccagcagttcacatcagatcagtgatcccagtttgttcagctcctccaccaaaacctaaccctaaccctaattcatcaccgttcatcacaagggagctgggaaatggaagccaagagaagaagtcattaccaaattag

SEQ ID NO: 98415 - protein, 357 aa, Arabidopsis thaliana
  peptide (1)..(357): Ceres Seq. ID no. 13593580
MYKNQLQELAQRSCFSLPSYTCTREGPDHAPRFKASVNFNGEIFESPTYCSTLRQAEHSAAEVALSALSSKGPSKSLTARDETGIYKNLLQETAHRAGLDLPVYTSVRSGPGHIPTFSCTVELAGMSFNGESAKTKKQAEKNAAIAAWFSLRKMPRLDPLRGEEKEQEIVARVLSRFRPKEVKRREPNQSRRRTVIRTIRQNTTTTTTTTGDLLCEKLRSINLYTNEASSSSPPPQRFWPSRTNLTQEQSKVKSLLEKCQEYAEKKQSLDDPKPEMRIKTSSPSPLSSSVERNCYSKLLPFPSFVLNHQKLAPAVHIRSVIPVCSAPPPKPNPNPNSSPFITRELGNGSQEKKSLPN

SEQ ID NO: 98416 - protein, 232 aa, Arabidopsis thaliana; identical to SEQ ID NO: 50008
  peptide (1)..(232): Ceres Seq. ID no. 13593581

SEQ ID NO: 98417 - protein, 204 aa, Arabidopsis thaliana; identical to SEQ ID NO: 50009
  peptide (1)..(204): Ceres Seq. ID no. 13593582

SEQ ID NO: 98418 - DNA, 447 bp, Arabidopsis thaliana
  misc_feature (1)..(447): Ceres Seq. ID no. 13593591
  misc_feature (1)..(447): Ortholog of  Ceres SEQ ID NO 15172691 as cited in SEQ ID NO 56148
  misc_feature (1)..(447): Ortholog of  Ceres SEQ ID NO 15226850 as cited in SEQ ID NO 62501
atgagcaaggatggtttgagcaacgaccaagtctcatcaatgaaggaagcattcatgctattcgacacagacggcgacggcaaaatcgcaccgtcggagctcggaatcttaatgcggtcactcggcggcaatccaacagaatcacaactcaaatcaatcataacgacggagaatctctcgtctccgttcgatttcaatcgattcctagatctaatggcgaaacatctgaaaacagagccgttcgatcgccagcttcgtgatgcgttcaaagtgcttgacaaggaaggtactggattcgttgctgtggcagatctgagacatatacttacgagtatcggtgagaaattgcagccgagtgagtttgatgagtggatcaaagaggttgatgttggatctgatggtaagatccggtatgaggattttattgctagaatggttgctaagtaa

SEQ ID NO: 98419 - protein, 148 aa, Arabidopsis thaliana
  peptide (1)..(148): Ceres Seq. ID no. 13593592
MSKDGLSNDQVSSMKEAFMLFDTDGDGKIAPSELGILMRSLGGNPTESQLKSIITTENLSSPFDFNRFLDLMAKHLKTEPFDRQLRDAFKVLDKEGTGFVAVADLRHILTSIGEKLQPSEFDEWIKEVDVGSDGKIRYEDFIARMVAK

SEQ ID NO: 98420 - protein, 135 aa, Arabidopsis thaliana
  peptide (1)..(135): Ceres Seq. ID no. 13593593
MKEAFMLFDTDGDGKIAPSELGILMRSLGGNPTESQLKSIITTENLSSPFDFNRFLDLMAKHLKTEPFDRQLRDAFKVLDKEGTGFVAVADLRHILTSIGEKLQPSEFDEWIKEVDVGSDGKIRYEDFIARMVAK

SEQ ID NO: 98421 - protein, 130 aa, Arabidopsis thaliana
  peptide (1)..(130): Ceres Seq. ID no. 13593594
MLFDTDGDGKIAPSELGILMRSLGGNPTESQLKSIITTENLSSPFDFNRFLDLMAKHLKTEPFDRQLRDAFKVLDKEGTGFVAVADLRHILTSIGEKLQPSEFDEWIKEVDVGSDGKIRYEDFIARMVAK

SEQ ID NO: 98422 - DNA, 1147 bp, Arabidopsis thaliana
  misc_feature (1)..(1147): Ceres Seq. ID no. 13593595
  misc_feature (1)..(1147): Ortholog of  Ceres SEQ ID NO 14309076 as cited in SEQ ID NO 0
gggacggaccgtgattggtcggtctctctcgttacggtgaggctgaggctgaggcggagattgagagagaccaaccatgatacgacgaatcaccgagagagcttctggtttcgctaagaatattccgattctcaaatcgtctcgatttcacggcgagtccctcgattcctccgtctcccctgttctcattcccggcgtccatgtcttccattgtcaggatgctgttgggattgtagctaaactatcagattgcatagcagcaaaaggtggcaacattcttggctacgatgtttttgttcctgaaaacaacaacgtcttctactctcgcagcgagtttatctttgatccggttaaatggccgagaagccaagtggatgaagattttcaaactattgcacaaagatacggtgccttgaattcagttgtgcgtgtgccttctattgatcctaagtataagatagctcttcttctttcaaaacaggatcattgtcttgtcgaaatgttgcataaatggcaggacgggaaactccctgtggatattacctgtgtgataagcaatcatgaaagagcttcaaacactcacgttatgcggtttcttgagaggcatggcatcccttatcattatgtatctacaactaaagagaataaaagagaagatgatattttggaattggttaaggacactgatttcctagttcttgctagatatatgcagattttatcgggtaactttttgaaaggttatggaaaggatgtaatcaacatccaccatggtctcttaccatcatttaagggtggatatcccgcaaaacaggcattcgacgctggtgtgaaactaattggagccactagtcactttgttaccgaggaacttgattcagggccaattattgaacaaatggttgagagtgtttcccaccgagacaacttaaggagctttgtccagaaatccgaggacctagagaaaaaatgcctcacgagagctataaaatcttactgcgaactaagggtattaccttatggtacaaacaagactgttgtattctagttaagaaagcaataactacgattctcatctgattctttgtttgaacatctcaagaaaaggtgatacgaatttctataagattgttgattcatttgcagt

SEQ ID NO: 98423 - protein, 323 aa, Arabidopsis thaliana; identical to SEQ ID NO: 50207
  peptide (1)..(323): Ceres Seq. ID no. 13593596

SEQ ID NO: 98424 - protein, 182 aa, Arabidopsis thaliana; identical to SEQ ID NO: 50208
  peptide (1)..(182): Ceres Seq. ID no. 13593597

SEQ ID NO: 98425 - DNA, 1414 bp, Arabidopsis thaliana
  misc_feature (1)..(1414): Ceres Seq. ID no. 13593611
  misc_feature (1)..(1414): Ortholog of  Ceres SEQ ID NO 14311938 as cited in SEQ ID NO 51615
  misc_feature (1)..(1414): Ortholog of  Ceres SEQ ID NO 14302059 as cited in SEQ ID NO 68322
aacccacccaaaatatcacaagcaccgactaaaacaattcggatctaaacccgacccggtaaaaccaatcccaaattttactccgttgtgaacgcatcaaacccagaaaatttcttcctccgatctcgcattctccacttccataatccccaaaattgtttcgttgatttttccacaagatgaagctaacggacaacgaagagatcaccatgaacggaactcgagaaatggagacgacagagcaagagacatcgtcgccgtgttcgttagtaatcgaagcttttccggtgaagaaatccattattgtaggttacgctcttacatcaaagaagattaagagctttttacaaccaaaactcgaaggtttagctaggaataaggggatattatttgtggcaatagatcagaataagccactttcagagcagggtccgtttgatattgtgttgcataagcaaattggaaaagaatggcgtcgaattctcgaggaatttaggctagcacatccagatgtcacagttcttgatcctccagatgcaatactacatctccgtaatcgtcagtcaatgcttcagtgtgttgcggacatgaatctgtctgatagtaatggacgcgttggtgtgcccaagcaattggtaattaaaaaggatgcatcttcaattccggaggctgtcaataatgctggtctgagactacctcttgttgcaaagccattggttgctgatggaagtgcaaagtcacatgagctttcgctggcttacgatcaacactcccttctgaagctcgagcctcctcttgttcttcaggagtttgttaaccatggaggtgttcttttcaaggtttacattgttggggaggctattagagttgtccggcgcttctccctacctgatgtctctagacgagaactccccaaatcagctggtgtattccgcttcccacgggtctcttgtgctgcagcttcagctgatgatgcagatctggacccgagcattgccgagcttccaccacgtcctctgttggagagactggcaaaggaactccgtcgtggattgggtctaaggctgttcaatttagacataattagagagcacgggacaagagatcggttttatgtgatcgacatcaactatttcccagggtacgggaaaatgccagagtatgagcatgtattcactgatttcttactgagtgtggtacaaagccaatgtaagaaacgagctttggcagatcaatactaaactcaacggagagaccattgttcctccccaaagaaaaaaagaagattagtagtctatgcaatttatttctgtacaggacaaagcaccgatttccctcgatgttgttctttagcttcattgtgctgtacaaaagaacaatggaagattgcatttaaaagaaaatccttgggacc

SEQ ID NO: 98426 - protein, 353 aa, Arabidopsis thaliana
  peptide (1)..(353): Ceres Seq. ID no. 13593612
MKLTDNEEITMNGTREMETTEQETSSPCSLVIEAFPVKKSIIVGYALTSKKIKSFLQPKLEGLARNKGILFVAIDQNKPLSEQGPFDIVLHKQIGKEWRRILEEFRLAHPDVTVLDPPDAILHLRNRQSMLQCVADMNLSDSNGRVGVPKQLVIKKDASSIPEAVNNAGLRLPLVAKPLVADGSAKSHELSLAYDQHSLLKLEPPLVLQEFVNHGGVLFKVYIVGEAIRVVRRFSLPDVSRRELPKSAGVFRFPRVSCAAASADDADLDPSIAELPPRPLLERLAKELRRGLGLRLFNLDIIREHGTRDRFYVIDINYFPGYGKMPEYEHVFTDFLLSVVQSQCKKRALADQY

SEQ ID NO: 98427 - protein, 343 aa, Arabidopsis thaliana
  peptide (1)..(343): Ceres Seq. ID no. 13593613
MNGTREMETTEQETSSPCSLVIEAFPVKKSIIVGYALTSKKIKSFLQPKLEGLARNKGILFVAIDQNKPLSEQGPFDIVLHKQIGKEWRRILEEFRLAHPDVTVLDPPDAILHLRNRQSMLQCVADMNLSDSNGRVGVPKQLVIKKDASSIPEAVNNAGLRLPLVAKPLVADGSAKSHELSLAYDQHSLLKLEPPLVLQEFVNHGGVLFKVYIVGEAIRVVRRFSLPDVSRRELPKSAGVFRFPRVSCAAASADDADLDPSIAELPPRPLLERLAKELRRGLGLRLFNLDIIREHGTRDRFYVIDINYFPGYGKMPEYEHVFTDFLLSVVQSQCKKRALADQY

SEQ ID NO: 98428 - protein, 337 aa, Arabidopsis thaliana
  peptide (1)..(337): Ceres Seq. ID no. 13593614
METTEQETSSPCSLVIEAFPVKKSIIVGYALTSKKIKSFLQPKLEGLARNKGILFVAIDQNKPLSEQGPFDIVLHKQIGKEWRRILEEFRLAHPDVTVLDPPDAILHLRNRQSMLQCVADMNLSDSNGRVGVPKQLVIKKDASSIPEAVNNAGLRLPLVAKPLVADGSAKSHELSLAYDQHSLLKLEPPLVLQEFVNHGGVLFKVYIVGEAIRVVRRFSLPDVSRRELPKSAGVFRFPRVSCAAASADDADLDPSIAELPPRPLLERLAKELRRGLGLRLFNLDIIREHGTRDRFYVIDINYFPGYGKMPEYEHVFTDFLLSVVQSQCKKRALADQY

SEQ ID NO: 98429 - DNA, 951 bp, Arabidopsis thaliana
  misc_feature (1)..(951): Ceres Seq. ID no. 13593631
  misc_feature (1)..(951): Ortholog of  Ceres SEQ ID NO 15179380 as cited in SEQ ID NO 0
atgagtccggacaataaactgcttccgaagcggatcatccttgtacggcacggtgaatcggaagggaatctcgacacggcggcgtatacaacgacgccggatcataagatccagttaacggattccggtttgcttcaggcgcaggaagccggagctcgtctccacgctttgatctcttctaatccttcttcaccggagtggcgtgtgtacttctacgtttcgccgtacgatcggactcgatctacgctccgggagatcggacggtcgttctcgcgtcgccgtgtgattggtgttcgcgaagaatgtcggattagggaacaggattttgggaattttcaggttaaagagcgaatgagagcaacgaaaaaggtcagagagagatttggccgctttttttaccggttcccggagggagaatccgccgccgatgtcttcgatcgcgtctccagttttctcgagtctctatggagagacattgacatgaacagactgcacatcaacccgtctcatgagctaaactttgtgattgtctcacatggcttaacatcgcgtgtgtttctgatgaaatggtttaagtggtcagtggaacagttcgagggactaaacaatccagggaacagtgagatcagagtgatggaattaggacaaggcggtgattacagcttggcgattcatcacacagaggaagagttagccacatggggactgtcaccagagatgattgcagatcaaaagtggcgggctaacgcgcataaaggcgaatggaaagaagattgtaagtggtattttggtgatttcttcgaccatatggcagattccgataaagagtgcgagactgaggccactgaagatagagaagaagaagaagaagaagaggggaaaagggtaaatctgctaacgagttcagaatatagcaatgagccagagttatacaatggacaatgctgctga

SEQ ID NO: 98430 - protein, 316 aa, Arabidopsis thaliana
  peptide (1)..(316): Ceres Seq. ID no. 13593632
MSPDNKLLPKRIILVRHGESEGNLDTAAYTTTPDHKIQLTDSGLLQAQEAGARLHALISSNPSSPEWRVYFYVSPYDRTRSTLREIGRSFSRRRVIGVREECRIREQDFGNFQVKERMRATKKVRERFGRFFYRFPEGESAADVFDRVSSFLESLWRDIDMNRLHINPSHELNFVIVSHGLTSRVFLMKWFKWSVEQFEGLNNPGNSEIRVMELGQGGDYSLAIHHTEEELATWGLSPEMIADQKWRANAHKGEWKEDCKWYFGDFFDHMADSDKECETEATEDREEEEEEEGKRVNLLTSSEYSNEPELYNGQCC

SEQ ID NO: 98431 - protein, 199 aa, Arabidopsis thaliana
  peptide (1)..(199): Ceres Seq. ID no. 13593633
MRATKKVRERFGRFFYRFPEGESAADVFDRVSSFLESLWRDIDMNRLHINPSHELNFVIVSHGLTSRVFLMKWFKWSVEQFEGLNNPGNSEIRVMELGQGGDYSLAIHHTEEELATWGLSPEMIADQKWRANAHKGEWKEDCKWYFGDFFDHMADSDKECETEATEDREEEEEEEGKRVNLLTSSEYSNEPELYNGQCC

SEQ ID NO: 98432 - DNA, 3546 bp, Arabidopsis thaliana
  misc_feature (1)..(3546): Ceres Seq. ID no. 13593638
  misc_feature (1)..(3546): Ortholog of  Ceres SEQ ID NO 13658778 as cited in SEQ ID NO 66511
atggtgaaatcagcagcttctcagtcaccatctccggtgactataacggtgacaccatgtaaaggatccggcgacagaagcttaggattgacgagtcctatcccacgcgcctccgtcatcaccaaccaaaactctcctctaagctcaagagccacgcgtcgcacttccattagcagcgggaatcggagatctaacggtgatgaaggaagatactgttctatgtctgtggaagatctaacggcggagacgactaattcagagtgcgttctgagctatactgttcatatcccacctacgccggatcatcagacggtgttcgcttcacaggagagtgaagaagacgagatgctaaaagggaattcgaatcaaaaaagtttcctctctgggacgattttcaccggtgggtttaaatcggtgacacgtggtcatgtgatcgattgttctatggatagagctgatccggagaagaagtcaggtcagatctgctggttaaaaggttgtgatgagaaagttgttcacgggagatgtgagtgtggtttccgaatctgtagagattgttactttgattgtatcacaagtggtggaggcaattgtcctggttgcaaagagccttatagggatatcaacgatgatccagagactgaggaagaagacgaagaagatgaggcgaaaccacttcctcagatgggtgaatcaaagcttgacaagaggctttcggttgtgaagtcgtttaaagcgcagaatcaagctggagattttgatcatactcggtggttgtttgagactaaaggtacttatgggtatgggaacgctgtttggcctaaagatgggtatggaatcgggtcgggtggtggtggaaacgggtatgaaacgccacctgagtttggggagagaagcaagaggcctcttactaggaaagtcagtgtctctgctgcaattatcagtccttacagattactcattgcactgcgtctggtggctcttggtttgttcctgacatggagggttcgccacccaaaccgagaagcaatgtggttgtggggaatgtcaacgacctgtgagctttggtttgccttgtcttggcttttggatcagcttccaaaactctgtccggttaacagattaactgatttaggtgttcttaaagaacgctttgagtctccaaacctcaggaaccccaaaggaagatctgatcttccgggtatcgatgtgtttgtctcaactgcagaccctgagaaagaaccacctctggtcacagccaacaccattctctcgatccttgctgttgattaccctgtggagaaacttgcttgctacttgtcagacgatggaggagctttgctaacatttgaagccttggctcaaacagctagctttgcaagtacatgggtgccattttgcaggaaacacaatatagagccaaggaaccctgaggcctactttggacagaagcgtaactttctcaagaacaaagtcaggctggattttgtgagggaaaggaggagagtgaagagagaatatgatgagtttaaggtcagaatcaactcattgcctgaagcgataaggagaaggtctgatgcttataacgtgcacgaagagctaagggctaagaagaaacagatggaaatgatgatgggaaacaatccacaagaaactgttatagttccaaaggccacttggatgtcagatggttctcactggccagggacttggtcctctggagaaaccgataactctcgaggagatcatgctggaatcattcaggcaatgttggctcctccaaatgcagaaccagtttatggagctgaagcagatgctgagaacttaattgatacaacagacgttgacatcaggctaccaatgctggtctatgtgtcgagagagaagcgtccgggttatgaccacaacaagaaagcaggagccatgaatgctttggttagaaccagcgcaattatgtctaatggcccattcatcctcaatcttgattgtgaccactacatctacaactctatggctttgagagaaggaatgtgcttcatgcttgatcgtggtggcgatagaatctgctatgttcagttccctcagaggtttgaaggtattgacccaaatgatcgttatgcaaaccacaacactgtcttctttgatgttagtatgagagctttggatggacttcaaggtccaatgtatgtgggaactggctgcatctttcggagaacagctctttatggatttagcccgccaagagcaactgaacatcatggctggcttggaagaagaaaagtcaagatatcgctgaggagaccaaaagccatgatgaagaaagacgatgaagtttctttgcctataaatggagaatacaacgaagaagagaatgatgatggagatattgaatctctgcttctcccaaagagatttggtaactcaaactctttcgttgcttcaatcccagttgctgaataccaagggagactcatacaagacttgcaaggcaaaggcaagaacagtagaccagctggctcacttgctgtcccacgtgaaccacttgatgcagccactgtagctgaagcaatcagtgtgatatcttgcttctatgaggacaaaactgaatggggtaaaagagttggatggatctatggatcagtgactgaagatgtagtcacgggatatcgaatgcacaacagaggatggagatcaatctactgcgtgacaaaaagagacgctttccgtggaacagctccgatcaatctaacggatagacttcaccaggttctgagatgggcaacaggatctgttgagatcttcttctcaaggaacaatgcaatttttgcaaccagaaggatgaagtttttgcagagagtggcttacttcaacgttggaatgtatccattcacatcgctattcctcatcgtctactgcattctccctgcgatttcgctcttctcgggtcaattcatagtccaatcactcgacataacgttcttgatctatctcctctcgataacactcacgctctgtatgctatcactccttgagatcaaatggtcaggcataactctccatgaatggtggagaaacgagcagttctgggtcataggaggtacaagcgcacaccctgcagctgttcttcagggtcttcttaaggtaattgcaggagttgatatctcatttaccttgacttccaagtcatctgcaccagaagatggagacgatgagtttgcggatctgtatgttgtgaaatggagctttttgatggttcctccattaactatcatgatggtgaatatgattgcaattgcggtggggctagcgaggactctgtacagtccgtttccacagtggagtaagcttgttggaggagtgttcttcagcttttgggtgctttgtcatctgtatccgtttgctaaaggattgatgggaagaagaggcagagttccgaccatagtgtttgtgtggtcaggtttgttgtcgattattgtgtcgttgctttgggtttatattaaccctccttcagggaaacaggactatatgcagtttcaattcccttga

SEQ ID NO: 98433 - protein, 1181 aa, Arabidopsis thaliana
  peptide (1)..(1181): Ceres Seq. ID no. 13593639
MVKSAASQSPSPVTITVTPCKGSGDRSLGLTSPIPRASVITNQNSPLSSRATRRTSISSGNRRSNGDEGRYCSMSVEDLTAETTNSECVLSYTVHIPPTPDHQTVFASQESEEDEMLKGNSNQKSFLSGTIFTGGFKSVTRGHVIDCSMDRADPEKKSGQICWLKGCDEKVVHGRCECGFRICRDCYFDCITSGGGNCPGCKEPYRDINDDPETEEEDEEDEAKPLPQMGESKLDKRLSVVKSFKAQNQAGDFDHTRWLFETKGTYGYGNAVWPKDGYGIGSGGGGNGYETPPEFGERSKRPLTRKVSVSAAIISPYRLLIALRLVALGLFLTWRVRHPNREAMWLWGMSTTCELWFALSWLLDQLPKLCPVNRLTDLGVLKERFESPNLRNPKGRSDLPGIDVFVSTADPEKEPPLVTANTILSILAVDYPVEKLACYLSDDGGALLTFEALAQTASFASTWVPFCRKHNIEPRNPEAYFGQKRNFLKNKVRLDFVRERRRVKREYDEFKVRINSLPEAIRRRSDAYNVHEELRAKKKQMEMMMGNNPQETVIVPKATWMSDGSHWPGTWSSGETDNSRGDHAGIIQAMLAPPNAEPVYGAEADAENLIDTTDVDIRLPMLVYVSREKRPGYDHNKKAGAMNALVRTSAIMSNGPFILNLDCDHYIYNSMALREGMCFMLDRGGDRICYVQFPQRFEGIDPNDRYANHNTVFFDVSMRALDGLQGPMYVGTGCIFRRTALYGFSPPRATEHHGWLGRRKVKISLRRPKAMMKKDDEVSLPINGEYNEEENDDGDIESLLLPKRFGNSNSFVASIPVAEYQGRLIQDLQGKGKNSRPAGSLAVPREPLDAATVAEAISVISCFYEDKTEWGKRVGWIYGSVTEDVVTGYRMHNRGWRSIYCVTKRDAFRGTAPINLTDRLHQVLRWATGSVEIFFSRNNAIFATRRMKFLQRVAYFNVGMYPFTSLFLIVYCILPAISLFSGQFIVQSLDITFLIYLLSITLTLCMLSLLEIKWSGITLHEWWRNEQFWVIGGTSAHPAAVLQGLLKVIAGVDISFTLTSKSSAPEDGDDEFADLYVVKWSFLMVPPLTIMMVNMIAIAVGLARTLYSPFPQWSKLVGGVFFSFWVLCHLYPFAKGLMGRRGRVPTIVFVWSGLLSIIVSLLWVYINPPSGKQDYMQFQFP

SEQ ID NO: 98434 - protein, 1108 aa, Arabidopsis thaliana
  peptide (1)..(1108): Ceres Seq. ID no. 13593640
MSVEDLTAETTNSECVLSYTVHIPPTPDHQTVFASQESEEDEMLKGNSNQKSFLSGTIFTGGFKSVTRGHVIDCSMDRADPEKKSGQICWLKGCDEKVVHGRCECGFRICRDCYFDCITSGGGNCPGCKEPYRDINDDPETEEEDEEDEAKPLPQMGESKLDKRLSVVKSFKAQNQAGDFDHTRWLFETKGTYGYGNAVWPKDGYGIGSGGGGNGYETPPEFGERSKRPLTRKVSVSAAIISPYRLLIALRLVALGLFLTWRVRHPNREAMWLWGMSTTCELWFALSWLLDQLPKLCPVNRLTDLGVLKERFESPNLRNPKGRSDLPGIDVFVSTADPEKEPPLVTANTILSILAVDYPVEKLACYLSDDGGALLTFEALAQTASFASTWVPFCRKHNIEPRNPEAYFGQKRNFLKNKVRLDFVRERRRVKREYDEFKVRINSLPEAIRRRSDAYNVHEELRAKKKQMEMMMGNNPQETVIVPKATWMSDGSHWPGTWSSGETDNSRGDHAGIIQAMLAPPNAEPVYGAEADAENLIDTTDVDIRLPMLVYVSREKRPGYDHNKKAGAMNALVRTSAIMSNGPFILNLDCDHYIYNSMALREGMCFMLDRGGDRICYVQFPQRFEGIDPNDRYANHNTVFFDVSMRALDGLQGPMYVGTGCIFRRTALYGFSPPRATEHHGWLGRRKVKISLRRPKAMMKKDDEVSLPINGEYNEEENDDGDIESLLLPKRFGNSNSFVASIPVAEYQGRLIQDLQGKGKNSRPAGSLAVPREPLDAATVAEAISVISCFYEDKTEWGKRVGWIYGSVTEDVVTGYRMHNRGWRSIYCVTKRDAFRGTAPINLTDRLHQVLRWATGSVEIFFSRNNAIFATRRMKFLQRVAYFNVGMYPFTSLFLIVYCILPAISLFSGQFIVQSLDITFLIYLLSITLTLCMLSLLEIKWSGITLHEWWRNEQFWVIGGTSAHPAAVLQGLLKVIAGVDISFTLTSKSSAPEDGDDEFADLYVVKWSFLMVPPLTIMMVNMIAIAVGLARTLYSPFPQWSKLVGGVFFSFWVLCHLYPFAKGLMGRRGRVPTIVFVWSGLLSIIVSLLWVYINPPSGKQDYMQFQFP

SEQ ID NO: 98435 - protein, 1066 aa, Arabidopsis thaliana
  peptide (1)..(1066): Ceres Seq. ID no. 13593641
MLKGNSNQKSFLSGTIFTGGFKSVTRGHVIDCSMDRADPEKKSGQICWLKGCDEKVVHGRCECGFRICRDCYFDCITSGGGNCPGCKEPYRDINDDPETEEEDEEDEAKPLPQMGESKLDKRLSVVKSFKAQNQAGDFDHTRWLFETKGTYGYGNAVWPKDGYGIGSGGGGNGYETPPEFGERSKRPLTRKVSVSAAIISPYRLLIALRLVALGLFLTWRVRHPNREAMWLWGMSTTCELWFALSWLLDQLPKLCPVNRLTDLGVLKERFESPNLRNPKGRSDLPGIDVFVSTADPEKEPPLVTANTILSILAVDYPVEKLACYLSDDGGALLTFEALAQTASFASTWVPFCRKHNIEPRNPEAYFGQKRNFLKNKVRLDFVRERRRVKREYDEFKVRINSLPEAIRRRSDAYNVHEELRAKKKQMEMMMGNNPQETVIVPKATWMSDGSHWPGTWSSGETDNSRGDHAGIIQAMLAPPNAEPVYGAEADAENLIDTTDVDIRLPMLVYVSREKRPGYDHNKKAGAMNALVRTSAIMSNGPFILNLDCDHYIYNSMALREGMCFMLDRGGDRICYVQFPQRFEGIDPNDRYANHNTVFFDVSMRALDGLQGPMYVGTGCIFRRTALYGFSPPRATEHHGWLGRRKVKISLRRPKAMMKKDDEVSLPINGEYNEEENDDGDIESLLLPKRFGNSNSFVASIPVAEYQGRLIQDLQGKGKNSRPAGSLAVPREPLDAATVAEAISVISCFYEDKTEWGKRVGWIYGSVTEDVVTGYRMHNRGWRSIYCVTKRDAFRGTAPINLTDRLHQVLRWATGSVEIFFSRNNAIFATRRMKFLQRVAYFNVGMYPFTSLFLIVYCILPAISLFSGQFIVQSLDITFLIYLLSITLTLCMLSLLEIKWSGITLHEWWRNEQFWVIGGTSAHPAAVLQGLLKVIAGVDISFTLTSKSSAPEDGDDEFADLYVVKWSFLMVPPLTIMMVNMIAIAVGLARTLYSPFPQWSKLVGGVFFSFWVLCHLYPFAKGLMGRRGRVPTIVFVWSGLLSIIVSLLWVYINPPSGKQDYMQFQFP

SEQ ID NO: 98436 - DNA, 1632 bp, Arabidopsis thaliana
  misc_feature (1)..(1632): Ceres Seq. ID no. 13593661
  misc_feature (1)..(1632): Ortholog of  Ceres SEQ ID NO 15227026 as cited in SEQ ID NO 52193
  misc_feature (1)..(1632): Ortholog of  Ceres SEQ ID NO 15177903 as cited in SEQ ID NO 54993
  misc_feature (1)..(1632): Ortholog of  Ceres SEQ ID NO 15177994 as cited in SEQ ID NO 55641
  misc_feature (1)..(1632): Ortholog of  Ceres SEQ ID NO 13595454 as cited in SEQ ID NO 56502
  misc_feature (1)..(1632): Ortholog of  Ceres SEQ ID NO 13589016 as cited in SEQ ID NO 68472
ctctctctcttctttctctttgtcatgaaccagtaatcttgtttctcttcatcttccattgacgtttccttctatcctcgttgccttcatttttcactcgcacgctaatcttcgcctactttgttagattttcggttttgggtttttgtcttttggtcgatttcccctgttcccagaatctccgattaagctgcttccttaatctcttgtctgaatataaactttttccggcgtgtaatttagataggtggttaaaattacgagtagtgagaggagtgttgttgctgttttgtttattcggtaaaacgaaatcggaagttctttgttgtcgtttgattccttttgagaaagagagatgttgggagctggatttaacttcactcagcttcagagagctcaaattgacgtctcttatggctgcagatcgagtcacactaaggatcgtgagaacggctctgcattgttgaaacaccatgtttctgaggcatcgtcaagtaatgtggaacggtttttggattcggtgacaccatctgttccggctcactatttatctaagacaatagttagggaaagaggaggcagtgatgttgagtctcaagttccttattttcttcttggagatgtatgggaatcgtttgcagagtggagtgcttatggcattggagttcctctcactttgaataacaataaagatcgtgtctttcaatactacgtgccctcgctttctggtattcaagtatacgctgatgttgatgctttaacttcatctcttcaagcaaggcggcaaggtgaggagagcgaaagcgattttagggattcaagtagtgaaggaagcagtagtgaatctgaaagaggactctgttattcaaaagagcagatctccgctagaatggacaaactctccttaagaaaggagcatcaagaagattcgtctagtgatgatggcgagcctttaagctctcaaggtcgtttgatatttgagtatcttgaacgtgatcttccttacgtccgtgaaccctttgccgacaagatgtctgaccttgcctctagatttcccgagctgaagacgctaagaagctgtgatttgcttccttcaagctggttttctgtggcatggtacccaatttacaaaatacccacaggaccgacactcaaggatctggatgcttgtttcttgacctatcattcccttcacacaccctttcaaggtccaggcgttacaacagggtctatgcatgtggtgcagccaagggaaagtgttgagaagatggaactgcctgtctttggtctcgcctcatacaagttgagaggttctgtatggacaagctttggtggctcgggccaccagctcgcgaactctctcttccaagccgcagataattggctgaggttgcgtcaagtcaaccatcctgatttcatcttcttctgccgccggtaatgatagattatactatgatgacgaaaaatgatataggaagttataaaaaggaactctttatgattactgtcttgaggaaaccttacatataggatactgtcaaaagtttttcatttggtagcttctgtaaattcacagaatgctagttttcttattgtgtgtaaaactgtttttgcaataaaggctaatagttg

SEQ ID NO: 98437 - protein, 360 aa, Arabidopsis thaliana
  peptide (1)..(360): Ceres Seq. ID no. 13593662
MLGAGFNFTQLQRAQIDVSYGCRSSHTKDRENGSALLKHHVSEASSSNVERFLDSVTPSVPAHYLSKTIVRERGGSDVESQVPYFLLGDVWESFAEWSAYGIGVPLTLNNNKDRVFQYYVPSLSGIQVYADVDALTSSLQARRQGEESESDFRDSSSEGSSSESERGLCYSKEQISARMDKLSLRKEHQEDSSSDDGEPLSSQGRLIFEYLERDLPYVREPFADKMSDLASRFPELKTLRSCDLLPSSWFSVAWYPIYKIPTGPTLKDLDACFLTYHSLHTPFQGPGVTTGSMHVVQPRESVEKMELPVFGLASYKLRGSVWTSFGGSGHQLANSLFQAADNWLRLRQVNHPDFIFFCRR

SEQ ID NO: 98438 - protein, 182 aa, Arabidopsis thaliana
  peptide (1)..(182): Ceres Seq. ID no. 13593663
MDKLSLRKEHQEDSSSDDGEPLSSQGRLIFEYLERDLPYVREPFADKMSDLASRFPELKTLRSCDLLPSSWFSVAWYPIYKIPTGPTLKDLDACFLTYHSLHTPFQGPGVTTGSMHVVQPRESVEKMELPVFGLASYKLRGSVWTSFGGSGHQLANSLFQAADNWLRLRQVNHPDFIFFCRR

SEQ ID NO: 98439 - DNA, 1161 bp, Arabidopsis thaliana
  misc_feature (1)..(1161): Ceres Seq. ID no. 13593693
  misc_feature (1)..(1161): Ortholog of  Ceres SEQ ID NO 15170354 as cited in SEQ ID NO 54190
  misc_feature (1)..(1161): Ortholog of  Ceres SEQ ID NO 14307253 as cited in SEQ ID NO 54783
  misc_feature (1)..(1161): Ortholog of  Ceres SEQ ID NO 13654989 as cited in SEQ ID NO 63117
  misc_feature (1)..(1161): Ortholog of  Ceres SEQ ID NO 13584744 as cited in SEQ ID NO 69137
atgaaaatcaattgcttgttctgttgtatgtcccacagacgatttaacagacgatcatcatcgagacaaagcatcaaagactgcattgatgcaaagaacaatataactacatttgacaacatctcttttaaaacagatagcagtaggcgaagatacatatccgaggagatagcaaaactcggtaaagggaacatcagtgctcatatttttacattcagagagctttgcgtcgctaccaagaacttcaaccccgataatcagctcggtgaaggcgggtttggaagggtttacaaagggcagatagaaaccccggaacaagttgttgcggttaagcagctagacaggaatggttaccaagggaacagagagtttcttgtggaagtcatgatgttgagtctcttacatcatcaaaaccttgtcaatttggtcggatattgcgcagacggtgatcaacggattcttgtctatgaatacatgcaaaatggctctttagaggatcatcttctagaattggcgcggaacaagaagaagccgttggattgggacacaagaatgaaagttgcggcaggagcagctagagggcttgagtatctacacgaaacagcagatcctcctgttatctacagagacttcaaggcctcaaatatattacttgacgaagaattcaacccaaagctttcggatttcggtttagctaaggttggtccgaccggtggagagactcatgtgtcaacgagagtgatgggaacatacggctattgtgcgcctgagtatgctctcacaggacagctcactgtgaaatccgatgtatacagcttcggagtcgtgttcttggagatgatcacaggaagacgagtcattgacacaacaaaaccaactgaagaacagaacttagtcacttgggcgagtccattgttcaaagataggagaaagttcacgttaatggcagatccattgcttgaaggaaagtatccaataaaaggattgtatcaagcgcttgcagtagcagcaatgtgtcttcaagaagaagcagcaacgagaccaatgatgagtgatgtagtcactgcgcttgagtacttagccgtgaccaaaaccgaagaagatggacaaactgtagaaggagaagaagaagaagaagaagacgaaagatccaaactttga

SEQ ID NO: 98440 - protein, 386 aa, Arabidopsis thaliana
  peptide (1)..(386): Ceres Seq. ID no. 13593694
MKINCLFCCMSHRRFNRRSSSRQSIKDCIDAKNNITTFDNISFKTDSSRRRYISEEIAKLGKGNISAHIFTFRELCVATKNFNPDNQLGEGGFGRVYKGQIETPEQVVAVKQLDRNGYQGNREFLVEVMMLSLLHHQNLVNLVGYCADGDQRILVYEYMQNGSLEDHLLELARNKKKPLDWDTRMKVAAGAARGLEYLHETADPPVIYRDFKASNILLDEEFNPKLSDFGLAKVGPTGGETHVSTRVMGTYGYCAPEYALTGQLTVKSDVYSFGVVFLEMITGRRVIDTTKPTEEQNLVTWASPLFKDRRKFTLMADPLLEGKYPIKGLYQALAVAAMCLQEEAATRPMMSDVVTALEYLAVTKTEEDGQTVEGEEEEEEDERSKL

SEQ ID NO: 98441 - protein, 377 aa, Arabidopsis thaliana
  peptide (1)..(377): Ceres Seq. ID no. 13593695
MSHRRFNRRSSSRQSIKDCIDAKNNITTFDNISFKTDSSRRRYISEEIAKLGKGNISAHIFTFRELCVATKNFNPDNQLGEGGFGRVYKGQIETPEQVVAVKQLDRNGYQGNREFLVEVMMLSLLHHQNLVNLVGYCADGDQRILVYEYMQNGSLEDHLLELARNKKKPLDWDTRMKVAAGAARGLEYLHETADPPVIYRDFKASNILLDEEFNPKLSDFGLAKVGPTGGETHVSTRVMGTYGYCAPEYALTGQLTVKSDVYSFGVVFLEMITGRRVIDTTKPTEEQNLVTWASPLFKDRRKFTLMADPLLEGKYPIKGLYQALAVAAMCLQEEAATRPMMSDVVTALEYLAVTKTEEDGQTVEGEEEEEEDERSKL

SEQ ID NO: 98442 - protein, 258 aa, Arabidopsis thaliana
  peptide (1)..(258): Ceres Seq. ID no. 13593696
MMLSLLHHQNLVNLVGYCADGDQRILVYEYMQNGSLEDHLLELARNKKKPLDWDTRMKVAAGAARGLEYLHETADPPVIYRDFKASNILLDEEFNPKLSDFGLAKVGPTGGETHVSTRVMGTYGYCAPEYALTGQLTVKSDVYSFGVVFLEMITGRRVIDTTKPTEEQNLVTWASPLFKDRRKFTLMADPLLEGKYPIKGLYQALAVAAMCLQEEAATRPMMSDVVTALEYLAVTKTEEDGQTVEGEEEEEEDERSKL

SEQ ID NO: 98443 - DNA, 1965 bp, Arabidopsis thaliana
  misc_feature (1)..(1965): Ceres Seq. ID no. 13593698
  misc_feature (1)..(1965): Ortholog of  Ceres SEQ ID NO 14307940 as cited in SEQ ID NO 0
  misc_feature (1)..(1965): Ortholog of  Ceres SEQ ID NO 14308560 as cited in SEQ ID NO 0
gaagtgaactccattgacgacgagtgaacgaaaggagggaagaaaaaagttaggttcgaaacgaaagtaaactagttaggtgaaaagcgaaacaacacccacagagcaatggcccctgctctcgccgttacacgagatctcaccgccgtcggatctccggagaatgctcctgcgaaaggacgtgcttcggtttacagtgaagttcaatcaagccgtattaacaacactcttcctttgccttctgttctcaaaggagctttcaaaatcgtcgaaggtcccgctagttccgccgccgggaatccagatgagatagcgaagttgtttccgggtctatatggccagccatcagtagcagtggttccagatcaggatgcaccttcgtcggcaccgaaattgaagattggtgttgttttgtctggaggtcaggcacctggtgggcacaatgttatttctggactgtttgattacctgcaagagcgtgcgaaaggtagcacattttacgggttcaagggtggtccagctggtatcatgaaatgcaaatatgttgagttgaatgctgaatatattcagccttacagaaaccagggtggttttgacatgatctgcagtggaagagacaagattgaaacacctgaccagtttaaacaagctgaagaaacagcaaagaagcttgatttggatgggttggtggttatcggtggagatgattccaacaccaatgcttgccttcttgctgaaaacttcaggagtaagaacttgaaaacccgagtcattgggtgccccaagaccattgatggtgatttgaaatgcaaagaggttcctactagttttgggtttgatacagcttgcaagatttactctgaaatgatcggaaacgtcatgattgatgcaaggtcgactggaaagtactatcattttgtaagacttatgggtcgtgctgcttcccacattacgcttgagtgtgctttacaaactcacccaaacataaccattattggagaagaggtttctgcccagaagcagactttgaagaatgtcacagactacatggtggatgttatctgcaaacgtgctgaacttggttacaactacggtgtcatactgattccagaaggtctgatcgactttattcctgaggtccaagagctcattgctgaactgaatgaaattctggcaaatgaggttgtcgatgaaaatggtttgtggaagaagaagctcaccgagcaatccctgaagctgtttgatcttctgcctgaagcaattcaggaacagctgatgcttgagagagacccacacggaaatgtccaggttgctaagattgagactgagaagatgcttattcaaatggttgaaactgaattggagaaaagaaagcaagctggtgcatacaagggacaattcatgggacagtcacatttcttcgggtatgaaggaagatgcggcttgcccacaaattttgatgccacatactgttatgcacttggttatggcgctggagtactcctcaacagtgggaagaccggactaatttcttcggttgggaacttggctgctcctgtggaagaatggactgtaggtgggactgctctcacagccttgatggatgtcgagaggagacacggtaagttcaagcctgtgatcaagaaagcaatggtggaacttgaaggtgcaccatttaagaaattcgcatcactgcgtgaagaatgggcattgaagaaccgatacatcagcccaggtccgatccaattcactggacctggttcagactctctcagccacactctacttcttgaactcggggctcaatagtctctcgactaaccaccattcctttgcttttctgccttccttggaatttcgcatcagtcttgttttatcttgaatattacgtgtccgtaacatttcgattaagttgattcctctcgtgtttcttcaacatataagataattataatattatttctc

SEQ ID NO: 98444 - protein, 566 aa, Arabidopsis thaliana; identical to SEQ ID NO: 38319
  peptide (1)..(566): Ceres Seq. ID no. 13593699

SEQ ID NO: 98445 - protein, 426 aa, Arabidopsis thaliana; identical to SEQ ID NO: 38320
  peptide (1)..(426): Ceres Seq. ID no. 13593700

SEQ ID NO: 98446 - protein, 403 aa, Arabidopsis thaliana; identical to SEQ ID NO: 38321
  peptide (1)..(403): Ceres Seq. ID no. 13593701

SEQ ID NO: 98447 - DNA, 1559 bp, Arabidopsis thaliana
  misc_feature (1)..(1559): Ceres Seq. ID no. 13593720
  misc_feature (1)..(1559): Ortholog of  Ceres SEQ ID NO 15176851 as cited in SEQ ID NO 61348
agcattcctagatttttccttcttgtgatcacttgcagctatggccacacatgcagctctcgccgtctcaagaatcccggtcacacagcgactgcagtctaagagtgccattcactctttccctgctcaatgctcctccaagaggctagaagtcgctgaattctccggtctgcgtatgagtagtatcggtggggaagcatctttcttcgatgctgtagctgcacaaatcatccctaaggctgtgacaacatcaactcctgttagaggagagacagtggcgaaactgaaagttgcgattaacggttttggaaggattggtaggaactttcttaggtgttggcatggtcgtaaagactctcctctcgaagttgttgtacttaacgacagtggtggtgtcaagaatgcatcccacttgcttaagtatgactccatgcttggaaccttcaaggctgaagtgaaaattgtggacaatgaaactattagtgttgatggtaagctcatcaaagttgtctccaacagagaccctcttaagcttccatgggctgagctcggcattgacattgttatcgagggaacaggagtgtttgttgatgggccaggagcagggaagcatatccaagccggagcctcgaaagttatcatcactgcaccagccaaaggtgctgatatccctacctatgttatgggagtcaatgagcaagactatggtcacgatgtcgctaacattattagcaatgcatcttgcaccaccaactgtttggcaccttttgctaaagtcttggatgaagaatttggaattgtcaaggggacaatgacaaccacacactcctacaccggagaccaaaggcttctagatgcatcacacagggacctaaggcgtgcaagagccgcagcactgaacatagtgcctaccagcacaggagcagccaaggcggtgtcattagtgttgccgcagctgaagggtaaacttaacggcattgcactccgtgtgccaacaccaaacgtctcagtggttgaccttgttataaacgttgagaagaaaggtttgacagcagaggatgtgaacgaggcctttagaaaagccgctaatggaccgatgaaaggcattttagacgtttgcgatgcgcctcttgtctctgttgacttcaggtgctctgatgtctctaccaccattgactcgtccctcactatggttatgggtgatgatatggtcaaggtggttgcttggtatgataacgagtggggttacagccaaagagtggtggatttggctcacctagtggctagcaagtggccgggagcggaagctgttggaagtggagatcctttggaggatttctgcaagacaaacccggctgatgaggaatgcaaagtctatgactgaacaactttgatcatttctttctttatttttcaccaaaacaatactttgtatcatgagttacttattcgaaatcgtactatgcatacttgtttttctcataagattttcttgtctgatgaacaactatatgttaagactgagagaattgtatttgagaaataaccattttatgcta

SEQ ID NO: 98448 - protein, 447 aa, Arabidopsis thaliana; identical to SEQ ID NO: 49987
  peptide (1)..(447): Ceres Seq. ID no. 13593721

SEQ ID NO: 98449 - protein, 402 aa, Arabidopsis thaliana; identical to SEQ ID NO: 49988
  peptide (1)..(402): Ceres Seq. ID no. 13593722

SEQ ID NO: 98450 - protein, 317 aa, Arabidopsis thaliana; identical to SEQ ID NO: 49989
  peptide (1)..(317): Ceres Seq. ID no. 13593723

SEQ ID NO: 98451 - DNA, 1247 bp, Arabidopsis thaliana
  misc_feature (1)..(1247): Ceres Seq. ID no. 13593724
  misc_feature (1)..(1247): Ortholog of  Ceres SEQ ID NO 15175425 as cited in SEQ ID NO 0
agaaagttgatggaggagattgttcgttttgtgaacgcttcaatggcataaatttccggccatcacatttcttctactttctctttctctctcccttgttgttgttctctagaattcgattcatcgttgttaacgtcgtccattcttcttctttgatcccttctttgatctctcacatttccgattccaatttagggtttcctctcttttcacatttctagggtttttcttgttccctttgtaccggagatggtgaattgaaaggaaaaataaaacgcttttgagagcttatatttgaggttgtttcctcaggttttgtagatctgaggttgctatttttgaattagagattcttttttttttttttcaaaattttgtttgttgtgatcatacatagacgtacgtagctccatttctggtggagaaggaagaagaagagaaatgagcgcttcgaggttcataaagtgtgtcaccgttggcgacggagctgttggtaaaacctgtttgctgatttcttacaccagcaacacttttcctacggattatgtaccgactgttttcgataactttagcgcaaatgtggttgttaatggagccactgtgaatcttgggctatgggataccgcagggcaggaggattataacagattaagacctttgagttaccgcggtgctgatgttttcatcttagcattctctcttatcagtaaggctagttatgagaatgtctccaagaagtggatcccagagctgaagcattatgcccctggtgtccctatagttcttgttggaaccaaactagatcttcgggatgacaaacagttcttcattgaccaccctggcgctgtaccaattactactgctcagggagaggaactgaagaaactaattggagctcccgcatacatcgagtgcagttcaaaaacacaagagaacgtgaaaggagtatttgatgcagcgatccgagtggttcttcaacctccaaagcagaagaaaaagaaaagcaaagcacaaaaagcctgctccattttgtaatttctctacgcttctcttacgtatctctctctgtctctctgtctcttccactcttctagtgaaggcttaagaagaaaacacattgggcttaaaaattgttccagagttcgttgtgataagctctcttaatccttaaaaaaacgattatttctgtttattgatgaatagtttccagctttagctgagacctaatattgcacttaccacttctc

SEQ ID NO: 98452 - protein, 197 aa, Arabidopsis thaliana; identical to SEQ ID NO: 22405
  peptide (1)..(197): Ceres Seq. ID no. 13593725

SEQ ID NO: 98453 - DNA, 1086 bp, Arabidopsis thaliana
  misc_feature (1)..(1086): Ceres Seq. ID no. 13593730
  misc_feature (1)..(1086): Ortholog of  Ceres SEQ ID NO 13594037 as cited in SEQ ID NO 55666
atgggttacatttcaatgtccgtggttgcattccttgttgtttttgcttcgccggtggttctagccaccgatacagatccgattccagaaaacagagcccaaatcccgcaatggtttaaaacaaacgttaaaccatattcccagagaaagggcacgctagaccccgccctcgaagctgctgaagcagcgcgacaaattatcaccgtgaatcaaaaaggtggcgctaatttcaagacattaaacgaagctatcaagagcattccgacaggaaacaagaaccgtgtgatcatcaagttggctcctggtgtatacaatgagaaggtcacaatcgacatagctcgaccattcattacattgcttggtcaacctggtgcggaaacggtcttgacttaccacgggacagccgctcagtacggaaccgttgagagtgcaactcttatcgtctgggctgaatatttccaggcagctcacctcaccattaaaaacactgctccaatgccgaaaccaggttcacagggacaagctctagcaatgaggatcaacgctgataaggcagctttctatagttgtagattccatggttttcaagatactctctgtgacgacaagggcaaccatttcttcaaggattgttacatcgaaggaacttatgattttatctttggaagaggagcttccttgtacttgaatacgcaattgcacgctgttggagatggattaagagtgatcacagctcaaggtagacaaagtgcaaccgaacaaaacggatacacgttcgtgcactgcaaagtcactggaaccggaaccggaatctatttgggcaggtcttggatgagccaccctaaagtcgtctatgctttcacagagatgaccagcgtggtcaatccatctggctggagggagaacctcaaccgcggatatgacaagacggtgttctatggagaatacaagtgtttcggaccagggtcacacttagagaagagagtgccttacacacaagatattgacaaaaacgaagttacgcctttcctcactcttggttacattaagggctccacatggctacttcctcctcctaaatactga

SEQ ID NO: 98454 - protein, 361 aa, Arabidopsis thaliana
  peptide (1)..(361): Ceres Seq. ID no. 13593731
MGYISMSVVAFLVVFASPVVLATDTDPIPENRAQIPQWFKTNVKPYSQRKGTLDPALEAAEAARQIITVNQKGGANFKTLNEAIKSIPTGNKNRVIIKLAPGVYNEKVTIDIARPFITLLGQPGAETVLTYHGTAAQYGTVESATLIVWAEYFQAAHLTIKNTAPMPKPGSQGQALAMRINADKAAFYSCRFHGFQDTLCDDKGNHFFKDCYIEGTYDFIFGRGASLYLNTQLHAVGDGLRVITAQGRQSATEQNGYTFVHCKVTGTGTGIYLGRSWMSHPKVVYAFTEMTSVVNPSGWRENLNRGYDKTVFYGEYKCFGPGSHLEKRVPYTQDIDKNEVTPFLTLGYIKGSTWLLPPPKY

SEQ ID NO: 98455 - protein, 356 aa, Arabidopsis thaliana
  peptide (1)..(356): Ceres Seq. ID no. 13593732
MSVVAFLVVFASPVVLATDTDPIPENRAQIPQWFKTNVKPYSQRKGTLDPALEAAEAARQIITVNQKGGANFKTLNEAIKSIPTGNKNRVIIKLAPGVYNEKVTIDIARPFITLLGQPGAETVLTYHGTAAQYGTVESATLIVWAEYFQAAHLTIKNTAPMPKPGSQGQALAMRINADKAAFYSCRFHGFQDTLCDDKGNHFFKDCYIEGTYDFIFGRGASLYLNTQLHAVGDGLRVITAQGRQSATEQNGYTFVHCKVTGTGTGIYLGRSWMSHPKVVYAFTEMTSVVNPSGWRENLNRGYDKTVFYGEYKCFGPGSHLEKRVPYTQDIDKNEVTPFLTLGYIKGSTWLLPPPKY

SEQ ID NO: 98456 - protein, 196 aa, Arabidopsis thaliana
  peptide (1)..(196): Ceres Seq. ID no. 13593733
MPKPGSQGQALAMRINADKAAFYSCRFHGFQDTLCDDKGNHFFKDCYIEGTYDFIFGRGASLYLNTQLHAVGDGLRVITAQGRQSATEQNGYTFVHCKVTGTGTGIYLGRSWMSHPKVVYAFTEMTSVVNPSGWRENLNRGYDKTVFYGEYKCFGPGSHLEKRVPYTQDIDKNEVTPFLTLGYIKGSTWLLPPPKY

SEQ ID NO: 98457 - DNA, 1518 bp, Arabidopsis thaliana
  misc_feature (1)..(1518): Ceres Seq. ID no. 13593735
  misc_feature (1)..(1518): Ortholog of  Ceres SEQ ID NO 14308061 as cited in SEQ ID NO 55155
  misc_feature (1)..(1518): Ortholog of  Ceres SEQ ID NO 13654238 as cited in SEQ ID NO 67874
caagactcatatagtaaaaatgttttgacaatcaaaaaccaaataagcaaagagatctctgactctctatctgaaatctcaaaacggagaacgcgagggaacaagagattaaagcatagtgagaccctaagagagagagctttaggtctagaggggatcttcacaattcacacaacaactacgagataggatcgtgcgcgtcaaaagaagctggtactgctgattccagccgaagattagtctccgcttctggttgttccggtggagactcgtcggaaatgagaggtcttttcaaatccaaaccgcggactcccgctgatattgttcgtcagactcgcgatctcctcctctacgccgatcgatccaactccttccctgaccttcgagagtccaaacgcgaggaaaagatggtggaactaagtaagagcatacgagatttgaagttgattctatatggaaacagtgaggctgagcctgttgctgaagcttgtgctcagttgactcaggagttctttaaggctgatactcttcgccgtttgctcacttctcttcctaatttgaacttggaggcgaggaaagatgctacacaagttgttgcaaatcttcagaggcaacaagtcaattcacgtcttattgctgctgattatcttgaatccaacattgatcttatggattttctagttgatgggtttgaaaacaccgatatggcgttacactatggtactatgtttagagagtgcatccgtcatcagattgttgcaaaatatgttttggactcggagcacgtgaagaagtttttttactacatacagcttcccaatttcgacattgctgctgatgctgctgcaacttttaaggaacttctgacaaggcacaagtctacagttgctgagtttctcattaagaatgaagactggttttttgcagactacaactcaaagcttcttgaatcaactaattatattacccgacggcaagctattaagttgttgggcgatatattattggataggtcaaattcggctgtgatgacgaagtatgtgagctcgatggataacttgaggattctgatgaatcttctcagagaatcaagcaagactattcagatagaagctttccatgttttcaagctgtttgtagcgaaccaaaacaagccttcagacatcgccaacattctggtggcaaacagaaacaagcttctgagattgttggctgatatcaagccggacaaagaggacgagaggtttgacgcagacaaagctcaggttgtgagagagattgcaaaccttaagctgcgagagcttgcttgagcatgcacatatacacagaagctcatgatttctgttaatctttgaaagacatttttggaccatcaaagattgttgttatttattaggtactgtttcttttctctctctcagcatctacgctgttgactactctggatttttttagatcatatgaattcacatgtacactcctttagtgttgatcaaataaaaatggcattataaatcc

SEQ ID NO: 98458 - protein, 343 aa, Arabidopsis thaliana; identical to SEQ ID NO: 49601
  peptide (1)..(343): Ceres Seq. ID no. 13593736

SEQ ID NO: 98459 - protein, 300 aa, Arabidopsis thaliana; identical to SEQ ID NO: 49602
  peptide (1)..(300): Ceres Seq. ID no. 13593737

SEQ ID NO: 98460 - protein, 213 aa, Arabidopsis thaliana; identical to SEQ ID NO: 49603
  peptide (1)..(213): Ceres Seq. ID no. 13593738

SEQ ID NO: 98461 - DNA, 1020 bp, Arabidopsis thaliana
  misc_feature (1)..(1020): Ceres Seq. ID no. 13593740
  misc_feature (1)..(1020): Ortholog of  Ceres SEQ ID NO 14312204 as cited in SEQ ID NO 54547
  misc_feature (1)..(1020): Ortholog of  Ceres SEQ ID NO 13597633 as cited in SEQ ID NO 65444
atggtgacggagctggaagagcttgtcgaatttttgtcatctccttcaccgcctgtgaagaaagctgcggtggaaattgttagtggtttaactggttccgaggaaggtttacaatctctatcaaagtattccgagattcttcttccatcattgtctcagcttctaaatgaaagcaaggaggtatcagagccagcagctcaagctcttgttaatctttctcagaagtgtgaattggcaaagaagatgattcaaatgggtttgattaaagtggccatggacatgttgtataagccagagtcttgtattaccagattacttgttatgcttctagtgaatcttactcagttggatgatggggtttcttctttgcttcagattgacgatgagaagatgcatggactacatatcatgaagcttgttaggtcattttgcaggtcttctggtgaaactgctgatgatcagtttgagcatgttggttcgatccttgtcaacatatcaaaaacagaagatgggaggaaattgttactggagccaaagagacgactattaaaacagatcattaggcagtttgattcaacaaatcaattgcgaaagaaaggggttgctgggactattcgtaactgttgttttgaagccaaaaaccaactccagaatatactcttgatatcagagtttctttggcccgctctgctcctaccagttgcaggcagcaagacatacagtgagcaagatgtcgcaaaaatgccacctgagcttggaagtgcactgtccattgagcgagaaccagttactgatcctgacattcgcgttcagacactcgaagctatatatttgatcatcttagaggaggcaggtcgaagggcattttggtcagtcaacggcccacggattctacaattgggatacgaatatgaagaagatccgaaagcaatgagagcctatgagcaagtcggttctttgcttgttgaggaagctggaggtccggaagagtcgttggagccaacaaaagcagagtcttga

SEQ ID NO: 98462 - protein, 339 aa, Arabidopsis thaliana; identical to SEQ ID NO: 47446
  peptide (1)..(339): Ceres Seq. ID no. 13593741

SEQ ID NO: 98463 - protein, 258 aa, Arabidopsis thaliana; identical to SEQ ID NO: 47447
  peptide (1)..(258): Ceres Seq. ID no. 13593742

SEQ ID NO: 98464 - protein, 255 aa, Arabidopsis thaliana; identical to SEQ ID NO: 47448
  peptide (1)..(255): Ceres Seq. ID no. 13593743

SEQ ID NO: 98465 - DNA, 1111 bp, Arabidopsis thaliana
  misc_feature (1)..(1111): Ceres Seq. ID no. 13593748
  misc_feature (1)..(1111): Ortholog of  Ceres SEQ ID NO 12611159 as cited in SEQ ID NO 59821
gagaaagacaaacaaattgaagagaaataataacaattaactcaaccaaaaatatgaggaagccagaggtagccattgcagctagtactcaccaagtaaagaagatgaagaagggactttggtctcctgaggaagactcaaagctgatgcaatacatgttaagcaatggacaaggatgttggagtgatgttgcgaaaaacgcaggacttcaaagatgtggcaaaagctgccgtcttcgttggatcaactatcttcgtcctgacctcaagcgtggcgctttctctcctcaagaagaggatctcatcattcgctttcattccatcctcggcaacaggtggtctcagattgcagcacgattgcctggtcggaccgataacgagatcaagaatttctggaactcaacaataaagaaaaggctaaagaagatgtccgatacctccaacttaatcaacaactcatcctcatcacccaacacagcaagcgattcctcttctaattccgcatcttctttggatattaaagacattataggaagcttcatgtccttacaagaacaaggcttcgtcaacccttccttgacccacatacaaaccaacaatccatttccaacgggaaacatgatcagccacccgtgcaatgacgattttaccccttatgtagatggtatctatggagtaaacgcaggggtacaaggggaactctacttcccacctttggaatgtgaagaaggtgattggtacaatgcaaatataaacaaccacttagacgagttgaacactaatggatccggaaacgcacctgagggtatgagaccagtggaagaattttgggaccttgaccagttgatgaacactgaggttccttcgttttacttcaacttcaaacaaagcatatgaatatttttacgtcatcttattcttttttctattgcggtttatactcaagattcttagccacacacacataaatgcaaatatatatacattgttagagagtattttgtatttcgaataatcttttcgtactagggcttgagccttgaggtgccatgtaatgattagtcaatgtaaaacatatatcctataataaataaataaaagaaataataagc

SEQ ID NO: 98466 - protein, 280 aa, Arabidopsis thaliana; identical to SEQ ID NO: 49344
  peptide (1)..(280): Ceres Seq. ID no. 13593749

SEQ ID NO: 98467 - protein, 263 aa, Arabidopsis thaliana; identical to SEQ ID NO: 49345
  peptide (1)..(263): Ceres Seq. ID no. 13593750

SEQ ID NO: 98468 - protein, 249 aa, Arabidopsis thaliana; identical to SEQ ID NO: 49346
  peptide (1)..(249): Ceres Seq. ID no. 13593751

SEQ ID NO: 98469 - DNA, 1275 bp, Arabidopsis thaliana
  misc_feature (1)..(1275): Ceres Seq. ID no. 13593756
  misc_feature (1)..(1275): Ortholog of  Ceres SEQ ID NO 13654989 as cited in SEQ ID NO 63117
  misc_feature (1)..(1275): Ortholog of  Ceres SEQ ID NO 13584744 as cited in SEQ ID NO 69137
atgggatgtttcggacgcactccgaaatcgaacaaacgatcagataccaaaaccacgaagaacaacgatttcaccccaaaaaaactcaccgtcaatgcaaatcgagataagctgacacaacccagctcagattgtttaaaagttagtatatgtggagatgtaagcaaggagatagttactaagaaggatcaattagctttggatgctaaagatactaatgttgaagatgaagttatagtgaagaaagcacagacttttacatttgaagaactctctgtttctactggaaactttaagtcggattgttttctaggagaaggaggttttggaaaagtttacaaaggtttcattgagaaaatcaatcaggttgttgcaattaagcaacttgatcggaatggtgctcaaggaatcagggagtttgttgttgaagtgttgacattaagtctcgctgatcatccaaatctcgtcaagcttataggattttgcgctgagggtgttcagagactgttggtttacgagtatatgcctctaggatctctggataatcaccttcatgatcttccttctggtaaaaacccgcttgcttggaacactcgaatgaaaatagcggctggtgcagcaagaggactagagtatctccacgatacaatgaaacctcctgtgatataccgtgatcttaagtgttcgaatatcttgatcgatgaaggatatcacgcaaaactctcagactttggattagctaaagtaggaccaagaggaagtgaaactcatgtttccacaagagttatgggaacatacggttactgtgctcctgattacgcattaactggacaactcacattcaaatcagatgtatacagtttcggagttgttcttttggagcttattactggaaggaaagcttacgataacacgagaacacgtaatcaccagagtcttgttgaatgggcaaatcccttgtttaaagataggaagaatttcaagaaaatggttgatccgttactcgaaggagattatccggttagaggattgtatcaagcacttgcaatagctgcaatgtgtgttcaagaacagcctagtatgagaccggtgatagctgatgtagtaatggctttggatcacttagcttcttctaaatatgatcgtagtcaccgtcaaaagcaggataatgtgaccgagactaaagtcgatgaagagaaaacacttaccacagaatctaatgtttgtgtggaggagaaacaagagatcaagatatgctcagatcaagcaacttaa

SEQ ID NO: 98470 - protein, 424 aa, Arabidopsis thaliana
  peptide (1)..(424): Ceres Seq. ID no. 13593757
MGCFGRTPKSNKRSDTKTTKNNDFTPKKLTVNANRDKLTQPSSDCLKVSICGDVSKEIVTKKDQLALDAKDTNVEDEVIVKKAQTFTFEELSVSTGNFKSDCFLGEGGFGKVYKGFIEKINQVVAIKQLDRNGAQGIREFVVEVLTLSLADHPNLVKLIGFCAEGVQRLLVYEYMPLGSLDNHLHDLPSGKNPLAWNTRMKIAAGAARGLEYLHDTMKPPVIYRDLKCSNILIDEGYHAKLSDFGLAKVGPRGSETHVSTRVMGTYGYCAPDYALTGQLTFKSDVYSFGVVLLELITGRKAYDNTRTRNHQSLVEWANPLFKDRKNFKKMVDPLLEGDYPVRGLYQALAIAAMCVQEQPSMRPVIADVVMALDHLASSKYDRSHRQKQDNVTETKVDEEKTLTTESNVCVEEKQEIKICSDQAT

SEQ ID NO: 98471 - protein, 250 aa, Arabidopsis thaliana; identical to SEQ ID NO: 49411
  peptide (1)..(250): Ceres Seq. ID no. 13593758

SEQ ID NO: 98472 - protein, 225 aa, Arabidopsis thaliana
  peptide (1)..(225): Ceres Seq. ID no. 13593759
MKIAAGAARGLEYLHDTMKPPVIYRDLKCSNILIDEGYHAKLSDFGLAKVGPRGSETHVSTRVMGTYGYCAPDYALTGQLTFKSDVYSFGVVLLELITGRKAYDNTRTRNHQSLVEWANPLFKDRKNFKKMVDPLLEGDYPVRGLYQALAIAAMCVQEQPSMRPVIADVVMALDHLASSKYDRSHRQKQDNVTETKVDEEKTLTTESNVCVEEKQEIKICSDQAT

SEQ ID NO: 98473 - DNA, 498 bp, Arabidopsis thaliana
  misc_feature (1)..(498): Ceres Seq. ID no. 13593764
  misc_feature (1)..(498): Ortholog of  Ceres SEQ ID NO 14307370 as cited in SEQ ID NO 54127
  misc_feature (1)..(498): Ortholog of  Ceres SEQ ID NO 13596338 as cited in SEQ ID NO 68005
  misc_feature (1)..(498): Ortholog of  Ceres SEQ ID NO 14302128 as cited in SEQ ID NO 0
atggacgatctcttgggcctccttagaatccgtatcaaacgtggcgtcaatttagccgtccgtgacatcagtagcagcgatccttacgtcgtcgtcaagatgggcaaacagaaattgaagactcgtgtcattaacaaagatgttaatccagaatggaatgaagatttgactctctccgtcacagactccaatcttaccgtcctcttgacggtgtatgatcacgacatgtttagcaaagacgacaagatgggcgatgctgagttcgagataaagccctatattgaggctttgaggatgcaactcgatggacttcctagtggaaccattgtgaccacggttaagccaagtcgtcgtaactgtctagccgaggagtcacgtgtcacctgggtcgacggcaagctcgtccaggatctcgttctcagattgcgacatgtggaatgcggagaggtcgaggctcagcttcaatggattgacctccctggctccaagggtctatga

SEQ ID NO: 98474 - protein, 165 aa, Arabidopsis thaliana; identical to SEQ ID NO: 49479
  peptide (1)..(165): Ceres Seq. ID no. 13593765

SEQ ID NO: 98475 - protein, 132 aa, Arabidopsis thaliana; identical to SEQ ID NO: 49480
  peptide (1)..(132): Ceres Seq. ID no. 13593766

SEQ ID NO: 98476 - protein, 90 aa, Arabidopsis thaliana
  peptide (1)..(90): Ceres Seq. ID no. 13593767
MFSKDDKMGDAEFEIKPYIEALRMQLDGLPSGTIVTTVKPSRRNCLAEESRVTWVDGKLVQDLVLRLRHVECGEVEAQLQWIDLPGSKGL

SEQ ID NO: 98477 - DNA, 1725 bp, Arabidopsis thaliana
  misc_feature (1)..(1725): Ceres Seq. ID no. 13593768
  misc_feature (1)..(1725): Ortholog of  Ceres SEQ ID NO 13597269 as cited in SEQ ID NO 63932
acttcaaaattcatcacaaagagagataagagagatggagaacggtgagaaagcagctgagactgtcgttgttgggaactatgttgagatggagaaggatggtaaagctttagacatcaaatctaagctatctgacatgttttggcatggtggctctgcttatgatgcttggttcagctgtgcttccaatcaggtggcacaagtgctgttgacactgccatactcgttctcacagctggggatgctctcagggattctgtttcagctcttttatggcatcttaggtagttggactgcttacctcatcagtattctctatgttgaatacagaaccagaaaggaaagagagaaagttaacttcagaaaccatgtcattcagtggtttgaggttcttgatggattgcttgggaagcattggaggaatgttggtttagcctttaactgcaccttccttctctttggatctgtcattcaactcatagcttgtgccagcaacatatattacataaatgataatctggacaagaggacatggacatacatatttggagcatgttgtgcaaccacagtctttattccttccttccacaactacaggatctggtcttttcttggactcttgatgaccacttacactgcttggtacctcaccattgcctctatcctccatggacaggtagaaggagtgaagcattcaggaccaagcaagctggttttatacttcacaggggccacaaacattctttacacattcggtggacatgctgttactgtagagataatgcatgctatgtggaaacctcagaagttcaagtccatatacctgtttgcaacactctacgtgctgacgctaacgctgccttctgcgtctgcggtttattgggcgtttggtgatttgcttctaaaccattcaaacgcatttgctcttctcccaaagaatctttaccgtgactttgcagttgtgcttatgctcatccatcagttcatcacctttggttttgcttgcacgccactctactttgtgtgggagaagctaatagggatgcatgagtgcagaagcatgtgtaaacgagccgctgcgaggctccctgtcgttatacccatttggtttcttgctatcatattcccgttctttggtcccattaactcaaccgtaggatctcttctcgtcagcttcactgtctacatcatcccagcactagctcacatcttcaccttccgctcatccgccgcacgtgaaaacgctgtggagcagccaccaaggtttctaggacgatggactggggcattcacgatcaatgccttcatagttgtgtgggtgttcattgttggattcgggttcggtggttgggctagtatgatcaattttgtacaccagattgacacctttggcctcttcaccaaatgctaccaatgcccaccaccggttatggtctcacctcctccaatcagccatcctcacttcaatcacactcacggcctttgaattttaagcatcaaatctttagtaccggcccaaaagtgtccctagctgccacgaaagttggcgtttttccacggatcagaaaaagacgagatttgggtttttcttagatctaccaagcccgtagtgtgtttgggtgtttgtttagcatctaaagttggttggtctgtttttattgtatttcatgtttgggaattaaagaaaaaaaaaaaaaactttaggagttaatgccatatctttca

SEQ ID NO: 98478 - protein, 494 aa, Arabidopsis thaliana
  peptide (1)..(494): Ceres Seq. ID no. 13593769
LQNSSQREIREMENGEKAAETVVVGNYVEMEKDGKALDIKSKLSDMFWHGGSAYDAWFSCASNQVAQVLLTLPYSFSQLGMLSGILFQLFYGILGSWTAYLISILYVEYRTRKEREKVNFRNHVIQWFEVLDGLLGKHWRNVGLAFNCTFLLFGSVIQLIACASNIYYINDNLDKRTWTYIFGACCATTVFIPSFHNYRIWSFLGLLMTTYTAWYLTIASILHGQVEGVKHSGPSKLVLYFTGATNILYTFGGHAVTVEIMHAMWKPQKFKSIYLFATLYVLTLTLPSASAVYWAFGDLLLNHSNAFALLPKNLYRDFAVVLMLIHQFITFGFACTPLYFVWEKLIGMHECRSMCKRAAARLPVVIPIWFLAIIFPFFGPINSTVGSLLVSFTVYIIPALAHIFTFRSSAARENAVEQPPRFLGRWTGAFTINAFIVVWVFIVGFGFGGWASMINFVHQIDTFGLFTKCYQCPPPVMVSPPPISHPHFNHTHGL

SEQ ID NO: 98479 - protein, 483 aa, Arabidopsis thaliana; identical to SEQ ID NO: 49582
  peptide (1)..(483): Ceres Seq. ID no. 13593770

SEQ ID NO: 98480 - protein, 465 aa, Arabidopsis thaliana; identical to SEQ ID NO: 49583
  peptide (1)..(465): Ceres Seq. ID no. 13593771

SEQ ID NO: 98481 - DNA, 1767 bp, Arabidopsis thaliana
  misc_feature (1)..(1767): Ceres Seq. ID no. 13593792
  misc_feature (1)..(1767): Ortholog of  Ceres SEQ ID NO 13660287 as cited in SEQ ID NO 67316
atctctcgtcttcaccattcttctcacttcttcttttctccttatatttcatttcttccacataactaaaaaaaaaaggaattagcgatgaggggaggtgatggagaagaaggatcggagtcaagagttgcactgttgaaaagtcctcacacggcggaggaagacggtgaaggattgaaggatagaattttggttgagacaaaaaagctatggcaaatagttggtccggccatattcagtcgagtaacgacatattcgatgcttgtaatcactcaagctttcgctggtcatctcggcgatcttgaactcgccgccatatccatcgttaataacgtcaccgttggcttcaactttggcctcttgcttggaatggcgagtgcgttggaaacgctgtgtggacaagcgtttggagcgaagaaatatcatatgttgggagtttatatgcagcgttcttggattgttctcttcttttgctgtgtcttgttattaccaacttatattttcactactccggttcttaaatttcttggtcaaccggacgatatcgctgagctgtccggtgttgtcgccatttgggtcataccgcttcatttcgccttcactttgtcttttccccttcaacgtttccttcagtgccagctcaaaaaccgagtgactgcgtatgcggcagcggttgcattggtggttcatattttagtgtgttggttgttcgtggacgggcttaaactaggagtcgtggggactgtagctacgattagtatctcgtggtgggtcaatgttcttattctgttagtttactctacttgtggtggttgtccgcttacttggaccggcttatcctctgaagccttaaccggactttgggaattccttaaactctctgcttcttcaggcgtcatgctctgtttggagaattggtattatcggattttgattataatgactgggaatcttcaaaatgctcgaatcgccgttgactccttgtccatatgcatggcgataaatggttgggagatgatgatacctctcgctttcttcgccggaaccggtgtccgtgtggcgaacgaattaggagctggtaatggtaaaggagcaagatttgcgacgattgtatcggtaacacaatcgttgataatcggattgtttttttgggtgctaataatgcttctccataaccaaatcgcatggatcttctcttcgagtgtagccgtcttagacgccgtcaataaactctcacttctgctagctttcaccgttcttcttaacagcgttcaaccggttctttccggtgtggcggttggatcgggttggcaatcgtacgtggcatatataaacttgggatgttactattgcattggtgttccacttgggtttctcatgggctggggttttaaactcggtgtcatgggaatttggggtggtatgatttttggaggaaccgctgttcaaaccatgatcttaagttttatcacaatgagatgtgactgggaaaaagaggcgcagaaagcaagtgctcgtattaacaaatggtccaacacaataaaatgattcaagattttgttgaatcaactattaaataattttgcagcataatatggttttggaaaactggtgtatgttttgtatccaaatgtgatacaacatatttagagccggttcatagattacataggatcgctgcaattactgcaaaatggcctttgtgattttctttttatagcatgccttgtaatattattagataaaactgctttattttaatttagt

SEQ ID NO: 98482 - protein, 486 aa, Arabidopsis thaliana; identical to SEQ ID NO: 50104
  peptide (1)..(486): Ceres Seq. ID no. 13593793

SEQ ID NO: 98483 - protein, 429 aa, Arabidopsis thaliana; identical to SEQ ID NO: 50105
  peptide (1)..(429): Ceres Seq. ID no. 13593794

SEQ ID NO: 98484 - protein, 392 aa, Arabidopsis thaliana; identical to SEQ ID NO: 50106
  peptide (1)..(392): Ceres Seq. ID no. 13593795

SEQ ID NO: 98485 - DNA, 849 bp, Arabidopsis thaliana
  misc_feature (1)..(849): Ceres Seq. ID no. 13593799
  misc_feature (1)..(849): Ortholog of  Ceres SEQ ID NO 12609146 as cited in SEQ ID NO 52118
  misc_feature (1)..(849): Ortholog of  Ceres SEQ ID NO 14303397 as cited in SEQ ID NO 54614
  misc_feature (1)..(849): Ortholog of  Ceres SEQ ID NO 13594056 as cited in SEQ ID NO 55691
  misc_feature (1)..(849): Ortholog of  Ceres SEQ ID NO 14314186 as cited in SEQ ID NO 57457
  misc_feature (1)..(849): Ortholog of  Ceres SEQ ID NO 13638136 as cited in SEQ ID NO 58644
  misc_feature (1)..(849): Ortholog of  Ceres SEQ ID NO 13596868 as cited in SEQ ID NO 62806
  misc_feature (1)..(849): Ortholog of  Ceres SEQ ID NO 12587035 as cited in SEQ ID NO 63605
  misc_feature (1)..(849): Ortholog of  Ceres SEQ ID NO 13595885 as cited in SEQ ID NO 69265
  misc_feature (1)..(849): Ortholog of  Ceres SEQ ID NO 12566239 as cited in SEQ ID NO 0
  misc_feature (1)..(849): Ortholog of  Ceres SEQ ID NO 13599119 as cited in SEQ ID NO 0
  misc_feature (1)..(849): Ortholog of  Ceres SEQ ID NO 14308987 as cited in SEQ ID NO 0
atggcgaagttatgttgcttcggttcttcagactacgatcttgtggttgggagggcatcgactagttctggaaaagggagaaataacgacggcgagattaaattcggttacagcttagtgaaagggaaagctaatcatccaatggaggattatcatgtgtctaaattcgtgaaaatagacggtaacgagctcggtttgtttgcaatctacgatggtcatttgggtgaacgtgttcctgcttatctacagaagcatttgttctccaatatcctcaaagaggagcagtttaggtatgatcctcagagatcaataattgctgcctatgagaagacagaccaagccattctgtcacattcttctgacttaggccgtggtggctcaacggctgtaaccgctattctgatgaatggacggcgtttatgggtggcaaatgtgggtgattctcgggcggttctatctcaaggaggtcaggcaatacagatgactattgatcatgagccgcacactgaaaggttgagcatcgagggtaaaggaggctttgtatccaacatgccaggagatgtccctcgggttaacgggcagctagcggtttctcgtgcttttggagacaaaagcctcaaaacacatctacggtcagatcctgacgttaaagattcatcgatcgatgatcacacagatgttcttgttcttgctagtgacggtctatggaaggtgatggctaaccaagaggcgattgatattgcgagaagaatcaaagatccattgaaagcagcgaaagaactaacaaccgaagcgcttagaagagacagtaaagatgatatttcttgcattgtcgtcagattaaggtga

SEQ ID NO: 98486 - protein, 282 aa, Arabidopsis thaliana
  peptide (1)..(282): Ceres Seq. ID no. 13593800
MAKLCCFGSSDYDLVVGRASTSSGKGRNNDGEIKFGYSLVKGKANHPMEDYHVSKFVKIDGNELGLFAIYDGHLGERVPAYLQKHLFSNILKEEQFRYDPQRSIIAAYEKTDQAILSHSSDLGRGGSTAVTAILMNGRRLWVANVGDSRAVLSQGGQAIQMTIDHEPHTERLSIEGKGGFVSNMPGDVPRVNGQLAVSRAFGDKSLKTHLRSDPDVKDSSIDDHTDVLVLASDGLWKVMANQEAIDIARRIKDPLKAAKELTTEALRRDSKDDISCIVVRLR

SEQ ID NO: 98487 - protein, 235 aa, Arabidopsis thaliana
  peptide (1)..(235): Ceres Seq. ID no. 13593801
MEDYHVSKFVKIDGNELGLFAIYDGHLGERVPAYLQKHLFSNILKEEQFRYDPQRSIIAAYEKTDQAILSHSSDLGRGGSTAVTAILMNGRRLWVANVGDSRAVLSQGGQAIQMTIDHEPHTERLSIEGKGGFVSNMPGDVPRVNGQLAVSRAFGDKSLKTHLRSDPDVKDSSIDDHTDVLVLASDGLWKVMANQEAIDIARRIKDPLKAAKELTTEALRRDSKDDISCIVVRLR

SEQ ID NO: 98488 - protein, 148 aa, Arabidopsis thaliana
  peptide (1)..(148): Ceres Seq. ID no. 13593802
MNGRRLWVANVGDSRAVLSQGGQAIQMTIDHEPHTERLSIEGKGGFVSNMPGDVPRVNGQLAVSRAFGDKSLKTHLRSDPDVKDSSIDDHTDVLVLASDGLWKVMANQEAIDIARRIKDPLKAAKELTTEALRRDSKDDISCIVVRLR

SEQ ID NO: 98489 - DNA, 1367 bp, Arabidopsis thaliana
  misc_feature (1)..(1367): Ceres Seq. ID no. 13593811
  misc_feature (1)..(1367): Ortholog of  Ceres SEQ ID NO 14310635 as cited in SEQ ID NO 53821
cccacgcgtccggaagccacggggggagcgctagcacttaaagatttgcaccgttttctctctggctttgtgttgtgctagatgcgatgcaatagcaatattttcctggagtttcaagtaactagtggcttaggttcataatagtgtttctttgtaggacgaaagctgtgttagtattctctccactgtaaaggacaagatgtctcagaagcgaaatcttccttcttggatgagttctagggatcccgagattactccgagtaagtctcattgtaagaagcctaaggatgaaggaccaaccgaagagcacaacagtagaaatgccccttccaacaagtcagaacacgccgagccaagttcaaataccactgaattctctaaacttatggaaggcgttgtttttgtactttcgggctttgttaatcctgagaggagtacactgaggtcacaagccttgacaatgggagccacctatcaacctgactggaacgctggctctaccttgttgatttgtgcttttcctaacactccaaagttccgtcaagttgaaacaaatggtggaacaattatctcaaaggagtggataactgagtgttatgcgcagaagaagttggtagatatcgagcaataccttatgcatgctggaaaaccatggaggaaaagcagtagtccccaagatgctaatcgagaaaagagagaacacctgtctaaaaaaccagagaagcaagtagagaaaaaaacagaaacaaggggaacaccatctacctcatccaagaatagatcagcttgcaatcttgtgaaagagccattttttgttacagaggtgaagaaatgggccagggatgacctaagtcaaaccatctcatggcttgagagtcaggaggaaaaaccagaaccaggcgaaatcaagcgaatagctgcggaaggagtcttaacctgcttacaagacgccatagattctcttgaacagaagcaggacattggatcagttacagagctatggagctttgtccctcgtgtagtgaaggagcttggaaagatggaatcgtcttctaaaaaggaaaattcaacagcatcaaaggaagaagtttgcaaacaagcaaagtcgtggaaaaagatctacgaagctgagctagcaaaaccgggcgaagatgaatcgacctctcgggttgcttgtggctatgacagtgatatgaccgttgagatgactgaagaagagatcgaacttgcttataggaacgtttctttagagtgtctttagatcaaacttgtttcattttgcatatgatctcttaaggaattccaagaattcttgttatactcggtttgttcggtttgagtaggatgttattactgataaaaatttg

SEQ ID NO: 98490 - protein, 353 aa, Arabidopsis thaliana
  peptide (1)..(353): Ceres Seq. ID no. 13593812
MSQKRNLPSWMSSRDPEITPSKSHCKKPKDEGPTEEHNSRNAPSNKSEHAEPSSNTTEFSKLMEGVVFVLSGFVNPERSTLRSQALTMGATYQPDWNAGSTLLICAFPNTPKFRQVETNGGTIISKEWITECYAQKKLVDIEQYLMHAGKPWRKSSSPQDANREKREHLSKKPEKQVEKKTETRGTPSTSSKNRSACNLVKEPFFVTEVKKWARDDLSQTISWLESQEEKPEPGEIKRIAAEGVLTCLQDAIDSLEQKQDIGSVTELWSFVPRVVKELGKMESSSKKENSTASKEEVCKQAKSWKKIYEAELAKPGEDESTSRVACGYDSDMTVEMTEEEIELAYRNVSLECL

SEQ ID NO: 98491 - protein, 343 aa, Arabidopsis thaliana
  peptide (1)..(343): Ceres Seq. ID no. 13593813
MSSRDPEITPSKSHCKKPKDEGPTEEHNSRNAPSNKSEHAEPSSNTTEFSKLMEGVVFVLSGFVNPERSTLRSQALTMGATYQPDWNAGSTLLICAFPNTPKFRQVETNGGTIISKEWITECYAQKKLVDIEQYLMHAGKPWRKSSSPQDANREKREHLSKKPEKQVEKKTETRGTPSTSSKNRSACNLVKEPFFVTEVKKWARDDLSQTISWLESQEEKPEPGEIKRIAAEGVLTCLQDAIDSLEQKQDIGSVTELWSFVPRVVKELGKMESSSKKENSTASKEEVCKQAKSWKKIYEAELAKPGEDESTSRVACGYDSDMTVEMTEEEIELAYRNVSLECL

SEQ ID NO: 98492 - protein, 291 aa, Arabidopsis thaliana
  peptide (1)..(291): Ceres Seq. ID no. 13593814
MEGVVFVLSGFVNPERSTLRSQALTMGATYQPDWNAGSTLLICAFPNTPKFRQVETNGGTIISKEWITECYAQKKLVDIEQYLMHAGKPWRKSSSPQDANREKREHLSKKPEKQVEKKTETRGTPSTSSKNRSACNLVKEPFFVTEVKKWARDDLSQTISWLESQEEKPEPGEIKRIAAEGVLTCLQDAIDSLEQKQDIGSVTELWSFVPRVVKELGKMESSSKKENSTASKEEVCKQAKSWKKIYEAELAKPGEDESTSRVACGYDSDMTVEMTEEEIELAYRNVSLECL

SEQ ID NO: 98493 - DNA, 862 bp, Arabidopsis thaliana
  misc_feature (1)..(862): Ceres Seq. ID no. 13593826
  misc_feature (1)..(862): Ortholog of  Ceres SEQ ID NO 13594494 as cited in SEQ ID NO 51293
  misc_feature (1)..(862): Ortholog of  Ceres SEQ ID NO 13595538 as cited in SEQ ID NO 59858
  misc_feature (1)..(862): Ortholog of  Ceres SEQ ID NO 12598249 as cited in SEQ ID NO 61073
  misc_feature (1)..(862): Ortholog of  Ceres SEQ ID NO 13582815 as cited in SEQ ID NO 68106
ctcttccaatttcgtttcgacatatttcgcgattcgtctaaggttttgttactgattgagaaaacatgggaggtgacaatgataatgacaaagacaaagggtttcatgggtatcctcccgctggatacccaccccctggggcttatccacccgctggatacccacaacaaggttaccctccaccacccggtgcttacccgcctgcaggttatcctccgggtgcctacccacctgctcctggtggttatcctcccgcccctggttatggtggttatcctccagctcctggttatggaggttatcctcctgcacctggtcatggtggttaccctcctgctggctatcctgctcatcactcaggacacgcaggaggaattgggggtatgattgcaggtgctgcagctgcctatggagctcaccacgtagctcatagctctcacggtccttacggacatgctgcatatggtcacggttttggccatggtcatggctatggctatggtcatggtcatggtaagttcaagcatgggaagcacgggaagttcaagcatgggaagcatggaatgtttggaggaggcaagttcaagaagtggaagtgatctagttaataccttttgtgaatctgtctggactgaccaatgtttcaaataagccctaaacattatataagttgactttcgtcggttagattgctggttcgagttggaataattgaaacttaattagtatcaaatcttattgtgtactttaaagctatcgttggctttataatgacagattctggtttcggtgtgttgttttaagatttttgtatatactgttttttacattgcttaagcttatagaagtcatgattatgact

SEQ ID NO: 98494 - protein, 177 aa, Arabidopsis thaliana
  peptide (1)..(177): Ceres Seq. ID no. 13593827
MGGDNDNDKDKGFHGYPPAGYPPPGAYPPAGYPQQGYPPPPGAYPPAGYPPGAYPPAPGGYPPAPGYGGYPPAPGYGGYPPAPGHGGYPPAGYPAHHSGHAGGIGGMIAGAAAAYGAHHVAHSSHGPYGHAAYGHGFGHGHGYGYGHGHGKFKHGKHGKFKHGKHGMFGGGKFKKWK

SEQ ID NO: 98495 - protein, 128 aa, Arabidopsis thaliana
  peptide (1)..(128): Ceres Seq. ID no. 13593828
LFQFRFDIFRDSSKVLLLIEKTWEVTMIMTKTKGFMGILPLDTHPLGLIHPLDTHNKVTLHHPVLTRLQVILRVPTHLLLVVILPPLVMVVILQLLVMEVILLHLVMVVTLLLAILLITQDTQEELGV

SEQ ID NO: 98496 - protein, 102 aa, Arabidopsis thaliana
  peptide (1)..(102): Ceres Seq. ID no. 13593829
MIMTKTKGFMGILPLDTHPLGLIHPLDTHNKVTLHHPVLTRLQVILRVPTHLLLVVILPPLVMVVILQLLVMEVILLHLVMVVTLLLAILLITQDTQEELGV

SEQ ID NO: 98497 - DNA, 1815 bp, Arabidopsis thaliana
  misc_feature (1)..(1815): Ceres Seq. ID no. 13600807
  misc_feature (1)..(1815): Ortholog of  Ceres SEQ ID NO 14302343 as cited in SEQ ID NO 67343
aaccacgttttcacagagagccacaccaccttcatcaaacttcttcataacaaatcacatttctctctcttctctgcttgaatccattacagagggattgtggagtggtttggtttgatttgatttcgatctgtgacaatggtggagactagtatcgacatggaggaaggaactctcgagatcggaatggagtatagaactgtctccggagttgctggacctttggtcatccttgacaaagtgaagggtccaaagtaccaggagattgttaatattcgcttaggagatggatcaacgagacgtggtcaggtcttggaggttgatggggagaaagctgttgtccaggtttttgaaggaacatctgggattgacaacaagtttaccaccgtgcaattcacaggagaggtactgaaaacgcctgtgtcattggacatgcttggccgcatatttaacggctcgggaaagccaattgataatggccctcctattttgccagaggcataccttgatatttctggaagttcaatcaaccccagtgaaagaacctaccctgaagagatgatacaaacggggatttctaccattgatgtcatgaactccattgctcgtggacagaagattcctcttttctctgctgctggtctacctcataatgagattgctgctcaaatttgtcgtcaggctggacttgtgaagcggttggaaaagactgagaacttaattcaggaggatcatggagaggacaattttgcaattgtttttgcagctatgggtgtaaacatggagacagctcagtttttcaagcgtgattttgaagaaaatggatcgatggaaagggttacccttttcctgaacttggccaatgatccaaccattgagagaattatcactcctcgaattgccctaacaaccgctgaatatttggcttatgaatgtggaaagcatgtgcttgttatattgacagacatgagttcttatgcagatgctcttcgtgaggtttctgctgctcgagaagaagttcctggaagacgtggatatccggggtatattatacagatcttgcaactatttatgaacgcgcgggacgtattgaaggaagaaagggttccattacccaaatccctatcctgactatgcccaatgacgatatcactcaccctactccggatcttactggttacattactgagggtcagatatatattgataggcaacttcacaacagacagatatacccacccattaacgtgcttccatcactttctcggctgatgaagagtgctattggtgaaggaatgactcgcaaagaccattctgatgtgtccaaccagctatacgcaaattatgcaatcggaaaagatgttcaagccatgaaagctgttgttggagaagaagctctgtcttccgaggatctgctgtatttagagtttctggataaatttgaaaggaagtttgtgatgcaaggcgcatacgatacaaggaacatcttccagtcgcttgacttggcatggacactgctccgtatcttcccacgtgagcttcttcaccgtattcctgccaaaacacttgatcaattctacagccgcgactccacaagctaaaccttttaaaacaagctctatgttgctccattcttatcttatttggaacttaaatcataccgagagaagacaaacaggattggttgcgtgaaaacaaaactcagagaattgtgaagttgggaattttcttttgtttttccatttgtataataaaggtttgtgtagagaaacttcgtacaaaatctatttataaaccacttcagctcctgtcttc

SEQ ID NO: 98498 - protein, 330 aa, Arabidopsis thaliana
  peptide (1)..(330): Ceres Seq. ID no. 13600808
MVETSIDMEEGTLEIGMEYRTVSGVAGPLVILDKVKGPKYQEIVNIRLGDGSTRRGQVLEVDGEKAVVQVFEGTSGIDNKFTTVQFTGEVLKTPVSLDMLGRIFNGSGKPIDNGPPILPEAYLDISGSSINPSERTYPEEMIQTGISTIDVMNSIARGQKIPLFSAAGLPHNEIAAQICRQAGLVKRLEKTENLIQEDHGEDNFAIVFAAMGVNMETAQFFKRDFEENGSMERVTLFLNLANDPTIERIITPRIALTTAEYLAYECGKHVLVILTDMSSYADALREVSAAREEVPGRRGYPGYIIQILQLFMNARDVLKEERVPLPKSLS

SEQ ID NO: 98499 - protein, 323 aa, Arabidopsis thaliana
  peptide (1)..(323): Ceres Seq. ID no. 13600809
MEEGTLEIGMEYRTVSGVAGPLVILDKVKGPKYQEIVNIRLGDGSTRRGQVLEVDGEKAVVQVFEGTSGIDNKFTTVQFTGEVLKTPVSLDMLGRIFNGSGKPIDNGPPILPEAYLDISGSSINPSERTYPEEMIQTGISTIDVMNSIARGQKIPLFSAAGLPHNEIAAQICRQAGLVKRLEKTENLIQEDHGEDNFAIVFAAMGVNMETAQFFKRDFEENGSMERVTLFLNLANDPTIERIITPRIALTTAEYLAYECGKHVLVILTDMSSYADALREVSAAREEVPGRRGYPGYIIQILQLFMNARDVLKEERVPLPKSLS

SEQ ID NO: 98500 - protein, 314 aa, Arabidopsis thaliana
  peptide (1)..(314): Ceres Seq. ID no. 13600810
MEYRTVSGVAGPLVILDKVKGPKYQEIVNIRLGDGSTRRGQVLEVDGEKAVVQVFEGTSGIDNKFTTVQFTGEVLKTPVSLDMLGRIFNGSGKPIDNGPPILPEAYLDISGSSINPSERTYPEEMIQTGISTIDVMNSIARGQKIPLFSAAGLPHNEIAAQICRQAGLVKRLEKTENLIQEDHGEDNFAIVFAAMGVNMETAQFFKRDFEENGSMERVTLFLNLANDPTIERIITPRIALTTAEYLAYECGKHVLVILTDMSSYADALREVSAAREEVPGRRGYPGYIIQILQLFMNARDVLKEERVPLPKSLS

SEQ ID NO: 98501 - DNA, 1449 bp, Arabidopsis thaliana
  misc_feature (1)..(1449): Ceres Seq. ID no. 13600892
  misc_feature (1)..(1449): Ortholog of  Ceres SEQ ID NO 14302514 as cited in SEQ ID NO 65814
atttcgctgaatagggttcagtacaaaattcggaatcgtaggtttaagaattttagatcattgaaacagccatgtctaggcaggtcacgagacttctcggatctcttcgccattccggcggcggctgcagcggcagctcaaaggtctgctctctcacttcattggtacagtctcgctccttcgggacaactcctccgcctcctgcggcggtctttgtcgacaaaaatacacgtgtcatctgccaaggtattaccggaaagaacgggaccttccacactgaacaagccattgaatacggcaccaaaatggtagcaggagtgacaccaaagaagggtggaacagaacatttggggctacctgttttcaacactgttgctgaagctaaggctgagactaaagccaatgcctctgtgatctacgtacctgcgcctttcgctgctgctgctatcatggaaggtttagctgctgagttagatcttattgtttgtatcactgaaggaattcctcaacatgacatggttcgtgtaaaggctgctcttaacagtcaatcaaaaactaggctgattggccctaattgtcctggtattatcaaacctggtgaatgcaagattgggatcatgccaggatacatacacaagccggggaagatagggattgtttctcgatctggaacattgacatatgaagctgttttccaaactactgcagtaggtttggggcaatctacttgtgtaggaattggtggggatccgtttaatgggacaaattttgttgactgcttggagaagttctttgttgacccccaaacagaaggtatcgttctcattggagaaatcggtgggactgcagaagaagatgccgctgctttgataaaggaaaatggtacagacaagcctgtagttgctttcatagccggacttactgcaccaccagggcgtcgtatgggtcatgcgggagccattgtttccggtggtaagggcacggctcaagacaagataaagagcctaagagacgcaggagttaaggtggttgagtcaccagctaagattggtgcggcgatgtttgagcttttccaagaaagaggtcttttgaagtgaaactgaagtaatatcataatacaatgagttgtttcaggaatcaacctctctaataacaacagtttgccaaaatagaagagtgaaacggaattcctaaaattccttaccatggagataattgcagagaaaaaaaaatagtcacttttttttttgtctatgccattctatttttcaatttattgagccgttctattttttttttgtctttgttttggttaagttacaaaaaatgagaacgaatcaattgcacaaatttcttcttttaagaatcaaaatcaactaatttagctatgttgattccaacttttgtctgctatgctatgagtattgttgtaaaacaaaccttttcttt

SEQ ID NO: 98502 - protein, 341 aa, Arabidopsis thaliana; identical to SEQ ID NO: 24951
  peptide (1)..(341): Ceres Seq. ID no. 13600893

SEQ ID NO: 98503 - protein, 263 aa, Arabidopsis thaliana; identical to SEQ ID NO: 24952
  peptide (1)..(263): Ceres Seq. ID no. 13600894

SEQ ID NO: 98504 - protein, 215 aa, Arabidopsis thaliana; identical to SEQ ID NO: 24953
  peptide (1)..(215): Ceres Seq. ID no. 13600895

SEQ ID NO: 98505 - DNA, 973 bp, Arabidopsis thaliana
  misc_feature (1)..(973): Ceres Seq. ID no. 13600903
  misc_feature (1)..(973): Ortholog of  Ceres SEQ ID NO 13661565 as cited in SEQ ID NO 60551
  misc_feature (1)..(973): Ortholog of  Ceres SEQ ID NO 12615329 as cited in SEQ ID NO 62561
gaaaaatattcacagatattttcgatcttaaccgagaaaaaggaagaaatggctggaccatcgacaacttcaaacgcaccaaagcagaggaagagagtcgaagccgagactagcagcaacacttctactaccttacgtcgcgctaaagacggaagcgctttcgctctctgtgaaggatgtaacaagagtgtagctgtagcgcttataagcatgcacaattgcagtctcgatgctaagatcagagtgaatctcgaagcacaagttgtggagacacaagcagaggctaagaagaagcctgcagagaagaagaagacaacatctgatggacctaagccaaagagacttaagaaaaccaatgatgagaagaagagctcgtctacttcaaacaagcccaagcgacctcttaccgctttctttatcttcatgagtgacttccgtaaaacgtttaagtcagagcataatggttcgttagctaaggatgctgcaaagatcggtggtgagaagtggaagtctttgactgaggaagagaagaaagtttatctggataaagctgctgaacttaaggcagagtataacaagtcactggaaagtaatgatgctgatgaggaagaggaagatgaggagaagcaatctgatgatgttgatgatgctgaggagaaacaagttgacgatgatgatgaagttgaggagaaagaagttgagaacacagatgatgacaagaaagaagctgagggtaaagaagaggaggaagaagagattttggatgactactagaaatgatatgctcgtttttgtggttctagtcttactgaaatcggtttatctctaatcgttgcgatgcattgtaaatgaagcctttattagtgaaagtagtttatttgaagttaagttgtgagcaagtgggttttttgtagttcactgaaatggtaatgccttttgtttaaacaagtaatgaagctatgtttttcgtttt

SEQ ID NO: 98506 - protein, 257 aa, Arabidopsis thaliana
  peptide (1)..(257): Ceres Seq. ID no. 13600904
EKYSQIFSILTEKKEEMAGPSTTSNAPKQRKRVEAETSSNTSTTLRRAKDGSAFALCEGCNKSVAVALISMHNCSLDAKIRVNLEAQVVETQAEAKKKPAEKKKTTSDGPKPKRLKKTNDEKKSSSTSNKPKRPLTAFFIFMSDFRKTFKSEHNGSLAKDAAKIGGEKWKSLTEEEKKVYLDKAAELKAEYNKSLESNDADEEEEDEEKQSDDVDDAEEKQVDDDDEVEEKEVENTDDDKKEAEGKEEEEEEILDDY

SEQ ID NO: 98507 - protein, 241 aa, Arabidopsis thaliana; identical to SEQ ID NO: 43590
  peptide (1)..(241): Ceres Seq. ID no. 13600905

SEQ ID NO: 98508 - protein, 187 aa, Arabidopsis thaliana; identical to SEQ ID NO: 43591
  peptide (1)..(187): Ceres Seq. ID no. 13600906

SEQ ID NO: 98509 - DNA, 1212 bp, Arabidopsis thaliana
  misc_feature (1)..(1212): Ceres Seq. ID no. 13600910
  misc_feature (1)..(1212): Ortholog of  Ceres SEQ ID NO 12609045 as cited in SEQ ID NO 51314
  misc_feature (1)..(1212): Ortholog of  Ceres SEQ ID NO 13595877 as cited in SEQ ID NO 67702
  misc_feature (1)..(1212): Ortholog of  Ceres SEQ ID NO 13654367 as cited in SEQ ID NO 67993
actgtactcttccaccaaatccattaatcatcatcttttcttcacagagaggaaaaaaaaaaaatggcgacagattctcaaccaaaccaaaagctaacgcttccgttaaaaacaagaatcgctctcaccgttatctccaccatgaccgataacgctcaacgtcctgacggaactatcaaccgccgtttcctccgcctcttcgatttccgtgctcctcccaatcctaaacccgtcaacatcgtctccacctccgatttcgtcgtggatcaatcccgtgatctctggttccgattgtacactccacatgtctccggcgataaaatccccgtcgttgttttcttccacggcggtggtttcgctttcctcagtcctaatgcgtatccttacgataatgtatgccggagattcgctaggaaattacctgcttatgtcatctccgttaactaccgtctcgctccggagcatcgttatcctgctcaatacgacgacggtttcgatgctttgaagtacatcgaggagaatcacggttcgattcttccggcgaacgctgatctctcgagatgcttcttcgccggagacagtgcaggtggaaacatcgcgcacaacgtcgcgattcgaatttgtcgcgagccgcggtcatctttcaccgccgtgaaactcatcggacttatctcgattcaacctttcttcggcggagaagagagaacggaagcggagaaacaactcgtcggagctcctttggtttcaccggaccgaacagattggtgctggaaagcgatgggattaaaccgggatcatgaagcggttaacgtcggcggaccaaacgcggttgatatatcgggtctggattatccggagacgatggtggtagtagctgggtttgatccgttaaaagattggcagagaagttactacgagtggttaaagttatgcggtaaaaaagcaacgttaatcgaatatccaaacatgtttcatgcgttttacattttccctgaattgcctgaggcgggtcagttaattatgcggattaaggattttgttgatgagcgcgtggcttcgctctccgcttaatcaccttcgctaatgatggatatttaaattagctcaatgaataataatgtattaagctctatgcttgtgtcttgtttagtgttttaaaaatggtgtaggtcgatctattttcattattaatcaagtgttcaactttaagtg

SEQ ID NO: 98510 - protein, 335 aa, Arabidopsis thaliana
  peptide (1)..(335): Ceres Seq. ID no. 13600911
MATDSQPNQKLTLPLKTRIALTVISTMTDNAQRPDGTINRRFLRLFDFRAPPNPKPVNIVSTSDFVVDQSRDLWFRLYTPHVSGDKIPVVVFFHGGGFAFLSPNAYPYDNVCRRFARKLPAYVISVNYRLAPEHRYPAQYDDGFDALKYIEENHGSILPANADLSRCFFAGDSAGGNIAHNVAIRICREPRSSFTAVKLIGLISIQPFFGGEERTEAEKQLVGAPLVSPDRTDWCWKAMGLNRDHEAVNVGGPNAVDISGLDYPETMVVVAGFDPLKDWQRSYYEWLKLCGKKATLIEYPNMFHAFYIFPELPEAGQLIMRIKDFVDERVASLSA

SEQ ID NO: 98511 - protein, 309 aa, Arabidopsis thaliana
  peptide (1)..(309): Ceres Seq. ID no. 13600912
MTDNAQRPDGTINRRFLRLFDFRAPPNPKPVNIVSTSDFVVDQSRDLWFRLYTPHVSGDKIPVVVFFHGGGFAFLSPNAYPYDNVCRRFARKLPAYVISVNYRLAPEHRYPAQYDDGFDALKYIEENHGSILPANADLSRCFFAGDSAGGNIAHNVAIRICREPRSSFTAVKLIGLISIQPFFGGEERTEAEKQLVGAPLVSPDRTDWCWKAMGLNRDHEAVNVGGPNAVDISGLDYPETMVVVAGFDPLKDWQRSYYEWLKLCGKKATLIEYPNMFHAFYIFPELPEAGQLIMRIKDFVDERVASLSA

SEQ ID NO: 98512 - DNA, 738 bp, Arabidopsis thaliana
  misc_feature (1)..(738): Ceres Seq. ID no. 13600931
  misc_feature (1)..(738): Ortholog of  Ceres SEQ ID NO 15225415 as cited in SEQ ID NO 0
atcttgtgatcatcccaagacaaaaccagagaaaaagacctgtctgtttttttaagaagtctttatattattttttttgtcggagaatcttataagcatggcttcaggaggatcaaagtcggcagctttcatgcttctgatgctgaatcttggtctctatttcgtcatcaccatcatcgcttcttgggctgttaatcacggcatcgagagaactcgcgagtctgcgtcgacactgtcacttccggcgaagatattcccgatatacttcccggtggggaacatggcgaccggttttttcgtaatattcacgttaatcgccggcgtcgtcggaatggccacatcactcaccggaatcatcaacgttcttcaatgggactctccgaatctccactccgccgcggcttcctctctaatctcctggtctctcactctcctcgccatgggattggcctgcaaggagatcaacataggctggaccgaagccaatctaagaactcttgaagttctgactataattgtgagtgctactcagttgttgtgcaccggagctattcatgctggagtcggagaaacagtcgcctccggagaaaggcctcatcttgggagagtttgagtttcatgattcttcttaaaagcggttttacatttgcttcagatcgtgtaatttgtgtgttgtgtcttgtgtgtgtttattcttttgttttgtttgattattatgatcatgtaaaatgattagtt

SEQ ID NO: 98513 - protein, 171 aa, Arabidopsis thaliana; identical to SEQ ID NO: 39539
  peptide (1)..(171): Ceres Seq. ID no. 13600932

SEQ ID NO: 98514 - protein, 160 aa, Arabidopsis thaliana; identical to SEQ ID NO: 39540
  peptide (1)..(160): Ceres Seq. ID no. 13600933

SEQ ID NO: 98515 - protein, 157 aa, Arabidopsis thaliana; identical to SEQ ID NO: 39541
  peptide (1)..(157): Ceres Seq. ID no. 13600934

SEQ ID NO: 98516 - DNA, 1297 bp, Arabidopsis thaliana
  misc_feature (1)..(1297): Ceres Seq. ID no. 13600935
  misc_feature (1)..(1297): Ortholog of  Ceres SEQ ID NO 13597582 as cited in SEQ ID NO 65348
cgaaaacgaaatctgaaacggtcacacacagtcgctagatatgtctctctcgcttccatcttcttccgccgccgctgctgcggcgtcaacatcgggatcatcatcttctccggcggctgcttcgtcttcctcaacaaccacgtcatggttctccgggatcgttcgtggtcgtggtgataaatccggcaccgcgaagctatctaaaagctcttccatggctggaggaggaagcggaagcggagattacggtggaccaatcaaagggaagaatcaatttcgcggtgttttgttcaaatacggtcctaaatcaattcaggttgcttttaagaccggagagtataaacaacaagtgatatttatcggtggattaactgatggacttttagctactgattacttggaacctcttgcgattgctttggataaagagaaatggtcacttgttcaactactgatgtcttcttcatattctggatttggcacttccagcttgaaacaagatgcacaagaaatcgaccagctaataaaccacctcatcaacaaagagaattctgaaggtgttgttctgcttggtcatagcactggctgtcaggacattgtgtattatatgggaacaaatgcggcatgctcccgagctgtccgggctgcaattttacaggcaccagtcagcgatagagagtacaaagcaacgcttcctgaaacacctgctatgatagacttggctgcaaacatgataaaagaaggtcgaggagaggagctaatgcctagagaagctgatccttgtgctccaatctctgcttatagatatcactccctctgcgcttacatgggagatgacgatatgtttagttctgaccttagtgatgatcagttgaaaactagacttggccatatggctaacacaccttgtcaggtgattttctccatgggtgatgagtatgtaccagattatgtcgacaaaaaagcattggtcaatagattaagtaaagcaatgggaggagcagagaaagtggagatagagcatgggaatcattctctctccaatagagttcatgaagctgttcaagccatcattggttttgtcaaaagagaaggacccagtggttgggatgatccttggagctaaatctgctttttccatttatgtggatgaaaaacttatccaaatctgaatctcatgaattaattcacttcttggctgattcgtaaccatttatccttaaaaagtaaaaaagtaaattgttgtccttttgttctgatatatacttggatcattaagaaaagtgtcttccttatt

SEQ ID NO: 98517 - protein, 361 aa, Arabidopsis thaliana; identical to SEQ ID NO: 29371
  peptide (1)..(361): Ceres Seq. ID no. 13600936

SEQ ID NO: 98518 - protein, 303 aa, Arabidopsis thaliana; identical to SEQ ID NO: 29372
  peptide (1)..(303): Ceres Seq. ID no. 13600937

SEQ ID NO: 98519 - protein, 223 aa, Arabidopsis thaliana; identical to SEQ ID NO: 29373
  peptide (1)..(223): Ceres Seq. ID no. 13600938

SEQ ID NO: 98520 - DNA, 1157 bp, Arabidopsis thaliana
  misc_feature (1)..(1157): Ceres Seq. ID no. 13600939
  misc_feature (1)..(1157): Ortholog of  Ceres SEQ ID NO 13639476 as cited in SEQ ID NO 58353
atccttaaagatctcgttgcggtttttgtcggaattgtttcgatttgttgtggttctcaataagctctcgcttgtcagagaaacaccggcaacgccgttgaaatagtcaccggagaccattttgcatcgtagagttcgccttttatggcgttcacgtggggatctgctctccggatttctgttctccttatccttgtagctgcaattgtcttagcttgttattttctccctgttgagaagctattgaaggattttttgttatgggttgaacaagatctagggccttggggaccttttgccctagctgttgcgtacattcctctaacagttttggctgttcctgcctcggttctcacgctcggtggtggctacctttttgggctgccaattggttttgtggcggactcagtcggtgctacacttggctcaggagctgcatttctactaggccgtacgattggaaaaccttttgtagttgcaaaattaaaggattatcctcagtttcaatcagtggcactcgcgatagagaaatccggcttcaagatatgcttgttgctccggcttgctcctcttcttccgttcagcatgttgaactacctcttatctgtcacgccaattcggctaggtccatacttgctttcttcgtggttagggatgatgccaataacacttgcgttagtgtatgttggaacaactctaaaagacctttctgatgtaactcacaagtggagcgagttctcgccaggtcgctgggcgttcttgatttcgagccttgtaatatccgtgatattaatggtgtgtgttacaaaggtggcgaaggacgctctaagaaaagctttagcagagcacggaggagacatgaacgaagcggttgcagccttgccggagctgaccgttactgatgatgcttcgacggatttaaatgagcctctcttgataaagatagatgcacaacaacctcaagaccaagtaaaccatagtcattaaaattaagatgatgaatacttactttgtataatctttattttaacatacaaagcttagttttcttggtttgtataataataacatagattaaaaattatttttaaaaagttatttttcttagtaactttgagatgtaattattagttcacagagatttaaaatattggatg

SEQ ID NO: 98521 - protein, 280 aa, Arabidopsis thaliana
  peptide (1)..(280): Ceres Seq. ID no. 13600940
MAFTWGSALRISVLLILVAAIVLACYFLPVEKLLKDFLLWVEQDLGPWGPFALAVAYIPLTVLAVPASVLTLGGGYLFGLPIGFVADSVGATLGSGAAFLLGRTIGKPFVVAKLKDYPQFQSVALAIEKSGFKICLLLRLAPLLPFSMLNYLLSVTPIRLGPYLLSSWLGMMPITLALVYVGTTLKDLSDVTHKWSEFSPGRWAFLISSLVISVILMVCVTKVAKDALRKALAEHGGDMNEAVAALPELTVTDDASTDLNEPLLIKIDAQQPQDQVNHSH

SEQ ID NO: 98522 - DNA, 1259 bp, Arabidopsis thaliana
  misc_feature (1)..(1259): Ceres Seq. ID no. 13600945
  misc_feature (1)..(1259): Ortholog of  Ceres SEQ ID NO 15177676 as cited in SEQ ID NO 52631
  misc_feature (1)..(1259): Ortholog of  Ceres SEQ ID NO 14314212 as cited in SEQ ID NO 57401
aaacaacacacacacaaatggctcctcgtgtgatcttcttacttctctcgcttgtttttctctacctcgcaaacacatcacactctttgagaaagtttcaatcatttctacaccctatttataaagacacggccaaaaatatatacaccatccctttgtccatcggctcaacttccagcgaaaaattcgtccttgacctcaacggagccgcaccgttattgcaaaactgtccaaccgccgccaaatccaccacctaccacccaatcagatgtggctccacaagatgcaaatacgcaaaccccaacttcccctgtcccaacaatgtcattgccaagaagaggaccgtgtgtctctcctccgacaattcccgcctattccgagacaccgtccccttgttatacacatttaatggagtttacactagggacagtgaaatgagttcttcattgactttgacttgcactgacggtgctcctgccttaaaacaaagaaccatcggtctcgctaacacccacttgtcgattccctcgcagctcatctccatgtaccagcttcctcataagatagctctttgtttgccttccaccgaacgaagtcagtctcataatggtgacctttggatcggtaaaggggaatattattatctgccttacgataaagatgtctctaagatctttgcctccacgcctctgatcggtaatggcaagtccggcgagtacttaatcgatgtgaagtccatccaaatcggtgcaaagaccgttcctataccctatggagccacaaagatcagcactttggctccttacaccgtattccaaacttccctttacaaggctctgctcacagctttcaccgaaaacatcaagatagctaaagctcccgcggtgaagcctttcggtgcgtgcttctactccaatggaggacgtggagttcccgtgatcgacctggtgctgagcggaggggctaagtggaggatctacgggtctaattccttggtgaaggtgaataaaaatgtggtttgtttagggtttgtggacggaggtgtgaagccgaagtaccctatagtgatcggaggatttcagatggaggataatttggtggagttcgatcttgaagcttccaaattttctttctcctcttctcttttgcttcacaacacttcttgctcagtgcaaaggttgtctcctttctaatgcatgtgatcgattattcatgttatcaagacatatcatcaatttcctttttaataaattaatgtc

SEQ ID NO: 98523 - protein, 396 aa, Arabidopsis thaliana
  peptide (1)..(396): Ceres Seq. ID no. 13600946
TTHTQMAPRVIFLLLSLVFLYLANTSHSLRKFQSFLHPIYKDTAKNIYTIPLSIGSTSSEKFVLDLNGAAPLLQNCPTAAKSTTYHPIRCGSTRCKYANPNFPCPNNVIAKKRTVCLSSDNSRLFRDTVPLLYTFNGVYTRDSEMSSSLTLTCTDGAPALKQRTIGLANTHLSIPSQLISMYQLPHKIALCLPSTERSQSHNGDLWIGKGEYYYLPYDKDVSKIFASTPLIGNGKSGEYLIDVKSIQIGAKTVPIPYGATKISTLAPYTVFQTSLYKALLTAFTENIKIAKAPAVKPFGACFYSNGGRGVPVIDLVLSGGAKWRIYGSNSLVKVNKNVVCLGFVDGGVKPKYPIVIGGFQMEDNLVEFDLEASKFSFSSSLLLHNTSCSVQRLSPF

SEQ ID NO: 98524 - protein, 391 aa, Arabidopsis thaliana
  peptide (1)..(391): Ceres Seq. ID no. 13600947
MAPRVIFLLLSLVFLYLANTSHSLRKFQSFLHPIYKDTAKNIYTIPLSIGSTSSEKFVLDLNGAAPLLQNCPTAAKSTTYHPIRCGSTRCKYANPNFPCPNNVIAKKRTVCLSSDNSRLFRDTVPLLYTFNGVYTRDSEMSSSLTLTCTDGAPALKQRTIGLANTHLSIPSQLISMYQLPHKIALCLPSTERSQSHNGDLWIGKGEYYYLPYDKDVSKIFASTPLIGNGKSGEYLIDVKSIQIGAKTVPIPYGATKISTLAPYTVFQTSLYKALLTAFTENIKIAKAPAVKPFGACFYSNGGRGVPVIDLVLSGGAKWRIYGSNSLVKVNKNVVCLGFVDGGVKPKYPIVIGGFQMEDNLVEFDLEASKFSFSSSLLLHNTSCSVQRLSPF

SEQ ID NO: 98525 - protein, 252 aa, Arabidopsis thaliana; identical to SEQ ID NO: 42894
  peptide (1)..(252): Ceres Seq. ID no. 13600948

SEQ ID NO: 98526 - DNA, 1535 bp, Arabidopsis thaliana
  misc_feature (1)..(1535): Ceres Seq. ID no. 13600949
  misc_feature (1)..(1535): Ortholog of  Ceres SEQ ID NO 15177676 as cited in SEQ ID NO 52631
  misc_feature (1)..(1535): Ortholog of  Ceres SEQ ID NO 14314212 as cited in SEQ ID NO 57401
  misc_feature (1)..(1535): Ortholog of  Ceres SEQ ID NO 13596376 as cited in SEQ ID NO 68056
acaaacaatcacattcatcatttcatttaccaaaaaaaattataacctgaatataatagagatgggtagtagcctcacgcgcctactagtcttcctttccattttcgcagccatagctctgaaatcaaactctcaataccttcttccgatcaccaagcacgaacccaccaatctattctacaccactttcaacgtcggatccgccgcaaaatctcctgtaaacctcctcctcgacctcggaacaaacctcacgtggctcgactgccgcaaacttaaatctttatcatctctccgcctagtcacttgccagagctccacatgcaagtctatccccggtaatggatgcgctggcaaatcttgtctttacaagcaaccaaacccactcggacaaaaccccgttgtaaccggccgtgtcgtccaagacagagcttccctctacaccacagacggcggcaagttcctctctcaagtctccgtccgccacttcacattctcatgcgccggtgagaaagccctccaaggccttcctcctccagtcgacggagttctggctctttctcccggatcttcgtcgttcacgaaacaagtgacgtcagcgtttaacgtcatccctaaattctctctctgcttgccttcttccggtaccggtcatttctatatcgccggcattcactactttatcccaccattcaatagtagcgataatccgattccaaggactttaactcccattaaaggcactgactcaggagattatctaatcactgtaaaatctatctacgttggtggaactgctttgaagttgaaccctgatttgctaaccggcggagccaaactcagtacggtggttcactacaccgtacttcaaaccgatatctacaatgctcttgctcagtcttttacactcaaggctaaggctatgggaatagctaaggttccatcggtggcgccgtttaaacattgttttgattcacgcaccgctggaaagaatttgacggcggggcctaacgtgcccgtgatagagattggtctgccggggaggataggggaggtaaagtgggggttctacggtgcgaatacggtggtgaaagtgaaggaaacggtgatgtgtttggcgtttatcgacggtggaaagacaccgaaggatttgatggtgattgggacacatcagcttcaagatcatatgctcgagttcgatttcagcgggacggttctcgcttttagtgagtcactcttgctccataacacaagctgctccacttggccttcccaaaaatagaatcatcagtcactcatgatagtatcacagtttttggtcttgtatgacacgttttcagcgacacatgtgttctaatcgaaattttaagaaattatcacccgtttctcataaatatcgtctatgttattttattcaaatttgatattcgcttgttttgataaaaaatattgtctgaggattttgcacattaataattatctaaagtattctgtatttcttattagaaattgcaatttagatttgaaattcaaaagtt

SEQ ID NO: 98527 - protein, 425 aa, Arabidopsis thaliana
  peptide (1)..(425): Ceres Seq. ID no. 13600950
QTITFIISFTKKNYNLNIIEMGSSLTRLLVFLSIFAAIALKSNSQYLLPITKHEPTNLFYTTFNVGSAAKSPVNLLLDLGTNLTWLDCRKLKSLSSLRLVTCQSSTCKSIPGNGCAGKSCLYKQPNPLGQNPVVTGRVVQDRASLYTTDGGKFLSQVSVRHFTFSCAGEKALQGLPPPVDGVLALSPGSSSFTKQVTSAFNVIPKFSLCLPSSGTGHFYIAGIHYFIPPFNSSDNPIPRTLTPIKGTDSGDYLITVKSIYVGGTALKLNPDLLTGGAKLSTVVHYTVLQTDIYNALAQSFTLKAKAMGIAKVPSVAPFKHCFDSRTAGKNLTAGPNVPVIEIGLPGRIGEVKWGFYGANTVVKVKETVMCLAFIDGGKTPKDLMVIGTHQLQDHMLEFDFSGTVLAFSESLLLHNTSCSTWPSQK

SEQ ID NO: 98528 - protein, 405 aa, Arabidopsis thaliana
  peptide (1)..(405): Ceres Seq. ID no. 13600951
MGSSLTRLLVFLSIFAAIALKSNSQYLLPITKHEPTNLFYTTFNVGSAAKSPVNLLLDLGTNLTWLDCRKLKSLSSLRLVTCQSSTCKSIPGNGCAGKSCLYKQPNPLGQNPVVTGRVVQDRASLYTTDGGKFLSQVSVRHFTFSCAGEKALQGLPPPVDGVLALSPGSSSFTKQVTSAFNVIPKFSLCLPSSGTGHFYIAGIHYFIPPFNSSDNPIPRTLTPIKGTDSGDYLITVKSIYVGGTALKLNPDLLTGGAKLSTVVHYTVLQTDIYNALAQSFTLKAKAMGIAKVPSVAPFKHCFDSRTAGKNLTAGPNVPVIEIGLPGRIGEVKWGFYGANTVVKVKETVMCLAFIDGGKTPKDLMVIGTHQLQDHMLEFDFSGTVLAFSESLLLHNTSCSTWPSQK

SEQ ID NO: 98529 - DNA, 1330 bp, Arabidopsis thaliana
  misc_feature (1)..(1330): Ceres Seq. ID no. 13600952
  misc_feature (1)..(1330): Ortholog of  Ceres SEQ ID NO 15177676 as cited in SEQ ID NO 52631
  misc_feature (1)..(1330): Ortholog of  Ceres SEQ ID NO 14314212 as cited in SEQ ID NO 57401
attcacaataaaccagcgtcggcccaccgcatcccaaaccataacgcttaatccttaaaaaccgtccagatccatttccttcctctaaaactcatcacacacacttctaatggcttcttcttcttgtttgaatctcttcttcttctcttttctctccgctctaatcatttctaaatctcagatctctgattccgttaacggggtcgttttccctgttgttaaagaccttccaaccggtcaatacctcgcacagattcgactcggtgactcaccggatccagtcaagctcgtagtcgatctggccggctcaattctctggtttgattgttcctcaagacatgtttcctcgtcaaggaacctaatatccggtagctctagcggctgcttaaaggcaaaagttggaaatgaacgagtatcatcatcatcatcatcgcgtaaagaccaaaacgccgattgcgaattacttgttaaaaacgacgcctttgggattacggcgagaggagagcttttcagtgacgtcatgtcggttggctctgttacttctccgggaaccgttgatctacttttcgcttgtactccaccgtggctgttacgtgggctcgctagtggagcccaaggagtaatgggcttaggaagggcccaaatctcactcccttcacaactcgccgcggaaactaacgaacgtcgtcggttaactgtttacctgtcgccgttgaacggtgtcgtatcaacgagttcggtggaggaggtttttggagtggctgcgtctagatcgctggtttacacgcctttgttaaccggttcgagtggcaactacgtaattaacgtgaaatcgattagagtcaacggggaaaagctctccgtggaaggtccgttggcggtggagctgagcacggtggttccttacacgattttagagagctcgatctacaaggtgttcgcggaagcttacgccaaagctgcgggtgaagctacatcggtgcctcctgtcgcaccgtttgggctctgcttcactagtgacgtagattttccggcggtagatctagcgttgcagagtgagatggtgcggtggaggattcatgggaagaatctgatggtggatgttggtggtggagtccgatgctcggggattgttgacggcgggtcaagtcgagtcaacccgattgtaatgggtgggctacaattagaaggctttatattggactttgatttgggtaactcaatgatgggctttggacaaagaacacgctctgattcaacttcgttgtaatacagaaacctttgtaattgtaaccttctaattatctggtagatatcctcaattttgatc

SEQ ID NO: 98530 - protein, 386 aa, Arabidopsis thaliana; identical to SEQ ID NO: 25101
  peptide (1)..(386): Ceres Seq. ID no. 13600953

SEQ ID NO: 98531 - protein, 249 aa, Arabidopsis thaliana; identical to SEQ ID NO: 25102
  peptide (1)..(249): Ceres Seq. ID no. 13600954

SEQ ID NO: 98532 - protein, 215 aa, Arabidopsis thaliana; identical to SEQ ID NO: 25103
  peptide (1)..(215): Ceres Seq. ID no. 13600955

SEQ ID NO: 98533 - DNA, 1376 bp, Arabidopsis thaliana
  misc_feature (1)..(1376): Ceres Seq. ID no. 13600960
  misc_feature (1)..(1376): Ortholog of  Ceres SEQ ID NO 14302820 as cited in SEQ ID NO 63287
aaattgtccccaaaaaaaaaaaaaaaaagtttctagaggcttcgttagcctaattcattaactaggttctcctagtttctgctgctaattcccaaatctcagcgaaatcaaacttctctgctctgcttagctctcagctagctgaaatctctctcaatccgtgtagcttagcttccctaatccaaccatggcaaagttcggtgaaggtgacaagagatggatcgtagaagacagacctgacggcaccaacgtccataactggcactggtccgaaaccaattgccttgaatggtctcgcaacttcttcaccaaacaattctccggcgttgatatcctctccggcgaaggtaatcttttcatcaaggtcagtaagatcgagaaagtcgaaggcgaggcttatgtgaatgtgaggaaggggaagattatccctggctacgagcttaacgtctctttatcttgggaaggtgaggctaaagattccgatgggaagacgcttttgaaagctgatggattggtcgatatgccttatatctccgatgagaatgctgatgaagatccggagattaggttttcggtgaaggatgagggaccgattgggaggactttgaaggaagcgatggtgaagaaggggaaggagattattctggagaaggttagggtttatgtggaggctatggcgagaggaggcccgtgtagggatgaattggaatcgaagaaggttgcgccgaaatcggtagcggctggatcagctacggtggcggtggagaagtctggtgctgccccggtggtgtctgctgctgcggtggagagtaaggtagttaaggagaagaagaaggcgaagactaaggaagggtttaagacaattactatgaccgagaagtttaattgcagagctagggatttgtatgagattttaatggatgagaatcgttggaaaggttttacgcagagtaatgctaagattagtaaagatgtgaatggtccgattagtgtctttgatgggtctgttactggaatgaatcttgagcttgaagaaggcaaattgattgttcagaagtggagatttgggagctggcctgatggtcttgattcaacggtgaagatcgttttcgaggagcctcaaccaggagtcaccattgtcaatcttactcacactgacgttcctgaagaggacagatacgggaatgcgactgtggtggaaaacactgagagaggatggagagatcttatattccataggatccgtgcagttttcggatttggaatatgaacttatgattttgattatcaaataagttgattatgatttggaccgataaccaatgcaaaatgtatgattttaaagtttttcagttttagttaatgcatttcccttg

SEQ ID NO: 98534 - protein, 360 aa, Arabidopsis thaliana
  peptide (1)..(360): Ceres Seq. ID no. 13600961
MAKFGEGDKRWIVEDRPDGTNVHNWHWSETNCLEWSRNFFTKQFSGVDILSGEGNLFIKVSKIEKVEGEAYVNVRKGKIIPGYELNVSLSWEGEAKDSDGKTLLKADGLVDMPYISDENADEDPEIRFSVKDEGPIGRTLKEAMVKKGKEIILEKVRVYVEAMARGGPCRDELESKKVAPKSVAAGSATVAVEKSGAAPVVSAAAVESKVVKEKKKAKTKEGFKTITMTEKFNCRARDLYEILMDENRWKGFTQSNAKISKDVNGPISVFDGSVTGMNLELEEGKLIVQKWRFGSWPDGLDSTVKIVFEEPQPGVTIVNLTHTDVPEEDRYGNATVVENTERGWRDLIFHRIRAVFGFGI

SEQ ID NO: 98535 - protein, 249 aa, Arabidopsis thaliana
  peptide (1)..(249): Ceres Seq. ID no. 13600962
MPYISDENADEDPEIRFSVKDEGPIGRTLKEAMVKKGKEIILEKVRVYVEAMARGGPCRDELESKKVAPKSVAAGSATVAVEKSGAAPVVSAAAVESKVVKEKKKAKTKEGFKTITMTEKFNCRARDLYEILMDENRWKGFTQSNAKISKDVNGPISVFDGSVTGMNLELEEGKLIVQKWRFGSWPDGLDSTVKIVFEEPQPGVTIVNLTHTDVPEEDRYGNATVVENTERGWRDLIFHRIRAVFGFGI

SEQ ID NO: 98536 - protein, 217 aa, Arabidopsis thaliana
  peptide (1)..(217): Ceres Seq. ID no. 13600963
MVKKGKEIILEKVRVYVEAMARGGPCRDELESKKVAPKSVAAGSATVAVEKSGAAPVVSAAAVESKVVKEKKKAKTKEGFKTITMTEKFNCRARDLYEILMDENRWKGFTQSNAKISKDVNGPISVFDGSVTGMNLELEEGKLIVQKWRFGSWPDGLDSTVKIVFEEPQPGVTIVNLTHTDVPEEDRYGNATVVENTERGWRDLIFHRIRAVFGFGI

SEQ ID NO: 98537 - DNA, 1667 bp, Arabidopsis thaliana
  misc_feature (1)..(1667): Ceres Seq. ID no. 13600968
  misc_feature (1)..(1667): Ortholog of  Ceres SEQ ID NO 14307210 as cited in SEQ ID NO 54833
gttgattttagtatttgccgaagttggaactttaagatcaaagaagaaaatggagagatccatttcctttaatcctcgaggcgataacgagctccctgatgatcggagcagcgatgtcggatatgctgctaatgatcggaggcttgcttattctcgctcgtttcagcaatctcacggtccacgaacgccggcggtcacggaagcggctaagccttttctcgataggacggtctcgagcatcgatatgccgccggatatttactccgttgatggaagtgatgtgtttttcggggaagggaaagatgtagacatggcaaaagtgtctgttttggaaatggtttgggaggtttttggagtagtgacaagtggaaatcggcagatgaagagactgtttctgctaattgcgcttaatgtgttgtattctacaacagagctctctattggtatcttcactggtcgtgtaggtttggtctctgatgcattccatttgacatttggttgtggtctcttgacattttctttatttgcaatggcaacttcaaggaagaagcctgatcatgcttactcatacgggtacaaaagacttgaagttttatctgctttcactaatgctacagctgttccttatgttcatgtcattctccttagctgtggaagctcttcatgcatttatacaagatgaatcagagcataagcattatttgattgtatcagcggtaacaaatctgctggtgaacctactaggtgtttggtttttccggaattatgctcgtgtcaatattgcctttgttggtggctttggtattcatttgtagaaattggccacccttgtcagttttcgctttaaagccaaagaagtaagggtgtttggttaagatagaatcagtacgaagattagttgaaagagagagtcagcataattgtaactgatctgtcaaacgactattcgttgcttcttgaaattatctgtcccttctttacatatctaaaaaccacatgttatcttgaatttttttcttatattcataatatgcaatatgctgcagcctacagaaaagcagaagatatgaattatcactccgtttgcttgcacgtcatatcagattccatccgcagtgcaggtttgatactggcatcttggctcctctcgctcggggttgaaaatgcagaggtcctatgtttaggattggtatcggtcacagtgtttatgcttgttatgccactcttcaaagccactggtggtgtcttgcttcagatggcacccccaaacattccttcttctgctttaagcaaatgcttgcgacagattacttctcgagaagatgtaacggaggttttacaggcacgtttctgggaggttgtgcctggtcacactgttggctcactcagactccaggtgaagagcggaatagatgaaagaccattactgcaatatgtatatgatgtataccatgatttgggtgtacaagacttgaccctgcaaactgattacacctaagctgcatctgcctcttctttgtttttaaatgctgatttgaagatttttggatgtatactagagatcatggttctttaggaatataaatattgtgaattttcaagttgtgactttgtgatattgttttgtttgtttttcatttatgtgaattttcaaccacacaaagacc

SEQ ID NO: 98538 - protein, 226 aa, Arabidopsis thaliana
  peptide (1)..(226): Ceres Seq. ID no. 13600969
LILVFAEVGTLRSKKKMERSISFNPRGDNELPDDRSSDVGYAANDRRLAYSRSFQQSHGPRTPAVTEAAKPFLDRTVSSIDMPPDIYSVDGSDVFFGEGKDVDMAKVSVLEMVWEVFGVVTSGNRQMKRLFLLIALNVLYSTTELSIGIFTGRVGLVSDAFHLTFGCGLLTFSLFAMATSRKKPDHAYSYGYKRLEVLSAFTNATAVPYVHVILLSCGSSSCIYTR

SEQ ID NO: 98539 - protein, 210 aa, Arabidopsis thaliana
  peptide (1)..(210): Ceres Seq. ID no. 13600970
MERSISFNPRGDNELPDDRSSDVGYAANDRRLAYSRSFQQSHGPRTPAVTEAAKPFLDRTVSSIDMPPDIYSVDGSDVFFGEGKDVDMAKVSVLEMVWEVFGVVTSGNRQMKRLFLLIALNVLYSTTELSIGIFTGRVGLVSDAFHLTFGCGLLTFSLFAMATSRKKPDHAYSYGYKRLEVLSAFTNATAVPYVHVILLSCGSSSCIYTR

SEQ ID NO: 98540 - protein, 155 aa, Arabidopsis thaliana; identical to SEQ ID NO: 25560
  peptide (1)..(155): Ceres Seq. ID no. 13600971

SEQ ID NO: 98541 - DNA, 1416 bp, Arabidopsis thaliana
  misc_feature (1)..(1416): Ceres Seq. ID no. 13600972
  misc_feature (1)..(1416): Ortholog of  Ceres SEQ ID NO 14308851 as cited in SEQ ID NO 55618
attcgctccgtttctctctcaaaaactacacacccgtaccacaccaccaccctcctcgtttcctcagagatcccctctctaacttctaaggatatagaaaatggcagatggtgaagacattcagcctctcgtctgtgacaatggaaccggaatggttaaggctggatttgctggagatgatgcaccaagagctgtattccctagcatcgttggtcgtcctcgacacactggtgtcatggttggtatgggacaaaaagatgcttacgttggtgatgaggctcagtctaagagaggtattttgacattgaaatatcctattgagcatggtattgttagcaactgggatgatatggagaagatttggcatcacactttctacaatgagctccgtgttgcacctgaagaacaccctgttcttctcactgaggctcctctcaaccccaaggccaatcgtgagaaaatgactcagattatgtttgaaactttcaacactcctgccatgtatgtcgctatccaagctgttctttccctctacgctagtggtcgtactactggtattgtgttggactctggagatggtgtgagtcacactgttccaatttatgaaggatatgctcttccacatgctattctgcgtttggaccttgcaggccgtgaccttactgattacctcatgaagatcttaaccgagcgtggttactcattcactacctcagcagagcgtgaaatcgtaagggatgtgaaagagaaacttgcttacatagcacttgactacgagcaagagatggaaacagcaaacacaagctcatccgttgagaagagctatgagttgcctgatggacaggtgatcaccattggaggagagagattccgctgcccggaggttctgttccaaccgtctttggtgggaatggaagctgctggtattcacgagaccacttacaattccatcatgaagtgtgatgtggatatcaggaaggatctgtatggaaacattgtgctcagtggtggaaccaccatgttccctggaattgctgataggatgagcaaagagatcactgctttggctccaagcagcatgaagattaaggtggttgctccaccagagaggaagtacagtgtctggattggaggctccattctagcatcactcagtaccttccaacagatgtggatagcaaaggccgagtatgatgagtcagggccatcaatagtccacaggaagtgcttctaagattaagctcaaatcaaagtgatgaatgattgttctgtattggtaaagccttttgttcatcgactttgttgcaaaatattcttttgttttctatgtttcttcaccactacattacatttctttcttgttgttatcctcttttggtgtttctgctattaatcgaaaaagaaattttcttttct

SEQ ID NO: 98542 - protein, 377 aa, Arabidopsis thaliana; identical to SEQ ID NO: 24317
  peptide (1)..(377): Ceres Seq. ID no. 13600973

SEQ ID NO: 98543 - protein, 360 aa, Arabidopsis thaliana; identical to SEQ ID NO: 24318
  peptide (1)..(360): Ceres Seq. ID no. 13600974

SEQ ID NO: 98544 - protein, 332 aa, Arabidopsis thaliana; identical to SEQ ID NO: 24319
  peptide (1)..(332): Ceres Seq. ID no. 13600975

SEQ ID NO: 98545 - DNA, 1459 bp, Arabidopsis thaliana
  misc_feature (1)..(1459): Ceres Seq. ID no. 13600976
  misc_feature (1)..(1459): Ortholog of  Ceres SEQ ID NO 15177298 as cited in SEQ ID NO 52711
atctgaccaccagaagaagagccacacactcacaaattaaaaagagagagagagagagagagacagagagagagagagattctgcggaggagcttcttcttcgtagggtgttcatcgttattaacgttatcgcccctacgtcagctccatctccagaaacatgggtgcaggtggaagaatgccggttcctacttcttccaagaaatcggaaaccgacaccacaaagcgtgtgccgtgcgagaaaccgcctttctcggtgggagatctgaagaaagcaatcccgccgcattgtttcaaacgctcaatccctcgctctttctcctaccttatcagtgacatcattatagcctcatgcttctactacgtcgccaccaattacttctctctcctccctcagcctctctcttacttggcttggccactctattgggcctgtcaaggctgtgtcctaactggtatctgggtcatagcccacgaatgcggtcaccacgcattcagcgactaccaatggctggatgacacagttggtcttatcttccattccttcctcctcgtcccttacttctcctggaagtatagtcatcgccgtcaccattccaacactggatccctcgaaagagatgaagtatttgtcccaaagcagaaatcagcaatcaagtggtacgggaaatacctcaacaaccctcttggacgcatcatgatgttaaccgtccagtttgtcctcgggtggcccttgtacttagcctttaacgtctctggcagaccgtatgacgggttcgcttgccatttcttccccaacgctcccatctacaatgaccgagaacgcctccagatatacctctctgatgcgggtattctagccgtctgttttggtctttaccgttacgctgctgcacaagggatggcctcgatgatctgcctctacggagtaccgcttctgatagtgaatgcgttcctcgtcttgatcacttacttgcagcacactcatccctcgttgcctcactacgattcatcagagtgggactggctcaggggagctttggctaccgtagacagagactacggaatcttgaacaaggtgttccacaacattacagacacacacgtggctcatcacctgttctcgacaatgccgcattataacgcaatggaagctacaaaggcgataaagccaattctgggagactattaccagttcgatggaacaccgtggtatgtagcgatgtatagggaggcaaaggagtgtatctatgtagaaccggacagggaaggtgacaagaaaggtgtgtactggtacaacaataagttatgaggatgatggtgaagaaattgtcgacctttctcttgtctgtttgtcttttgttaaagaagctatgcttcgttttaataatcttattgtccattttgttgtgttatgacattttggctgctcattatgttatgtgggaagttagtgttc

SEQ ID NO: 98546 - protein, 383 aa, Arabidopsis thaliana; identical to SEQ ID NO: 39928
  peptide (1)..(383): Ceres Seq. ID no. 13600977

SEQ ID NO: 98547 - protein, 377 aa, Arabidopsis thaliana; identical to SEQ ID NO: 39929
  peptide (1)..(377): Ceres Seq. ID no. 13600978

SEQ ID NO: 98548 - protein, 204 aa, Arabidopsis thaliana; identical to SEQ ID NO: 39930
  peptide (1)..(204): Ceres Seq. ID no. 13600979

SEQ ID NO: 98549 - DNA, 1180 bp, Arabidopsis thaliana
  misc_feature (1)..(1180): Ceres Seq. ID no. 13600988
  misc_feature (1)..(1180): Ortholog of  Ceres SEQ ID NO 15226198 as cited in SEQ ID NO 62150
agattaagtcttcttcgtcatcttcgagtgtgagtggatccagagagagaattagatatttccgacacgaggcaaattcctagtggctcatggcgtcatcatctgatcacacggcgaagataatcgacggcaaggcgattgctcataccatcagatcagagatcgccgaggaagttcgcggtctatctgagaaacacggcaaggtcccaggactagctgtagttattgttgggagccgaaaggattcacagacctatgtgaatacgaagaggaaagcgtgcgctgaggttgggattaagtcatttgacgtgggcctaccagaggaagtttctgaagctgatcttattagcaaagttcatgaactaaattcaaatccggatgtccatggcatattagttcaactcccattgccgaaacatattaatgaggagcatatattgggtgcaatcagcattgataaagatgtcgatggcttccatcctttgaatattggtaagctagccatgaaaggcagagaacccctcttccttccttgcaccccaaagggatgtttggaactcctagctagaagcggcgtaaagataaaggggcaacgagcagttgttgtaggtcggagtaacattgttggtttgcccgtttcacttcttttgctcaaggctgatgctactgtcacaactgtacattctcacaccaaggatcctgaggctatcatacgggaagctgacattgttattgctgcatgcggacaagcccacatgattaagggcaactggataaagccaggggctgcagtaattgatgttggaactaatgcagtcagcgacccgagcaagaaatcaggataccggttggttggagatgttgatttcgcagaagcttcaaaagttgcaggtttcataactccggtccctggtggtgtaggcccaatgacagtggcaatgcttctcaggaacaccgtagacggtgccaagcgtgtctttggcgagtaaaacaatctactgtatgtaataaagaaaccaagagtttctccattctgtaattgtgtacttggcttgacgatatttttccactcaaataaattgaaattggcgttccctttggattaccttacattgttctgcaactagctagaacgattatttccgcaattcagttaaatacaagggtgtcatcatgtgac

SEQ ID NO: 98550 - protein, 299 aa, Arabidopsis thaliana
  peptide (1)..(299): Ceres Seq. ID no. 13600989
MASSSDHTAKIIDGKAIAHTIRSEIAEEVRGLSEKHGKVPGLAVVIVGSRKDSQTYVNTKRKACAEVGIKSFDVGLPEEVSEADLISKVHELNSNPDVHGILVQLPLPKHINEEHILGAISIDKDVDGFHPLNIGKLAMKGREPLFLPCTPKGCLELLARSGVKIKGQRAVVVGRSNIVGLPVSLLLLKADATVTTVHSHTKDPEAIIREADIVIAACGQAHMIKGNWIKPGAAVIDVGTNAVSDPSKKSGYRLVGDVDFAEASKVAGFITPVPGGVGPMTVAMLLRNTVDGAKRVFGE

SEQ ID NO: 98551 - protein, 161 aa, Arabidopsis thaliana; identical to SEQ ID NO: 35870
  peptide (1)..(161): Ceres Seq. ID no. 13600990

SEQ ID NO: 98552 - DNA, 771 bp, Arabidopsis thaliana
  misc_feature (1)..(771): Ceres Seq. ID no. 13600991
  misc_feature (1)..(771): Ortholog of  Ceres SEQ ID NO 15225940 as cited in SEQ ID NO 205
actcgctcaaaaatttagagaaaggaagaagaagacagatcaatggctccgacgatcaaaagaatcagaagtttccgtactcaccaaaaacactttgtcgattttttcggagacgacttgatcgtcaccgttacgccgactgcttccgttatccgccgctggattcgtagcgtccgctcctacaaccgtaatcactcggtacatcctctcgtcgttggaatcggtgttcagtggagaccggatagttccgatccagatccaccaccaaaaactctccagttgtgcgtcggtagtcgctgtctcatcatccaactaggttacaattacggtctcccaaaagtcctccgcactttccttgccgatcccaaaacgactttcgtcggcgtttggaacggccaagaccagaaaaaactcgagaaatgtaggcatcgagtggagatcgggaagcttctggacataaggatgttcgtgagagattcgagaggggctaggatgtgtttttgttcgtttgaacagatcgtgaaggagcgtttgggtcgcgtaggagtgaggttagatccggcgatttgtatgagcgattggggcgtttataaccttaaccattatcaggtacttcaggcgtcgattgagtcgtatgtttgctttaagctcgctgttgaggaacgtctctggaacttaaaagttgctgctaatcttgtgatttgaatttgttgttgttcttctctctttatcaatcaacgtcttcttctaattcatgaaagttttcatgtt

SEQ ID NO: 98553 - protein, 220 aa, Arabidopsis thaliana
  peptide (1)..(220): Ceres Seq. ID no. 13600992
MAPTIKRIRSFRTHQKHFVDFFGDDLIVTVTPTASVIRRWIRSVRSYNRNHSVHPLVVGIGVQWRPDSSDPDPPPKTLQLCVGSRCLIIQLGYNYGLPKVLRTFLADPKTTFVGVWNGQDQKKLEKCRHRVEIGKLLDIRMFVRDSRGARMCFCSFEQIVKERLGRVGVRLDPAICMSDWGVYNLNHYQVLQASIESYVCFKLAVEERLWNLKVAANLVI

SEQ ID NO: 98554 - DNA, 1341 bp, Arabidopsis thaliana
  misc_feature (1)..(1341): Ceres Seq. ID no. 13600997
  misc_feature (1)..(1341): Ortholog of  Ceres SEQ ID NO 15174737 as cited in SEQ ID NO 52912
  misc_feature (1)..(1341): Ortholog of  Ceres SEQ ID NO 13624551 as cited in SEQ ID NO 0
acgagtatataactacctttcaattctctctgcctctcatagttaatatatatacgttcacaatcacttctcttctctatttcttattcattatctcaaccctctctctctctctctcagtacaacttatcatccatcaccatatatagagaatatgagcaaaacggaagcaatcagcttgaccaaaaggggaatgttgccgccaagtagttgcaatagcctaatggaccgctctgagtcccttaagagggacagtgtgatgggcaatggtgcagccaaagtgagaggaagcttggagcgcaagaaatcaaagagttttaaggaaggagatagttattcttcgtggctcataacggaggctcctgggagtatagccgccgtgaggagagagcaagtggcggcacaacaagcactaaggaaactaaagattgctcattacggtagatccaaatcaaccattaatttcacttcttccaaagtcgtccctcttcttaaccctaaccctaaccctcatcctcagagatgcagcttcctcacccccacttctgatcctatttacgtggcctaccatgatgaagaatggggagttccagttcatgatgacaagacgttgttcgaactgctgaccctaagcggcgcacaagtaggctccgattggacttcaaccttgagaaaacgccatgactataggaaggcctttatggagtttgaggcggaagtggttgccaaactcaccgagaaagagatgaatgcaataagcatcgaatacaagatagagatgagcaaagtgagaggtgttgtggaaaacgctaaaaagatcgtagagatcaagaaagcgtttgtgtcattagagaaatacctttggggatttgtgaaccacaaaccaatctccacgaactacaagcttggacacaagattccggtcaagacatcgaagtcggagagcatcagcaaagacatggttcgtcgaggcttccggttcgtgggtcccactgtggttcactcattcatgcaagccgctggtcttacaaacgaccacttgatcacttgctgtcgccacgctccttgcactctccttgcaaccaatccctaattattaatttttaatttaattgaaagtggtgtttttatttaactttcgagtgcaaaatgtaggtttaggagaaaagagattgcagttttttaaaattggcaatgtaagataaaccagctggtttgatttttttcttgtgtgtgaggtgtttaaaatcacatgtataatggtttttgatgtatgtgtggtgtggcaaattgaaatagtaattgattttcatttgatttatctattgttcaaaatttgtt

SEQ ID NO: 98555 - protein, 312 aa, Arabidopsis thaliana
  peptide (1)..(312): Ceres Seq. ID no. 13600998
MSKTEAISLTKRGMLPPSSCNSLMDRSESLKRDSVMGNGAAKVRGSLERKKSKSFKEGDSYSSWLITEAPGSIAAVRREQVAAQQALRKLKIAHYGRSKSTINFTSSKVVPLLNPNPNPHPQRCSFLTPTSDPIYVAYHDEEWGVPVHDDKTLFELLTLSGAQVGSDWTSTLRKRHDYRKAFMEFEAEVVAKLTEKEMNAISIEYKIEMSKVRGVVENAKKIVEIKKAFVSLEKYLWGFVNHKPISTNYKLGHKIPVKTSKSESISKDMVRRGFRFVGPTVVHSFMQAAGLTNDHLITCCRHAPCTLLATNP

SEQ ID NO: 98556 - protein, 299 aa, Arabidopsis thaliana
  peptide (1)..(299): Ceres Seq. ID no. 13600999
MLPPSSCNSLMDRSESLKRDSVMGNGAAKVRGSLERKKSKSFKEGDSYSSWLITEAPGSIAAVRREQVAAQQALRKLKIAHYGRSKSTINFTSSKVVPLLNPNPNPHPQRCSFLTPTSDPIYVAYHDEEWGVPVHDDKTLFELLTLSGAQVGSDWTSTLRKRHDYRKAFMEFEAEVVAKLTEKEMNAISIEYKIEMSKVRGVVENAKKIVEIKKAFVSLEKYLWGFVNHKPISTNYKLGHKIPVKTSKSESISKDMVRRGFRFVGPTVVHSFMQAAGLTNDHLITCCRHAPCTLLATNP

SEQ ID NO: 98557 - protein, 289 aa, Arabidopsis thaliana
  peptide (1)..(289): Ceres Seq. ID no. 13601000
MDRSESLKRDSVMGNGAAKVRGSLERKKSKSFKEGDSYSSWLITEAPGSIAAVRREQVAAQQALRKLKIAHYGRSKSTINFTSSKVVPLLNPNPNPHPQRCSFLTPTSDPIYVAYHDEEWGVPVHDDKTLFELLTLSGAQVGSDWTSTLRKRHDYRKAFMEFEAEVVAKLTEKEMNAISIEYKIEMSKVRGVVENAKKIVEIKKAFVSLEKYLWGFVNHKPISTNYKLGHKIPVKTSKSESISKDMVRRGFRFVGPTVVHSFMQAAGLTNDHLITCCRHAPCTLLATNP

SEQ ID NO: 98558 - DNA, 1125 bp, Arabidopsis thaliana
  misc_feature (1)..(1125): Ceres Seq. ID no. 13601001
  misc_feature (1)..(1125): Ortholog of  Ceres SEQ ID NO 12609314 as cited in SEQ ID NO 51796
  misc_feature (1)..(1125): Ortholog of  Ceres SEQ ID NO 15226254 as cited in SEQ ID NO 68176
attttgcatagaagagagagaggcggagagagaggaaagtgaagaagcaatcgtgagagactctctcgagtcttccctgagtcactcctctcctctcacacctttttgcttcgcgattaagagtcagagagagagagatagtaaacatcgaacgtcttccatttcatcttccttcgattaccttgttagggttttgtattttggcttctggattcttcttcactatgcataagttgagcagaagcaaccgtgacaaacttcagcagttcgtggctatcacaggagctagtgagaagaatgctcttcaggctctcaaagccagtgattggcaccttgaagcagcgtttgatgtgttttacagccagcctcaaccaagaagcaatgctgctgaagtaagacgcttggaggagctctacaatagatataaagacccgtattctgatatgattcttgcggagggtatctcggttctgtgtaatgatcttgaggtggaaccgcaagacatagtcacgttggttctttcgtggcatatgaatgctgcaacagcgtgtgagttttccaggcaagaatttatcagtggattacaggcattaggtgtagattcaatcgggaagttgcaggaaaagctgccatttatgcgttctgagcttaaagatgaacaaaagttccatgagatatacaactttgcttttgggtgggcgaaagagaaggggcagaaatctcttgccttagacacagcgattgggatgtggcagttgctctttgcagaaagagagtggcctttggtaactcactggtgtgatttcttgcaggatcgtcataacaaggccatatctaaggacacatgggcacagctactggaattttcaaggatggtcgacccagtgctgtcgaattacgatgcagaaggagcatggccttacctgattgatgaattcgttgagtatttgtatgacaaaaatgtcgttgagaagtgaccagccaactgggagaagtaatcaactctatttgacaatgttcctttcttctcattattttaaatagacttgcttatctcacagatttttctattgtgtttgtcagaatctttaaattgatgattaaataagtaagcttttcaacctt

SEQ ID NO: 98559 - protein, 250 aa, Arabidopsis thaliana; identical to SEQ ID NO: 21216
  peptide (1)..(250): Ceres Seq. ID no. 13601002

SEQ ID NO: 98560 - protein, 177 aa, Arabidopsis thaliana; identical to SEQ ID NO: 21217
  peptide (1)..(177): Ceres Seq. ID no. 13601003

SEQ ID NO: 98561 - protein, 148 aa, Arabidopsis thaliana; identical to SEQ ID NO: 21218
  peptide (1)..(148): Ceres Seq. ID no. 13601004

SEQ ID NO: 98562 - DNA, 6308 bp, Arabidopsis thaliana
  misc_feature (1)..(6308): Ceres Seq. ID no. 13601005
  misc_feature (1)..(6308): Ortholog of  Ceres SEQ ID NO 14313034 as cited in SEQ ID NO 54449
cactctgcagtcactaaccatcttcttcttggaagattttgcttaaaggcgttagtaatggcgtctaaaggtggtaaatctaaacctgatatagtaatggcgtccaagagtgggaaatctaaacctgataatgaatccagagctaagcgtcagaagacgctcgaagctcctaaagaaccacgtcgtcctaaaactcactgggaccatgtattggaggagatggcttggctgtcaaaggactttgagtctgagaggaaatggaagctggcgcaggcgaagaaggttgctttgagagccagcaaaggaatgctagatcaggcatctagggaagaaaggaagctaaaggaagaagaacagcgacttcggaaagtagccctcaatatctcgaaagacatgaaaaagttttggatgaaagttgagaagctggtgctttacaagcatcagttggtacgcaatgagaagaagaagaaggctatggacaagcaacttgaatttctgttaggccaaactgagaggtactcaaccatgttggcagaaaatttagtggagccttataaacagggccaaaatactccttcaaaacctctactaactatcgaatcaaaaagtgatgaggagagggcagaacagatacctccagagataaattcttgtcttgaatcaggaagtcctgaactcgatgaggattatgatctaaaatctgaggatgagaccgaagatgatgaagatactattgaggaggatgaaaaacacttcaccaaacgtgaaagacaggaagagttggaagctttgcaaaatgaagtggatctaccagttgaggagctgctcagacgttatacctctggaagagttagccgagaaaccagcccagtaaaagatgaaaatgaggacaatctgacctcagttagccgagtaaccagcccagtaaaagatgaaaatcaggacaatctggcctcagtaggtcaagatcatggagaggcagacaagaacaatcttgcagcttctgaagaaactgaagggaacccaagtgttcgtcgttctaatgatagctatggtcatttggcaatatccgagacccattcacatgaccttgagccaggcatgacgactgcatctgtgaagtccagaaaggaagatcatacctatgattttaacgatgaacaggaagatgttgactttgttcttgccaatggtgaggaaaaggatgatgaggcgacattggctgtcgaagaggaactggcgaaagcagataatgaagatcatgtcgaagagattgccctgctgcaaaaagagagtgaaatgcctattgaagtactacttgcaaggtataaggaggatttcggtggcaaggatatatctgaggatgaatctgaatcttcatttgctgtatctgaagactctatagtagactctgacgaaaataggcagcaagctgatttagatgatgacaacgttgatttaacagaatgtaagctagatccagagccttgctcagaaaatgttgaaggcacattccatgaagtagcagaagataatgataaagatagtagtgataaaattgctgatgcagcagcagcagcaagatctgcccagccaactggatttacatactccacaacaaaagttcgaacgaaactgccgtttctacttaagcattctctgcgtgagtaccaacacattggtttggactggcttgtcacgatgtatgagaaaaagttgaacggtattctggctgatgaaatgggtcttggaaagacaattatgaccattgctcttctagctcaccttgcatgtgataagggaatatggggtccccatctgattgtggttcctacaagtgtgatgcttaattgggagactgagtttcttaaatggtgtcctgcatttaaaattctcacctactttggtagtgcaaaggagcggaaactcaagagacaaggatggatgaagcttaactcatttcatgtatgcataacaacctataggctagttattcaggacagtaaaatgttcaagcgcaagaagtggaaatacttgattcttgacgaagcccatttaattaagaattggaagtctcagagatggcagacactattgaacttcaattctaaacgcagaattttgttgactggtacacccctgcagaatgatcttatggaactgtggtcacttatgcactttctgatgccacatgtctttcagtctcaccaggaattcaaagactggttctgtaacccaatagcagggatggtcgagggacaagaaaaaatcaacaaagaagttattgatcgcttacataatgtcctccgtcctttccttctacggcgcctaaaaagggatgtggagaagcaacttccttcgaaacatgagcatgttattttctgtagactgtctaagaggcagcgcaacttgtatgaggacttcatagcaagcacagaaacacaggctacgcttaccagtggaagcttttttgggatgataagtatcataatgcagttgcggaaagtttgtaatcatcctgatctctttgagggtcgtcctattgtaagttcttttgatatggctggcattgatgtgcagttgagttcaacaatctgttcgctactattggaaagtccgttttccaaggttgatcttgaggctttgggattcttattcacccatcttgatttttctatgacttcttgggaaggagatgagatcaaagctatttcaacaccctcagaattaatcaaacagcgtgtgaacttgaaggatgatctagaagcaatccctttgagtccaaaaaaccgcaaaaatctgcaagggacaaatatttttgaagaaattcgtaaggctgtctttgaggaaaggatacaagaatctaaggatcgggcagcagccattgcatggtggaattctttgagatgccagagaaagccgacttactctacatcactaagaactcttttaaccattaagggtcctcttgatgatcttaaagctaactgttcatcttacatgtattcatcaatcctcgctgacatagtcctttcaccaatcgagcgttttcagaagatgattgagctagttgaagctttcacatttgcgattccagctgcacgagtgccttcacctacttgctggtgcagtaaaagtgactctcctgtttttcttagtccatcgtacaaggaaaaagttacagatttattgtcacctcttttatctccaattagacctgcaatcgttaggagacaagtatattttccagataggcgactgatacagtttgattgtggtaagctgcaggagcttgctatgttattgaggaaattaaaatttgggggtcacagagcgttgatattcacgcaaatgaccaagatgcttgacgtcttggaggctttcattaatttatatggttatacctacatgcgtcttgatggctctacacctccagaagagaggcagacgttaatgcagcggtttaatacaaatcccaagatctttcttttcattttgtcaacccgaagtgggggcgttggcatcaaccttgtgggtgcggacacagttatattctatgacagtgactggaatcctgctatggatcaacaagctcaagatcgctgccacaggataggtcagacacgtgaagtgcatatataccggttgataagtgagagcaccattgaggagaatatcttaaagaaagcaaaccagaagcgtgtgcttgataacctagtaattcaaaacggtgagtataacaccgaatttttcaagaagctcgatcccatggaattgttctctgggcataaggctctgactacaaaggatgaaaaggaaacaagcaagcattgtggggcggatatacctctatcaaatgcagatgttgaggctgctctaaaacaggccgaagatgaggcagattatatggctctcaaaagagtagaacaagaagaagctgtggacaatcaagagttcacagaagaacctgtagagagaccagaagacgatgagctagtaaatgaagatgacataaaggctgatgagcctgctgatcaaggtttagttgcagcagggccggccaaagaagaaatgtcattgttacatagtgatatcagggatgagagagctgttatcactacttcaagccaagaagatgacactgatgtattagatgatgtcaagcaaatggctgcagcagcggctgatgctggacaagctatctcatcttttgagaatcagctacgtcctattgatagatatgcgattagatttttagagctttgggaccccatcattgttgaggctgcaatggaaaatgaagcaggatttgaagagaaagaatgggaacttgaccacattgagaagtacaaggaggaaatggaagctgagattgatgatggggaagagcctcttgtttacgagaaatgggatgctgattttgcaactgaggcatacaggcagcaagtggaagtcttagctcagcaccagttaatggaagatttggaaaatgaagctagagagagggaagcggcagaggtggctgaaatggttttgacacagaacgaaagtgctcatgtactgaagcctaagaagaagaaaaaggcgaagaaagccaaatataaatccctgaagaaaggatcactggctgccgaatcaaaacatgtgaagtcagttgtgaaaattgaagattctactgatgatgataatgaagaattcggctatgtgagtagcagtgactcggatatggttacaccgctttcgcggatgcatatgaagggcaagaaaagagatttaattgttgacactgatgaagagaagacctcaaagaagaaagcaaagaagcacaagaagtctctcccgaattcagatatcaaatataagcaaacaagtgcactacttgatgaactggaaccatcaaagccgtctgacagtatggttgttgataatgagttgaaattgacgaacaggggtaaaactgtagggaaaaaattcatcacttccatgccaataaagcgtgttcttatgatcaagccagagaaattgaagaaaggaaatctgtggtctagagattgtgttccctcgcctgattcttggttgccgcaggaagatgctatattgtgtgccatggttcatgaatatgggcctaactggaattttgttagcggaactctttatggaatgacagctggtggggcttacagaggacggtatcggcatcctgcatattgttgtgagagatatagagagcttattcaacgacatattttgtctgcttccgacagtgcagtgaacgagaagaacctcaacacaggttctgggaaggctctccttaaagtcactgaggaaaatattcggacactcctaaatgttgcagctgagcagccagatacggagatgctcctacaaaaacatttttcttgcttgctgtcatcaatttggaggacgtctacccgcactgggaatgatcaaatgctctccttaaacagtcctattttcaacagacagtttatgggttccgtgaatcacacccaagatttagctagaaagccttggcaggggatgaaggtcaccagcttaagtagaaagttgttagaatccgctctccaggattctggcccgagtcagccagacaatactatttcccgttctaggttgcaggagactcaacctatcaataaattgggattagagttaaccttggaattcccacgtggcaatgatgattccctgaatcagtttccaccgatgattagtctgtccattgatgggtcagattcattaaattatgtgaacgagcccccaggggaagatgttctaaaaggttctagggttgctgcagagaaccgttacaggaatgctgcaaatgcttgtattgaagattcatttggatgggcttcaaacacgttcccagccaatgatctgaagtcaagaacaggcacgaaagcacagtccctggggaaacacaagctatccgcctcagactcagccaagtctacaaaaagcaaacaccgcaaactcttagcagagcaattggaaggggcatgggttaggccaaatgatccgaatctcaagtttgatttcacacctggtgatagggaggaggaggaggagcaggaggtggatgagaaagcgaattcagcagagatagagatgataagctgttcacaatggtatgatccattctttacctcaggccttgatgattgctcattagcttcggatatctcagaaatagagtagtaaaaaagccttttgtaaaagtaaaaacctgcttgcagaagaaaatgctgatgattgtggatgatcattttcttaacctcccactt

SEQ ID NO: 98563 - protein, 2073 aa, Arabidopsis thaliana
  peptide (1)..(2073): Ceres Seq. ID no. 13601006
HSAVTNHLLLGRFCLKALVMASKGGKSKPDIVMASKSGKSKPDNESRAKRQKTLEAPKEPRRPKTHWDHVLEEMAWLSKDFESERKWKLAQAKKVALRASKGMLDQASREERKLKEEEQRLRKVALNISKDMKKFWMKVEKLVLYKHQLVRNEKKKKAMDKQLEFLLGQTERYSTMLAENLVEPYKQGQNTPSKPLLTIESKSDEERAEQIPPEINSCLESGSPELDEDYDLKSEDETEDDEDTIEEDEKHFTKRERQEELEALQNEVDLPVEELLRRYTSGRVSRETSPVKDENEDNLTSVSRVTSPVKDENQDNLASVGQDHGEADKNNLAASEETEGNPSVRRSNDSYGHLAISETHSHDLEPGMTTASVKSRKEDHTYDFNDEQEDVDFVLANGEEKDDEATLAVEEELAKADNEDHVEEIALLQKESEMPIEVLLARYKEDFGGKDISEDESESSFAVSEDSIVDSDENRQQADLDDDNVDLTECKLDPEPCSENVEGTFHEVAEDNDKDSSDKIADAAAAARSAQPTGFTYSTTKVRTKLPFLLKHSLREYQHIGLDWLVTMYEKKLNGILADEMGLGKTIMTIALLAHLACDKGIWGPHLIVVPTSVMLNWETEFLKWCPAFKILTYFGSAKERKLKRQGWMKLNSFHVCITTYRLVIQDSKMFKRKKWKYLILDEAHLIKNWKSQRWQTLLNFNSKRRILLTGTPLQNDLMELWSLMHFLMPHVFQSHQEFKDWFCNPIAGMVEGQEKINKEVIDRLHNVLRPFLLRRLKRDVEKQLPSKHEHVIFCRLSKRQRNLYEDFIASTETQATLTSGSFFGMISIIMQLRKVCNHPDLFEGRPIVSSFDMAGIDVQLSSTICSLLLESPFSKVDLEALGFLFTHLDFSMTSWEGDEIKAISTPSELIKQRVNLKDDLEAIPLSPKNRKNLQGTNIFEEIRKAVFEERIQESKDRAAAIAWWNSLRCQRKPTYSTSLRTLLTIKGPLDDLKANCSSYMYSSILADIVLSPIERFQKMIELVEAFTFAIPAARVPSPTCWCSKSDSPVFLSPSYKEKVTDLLSPLLSPIRPAIVRRQVYFPDRRLIQFDCGKLQELAMLLRKLKFGGHRALIFTQMTKMLDVLEAFINLYGYTYMRLDGSTPPEERQTLMQRFNTNPKIFLFILSTRSGGVGINLVGADTVIFYDSDWNPAMDQQAQDRCHRIGQTREVHIYRLISESTIEENILKKANQKRVLDNLVIQNGEYNTEFFKKLDPMELFSGHKALTTKDEKETSKHCGADIPLSNADVEAALKQAEDEADYMALKRVEQEEAVDNQEFTEEPVERPEDDELVNEDDIKADEPADQGLVAAGPAKEEMSLLHSDIRDERAVITTSSQEDDTDVLDDVKQMAAAAADAGQAISSFENQLRPIDRYAIRFLELWDPIIVEAAMENEAGFEEKEWELDHIEKYKEEMEAEIDDGEEPLVYEKWDADFATEAYRQQVEVLAQHQLMEDLENEAREREAAEVAEMVLTQNESAHVLKPKKKKKAKKAKYKSLKKGSLAAESKHVKSVVKIEDSTDDDNEEFGYVSSSDSDMVTPLSRMHMKGKKRDLIVDTDEEKTSKKKAKKHKKSLPNSDIKYKQTSALLDELEPSKPSDSMVVDNELKLTNRGKTVGKKFITSMPIKRVLMIKPEKLKKGNLWSRDCVPSPDSWLPQEDAILCAMVHEYGPNWNFVSGTLYGMTAGGAYRGRYRHPAYCCERYRELIQRHILSASDSAVNEKNLNTGSGKALLKVTEENIRTLLNVAAEQPDTEMLLQKHFSCLLSSIWRTSTRTGNDQMLSLNSPIFNRQFMGSVNHTQDLARKPWQGMKVTSLSRKLLESALQDSGPSQPDNTISRSRLQETQPINKLGLELTLEFPRGNDDSLNQFPPMISLSIDGSDSLNYVNEPPGEDVLKGSRVAAENRYRNAANACIEDSFGWASNTFPANDLKSRTGTKAQSLGKHKLSASDSAKSTKSKHRKLLAEQLEGAWVRPNDPNLKFDFTPGDREEEEEQEVDEKANSAEIEMISCSQWYDPFFTSGLDDCSLASDISEIE

SEQ ID NO: 98564 - protein, 2054 aa, Arabidopsis thaliana
  peptide (1)..(2054): Ceres Seq. ID no. 13601007
MASKGGKSKPDIVMASKSGKSKPDNESRAKRQKTLEAPKEPRRPKTHWDHVLEEMAWLSKDFESERKWKLAQAKKVALRASKGMLDQASREERKLKEEEQRLRKVALNISKDMKKFWMKVEKLVLYKHQLVRNEKKKKAMDKQLEFLLGQTERYSTMLAENLVEPYKQGQNTPSKPLLTIESKSDEERAEQIPPEINSCLESGSPELDEDYDLKSEDETEDDEDTIEEDEKHFTKRERQEELEALQNEVDLPVEELLRRYTSGRVSRETSPVKDENEDNLTSVSRVTSPVKDENQDNLASVGQDHGEADKNNLAASEETEGNPSVRRSNDSYGHLAISETHSHDLEPGMTTASVKSRKEDHTYDFNDEQEDVDFVLANGEEKDDEATLAVEEELAKADNEDHVEEIALLQKESEMPIEVLLARYKEDFGGKDISEDESESSFAVSEDSIVDSDENRQQADLDDDNVDLTECKLDPEPCSENVEGTFHEVAEDNDKDSSDKIADAAAAARSAQPTGFTYSTTKVRTKLPFLLKHSLREYQHIGLDWLVTMYEKKLNGILADEMGLGKTIMTIALLAHLACDKGIWGPHLIVVPTSVMLNWETEFLKWCPAFKILTYFGSAKERKLKRQGWMKLNSFHVCITTYRLVIQDSKMFKRKKWKYLILDEAHLIKNWKSQRWQTLLNFNSKRRILLTGTPLQNDLMELWSLMHFLMPHVFQSHQEFKDWFCNPIAGMVEGQEKINKEVIDRLHNVLRPFLLRRLKRDVEKQLPSKHEHVIFCRLSKRQRNLYEDFIASTETQATLTSGSFFGMISIIMQLRKVCNHPDLFEGRPIVSSFDMAGIDVQLSSTICSLLLESPFSKVDLEALGFLFTHLDFSMTSWEGDEIKAISTPSELIKQRVNLKDDLEAIPLSPKNRKNLQGTNIFEEIRKAVFEERIQESKDRAAAIAWWNSLRCQRKPTYSTSLRTLLTIKGPLDDLKANCSSYMYSSILADIVLSPIERFQKMIELVEAFTFAIPAARVPSPTCWCSKSDSPVFLSPSYKEKVTDLLSPLLSPIRPAIVRRQVYFPDRRLIQFDCGKLQELAMLLRKLKFGGHRALIFTQMTKMLDVLEAFINLYGYTYMRLDGSTPPEERQTLMQRFNTNPKIFLFILSTRSGGVGINLVGADTVIFYDSDWNPAMDQQAQDRCHRIGQTREVHIYRLISESTIEENILKKANQKRVLDNLVIQNGEYNTEFFKKLDPMELFSGHKALTTKDEKETSKHCGADIPLSNADVEAALKQAEDEADYMALKRVEQEEAVDNQEFTEEPVERPEDDELVNEDDIKADEPADQGLVAAGPAKEEMSLLHSDIRDERAVITTSSQEDDTDVLDDVKQMAAAAADAGQAISSFENQLRPIDRYAIRFLELWDPIIVEAAMENEAGFEEKEWELDHIEKYKEEMEAEIDDGEEPLVYEKWDADFATEAYRQQVEVLAQHQLMEDLENEAREREAAEVAEMVLTQNESAHVLKPKKKKKAKKAKYKSLKKGSLAAESKHVKSVVKIEDSTDDDNEEFGYVSSSDSDMVTPLSRMHMKGKKRDLIVDTDEEKTSKKKAKKHKKSLPNSDIKYKQTSALLDELEPSKPSDSMVVDNELKLTNRGKTVGKKFITSMPIKRVLMIKPEKLKKGNLWSRDCVPSPDSWLPQEDAILCAMVHEYGPNWNFVSGTLYGMTAGGAYRGRYRHPAYCCERYRELIQRHILSASDSAVNEKNLNTGSGKALLKVTEENIRTLLNVAAEQPDTEMLLQKHFSCLLSSIWRTSTRTGNDQMLSLNSPIFNRQFMGSVNHTQDLARKPWQGMKVTSLSRKLLESALQDSGPSQPDNTISRSRLQETQPINKLGLELTLEFPRGNDDSLNQFPPMISLSIDGSDSLNYVNEPPGEDVLKGSRVAAENRYRNAANACIEDSFGWASNTFPANDLKSRTGTKAQSLGKHKLSASDSAKSTKSKHRKLLAEQLEGAWVRPNDPNLKFDFTPGDREEEEEQEVDEKANSAEIEMISCSQWYDPFFTSGLDDCSLASDISEIE

SEQ ID NO: 98565 - protein, 2041 aa, Arabidopsis thaliana
  peptide (1)..(2041): Ceres Seq. ID no. 13601008
MASKSGKSKPDNESRAKRQKTLEAPKEPRRPKTHWDHVLEEMAWLSKDFESERKWKLAQAKKVALRASKGMLDQASREERKLKEEEQRLRKVALNISKDMKKFWMKVEKLVLYKHQLVRNEKKKKAMDKQLEFLLGQTERYSTMLAENLVEPYKQGQNTPSKPLLTIESKSDEERAEQIPPEINSCLESGSPELDEDYDLKSEDETEDDEDTIEEDEKHFTKRERQEELEALQNEVDLPVEELLRRYTSGRVSRETSPVKDENEDNLTSVSRVTSPVKDENQDNLASVGQDHGEADKNNLAASEETEGNPSVRRSNDSYGHLAISETHSHDLEPGMTTASVKSRKEDHTYDFNDEQEDVDFVLANGEEKDDEATLAVEEELAKADNEDHVEEIALLQKESEMPIEVLLARYKEDFGGKDISEDESESSFAVSEDSIVDSDENRQQADLDDDNVDLTECKLDPEPCSENVEGTFHEVAEDNDKDSSDKIADAAAAARSAQPTGFTYSTTKVRTKLPFLLKHSLREYQHIGLDWLVTMYEKKLNGILADEMGLGKTIMTIALLAHLACDKGIWGPHLIVVPTSVMLNWETEFLKWCPAFKILTYFGSAKERKLKRQGWMKLNSFHVCITTYRLVIQDSKMFKRKKWKYLILDEAHLIKNWKSQRWQTLLNFNSKRRILLTGTPLQNDLMELWSLMHFLMPHVFQSHQEFKDWFCNPIAGMVEGQEKINKEVIDRLHNVLRPFLLRRLKRDVEKQLPSKHEHVIFCRLSKRQRNLYEDFIASTETQATLTSGSFFGMISIIMQLRKVCNHPDLFEGRPIVSSFDMAGIDVQLSSTICSLLLESPFSKVDLEALGFLFTHLDFSMTSWEGDEIKAISTPSELIKQRVNLKDDLEAIPLSPKNRKNLQGTNIFEEIRKAVFEERIQESKDRAAAIAWWNSLRCQRKPTYSTSLRTLLTIKGPLDDLKANCSSYMYSSILADIVLSPIERFQKMIELVEAFTFAIPAARVPSPTCWCSKSDSPVFLSPSYKEKVTDLLSPLLSPIRPAIVRRQVYFPDRRLIQFDCGKLQELAMLLRKLKFGGHRALIFTQMTKMLDVLEAFINLYGYTYMRLDGSTPPEERQTLMQRFNTNPKIFLFILSTRSGGVGINLVGADTVIFYDSDWNPAMDQQAQDRCHRIGQTREVHIYRLISESTIEENILKKANQKRVLDNLVIQNGEYNTEFFKKLDPMELFSGHKALTTKDEKETSKHCGADIPLSNADVEAALKQAEDEADYMALKRVEQEEAVDNQEFTEEPVERPEDDELVNEDDIKADEPADQGLVAAGPAKEEMSLLHSDIRDERAVITTSSQEDDTDVLDDVKQMAAAAADAGQAISSFENQLRPIDRYAIRFLELWDPIIVEAAMENEAGFEEKEWELDHIEKYKEEMEAEIDDGEEPLVYEKWDADFATEAYRQQVEVLAQHQLMEDLENEAREREAAEVAEMVLTQNESAHVLKPKKKKKAKKAKYKSLKKGSLAAESKHVKSVVKIEDSTDDDNEEFGYVSSSDSDMVTPLSRMHMKGKKRDLIVDTDEEKTSKKKAKKHKKSLPNSDIKYKQTSALLDELEPSKPSDSMVVDNELKLTNRGKTVGKKFITSMPIKRVLMIKPEKLKKGNLWSRDCVPSPDSWLPQEDAILCAMVHEYGPNWNFVSGTLYGMTAGGAYRGRYRHPAYCCERYRELIQRHILSASDSAVNEKNLNTGSGKALLKVTEENIRTLLNVAAEQPDTEMLLQKHFSCLLSSIWRTSTRTGNDQMLSLNSPIFNRQFMGSVNHTQDLARKPWQGMKVTSLSRKLLESALQDSGPSQPDNTISRSRLQETQPINKLGLELTLEFPRGNDDSLNQFPPMISLSIDGSDSLNYVNEPPGEDVLKGSRVAAENRYRNAANACIEDSFGWASNTFPANDLKSRTGTKAQSLGKHKLSASDSAKSTKSKHRKLLAEQLEGAWVRPNDPNLKFDFTPGDREEEEEQEVDEKANSAEIEMISCSQWYDPFFTSGLDDCSLASDISEIE

SEQ ID NO: 98566 - DNA, 1142 bp, Arabidopsis thaliana
  misc_feature (1)..(1142): Ceres Seq. ID no. 13601020
  misc_feature (1)..(1142): Ortholog of  Ceres SEQ ID NO 12618197 as cited in SEQ ID NO 64478
attctctaggcttttttatattctgaaagttttgattttttgtatcttgttttgtttctcaatcatcaatttgtggtagtagctcactagcaaacaatggaggggaggttgaataatatgtggaggttgactgtgaatgagagcaaattcgttgaatctgcgttgcaatctgagctcagagtcgatggtcgtggcctttatgattaccgcaagcttactattaagtttggcaaggaatatggcagctcacaagttcaactgggtcagactcatgtaatggcttttgtgactgctcagctagtacaaccttacaaagacagacctagtgaaggctccttctctatcttcaccgagttttctccaatggctgatccatcgtttgagccagggcatcctggtgaatctgctgttgagcttggccgtattatagaccgtgctctacgagaaagccgtgcagtagatacagagtcgctttgtgttctagccggaaagctggtttggtctgttcgcattgatcttcacattttggacaatggagggaacttggttgatgctgctaatgttgctgccttagccgcactcatgactttcaggagacctgattgcactgtaggaggggacaacagtcaagacgtgatcatacatccacccgaagaaagggaaccacttcctttgataatacatcatctcccaatagccttcacgtttggattttttaataaaggcagtatcttggtgatggacccaacttacgttgaagaagctgttatgtgtgggagaatgactgtgacagtcaatgccaatggcgatatatgcgcaatccaaaaaccaggagaagaaggcgtgaaccagagtgtaatccttcattgcctgcgtcttgcttcttcaagagcttctgcaacaacaaagataattagagatgcagttgaagcatacaaccgtgagaggagctcacagaaggtgaagcggcatcatactttggctaagtctgaagttttgggacctattgtagttgtgtaggaagagacataaataaaacatttgctgtggtcgtcgattgtaaataaagattttagttgtagaaatcttatcagcaacactaagctataaaaacgtcgatatgatcaagacatgttgagact

SEQ ID NO: 98567 - protein, 307 aa, Arabidopsis thaliana
  peptide (1)..(307): Ceres Seq. ID no. 13601021
MEGRLNNMWRLTVNESKFVESALQSELRVDGRGLYDYRKLTIKFGKEYGSSQVQLGQTHVMAFVTAQLVQPYKDRPSEGSFSIFTEFSPMADPSFEPGHPGESAVELGRIIDRALRESRAVDTESLCVLAGKLVWSVRIDLHILDNGGNLVDAANVAALAALMTFRRPDCTVGGDNSQDVIIHPPEEREPLPLIIHHLPIAFTFGFFNKGSILVMDPTYVEEAVMCGRMTVTVNANGDICAIQKPGEEGVNQSVILHCLRLASSRASATTKIIRDAVEAYNRERSSQKVKRHHTLAKSEVLGPIVVV

SEQ ID NO: 98568 - protein, 300 aa, Arabidopsis thaliana
  peptide (1)..(300): Ceres Seq. ID no. 13601022
MWRLTVNESKFVESALQSELRVDGRGLYDYRKLTIKFGKEYGSSQVQLGQTHVMAFVTAQLVQPYKDRPSEGSFSIFTEFSPMADPSFEPGHPGESAVELGRIIDRALRESRAVDTESLCVLAGKLVWSVRIDLHILDNGGNLVDAANVAALAALMTFRRPDCTVGGDNSQDVIIHPPEEREPLPLIIHHLPIAFTFGFFNKGSILVMDPTYVEEAVMCGRMTVTVNANGDICAIQKPGEEGVNQSVILHCLRLASSRASATTKIIRDAVEAYNRERSSQKVKRHHTLAKSEVLGPIVVV

SEQ ID NO: 98569 - protein, 247 aa, Arabidopsis thaliana
  peptide (1)..(247): Ceres Seq. ID no. 13601023
MAFVTAQLVQPYKDRPSEGSFSIFTEFSPMADPSFEPGHPGESAVELGRIIDRALRESRAVDTESLCVLAGKLVWSVRIDLHILDNGGNLVDAANVAALAALMTFRRPDCTVGGDNSQDVIIHPPEEREPLPLIIHHLPIAFTFGFFNKGSILVMDPTYVEEAVMCGRMTVTVNANGDICAIQKPGEEGVNQSVILHCLRLASSRASATTKIIRDAVEAYNRERSSQKVKRHHTLAKSEVLGPIVVV

SEQ ID NO: 98570 - DNA, 949 bp, Arabidopsis thaliana
  misc_feature (1)..(949): Ceres Seq. ID no. 13601030
  misc_feature (1)..(949): Ortholog of  Ceres SEQ ID NO 12610908 as cited in SEQ ID NO 55869
  misc_feature (1)..(949): Ortholog of  Ceres SEQ ID NO 14302449 as cited in SEQ ID NO 62344
ttttcactttgttctctctctctctcgtaacacgcctgagagttctcgtcgtccttatctcgatcttggttgattcgctctccgatcggaaattagggcttttgttttctgaagatgacgactgcagcacgaccaacctgggctccagctaagggaggtaacgagcaaggtggtgctcggatctttggtccatctcagaagtattcgtcccgtgatgtcgccgctcacacaactttaaagccaaggagggaagggcaacacactcaagaggaactccagaagataaatcttcgtgatgagcttgaagagcgtgagaggagacatttctcatcaaaagacaaatcatacaatgatgatagagatcgcagaagaggaagtcagcttttactggaagactcgaaaagggatcctgaagagcggattattcctcgcagtgtagatgctgatgattctgatgttgatatcaaaagtgacgatgatagtgatgacgaaagtgacgatgatgatgaggacgacactgaagctcttatggcggaactcgaccagataaagaaagaaagagtggaagagaggctcaggaaggaaaaagagcagcagatggaagagctaaacgctaaggaagaggaacttctcaaaggaaacccattgcttaatactccaacgtcttttagcgtcaaaaggaggtgggatgatgatgttgtattcaaaaaccaggcacgtggtgaaatgaaagctcctaagcgcttcatcaatgatacaatcaggaatgacttccacagaaaattcctgcatagatacatgaagtgattgtttgtcaagagtgttattgctacttctttgtatgatgattatgactaaaagcttttattctgtctggaattacgatgtctctgtactcaaacaacaaatgtttttaagctttatatcaaaaacttatgcatttgatttt

SEQ ID NO: 98571 - protein, 230 aa, Arabidopsis thaliana
  peptide (1)..(230): Ceres Seq. ID no. 13601031
MTTAARPTWAPAKGGNEQGGARIFGPSQKYSSRDVAAHTTLKPRREGQHTQEELQKINLRDELEERERRHFSSKDKSYNDDRDRRRGSQLLLEDSKRDPEERIIPRSVDADDSDVDIKSDDDSDDESDDDDEDDTEALMAELDQIKKERVEERLRKEKEQQMEELNAKEEELLKGNPLLNTPTSFSVKRRWDDDVVFKNQARGEMKAPKRFINDTIRNDFHRKFLHRYMK

SEQ ID NO: 98572 - DNA, 868 bp, Arabidopsis thaliana
  misc_feature (1)..(868): Ceres Seq. ID no. 13601044
  misc_feature (1)..(868): Ortholog of  Ceres SEQ ID NO 13622227 as cited in SEQ ID NO 413
ataaaacaaaaaacatcctccgaagcagctactcctcctcagttgttgttccgccgtcccgccatcagatcccaatcaaagatttaggtaataatttaccatagaagaaatggcagagtctactcagatggaagttgagacagcaacagaaggaactgtgccattgccgcctaaaccaaccttcaagcctttgaaagctcatgaaatgtctgatggtaaagtccagttcaggaaaatagctgtaccaccaaaccgatactcgcctctcaagaaagcatggttggatatctacacacccatttacgatcagatgaaggttgacataaggatgaatctcaaagcccgcaaagtcgagcttaaaacccgagctgacactcccgacatcagtaatcttcagaagtctgcggattttgtacacgctttcatgcttggttttgatatccctgatgctatctctcttttgagaatggacgagctttatgttgagtcttttgagatcaaggatgtgaagactcttaaaggtgagcatttgtctagagccattggtaggttgtctggtaaaggagggaagacaaagtttgctattgagaactcgaccaagacgaggattgtgattgcagacactaggattcatattttgggagctttctctaatattaaagtcgcaaggagttcactttgcagtcttattatgggatctcctgctgggaaagtttactctaagctcagatctgtctctgctagattgaacgaatagttttgaatggcgaaattttgaaacattaacttgcttttgttcggagtgatctttgtaatgaaattttgaagaaacaaatgttatggtgttctttataaaatttgttatggg

SEQ ID NO: 98573 - protein, 215 aa, Arabidopsis thaliana
  peptide (1)..(215): Ceres Seq. ID no. 13601045
MAESTQMEVETATEGTVPLPPKPTFKPLKAHEMSDGKVQFRKIAVPPNRYSPLKKAWLDIYTPIYDQMKVDIRMNLKARKVELKTRADTPDISNLQKSADFVHAFMLGFDIPDAISLLRMDELYVESFEIKDVKTLKGEHLSRAIGRLSGKGGKTKFAIENSTKTRIVIADTRIHILGAFSNIKVARSSLCSLIMGSPAGKVYSKLRSVSARLNE

SEQ ID NO: 98574 - protein, 209 aa, Arabidopsis thaliana
  peptide (1)..(209): Ceres Seq. ID no. 13601046
MEVETATEGTVPLPPKPTFKPLKAHEMSDGKVQFRKIAVPPNRYSPLKKAWLDIYTPIYDQMKVDIRMNLKARKVELKTRADTPDISNLQKSADFVHAFMLGFDIPDAISLLRMDELYVESFEIKDVKTLKGEHLSRAIGRLSGKGGKTKFAIENSTKTRIVIADTRIHILGAFSNIKVARSSLCSLIMGSPAGKVYSKLRSVSARLNE

SEQ ID NO: 98575 - protein, 183 aa, Arabidopsis thaliana
  peptide (1)..(183): Ceres Seq. ID no. 13601047
MSDGKVQFRKIAVPPNRYSPLKKAWLDIYTPIYDQMKVDIRMNLKARKVELKTRADTPDISNLQKSADFVHAFMLGFDIPDAISLLRMDELYVESFEIKDVKTLKGEHLSRAIGRLSGKGGKTKFAIENSTKTRIVIADTRIHILGAFSNIKVARSSLCSLIMGSPAGKVYSKLRSVSARLNE

SEQ ID NO: 98576 - DNA, 834 bp, Arabidopsis thaliana
  misc_feature (1)..(834): Ceres Seq. ID no. 13601052
  misc_feature (1)..(834): Ortholog of  Ceres SEQ ID NO 12611008 as cited in SEQ ID NO 56180
  misc_feature (1)..(834): Ortholog of  Ceres SEQ ID NO 15179480 as cited in SEQ ID NO 0
atataagtctttctcactccttctctttcctttgtgattcatatccttcttcttctccaagaacctctctctctttctgcttctctatattttaacactttcttccgaatttgcccctcaagttttattttaattgctaaaatggctggaaccctagttaactccgccgggagattctcaccgggaaattgtattcttcctcaacagagaacagccagattctacagcggaaccgcgagatttcccaccggagctccgtcgtttaaggcttcagctcagacgcttaacgccgagccagctgtaacggaatccgttcgtcggagagtttctagcctctacgaattactgaaagtgaatgaaacggcgtccttgacggagatcaagacggcgtaccggagcttagctaaagtatatcatccagatgcgtcggaatcggacggtcgagattttatggagattcacaaagcttacgcgacacttgcggatccgactacaagagcgatttacgactcgacgcttagagtaccacggagacgggtacacgccggagcgatgggtcggtcggggcgggtttacgctacgacccggagatgggagacggatcagtgttggtgattttaggcttcctatgattttgcagcagcgaaagggcactttttgacttactttcccctttgattacgtttttttttttccttgtcatatctttggaaaattaaggggaaattaagtttaatccgctctttttttttgtttttcttttaacttaagcagttaacaatgtataaagaagttatgagtagagaaatgtatatgattttagttttctccttt

SEQ ID NO: 98577 - protein, 157 aa, Arabidopsis thaliana; identical to SEQ ID NO: 21713
  peptide (1)..(157): Ceres Seq. ID no. 13601053

SEQ ID NO: 98578 - protein, 79 aa, Arabidopsis thaliana
  peptide (1)..(79): Ceres Seq. ID no. 13601054
MRRNRTVEILWRFTKLTRHLRIRLQERFTTRRLEYHGDGYTPERWVGRGGFTLRPGDGRRISVGDFRLPMILQQRKGTF

SEQ ID NO: 98579 - DNA, 2052 bp, Arabidopsis thaliana
  misc_feature (1)..(2052): Ceres Seq. ID no. 13601055
  misc_feature (1)..(2052): Ortholog of  Ceres SEQ ID NO 13587235 as cited in SEQ ID NO 0
gttcctctcctctctctctctcttcccgttttcacttttgttcgttctctggcggccgatcccgtcgctcgctaccttttaagatattttttttatctaatgaacctgaaattgtaattaggcatataattggggattatttgctgaaattctcatttctagatcgaaaaaagcgaataattcgttttcatttgattcttgcctaatcttagggtgtctttatttatctaccaaaagaatgtctaattatcgaggagatgatgctgagtacatggaagacgtagatgatgagatggaagatgttgaagatgatatggatgaggagtttcgtggtgatgatcttggtgcttcagattctgacgttgaagaatttgactattcgaacaataaagtagctgataccacggctgagcaagctcggaaagggaaagatatccaggggattccgtgggacagacttaatatttctagagagaaatacagacaaactagattagaacagtataagaattatgaaaatgtccctaattctggagaatcatcagaaaaggtttgcaaggtcacacagaaaggaggactattttatgacttctggcggaattcacgatctattaagtctactatactacatttccagctgagaaatttggtatgggcaacttctaagcacgacgtgtatcttatgtcaaattttctggttacacattattcttctctaacgtctggaaagcatgaagttctcaatgtccgtggtcatgttgcgccatctgagaaacatcctggaagtttacttgaaggatttacgcagactcaagtaagtacacttgcagtaaaagatgactttctggttgctggcgggtttcaaggagaacttatttgcaagcatcttgatagaccgggtgtcagcttttgctctcgtatgacttatgatgataatgctataaccaatgctattgagatctacaacaaacccagtggtgcacttcattttactgcgtcaaataatgactgtggagttagagactttgacatggagagataccagcttgttaagcatttccgttttccttggccagtgaatcacgcatctttgagtcctgatggtaaattactggctattgttggagacaacccggagggccttattgtagaccccaacacaggaaagacgttggaaacactatcaggacacttggacttttcctttgcctctgcgtggcatccggatggagtcactttctctacaggaaaccaagataagacttgtcgtgtatgggacatccgtaacctatctcagtctgttactgtcttgaagggtaacctgggagcaatccggtcaatccgctacacatcagatggaaaatacatggccatggctgaaccggctgactttgtccatgtctatgatgtctcaaacgggtatgaaacagagcaggaaatcgacttctttggggaaatctctggaatatctttcagccctgacacagaggcgctatttattggggtatgggaccgcacttatggtagcctccttgagtttggtcggcgcaggaactattcctaccttgactcgtatctttaagctagaagagaagtatacacaaccctgtccaatgaagaaaagagagctcattcagcaaccagtgaacatgacagaagcaaagcatagatatatggatatctcaaagatgtaaatgatgtgttgtgcaaatgctagttagttagtgtcttttgtttccttctccggctggtgtgttattttccttatgtctggttatgtctggtctcaaaaggttcaagatgtgtacagaaagggctggttcagtggtggcacagactggattaggacttgagggtggctccgcagcgggttctggattcaaagtcgggaggatcattgttgttgtgtttggtggcttgtgatcttttctttttgttccttgtacttgtggttgttgtaggaactcgagtgtttagatcctgttctgagtttagaatttggagatacttaactaaattaaaataaattaataatagtcctttgttcgttat

SEQ ID NO: 98580 - protein, 447 aa, Arabidopsis thaliana; identical to SEQ ID NO: 40107
  peptide (1)..(447): Ceres Seq. ID no. 13601056

SEQ ID NO: 98581 - protein, 436 aa, Arabidopsis thaliana; identical to SEQ ID NO: 40108
  peptide (1)..(436): Ceres Seq. ID no. 13601057

SEQ ID NO: 98582 - protein, 429 aa, Arabidopsis thaliana; identical to SEQ ID NO: 40109
  peptide (1)..(429): Ceres Seq. ID no. 13601058

SEQ ID NO: 98583 - DNA, 1365 bp, Arabidopsis thaliana
  misc_feature (1)..(1365): Ceres Seq. ID no. 13601063
  misc_feature (1)..(1365): Ortholog of  Ceres SEQ ID NO 13595222 as cited in SEQ ID NO 56312
  misc_feature (1)..(1365): Ortholog of  Ceres SEQ ID NO 13654209 as cited in SEQ ID NO 62121
  misc_feature (1)..(1365): Ortholog of  Ceres SEQ ID NO 13596965 as cited in SEQ ID NO 63363
gactactcatatgtgtcgcccagatttgaagatcggagatatgaatctcttctttctctggatttgaaagttcgataaaaatctactgatacatcgacttctggaagcgatctcgatctctctagaattgtttcgacgacgaagatgaagaagattcaaattggtgcggtggcgctattggtgtttctatctgtggcctctctctttgaaatcggattggcttctccgaacacagttcctgctttcctctggtctccgcatctccagtctgctaatggtgaattggatgaggctgtaaattatcaggtcatgtctgcaaaggatctagttggttctgttttcactcaaggaggttggtcaaactttctgtgctcagagaagaagcttgagcaacctgttgatgttgcacttgtgttcataggcagagagttactgtcttctgatgtttcttcaaaaaggaactcagatcctgcccttgttaacacattgaataatctatttacagcttccaacttctcattggcattcccatatattgctgctccagaggaagaaaggatggagaatttgttactttcagggcttaaagaagcttgtcccaacaatgtaggagtcagcaatatcgtgttctcagattcgtgctttgttgaggatggaacaattcagaaactttcagacttgcagtctttcaaagatcatttgcttgctagaagagaaacaaggaaagaaggagaaactgacttggttgtgctctgttccgagggttctgaatcgaatagtcaagctggacagtcacattcagagcgtgaaagcttcttggaacttgttagttctgtagaacaatccggcagtaaatatacagctctttatgtttctgatccttattggtacacatcttacaaaactctccaaaggtttctagctgaaactgctaaaggaaacagtactcctgaaattgctactggctgtgatgaactctgcaaatttaagtcatcacttttggagggcatactagtgggaatcgtttttcttctcatcttgatcagtggactttgctgtatggcgggtatcgatacaccgactagattcgagactcctcaagattcttaagctgttgaccttaagagccatccccaccttttgctttgcttttgacgagtcttttcttgtgcatagtgcgcattgtggaaggtacttcaatgtcgatttgttacattattacttcaaaacaaaatctgcatatgccataaaatccccttgtatcatttattcatcttgtttgtgagtctttcttaaacgtcataaattaataatggagaacgagtaaaaaaccagagatacatacactggagaacggattacatt

SEQ ID NO: 98584 - protein, 321 aa, Arabidopsis thaliana; identical to SEQ ID NO: 28682
  peptide (1)..(321): Ceres Seq. ID no. 13601064

SEQ ID NO: 98585 - protein, 266 aa, Arabidopsis thaliana; identical to SEQ ID NO: 28683
  peptide (1)..(266): Ceres Seq. ID no. 13601065

SEQ ID NO: 98586 - protein, 183 aa, Arabidopsis thaliana; identical to SEQ ID NO: 28684
  peptide (1)..(183): Ceres Seq. ID no. 13601066

SEQ ID NO: 98587 - DNA, 1052 bp, Arabidopsis thaliana
  misc_feature (1)..(1052): Ceres Seq. ID no. 13601075
  misc_feature (1)..(1052): Ortholog of  Ceres SEQ ID NO 13583408 as cited in SEQ ID NO 62616
  misc_feature (1)..(1052): Ortholog of  Ceres SEQ ID NO 15179752 as cited in SEQ ID NO 63074
cctagtccaaaaatttctcatactataaaatgatttttttttttgcttcgctccctctttttcacttcgttaacggccccgcctccactctatcctaccgccgacgtccgtgatcgccgaaatgactgaagcagagtccaagactgttgttcctgagtcagtgttgaagaagagaaagagggaggaagaatgggcacttgccaagaaacaggagcttgaggctgccaaaaagcagaatgctgagaagaggaaactcatatttaaccgggctaaacagtactccaaggagtaccaggagaaagaaagggaattaatccagctgaagcgtgaggcaaaattgaaaggaggcttttatgttgacccagaagctaaactgcttttcattatccgtatccgtggtatcaatgccattgacccaaagacaaagaagattttgcaacttttgcgtttaagacagattttcaatggtgtgttcttgaaggtcaacaaggcaaccattaacatgcttcgccgtgttgaaccctatgtaacctatggatacccgaacttaaaaagtgtgaaggaattgatttacaaacgaggttttggaaagcttaaccaccagaggactgccttaacagacaattctattgtagatcaggggctaggaaagcatggcatcatctgcgttgaggatctgatccatgagatcatgacggttgggccacatttcaaggaagccaataactttttgtggccattccagttgaaggctccattgggagggatgaagaagaagaggaaccattacgtggaaggaggagatgctggaaaccgcgagaacttcatcaacgagctcgttaggagaatgaactgaagcgtaagcgttattgctctgaaactccctaggaaacgttttgctataggtggaaaacttctgttcgcttgcttgtgttgccattgaggcgaagtaaacatttacggtgaaagactttgatattttataagtttgaaattgtaagaacacatcatttatttccttccacattacatcgtcacttgcattgcatttt

SEQ ID NO: 98588 - protein, 244 aa, Arabidopsis thaliana; identical to SEQ ID NO: 40188
  peptide (1)..(244): Ceres Seq. ID no. 13601076

SEQ ID NO: 98589 - DNA, 837 bp, Arabidopsis thaliana
  misc_feature (1)..(837): Ceres Seq. ID no. 13601081
  misc_feature (1)..(837): Ortholog of  Ceres SEQ ID NO 14312416 as cited in SEQ ID NO 55270
  misc_feature (1)..(837): Ortholog of  Ceres SEQ ID NO 15225352 as cited in SEQ ID NO 67888
ctatagattattcaaaaagatgttctgaagacagattttcctcactttgatctcgtggttgcaaatattccttacaacatatcttcccctcttgtggccaagcttgtatacggctccaatacttttcgaagcgccacactcttgcttcaaaaggaattctcccgccggctcctggcaaatccaggagattccgatttcaatagattggcggtgaacgttaagttagtagctgatgttaaatttgtgatggatgtaagtaaaagagagtttgttccacctcctaaagttgattcatctgtaattaggattacaccaaaggagataataccggatgttaatgttcaagaatggttggcattcactcgcacgtgtttcgggaagaagaataagacgcttggttccatgtttaggcagaagaaaaaggtcatggaattgcagagtttgtctgcagggaggcatggctcgaatgttgaggttatgaatcagacaggtggtgattctgacagtgatgttgaagaagatgggaaagatgatttgttgtgtttggatacagatgcaagtatgttcaaggaaagggtaattgaaattctgagaacaaatgggttcgaagagaagagaccatccaagctttcacatcgtgagttgttacatttgctttctttgtttaaccaagctggaatttttttccatgatattacatcattacaaatggatctacacgaataatgataagttttctttaatgttttatgtttttggtcgaaccctttgaatttatttttcttacaaattggaagattacagtaaaagctacttaatgcagtaatttcggaaggg

SEQ ID NO: 98590 - protein, 159 aa, Arabidopsis thaliana
  peptide (1)..(159): Ceres Seq. ID no. 13601082
MDVSKREFVPPPKVDSSVIRITPKEIIPDVNVQEWLAFTRTCFGKKNKTLGSMFRQKKKVMELQSLSAGRHGSNVEVMNQTGGDSDSDVEEDGKDDLLCLDTDASMFKERVIEILRTNGFEEKRPSKLSHRELLHLLSLFNQAGIFFHDITSLQMDLHE

SEQ ID NO: 98591 - protein, 107 aa, Arabidopsis thaliana
  peptide (1)..(107): Ceres Seq. ID no. 13601083
MFRQKKKVMELQSLSAGRHGSNVEVMNQTGGDSDSDVEEDGKDDLLCLDTDASMFKERVIEILRTNGFEEKRPSKLSHRELLHLLSLFNQAGIFFHDITSLQMDLHE

SEQ ID NO: 98592 - protein, 99 aa, Arabidopsis thaliana
  peptide (1)..(99): Ceres Seq. ID no. 13601084
MELQSLSAGRHGSNVEVMNQTGGDSDSDVEEDGKDDLLCLDTDASMFKERVIEILRTNGFEEKRPSKLSHRELLHLLSLFNQAGIFFHDITSLQMDLHE

SEQ ID NO: 98593 - DNA, 1046 bp, Arabidopsis thaliana
  misc_feature (1)..(1046): Ceres Seq. ID no. 13601085
  misc_feature (1)..(1046): Ortholog of  Ceres SEQ ID NO 14316165 as cited in SEQ ID NO 52560
  misc_feature (1)..(1046): Ortholog of  Ceres SEQ ID NO 13597076 as cited in SEQ ID NO 63571
gattagtccggattgcatctaaggattcgttgatggcggcgtcgtggcagtgggaaaatgccaccgccggcgccgtcgctggattcgccaccgtagctgctatgcactctcttgatgttgttcgtacgagattccaagtcaacgacggaagagggtcaagtctgccgacgtacaagaacactgctcacgctgtcttcaccattgcccgtctcgagggtttgagagggctttatgcaggcttcttccctgcagttatcggttctactgtttcctggggcttatacttctttttttatggaagagccaagcagaggtacgctagaggcagggacgatgagaaactcagccctgctctccaccttgcttctgctgctgaagcaggggccttggtctgtttatgcacaaatcctatttggcttgtcaaaacaaggttacagcttcagacacctcttcatcaaactcaaccatactcagggctattagatgcctttagaaccatagtgaaagaggaaggacccagggcgctctacaagggtattgtccctggtcttgtactggtttctcatggtgctattcagttcacagcttatgaggaactccgtaaaatcattgtggatttgaaagaaaggagaagaaagtccgaatccactgacaatctattgaactcagcagattatgctgcacttggtggctcctccaaagtcgctgcagttcttcttacgtatccatttcaagttatacgagcacgattacagcaacgacctagtaccaacggaatcccaagatatatagacagcttacatgtcatcagagaaaccgcgagatatgaaggtctcaggggtttctacaggggactaacggctaatcttttgaaaaatgtacctgcgtcttccatcacattcatcgtctatgaaaacgttctgaaattgctaaaacagcatccaacaacaaaagattagactcttcctcttcctttaccgttatttcttagactcaacacgcacgcggttgacttgtcactcccaatactagagaattattctttg

SEQ ID NO: 98594 - protein, 318 aa, Arabidopsis thaliana
  peptide (1)..(318): Ceres Seq. ID no. 13601086
LVRIASKDSLMAASWQWENATAGAVAGFATVAAMHSLDVVRTRFQVNDGRGSSLPTYKNTAHAVFTIARLEGLRGLYAGFFPAVIGSTVSWGLYFFFYGRAKQRYARGRDDEKLSPALHLASAAEAGALVCLCTNPIWLVKTRLQLQTPLHQTQPYSGLLDAFRTIVKEEGPRALYKGIVPGLVLVSHGAIQFTAYEELRKIIVDLKERRRKSESTDNLLNSADYAALGGSSKVAAVLLTYPFQVIRARLQQRPSTNGIPRYIDSLHVIRETARYEGLRGFYRGLTANLLKNVPASSITFIVYENVLKLLKQHPTTKD

SEQ ID NO: 98595 - protein, 308 aa, Arabidopsis thaliana
  peptide (1)..(308): Ceres Seq. ID no. 13601087
MAASWQWENATAGAVAGFATVAAMHSLDVVRTRFQVNDGRGSSLPTYKNTAHAVFTIARLEGLRGLYAGFFPAVIGSTVSWGLYFFFYGRAKQRYARGRDDEKLSPALHLASAAEAGALVCLCTNPIWLVKTRLQLQTPLHQTQPYSGLLDAFRTIVKEEGPRALYKGIVPGLVLVSHGAIQFTAYEELRKIIVDLKERRRKSESTDNLLNSADYAALGGSSKVAAVLLTYPFQVIRARLQQRPSTNGIPRYIDSLHVIRETARYEGLRGFYRGLTANLLKNVPASSITFIVYENVLKLLKQHPTTKD

SEQ ID NO: 98596 - protein, 285 aa, Arabidopsis thaliana
  peptide (1)..(285): Ceres Seq. ID no. 13601088
MHSLDVVRTRFQVNDGRGSSLPTYKNTAHAVFTIARLEGLRGLYAGFFPAVIGSTVSWGLYFFFYGRAKQRYARGRDDEKLSPALHLASAAEAGALVCLCTNPIWLVKTRLQLQTPLHQTQPYSGLLDAFRTIVKEEGPRALYKGIVPGLVLVSHGAIQFTAYEELRKIIVDLKERRRKSESTDNLLNSADYAALGGSSKVAAVLLTYPFQVIRARLQQRPSTNGIPRYIDSLHVIRETARYEGLRGFYRGLTANLLKNVPASSITFIVYENVLKLLKQHPTTKD

SEQ ID NO: 98597 - DNA, 1846 bp, Arabidopsis thaliana
  misc_feature (1)..(1846): Ceres Seq. ID no. 13601089
  misc_feature (1)..(1846): Ortholog of  Ceres SEQ ID NO 14314108 as cited in SEQ ID NO 63184
  misc_feature (1)..(1846): Ortholog of  Ceres SEQ ID NO 13658253 as cited in SEQ ID NO 66650
acaagaacaacaaaacagaggaagaagaagaagaagatgaagcttctggctctgtttccatttctagcgatcgtgatccaactcagctgttgggagctaggaacagatgcattaccgagcggtgggttcgtgaggacgaaaggtgttcagtttagtctcaatggctatccatattacgctaatggcttcaatgcctactggctcatgtacgtagcctccgatccatcccaacggtctaagatctccaccgctttccaagatgcttctcgccatggattgaccgttgctcgaacctgggctttcagcgatggcggttacagggctcttcagtattcccctggctcctacaacgaggatatgtttcagggtttggattttgcgttagctgaggcaagaaggcatggtataaagataatactcagctttgccaataactacgagagcttcggagggaggaagcaatatgtggattgggctcgaagcagaggccgtcccgtttcttctgaagacgacttcttcactgactctcttgttaaagatttctacaagaaccatatcaaggctgtgctgaacagattcaatacctttaccaaagttcattacaaagatgacccaaccattatggcttgggagctcatgaacgagccccgttgcccctctgatccttccggaagagccattcaggcttggattactgaaatggctgctcatgtgaaatcactagacagaaaccatctgcttgaagctggcctcgaaggtttctatggtcagtcttcacctcaaagcaagactcttaacccacctggccagtttggaaccgatttcatcgccaataaccgcattcccggcattgatttcgtcacggttcactcttaccctgatgaatggtttccagactcaagcgagcaatcccaaatggatttcttgaacaaatggctagacgcacacatccaagacgcacagaacgttcttcacaaaccaataatattagcagagtttggtaaatcaatgaagaaaccaggttataccccagcgcagagagacatcgtcttcaacaccgtgtacagcaagatttacgggtctgcaaaacgaggaggtgcagcagcaggaggattgttctggcaacttctggtaaacggaattgataattttcaagatgggtatgggatcatacttagccaaagctcgtcgaccgttaacgtcatttcacagcaatcgcggaagttgactttgattaggaaaatcttcgctaggatgatcaatgtggagaaatggaagagagcgagaggtcagggacaagttgggaaacgaggtcacaaaatcaataactgaaatgatactaattaaaccacttttttatagcgaatggaacgatctcagctcgtccacgaaagttatagtgatagatttcataatatatagttttttggccggaatgaatgaactttattagtgcgacgaaaattattagtaataacccgtcaaaactcaaaaggttggttatttagtaatgggctttacttattaggcccactatgaaatacaagggcctagaatttctccagccacatgtgagttataacatgggcaaaaccattcaacaatgtttgttttggattctgtgaaagagatgactatcgttgataatttgaaggatgaagaagattcagaacaataaaacgtcgtcggcgtttgatttcagacatcgccggagagaacaagactctccatttgttacttccatggcttatgtgggtaggtcttggcgtaaacttgtattttatattctcgatttgtacggtttaatgattaaagaagaaaatagacaaaaaaaaattatttagct

SEQ ID NO: 98598 - protein, 443 aa, Arabidopsis thaliana
  peptide (1)..(443): Ceres Seq. ID no. 13601090
TRTTKQRKKKKKMKLLALFPFLAIVIQLSCWELGTDALPSGGFVRTKGVQFSLNGYPYYANGFNAYWLMYVASDPSQRSKISTAFQDASRHGLTVARTWAFSDGGYRALQYSPGSYNEDMFQGLDFALAEARRHGIKIILSFANNYESFGGRKQYVDWARSRGRPVSSEDDFFTDSLVKDFYKNHIKAVLNRFNTFTKVHYKDDPTIMAWELMNEPRCPSDPSGRAIQAWITEMAAHVKSLDRNHLLEAGLEGFYGQSSPQSKTLNPPGQFGTDFIANNRIPGIDFVTVHSYPDEWFPDSSEQSQMDFLNKWLDAHIQDAQNVLHKPIILAEFGKSMKKPGYTPAQRDIVFNTVYSKIYGSAKRGGAAAGGLFWQLLVNGIDNFQDGYGIILSQSSSTVNVISQQSRKLTLIRKIFARMINVEKWKRARGQGQVGKRGHKINN

SEQ ID NO: 98599 - protein, 431 aa, Arabidopsis thaliana; identical to SEQ ID NO: 24290
  peptide (1)..(431): Ceres Seq. ID no. 13601091

SEQ ID NO: 98600 - protein, 375 aa, Arabidopsis thaliana; identical to SEQ ID NO: 24291
  peptide (1)..(375): Ceres Seq. ID no. 13601092

SEQ ID NO: 98601 - DNA, 1202 bp, Arabidopsis thaliana
  misc_feature (1)..(1202): Ceres Seq. ID no. 13601096
  misc_feature (1)..(1202): Ortholog of  Ceres SEQ ID NO 14311659 as cited in SEQ ID NO 51212
  misc_feature (1)..(1202): Ortholog of  Ceres SEQ ID NO 12635180 as cited in SEQ ID NO 0
agcccttttgattattactctttagtctttactttgctcacagctttggatcaccaaaaaaaaaactcaagagagactttgtggccatggcagcctctctccaatccaccgctacattcctccagtcggcgaagatcgccaccgctccttctcgcggaagttctcacctccgatcgactcaagccgtcggcaaatcttttgggctcgaaacttcctcggctcgcctcacttgctccttccagtctgactttaaggacttcaccggtaaatgctccgacgctgtcaaaatcgccggattcgctcttgccacctctgctctcgtcgtctcgggagcaagtgcggagggagctccaaagagattgacctatgatgagattcagagcaagacatacatggaagtgaaaggaactggaacggctaaccagtgccctactattgacggtggctctgagactttctcgttcaaacccggaaagtatgcaggaaagaagttctgcttcgagcctacttccttcaccgtcaaggcagacagtgtaagcaagaacgctcctccagagttccagaacacaaagctcatgacccgtcttacctacacccttgacgagatcgaaggacccttcgaggttgcttcagacggaagcgtcaatttcaaggaagaagatggaatcgactatgctgcagtcacagtccaacttccaggaggtgaacgtgtgccattccttttcacagtcaaacagcttgacgcctcaggcaaaccagacagcttcaccggaaaattcttggttccatcgtaccgtggctcttccttcttggacccaaagggccgtggtggatccacaggatatgacaacgccgtggcattgccagctggaggcagaggagacgaggaggagcttgtaaaggagaacgtgaagaacactgccgcttcagtgggagagatcactctgaaagtgacaaagagcaagccggagacaggagaggtgatcggagtgttcgagagtcttcagccgtcggatactgacttgggtgctaaggtaccaaaggatgtgaagatccaaggggtgtggtatggtcaacttgagtgatcatgttattatattttccgttgattgtgtttgatgataatgataacatcttttgatgctttcttcgtttatctctcttatataaaatgcacatgcctaagatcttgaattttctgt

SEQ ID NO: 98602 - protein, 332 aa, Arabidopsis thaliana
  peptide (1)..(332): Ceres Seq. ID no. 13601097
MAASLQSTATFLQSAKIATAPSRGSSHLRSTQAVGKSFGLETSSARLTCSFQSDFKDFTGKCSDAVKIAGFALATSALVVSGASAEGAPKRLTYDEIQSKTYMEVKGTGTANQCPTIDGGSETFSFKPGKYAGKKFCFEPTSFTVKADSVSKNAPPEFQNTKLMTRLTYTLDEIEGPFEVASDGSVNFKEEDGIDYAAVTVQLPGGERVPFLFTVKQLDASGKPDSFTGKFLVPSYRGSSFLDPKGRGGSTGYDNAVALPAGGRGDEEELVKENVKNTAASVGEITLKVTKSKPETGEVIGVFESLQPSDTDLGAKVPKDVKIQGVWYGQLE

SEQ ID NO: 98603 - protein, 230 aa, Arabidopsis thaliana; identical to SEQ ID NO: 23855
  peptide (1)..(230): Ceres Seq. ID no. 13601098

SEQ ID NO: 98604 - protein, 169 aa, Arabidopsis thaliana; identical to SEQ ID NO: 23856
  peptide (1)..(169): Ceres Seq. ID no. 13601099

SEQ ID NO: 98605 - DNA, 2350 bp, Arabidopsis thaliana
  misc_feature (1)..(2350): Ceres Seq. ID no. 13601100
  misc_feature (1)..(2350): Ortholog of  Ceres SEQ ID NO 13656177 as cited in SEQ ID NO 64997
gtcctcttttgtcgtctctccctgctttcgcacttcatagcctcaatctctcaacaagcagaagagattcgattctccattatcttccttctaaatgccttccctaatgttatctgataagaaagaggagaagaagatgaagaagaagatggctttggataccccagagcttgattctaagaaggggaagaaggagcagaagctgaaactatctgattcggatgaagaagagtcggagaagaagaagagtaagaagaaggataagaagcgtaaggcttccgaggaggaggatgaagtgaagagcgattcaagctcggagaagaagaagagcagcaagaaggttaagttgggcgttgaggatgttgaagttgataaccctaatgctgtttctaagtttcggatttctgcgcctttgagggagaagcttaaggcgaatggtattgaagctcttttcccgattcaggcttccacgtttgatatggttctcgatggtgctgatttagttggacgggctcgtactggtcagggtaaaacattggcttttgtgttgcctatattggaatctttggttaatggacctgccaaaagcaaaaggaagatgggatatggcaggtcaccaagtgttttggtccttttaccgaccagagaattggccaagcaggtggctgctgactttgatgcatatggaggatcacttgggttaagttcatgttgtctctatggaggtgatagctatccagttcaggagggtaaattaaagagaggtgttgacattgtagttggaacccctggtcgtattaaggatcatattgaaagacaaaaccttgatttcagctatttacaattccgtgttcttgatgaagctgatgaaatgttgaggatgggatttgttgaggatgttgaacttattttagggaaagtggaggattctactaaagtccagactcttctcttcagtgctactttgccatcatgggtgaaaaatatctctaacaggtttcttaaaagagaccagaagactattgatcttgttggtaatgataaaatgaaggccagtaatagtgttcgacacattgctattccttgtaataaggcagccatggctcggttgattcctgatattatcagttgctatagcagtggaggccaaactattattttcgctgaaactaaagttcaagtttctgagctttctggtttgttggatggatcaagagccttgcatggtgaaatacctcaatcacaacgtgaggttactcttgctggatttaggaatggcaagtttgcaacattggtggctacaaatgttgctgctcgtggtctagatatcaatgatgtgcagttaattatccagtgtgagcctccacgtgaagttgaagcatatattcatcgttcaggccgaacaggaagagctggcaacacaggagttgcggttacactctacgattctagaaagtcgagtgtatccaggatcgaaaaagaagctggtatcaaatttgagcaccttgctgcacctcaacctgatgaaattgccagatctggtggtatggaagctgctgagaaagttaaacaagtgtgtgacagtgtggttcctgcattccttgaagctgccaaggaattattagaaacttctggtttatcagctgaagtactcctcgcaaaagctcttgcaaaaactgcgggcttcactgagataaagaaaaggtcacttcttacatcaatggagaactatgtgacactacatcttgaagcagggaaaccaatatactcgccatcatttgtttatggactgctaaggagagttttaccggatgacaaggtggaaatgattgaagggttatctctaacagcagataaaacaggagctgtgttcgatgttaagcaatcagatctagacttgttcattgcaggagcacaaaagagtgctggaagtatgagtttggaagtggttaaggtgatgcctaaactccaggagagagaaccattgccacaaaaaagattcggtggtggtggcagaggaaatcggtttggtggtggtggaggaaatcggtttggcggtggtggtggcagaggaagaggaggcagtggtggtagaggccagagatattgaaaactggaacccaacttctcctttctatataaaaagaaactaaactccgtcttataatttcattactatcttcttccgctgatgttttctacactataataggtggcttttctgtgttttccattttctttccttgaacaaacttatggaggctctcttgtaccctcttatcaattttgtgtaatgttggatgataatgatgattaaattataacttcgtcactcattggaattgttttg

SEQ ID NO: 98606 - protein, 671 aa, Arabidopsis thaliana; identical to SEQ ID NO: 27774
  peptide (1)..(671): Ceres Seq. ID no. 13601101

SEQ ID NO: 98607 - protein, 667 aa, Arabidopsis thaliana; identical to SEQ ID NO: 27775
  peptide (1)..(667): Ceres Seq. ID no. 13601102

SEQ ID NO: 98608 - protein, 657 aa, Arabidopsis thaliana; identical to SEQ ID NO: 27776
  peptide (1)..(657): Ceres Seq. ID no. 13601103

SEQ ID NO: 98609 - DNA, 812 bp, Arabidopsis thaliana
  misc_feature (1)..(812): Ceres Seq. ID no. 13601104
  misc_feature (1)..(812): Ortholog of  Ceres SEQ ID NO 15178899 as cited in SEQ ID NO 0
aagaagacaacaatggagtgctctctctcatccatcctccttctccttgtactctgcttcactcatcccattccttctctaaccttcgagccactaatctcttctcttgatcttcatgaagaagaaagctgcccttacactgtaattgttaccacaagctgtttctctcctgattggtctagagatcaggtcactatcgctttgggtgacgccgacgataaccaggtggtcgcaccgagactagacaaaccgctaagtggaggaggtggttttgagaaatgttcatcggacacattccaagtcaaaggtaaatgtctcaacactatctgctccgtctacatctaccgttccggtaccgacggctggatcccggagaccgtcgagatatacaaggaaggttccaaatccgtgaaattcgatttcaacaagaacgtccctgaaaacatttggtacggaaacaactattgtaacaacaccgatttgccaccgccttccccggatttccctccgttttctccatccatcccaccgccttcaccaccttattttcctcctgaaccaccttcaatcccgccgccaccaccaccatcaccgccgtctgctgcctctggacgtggaagtggtcagagtttggttgttgcgtttgctgcgtttgtgtttgcgtttgcggctgtggttgtttgagttattttgttaagaattaagagttgtctcaataagtaacgagtatcgtgtaatccctctgttttgtctttgactctttgtagttgaacattgacaatttcatattgtggtaacattaattagttaac

SEQ ID NO: 98610 - protein, 227 aa, Arabidopsis thaliana
  peptide (1)..(227): Ceres Seq. ID no. 13601105
KKTTMECSLSSILLLLVLCFTHPIPSLTFEPLISSLDLHEEESCPYTVIVTTSCFSPDWSRDQVTIALGDADDNQVVAPRLDKPLSGGGGFEKCSSDTFQVKGKCLNTICSVYIYRSGTDGWIPETVEIYKEGSKSVKFDFNKNVPENIWYGNNYCNNTDLPPPSPDFPPFSPSIPPPSPPYFPPEPPSIPPPPPPSPPSAASGRGSGQSLVVAFAAFVFAFAAVVV

SEQ ID NO: 98611 - protein, 223 aa, Arabidopsis thaliana; identical to SEQ ID NO: 21019
  peptide (1)..(223): Ceres Seq. ID no. 13601106

SEQ ID NO: 98612 - DNA, 1317 bp, Arabidopsis thaliana
  misc_feature (1)..(1317): Ceres Seq. ID no. 13601118
  misc_feature (1)..(1317): Ortholog of  Ceres SEQ ID NO 15177059 as cited in SEQ ID NO 60196
aagtaacaaaatactaattcaaaagctttataaagtttcttttctcattcggttctaaagttcctatttttcaatggattacgtgagaacccaagtcgaagctgtttttgatgattctgagcaagatggatcaaccatctctgaatctggaagctgcgattcttcttctgatcgatcttttgctgacgagcttgggcttatggagttgcttgaaggagataaagctcatgatttgatctatcgtaattgtaaatctggtcttggtgatcaatgtcagattctctctgttcttagaaacggatttaggaacgttggatctcgtgcaaagctcaagacttttcaggtttttcaagaggcggtgcagatgaaacacggtggagacggtggagctaaggtgaaatacggttggtgctctgtttcgaaacatgagcttaaaacgatttttgagtatgggtttagcgagccgctgaggaatgatggatcttttggccgtggattgtatctctcgccggataattctcctcttgattgtttgaaggattcagcttcagaatcagaagatgggatgagattcttgttgctttgtagagttctacttggaaaatcagagattgttcctcaaggctcgactagatcatgtccaagttcaccagagtttgattctggtgtggatgatttagtttctacgaagaagtatattgtgtggagtacacacatgaacactcatgttttgcctgagtttcttgtttgcatcaaagctccatttaacctaactcgaagtccaaagagattgagatcaccatggatggcatttcctgtattgatcaaagcattgtccaagtttctacctccttctcaaatacttgtcattcagaaacattacaaagatcaacaaaataggagaattacacggagcgaactaatccaacgagtcagaagcataaccggagacaagttactagttcacatcatcaaagcttgtggacataaagtacaacactaaatctccattgcagatcactttggcgtttttgtttcaaggacacaatcaccatggttgtatttgtctgtttaccaactccaaaatgatcaggactggtagagtccctttctattgttttcccatgatagtgatgaaaaaaaactgttcattagattatttaagatcgattagattagggtcttagcaacattattaatgaagagaacattaacaagttatcatcttgtttttcttttcactcttcttctttcaaaaacatttgtattattgtctggctttgagctgaagaaaatttctggtggactgagttttac

SEQ ID NO: 98613 - protein, 309 aa, Arabidopsis thaliana; identical to SEQ ID NO: 35573
  peptide (1)..(309): Ceres Seq. ID no. 13601119

SEQ ID NO: 98614 - protein, 267 aa, Arabidopsis thaliana; identical to SEQ ID NO: 35574
  peptide (1)..(267): Ceres Seq. ID no. 13601120

SEQ ID NO: 98615 - protein, 212 aa, Arabidopsis thaliana; identical to SEQ ID NO: 35575
  peptide (1)..(212): Ceres Seq. ID no. 13601121

SEQ ID NO: 98616 - DNA, 1789 bp, Arabidopsis thaliana
  misc_feature (1)..(1789): Ceres Seq. ID no. 13601125
  misc_feature (1)..(1789): Ortholog of  Ceres SEQ ID NO 13595201 as cited in SEQ ID NO 56606
aatccagattcctttcttatcatcatctctctctctcacactgtttatctgattcgtcttctctgataatcaagagtagtagtgcggttctctggaaaatattcgatttttaaaagactctgatgatgacattaaactcactatctccagctgaatccaaagctatttctttcttggatacctccaggttcaatccaatccctaaactctcaggtgggtttagtttgaggaggaggaatcaagggagaggttttggaaaaggtgttaagtgttcagtgaaagtgcagcagcaacaacaacctcctccagcatggcctgggagagctgtccctgaggcgcctcgtcaatcttgggatggaccaaaacccatctctatcgttggatctactggttctattggcactcagacattggatattgtggctgagaatcctgacaaattcagagttgtggctctagctgctggttcgaatgttactctacttgctgatcaggtaaggagatttaagcctgcattggttgctgttagaaacgagtcactgattaatgagcttaaagaggctttagctgatttggactataaactcgagattattccaggagagcaaggagtgattgaggttgcccgacatcctgaagctgtaaccgttgttaccggaatagtaggttgtgcgggactaaagcctacggttgctgcaattgaagcaggaaaggacattgctcttgcaaacaaagagacattaatcgcaggtggtcctttcgtgcttccgcttgccaacaaacataatgtaaagattcttccggcagattcagaacattctgccatatttcagtgtattcaaggtttgcctgaaggcgctctgcgcaagataatcttgactgcatctggtggagcttttagggattggcctgtcgaaaagctaaaggaagttaaagtagcggatgcgttgaagcatccaaactggaacatgggaaagaaaatcactgtggactctgctacgcttttcaacaagggtcttgaggtcattgaagcgcattatttgtttggagctgagtatgacgatatagagattgtcattcatccgcaaagtatcatacattccatgattgaaacacaggattcatctgtgcttgctcaattgggttggcctgatatgcgtttaccgattctctacaccatgtcatggcccgatagagttccttgttctgaagtaacttggccaagacttgacctttgcaaactcggttcattgactttcaagaaaccagacaatgtgaaatacccatccatggatcttgcttatgctgctggacgagctggaggcacaatgactggagttctcagcgccgccaatgagaaagctgttgaaatgttcattgatgaaaagataagctatttggatatcttcaaggttgtggaattaacatgcgataaacatcgaaacgagttggtaacatcaccgtctcttgaagagattgttcactatgacttgtgggcacgtgaatatgccgcgaatgtgcagctttcttctggtgctaggccagttcatgcatgaagaattggttgttggaagaacataaggaagcttctgaggaaatgttgaaagaagattagtgtagagaatggggtactacttaatagcgtttttggcaaggattatggattgtgtagctaatttatctgtgatccgaacaagccaaactgataatttgaaaccatttttaccaataaaaccgagcttaattgtttcacattatatgattaattacattcatctaagggttcttg

SEQ ID NO: 98617 - protein, 477 aa, Arabidopsis thaliana; identical to SEQ ID NO: 40931
  peptide (1)..(477): Ceres Seq. ID no. 13601126

SEQ ID NO: 98618 - protein, 476 aa, Arabidopsis thaliana; identical to SEQ ID NO: 40932
  peptide (1)..(476): Ceres Seq. ID no. 13601127

SEQ ID NO: 98619 - DNA, 713 bp, Arabidopsis thaliana
  misc_feature (1)..(713): Ceres Seq. ID no. 13601128
  misc_feature (1)..(713): Ortholog of  Ceres SEQ ID NO 13648568 as cited in SEQ ID NO 20436
tatagacccctcacctacgctttactctttcactcctctctctcctgctttgctccgccgtgagaggagaaacaaatggggaattgtcaagcggcggaggcggcaacgacggtgatacaacaaccagacggtaaatcggttagattttactgtacagtaaacgcgagcgaagtgattaagtcccatcccggtcaccacgtggctctcctcctctcttccgccgtacctcacggtggctctctccgcgtcactcgtataaagcttcttcgtccttctgataacctcttgctcggtcatgtttatagactcatctcctccgaagaggtgatgaaaggaataagagccaagaaatctggaaagatgaagaagattcatggagagttttctgttgcagaagaagagattaacccactaaccctaagatctgaatctgcttctgacaaagacactcagagaaggatacatgaaaagcagagaggaatgatgaacacaggaggagctaccaataaagttagagcttggcagccttctcttcaaagcatctcagaatctacaagctaaaacacttcaatccatatttttctatctttttttcttacttttgactcttttttttatcatttcatttctctttgtattgttgtttttcccaatcaaatttgtaaaggaagaagacccatttgattgtggttgaagaagaagaaacttttgtc

SEQ ID NO: 98620 - protein, 161 aa, Arabidopsis thaliana
  peptide (1)..(161): Ceres Seq. ID no. 13601129
MGNCQAAEAATTVIQQPDGKSVRFYCTVNASEVIKSHPGHHVALLLSSAVPHGGSLRVTRIKLLRPSDNLLLGHVYRLISSEEVMKGIRAKKSGKMKKIHGEFSVAEEEINPLTLRSESASDKDTQRRIHEKQRGMMNTGGATNKVRAWQPSLQSISESTS

SEQ ID NO: 98621 - DNA, 1065 bp, Arabidopsis thaliana
  misc_feature (1)..(1065): Ceres Seq. ID no. 13601134
  misc_feature (1)..(1065): Ortholog of  Ceres SEQ ID NO 14304830 as cited in SEQ ID NO 54884
  misc_feature (1)..(1065): Ortholog of  Ceres SEQ ID NO 14316297 as cited in SEQ ID NO 57465
  misc_feature (1)..(1065): Ortholog of  Ceres SEQ ID NO 12784351 as cited in SEQ ID NO 60968
  misc_feature (1)..(1065): Ortholog of  Ceres SEQ ID NO 13584213 as cited in SEQ ID NO 63690
atgatttggcccagaagagactttaagtttcctaatacagttaacggtttactcagtgaaccggagggagacagcgagatgaggccggagatagttctgttcggcgactcgatcacggcgcagtcttttaggtccggcggttggggatctgctcttgccgacgcttactctcgcaaggctgatgttgtggttcgaggctacggcggctacaacacccgatgggctctcttcttgcttcatcacatcttccctctcggctcttcgtctcctcctgttgctacgacgatattcttcggtgcaaacgatgcagctctcaaaggaagaaccagtgatagacaacatgtgccggtggaagagtacacagataatgtcagaaagattgttcagcatttgaagaaatgttcacctacaatgctaattgtgcttataactccaccaccaattgatgaagctggacgtcaaagttatgcagaatcaatctacggtgagaaagctatgaaagagcctgagagaacaaacgaaacaacaggggtatatgcacaacattgtgttgcattggccgaggaactcggtctgcgatgtgtcaacttatggtctaagatgcaggaaaccaatgattggcagaaaaagtacctaagtgatgggctccatctcacgcctgaaggcaatggggtagtttttgatgaagtctcgagagtttttagagaagcttggctctctcccgaagaaatgccgtttgatttcccccatcattcgcatatcgatggtaaaaacccatcgaaagcttttgaagagcgttgcttataacgatcatccccaaattcatgagcaggtttgttttgatttaaattcatgaacacgtttcaatgttgtgatttagaaaactctcggatgtgaataaatacctaaaaagtgcatcatcactagagatcgttttcaagagaaatgaacttatgatgtacttactatatgttgtgacttttgacttatgtacctgcactagctttctatcttccttgctatatatttcagtctgaaagattttttttaatcttcttttcaatg

SEQ ID NO: 98622 - protein, 268 aa, Arabidopsis thaliana
  peptide (1)..(268): Ceres Seq. ID no. 13601135
MIWPRRDFKFPNTVNGLLSEPEGDSEMRPEIVLFGDSITAQSFRSGGWGSALADAYSRKADVVVRGYGGYNTRWALFLLHHIFPLGSSSPPVATTIFFGANDAALKGRTSDRQHVPVEEYTDNVRKIVQHLKKCSPTMLIVLITPPPIDEAGRQSYAESIYGEKAMKEPERTNETTGVYAQHCVALAEELGLRCVNLWSKMQETNDWQKKYLSDGLHLTPEGNGVVFDEVSRVFREAWLSPEEMPFDFPHHSHIDGKNPSKAFEERCL

SEQ ID NO: 98623 - protein, 242 aa, Arabidopsis thaliana; identical to SEQ ID NO: 37221
  peptide (1)..(242): Ceres Seq. ID no. 13601136

SEQ ID NO: 98624 - DNA, 1437 bp, Arabidopsis thaliana
  misc_feature (1)..(1437): Ceres Seq. ID no. 13601143
  misc_feature (1)..(1437): Ortholog of  Ceres SEQ ID NO 12590542 as cited in SEQ ID NO 621
  misc_feature (1)..(1437): Ortholog of  Ceres SEQ ID NO 12421854 as cited in SEQ ID NO 20723
  misc_feature (1)..(1437): Ortholog of  Ceres SEQ ID NO 13597847 as cited in SEQ ID NO 64858
atcaaattaaaaccctccagcctccaacaacaaaatttaccaacactctctctttctctttctctctgaaaacttaaaacgatggctataaccgccactcaaaacgacggcgtttcactaaacgccaataagatttcgtatgatcttgtggaaactgatgttgagatcatcacctccggtcgtcgtagtattccggcacactccggcatcctcgcttcggtctcaccggtactgacgaacatcatcgagaagccgaggaagattcacggcggatcatcgaagaaagttattaagattctcggtgttccatgcgacgccgtttcagtcttcgtcagattcctctattctccgagtgtcacggagaatgagatggaaaaatacggaatccatctactggctttatcacacgtgtatatggtgactcagttaaagcaacggtgcactaaaggcgtcggtgagagagtaaccgccgaaaacgttgtcgatattctccagctggctcgtctctgcgacgcacctgacctctgtctcaagtgtatgcgattcattcactacaagttcaagaccgttgaacagacagaaggatggaagtttcttcaagaacacgatccttttcttgaacttgacattctccaattcatcgacgatgcagaatcgaggaagaaaagaagaaggagacacagacgagaacagaatctgtatttgcagctgagtgaagccatggaatgtatagaacacatatgcaccgaaggttgcacactggtcggaccatcgtctaacttagacaacaagtcaacatgtcaagcaaaacccggtccatgcagtgcgttttcgacttgttacggacttcaacttcttatacgtcactttgcagtatgcaagaaaagagtcgatggcaaaggttgtgtccgatgcaagagaatgattcaactccttagactccattcttcgatttgtgaccaatctgaatcttgccgtgtccctctttgcaggcaatataagaatagaggtgaaaaggacaagaaaatggttgaggacacgaagtggaaggttctggtgagaagagtagcgtctgctaaagccatgtcttcgttgtctcaatcaaagaagaaaaaaagtgaagtgttatttaaagaagaagcagaagatttgatcagaatccggaacaagttaatgtgaatatacaatatatgtgtttttattagattatatagtgagcgattgttagaagccattaattacttgagtcggaaggtttatttgtttgttatttgtctctcggactggttgattgggttaaacttgtcaatgagtaaccctttgaatctgtcgttttgtttggtcggtcgaattatatagaaatgtattattggttataaaatggtattagggtttttggagactttgtggcaaaaagtatacagattgatccggttt

SEQ ID NO: 98625 - protein, 365 aa, Arabidopsis thaliana
  peptide (1)..(365): Ceres Seq. ID no. 13601144
MAITATQNDGVSLNANKISYDLVETDVEIITSGRRSIPAHSGILASVSPVLTNIIEKPRKIHGGSSKKVIKILGVPCDAVSVFVRFLYSPSVTENEMEKYGIHLLALSHVYMVTQLKQRCTKGVGERVTAENVVDILQLARLCDAPDLCLKCMRFIHYKFKTVEQTEGWKFLQEHDPFLELDILQFIDDAESRKKRRRRHRREQNLYLQLSEAMECIEHICTEGCTLVGPSSNLDNKSTCQAKPGPCSAFSTCYGLQLLIRHFAVCKKRVDGKGCVRCKRMIQLLRLHSSICDQSESCRVPLCRQYKNRGEKDKKMVEDTKWKVLVRRVASAKAMSSLSQSKKKKSEVLFKEEAEDLIRIRNKLM

SEQ ID NO: 98626 - protein, 269 aa, Arabidopsis thaliana
  peptide (1)..(269): Ceres Seq. ID no. 13601145
MEKYGIHLLALSHVYMVTQLKQRCTKGVGERVTAENVVDILQLARLCDAPDLCLKCMRFIHYKFKTVEQTEGWKFLQEHDPFLELDILQFIDDAESRKKRRRRHRREQNLYLQLSEAMECIEHICTEGCTLVGPSSNLDNKSTCQAKPGPCSAFSTCYGLQLLIRHFAVCKKRVDGKGCVRCKRMIQLLRLHSSICDQSESCRVPLCRQYKNRGEKDKKMVEDTKWKVLVRRVASAKAMSSLSQSKKKKSEVLFKEEAEDLIRIRNKLM

SEQ ID NO: 98627 - protein, 254 aa, Arabidopsis thaliana
  peptide (1)..(254): Ceres Seq. ID no. 13601146
MVTQLKQRCTKGVGERVTAENVVDILQLARLCDAPDLCLKCMRFIHYKFKTVEQTEGWKFLQEHDPFLELDILQFIDDAESRKKRRRRHRREQNLYLQLSEAMECIEHICTEGCTLVGPSSNLDNKSTCQAKPGPCSAFSTCYGLQLLIRHFAVCKKRVDGKGCVRCKRMIQLLRLHSSICDQSESCRVPLCRQYKNRGEKDKKMVEDTKWKVLVRRVASAKAMSSLSQSKKKKSEVLFKEEAEDLIRIRNKLM

SEQ ID NO: 98628 - DNA, 3026 bp, Arabidopsis thaliana
  misc_feature (1)..(3026): Ceres Seq. ID no. 13601159
  misc_feature (1)..(3026): Ortholog of  Ceres SEQ ID NO 15224454 as cited in SEQ ID NO 0
gaaagattgtttacagtcacagagatacttttctcactcatctctctctctctttcccgcttccctccttaaaccccaattcttctcctgctcacaaaaaccctatcttttgggttttgttatacagtgatgatgaaacctgcttctttgcaaggtttctcctcacatgcgtcctcctctatctactccgatgttcgcaggccagctactactccttcgaaaatggcagcttttagtgccctctcgctttgtccctatactttcaccttccgccaaagctctcgaattaagtctaccgtttcctgttccgtcacttctgctcctgcttctggtacatcttcatcctctaagacgccacgtagaagatcaggtcgactagaaggagttggaaaaagcatggaggattcggtgaaacgtaaaatggaacagttttatgaaggaaccgatggaccacctctccgtattcttcccataggaggccttggtgaaattggaatgaactgtatgcttgttggaaactatgatcgttacattctaatcgacgctggtataatgttccctgattatgatgagcctgggatccagaaaataatgccagacacaggatttatcagacgatggaaacacaaaattgaagctgttgttataacgcatggtcatgaagatcacattggtgcgttgccttgggttatcccagcattggaccctaatacaccaatattcgcatcatccttcaccatggagcttataaagaagcgcttgaaggagcatggaatcttcgttcaatctagacttaagacattcagcactcgaaggagatttatggctggaccatttgagatagagcccattacagttacccattctattcctgattgtagtggtttattcctccgttgcgctgatggtaatattcttcacactggtgattggaagattgatgaagcaccattggatggaaaagtctttgatcgtgaagctttagaagaactctcaaaggaaggagtcacattgatgatgagtgactcaacaaatgtgttgtcacctggaaggacaattagtgaaaaggtggtagcagatgctctggtaaggaatgtaatggcggccaagggaagagtaatcacaactcagtttgcctctaatatacaccgtttgggaagtataaaagctgctgctgatataactggtcgaaagttggtctttgttggcatgtcgttgcggacatacctagaggcagcttggagggatggaaaggctccaattgacccgtcaagtctgataaaagtcgaagacattgaagcatatgctcctaaggacttactgattgtcacaactggatcacaagcagaaccacgcgctgccctgaatcttgcatcatatgggagtagtcacgcattcaaacttacgaaggaagacataattctttactctgccaaggtaatcccaggcaatgaatcacgagtaatgaaaatgatgaatcggatagcagatatcgggccaaatattatcatgggtaagaatgaaatgctccacacatctggtcatgcctaccgtggagaattggaagaggtccttaaaatagtgaagccgcaacattttcttcccatacatggagaacttttgtttcttaaggagcatgagttgctcgggaagtctactgggattagacacactactgttataaagaacggagaaatgctaggagtttctcacctgagaaatagaagggttttgtctaatggatttagctctcttggcagggagaatttgcagttaatgtatagtgatggtgataaagcatttggcacatcaagcgaactatgcattgacgaacgacttagaatttcttctgatggcattatagttctgagcatggagatcatgcgtccaggggtctcagaaaacactttgaaaggaaaaataagaatcacaacgcggtgcatgtggcttgacaaaggaagacttttagatgcacttcacaaagcagctcatgctgctctatcaagttgtcctgtgacatgtcccttgtctcacatggaaagaacagtctccgaagtcctgaggaagattgtaaggaagtacagtggtaaaaggcctgaagtcatcgctatagccactgagaatccaatggctgtccgagctgatgaggtcagtgcgagactgtctggtgatccaagtgttggttctggagttgcagctttaaggaaagttgttgaaggaaatgacaaaagaagtcgggcgaagaaagcaccttcacaagaagcttcccccaaagaagtagatcgcactttggaagatgatatcattgatagtgcaagactactggctgaagaagaaactgcggcatcaacatacacggaagaagttgatacgcccgttgggagttcttcagaagagtcagacgatttttggaaatcattcatcaatccatcatcgtcaccttcaccgagtgaaacagaaaatatgaataaggtagctgatacggagcctaaagcagagggtaaggaaaacagcagagacgacgatgaattagctgatgcttcagattctgaaaccaagtcatcaccaaaacgtgtgaggaagaacaaatggaaaccggaggagataaagaaggtaatcagaatgcgaggagagctgcacagtagatttcaagtggtgaaaggtagaatggcattgtgggaagagatctcttcaaatctatcagctgaaggaatcaatcgaagcccgggacaatgcaaatctctctgggcatcacttattcagaaatacgaggagagcaaggctgatgagagaagcaagacgagttggccacattttgaggatatgaacaacattttgtcagagctaggcacacctgcgtcttaagtaatgtgatttagatgacattatcttcccaaaagaatcatctccagattttcttaaattgaacaaaaacagaaaagcattaattatattatgtatgtaaccagctgtaagatgatttttgtctgtagaactagaagctatcaacgcagaatccaaatccc

SEQ ID NO: 98629 - protein, 911 aa, Arabidopsis thaliana
  peptide (1)..(911): Ceres Seq. ID no. 13601160
MMKPASLQGFSSHASSSIYSDVRRPATTPSKMAAFSALSLCPYTFTFRQSSRIKSTVSCSVTSAPASGTSSSSKTPRRRSGRLEGVGKSMEDSVKRKMEQFYEGTDGPPLRILPIGGLGEIGMNCMLVGNYDRYILIDAGIMFPDYDEPGIQKIMPDTGFIRRWKHKIEAVVITHGHEDHIGALPWVIPALDPNTPIFASSFTMELIKKRLKEHGIFVQSRLKTFSTRRRFMAGPFEIEPITVTHSIPDCSGLFLRCADGNILHTGDWKIDEAPLDGKVFDREALEELSKEGVTLMMSDSTNVLSPGRTISEKVVADALVRNVMAAKGRVITTQFASNIHRLGSIKAAADITGRKLVFVGMSLRTYLEAAWRDGKAPIDPSSLIKVEDIEAYAPKDLLIVTTGSQAEPRAALNLASYGSSHAFKLTKEDIILYSAKVIPGNESRVMKMMNRIADIGPNIIMGKNEMLHTSGHAYRGELEEVLKIVKPQHFLPIHGELLFLKEHELLGKSTGIRHTTVIKNGEMLGVSHLRNRRVLSNGFSSLGRENLQLMYSDGDKAFGTSSELCIDERLRISSDGIIVLSMEIMRPGVSENTLKGKIRITTRCMWLDKGRLLDALHKAAHAALSSCPVTCPLSHMERTVSEVLRKIVRKYSGKRPEVIAIATENPMAVRADEVSARLSGDPSVGSGVAALRKVVEGNDKRSRAKKAPSQEASPKEVDRTLEDDIIDSARLLAEEETAASTYTEEVDTPVGSSSEESDDFWKSFINPSSSPSPSETENMNKVADTEPKAEGKENSRDDDELADASDSETKSSPKRVRKNKWKPEEIKKVIRMRGELHSRFQVVKGRMALWEEISSNLSAEGINRSPGQCKSLWASLIQKYEESKADERSKTSWPHFEDMNNILSELGTPAS

SEQ ID NO: 98630 - protein, 910 aa, Arabidopsis thaliana
  peptide (1)..(910): Ceres Seq. ID no. 13601161
MKPASLQGFSSHASSSIYSDVRRPATTPSKMAAFSALSLCPYTFTFRQSSRIKSTVSCSVTSAPASGTSSSSKTPRRRSGRLEGVGKSMEDSVKRKMEQFYEGTDGPPLRILPIGGLGEIGMNCMLVGNYDRYILIDAGIMFPDYDEPGIQKIMPDTGFIRRWKHKIEAVVITHGHEDHIGALPWVIPALDPNTPIFASSFTMELIKKRLKEHGIFVQSRLKTFSTRRRFMAGPFEIEPITVTHSIPDCSGLFLRCADGNILHTGDWKIDEAPLDGKVFDREALEELSKEGVTLMMSDSTNVLSPGRTISEKVVADALVRNVMAAKGRVITTQFASNIHRLGSIKAAADITGRKLVFVGMSLRTYLEAAWRDGKAPIDPSSLIKVEDIEAYAPKDLLIVTTGSQAEPRAALNLASYGSSHAFKLTKEDIILYSAKVIPGNESRVMKMMNRIADIGPNIIMGKNEMLHTSGHAYRGELEEVLKIVKPQHFLPIHGELLFLKEHELLGKSTGIRHTTVIKNGEMLGVSHLRNRRVLSNGFSSLGRENLQLMYSDGDKAFGTSSELCIDERLRISSDGIIVLSMEIMRPGVSENTLKGKIRITTRCMWLDKGRLLDALHKAAHAALSSCPVTCPLSHMERTVSEVLRKIVRKYSGKRPEVIAIATENPMAVRADEVSARLSGDPSVGSGVAALRKVVEGNDKRSRAKKAPSQEASPKEVDRTLEDDIIDSARLLAEEETAASTYTEEVDTPVGSSSEESDDFWKSFINPSSSPSPSETENMNKVADTEPKAEGKENSRDDDELADASDSETKSSPKRVRKNKWKPEEIKKVIRMRGELHSRFQVVKGRMALWEEISSNLSAEGINRSPGQCKSLWASLIQKYEESKADERSKTSWPHFEDMNNILSELGTPAS

SEQ ID NO: 98631 - protein, 880 aa, Arabidopsis thaliana
  peptide (1)..(880): Ceres Seq. ID no. 13601162
MAAFSALSLCPYTFTFRQSSRIKSTVSCSVTSAPASGTSSSSKTPRRRSGRLEGVGKSMEDSVKRKMEQFYEGTDGPPLRILPIGGLGEIGMNCMLVGNYDRYILIDAGIMFPDYDEPGIQKIMPDTGFIRRWKHKIEAVVITHGHEDHIGALPWVIPALDPNTPIFASSFTMELIKKRLKEHGIFVQSRLKTFSTRRRFMAGPFEIEPITVTHSIPDCSGLFLRCADGNILHTGDWKIDEAPLDGKVFDREALEELSKEGVTLMMSDSTNVLSPGRTISEKVVADALVRNVMAAKGRVITTQFASNIHRLGSIKAAADITGRKLVFVGMSLRTYLEAAWRDGKAPIDPSSLIKVEDIEAYAPKDLLIVTTGSQAEPRAALNLASYGSSHAFKLTKEDIILYSAKVIPGNESRVMKMMNRIADIGPNIIMGKNEMLHTSGHAYRGELEEVLKIVKPQHFLPIHGELLFLKEHELLGKSTGIRHTTVIKNGEMLGVSHLRNRRVLSNGFSSLGRENLQLMYSDGDKAFGTSSELCIDERLRISSDGIIVLSMEIMRPGVSENTLKGKIRITTRCMWLDKGRLLDALHKAAHAALSSCPVTCPLSHMERTVSEVLRKIVRKYSGKRPEVIAIATENPMAVRADEVSARLSGDPSVGSGVAALRKVVEGNDKRSRAKKAPSQEASPKEVDRTLEDDIIDSARLLAEEETAASTYTEEVDTPVGSSSEESDDFWKSFINPSSSPSPSETENMNKVADTEPKAEGKENSRDDDELADASDSETKSSPKRVRKNKWKPEEIKKVIRMRGELHSRFQVVKGRMALWEEISSNLSAEGINRSPGQCKSLWASLIQKYEESKADERSKTSWPHFEDMNNILSELGTPAS

SEQ ID NO: 98632 - DNA, 1623 bp, Arabidopsis thaliana
  misc_feature (1)..(1623): Ceres Seq. ID no. 13601163
  misc_feature (1)..(1623): Ortholog of  Ceres SEQ ID NO 15169603 as cited in SEQ ID NO 65772
  misc_feature (1)..(1623): Ortholog of  Ceres SEQ ID NO 14308003 as cited in SEQ ID NO 65919
  misc_feature (1)..(1623): Ortholog of  Ceres SEQ ID NO 14303087 as cited in SEQ ID NO 66569
acaaatcaaaacaacataattaacttacccaaacaagaaacccaagaatccaaaatggaaatgctcaacgcaataattctcatcctatttccaatcatagggtttgtattaatcttctcattcccaacaaaaaccctaaaagccaaaaccgcatcaccctctaatccgacatcgtaccaactcatcggctctattctctccttcaacaaaaaccgccaccgtcttctccaatggtacacagatctcctccgtctctctccgtctcaaaccatcaccgtcgatctcctcttcggtcgtcggactatcatcactgcaaaccctgaaaacgttgagcacattctcaaaacaaatttttataacttccctaaaggcaaacctttcaccgacctcctaggagatctactcggcggcggaatctttaattctgacggcgagttatggagctcacagcgtaaactcgcgagccacgagtttacaatgcgttctcttagggaattcactttcgaaatcctccgtgaagaagtccaaaaccgcctcattccggtgctttcctccgccgtggactgtggagagacggttgattttcaggaggttttgaagcgctttgctttcgatgttgtatgcaaagtgtcgttgggttgggatccggattgtttggatttgacccgacccgttccagaacttgttaaggcttttgatgtagcggcggagatcagcgctcgccgcgccacggagccggtttacgccgtgtggaaagtaaagcgtttcttgaacgtagggagcgagaagaggttgagagaagccatcaagaccgtacacttgtctgtgtctgagatcatccgggccaaaaagaaaagcctcgatatcggtggtgacgtgtcggacaagcaggacctgctgtcgaggtttctcgccgctggccacggggaagaagccgtgagggatagtgtaatcagctttattatggcgggaagggatacaacgtcggcagcgatgacgtggctgttttggttgttgagtcaaaatgatgacgtggagacgaagatactcgacgaattgagaaacaaagggtctttagggttagggtttgaggatttgagagagatgagttacacaaaagcttgtctgtgtgaagcaatgaggctttacccaccagtggcttgggactcaaagcatgcagcaaacgacgacattttgccagatggaacacctctcaaaaagggagacaaagtcacttatttcccttacggtatgggaaggatggagaaggtgtggggtaaagattgggacgagtttaaaccaaaccggtggtttgaggaagaaccgagttacggtacaaaaccggttttgaaaagtgtgagttcgttcaagtttccggttttccaagccggaccaagggtttgcataggtaaagaaatggcttttacacaaatgaaatacgtggttggttcagttttgagtcggtttaagattataccggtttgcaataaccggccggtctttgttcctcttctaaccgctcacatggctggtgggctaaaggtgaagatcaagaggagagagcaatgtgattcgatgtatatttaattaattgattaatcaagtcatgtccttgtagaatat

SEQ ID NO: 98633 - protein, 528 aa, Arabidopsis thaliana
  peptide (1)..(528): Ceres Seq. ID no. 13601164
TNQNNIINLPKQETQESKMEMLNAIILILFPIIGFVLIFSFPTKTLKAKTASPSNPTSYQLIGSILSFNKNRHRLLQWYTDLLRLSPSQTITVDLLFGRRTIITANPENVEHILKTNFYNFPKGKPFTDLLGDLLGGGIFNSDGELWSSQRKLASHEFTMRSLREFTFEILREEVQNRLIPVLSSAVDCGETVDFQEVLKRFAFDVVCKVSLGWDPDCLDLTRPVPELVKAFDVAAEISARRATEPVYAVWKVKRFLNVGSEKRLREAIKTVHLSVSEIIRAKKKSLDIGGDVSDKQDLLSRFLAAGHGEEAVRDSVISFIMAGRDTTSAAMTWLFWLLSQNDDVETKILDELRNKGSLGLGFEDLREMSYTKACLCEAMRLYPPVAWDSKHAANDDILPDGTPLKKGDKVTYFPYGMGRMEKVWGKDWDEFKPNRWFEEEPSYGTKPVLKSVSSFKFPVFQAGPRVCIGKEMAFTQMKYVVGSVLSRFKIIPVCNNRPVFVPLLTAHMAGGLKVKIKRREQCDSMYI

SEQ ID NO: 98634 - protein, 510 aa, Arabidopsis thaliana
  peptide (1)..(510): Ceres Seq. ID no. 13601165
MEMLNAIILILFPIIGFVLIFSFPTKTLKAKTASPSNPTSYQLIGSILSFNKNRHRLLQWYTDLLRLSPSQTITVDLLFGRRTIITANPENVEHILKTNFYNFPKGKPFTDLLGDLLGGGIFNSDGELWSSQRKLASHEFTMRSLREFTFEILREEVQNRLIPVLSSAVDCGETVDFQEVLKRFAFDVVCKVSLGWDPDCLDLTRPVPELVKAFDVAAEISARRATEPVYAVWKVKRFLNVGSEKRLREAIKTVHLSVSEIIRAKKKSLDIGGDVSDKQDLLSRFLAAGHGEEAVRDSVISFIMAGRDTTSAAMTWLFWLLSQNDDVETKILDELRNKGSLGLGFEDLREMSYTKACLCEAMRLYPPVAWDSKHAANDDILPDGTPLKKGDKVTYFPYGMGRMEKVWGKDWDEFKPNRWFEEEPSYGTKPVLKSVSSFKFPVFQAGPRVCIGKEMAFTQMKYVVGSVLSRFKIIPVCNNRPVFVPLLTAHMAGGLKVKIKRREQCDSMYI

SEQ ID NO: 98635 - protein, 508 aa, Arabidopsis thaliana
  peptide (1)..(508): Ceres Seq. ID no. 13601166
MLNAIILILFPIIGFVLIFSFPTKTLKAKTASPSNPTSYQLIGSILSFNKNRHRLLQWYTDLLRLSPSQTITVDLLFGRRTIITANPENVEHILKTNFYNFPKGKPFTDLLGDLLGGGIFNSDGELWSSQRKLASHEFTMRSLREFTFEILREEVQNRLIPVLSSAVDCGETVDFQEVLKRFAFDVVCKVSLGWDPDCLDLTRPVPELVKAFDVAAEISARRATEPVYAVWKVKRFLNVGSEKRLREAIKTVHLSVSEIIRAKKKSLDIGGDVSDKQDLLSRFLAAGHGEEAVRDSVISFIMAGRDTTSAAMTWLFWLLSQNDDVETKILDELRNKGSLGLGFEDLREMSYTKACLCEAMRLYPPVAWDSKHAANDDILPDGTPLKKGDKVTYFPYGMGRMEKVWGKDWDEFKPNRWFEEEPSYGTKPVLKSVSSFKFPVFQAGPRVCIGKEMAFTQMKYVVGSVLSRFKIIPVCNNRPVFVPLLTAHMAGGLKVKIKRREQCDSMYI

SEQ ID NO: 98636 - DNA, 1041 bp, Arabidopsis thaliana
  misc_feature (1)..(1041): Ceres Seq. ID no. 13601171
  misc_feature (1)..(1041): Ortholog of  Ceres SEQ ID NO 13590233 as cited in SEQ ID NO 64652
actctctctcttttcctctttgcaaatccttgaagaaatccaaaatccatagcaatggcgacttcgatagctcgattgtctcggagaggagtcacttctaacctgatccgtcgttgcttcgctgcggaagcggcgttggcgaggaagacagagttacctaaaccgcaattcacggtgtcgccgtcgacggatcgtgtgaaatgggactacagaggccaacgacagatcattcctttgggacagtggcttccgaaggtagccgttgatgcttacgtggcacccaacgttgtgctggctggtcaggtcacagtctgggacggctcgtctgtttggaacggtgccgttttgcgcggcgatctcaacaaaatcactgttggattctgctcgaatgtacaggaacggtgtgttgttcatgccgcctggtcttccccaacaggattaccagcagcgacaataatcgacaggtatgtgacagtaggtgcctacagtcttctgagatcatgtaccatcgaaccagagtgcatcatcggtcaacactcaatactaatggaaggctcactggttgagacccggtcaatcttggaagcgggttcagttgtgccgccaggaagaaggatcccatcaggtgaactatggggaggcaatccagcaagattcattagaaccctaaccaacgaagaaaccctagagatcccaaaactcgctgtagccatcaaccacttaagcggagattacttctctgagttcctaccttactcaactgtctacttagaggtagagaagttcaagaagtcccttgggatcgccgtttagaagcttcatctttttcgtgattcactttcatgtgtttatctatcatatgaggtctttctctctgcatattgcaataagtagctgatgaacatcaaaacaagtccggctctcttttttggttctaaaacgtttgtcatttcgttttttgggttctttgtaaaattccatttaaaactgattttggctgaatattgtctgaatgataatggcgacgacttctggttttgt

SEQ ID NO: 98637 - protein, 252 aa, Arabidopsis thaliana
  peptide (1)..(252): Ceres Seq. ID no. 13601172
MATSIARLSRRGVTSNLIRRCFAAEAALARKTELPKPQFTVSPSTDRVKWDYRGQRQIIPLGQWLPKVAVDAYVAPNVVLAGQVTVWDGSSVWNGAVLRGDLNKITVGFCSNVQERCVVHAAWSSPTGLPAATIIDRYVTVGAYSLLRSCTIEPECIIGQHSILMEGSLVETRSILEAGSVVPPGRRIPSGELWGGNPARFIRTLTNEETLEIPKLAVAINHLSGDYFSEFLPYSTVYLEVEKFKKSLGIAV

SEQ ID NO: 98638 - DNA, 1199 bp, Arabidopsis thaliana
  misc_feature (1)..(1199): Ceres Seq. ID no. 13601185
  misc_feature (1)..(1199): Ortholog of  Ceres SEQ ID NO 15174890 as cited in SEQ ID NO 53624
gattttatctgatcactcgttttgtgtctctgaatctctatcccgtggattcgcatctggatttgtttttttttcatttttattcgagcggctaacctttctcggatccatctgatatcgattggattctctctaatcaatcgttgaaatggcggatgcgtggaaggatttagcttcagggactgttggaggagctgctcaactagttgttggtcatccatttgacactatcaaggtcaaacttcagagccaaccgactccagcaccaggccaacttccaaggtacaccggtgcaatcgatgcggttaaacagaccgttgcttctgaaggaaccaaaggtttgtataaaggtatgggagctccacttgcaaccgttgctgccttcaatgcggttttgttcactgtgagaggtcaaatggaagggctgcttaggtctgaagctggagttcctttgaccattagtcaacagtttgtggccggtgcaggcgctggtttcgctgtttcgttccttgcttgtcctaccgagttgatcaagtgcaggttgcaagcacaaggtgcattagctggtgcctctactacaagctcagtggttgcagccgtgaaatacggtggaccaatggatgtagcccgtcatgtcctacgatcagaaggaggagcacgaggtctattcaaaggtttattccctacattcgcccgtgaagtcccgggaaatgcaacaatgtttgcagcctacgaagctttcaagcggtttttagccggtggttcagacacttcaagcttaggacaagggtcattgatcatggcgggtggagtcgctggtgcttctttttggggaatagtatatccgacagatgttgtgaagagtgttcttcaagtcgacgattacaaaaacccgagatacacggggtcgatggatgcttttcggaagattctgaaatctgaaggagttaaaggtttgtataaaggatttggtccagctatggctaggagtgttcctgctaatgctgcttgcttcttggcttatgagatgacaaggtcaagcttgggataaaccggttcggtttgggtttaactgttggttcgatttctgaatgttccattgcgattaacctctctgtttttagatttgattcttaaaaaatttctgcaaaatttatgtaccatttacacagtttatttcagtatttcttacacagaag

SEQ ID NO: 98639 - protein, 300 aa, Arabidopsis thaliana; identical to SEQ ID NO: 98136
  peptide (1)..(300): Ceres Seq. ID no. 13601186

SEQ ID NO: 98640 - protein, 232 aa, Arabidopsis thaliana; identical to SEQ ID NO: 98137
  peptide (1)..(232): Ceres Seq. ID no. 13601187

SEQ ID NO: 98641 - protein, 211 aa, Arabidopsis thaliana; identical to SEQ ID NO: 98138
  peptide (1)..(211): Ceres Seq. ID no. 13601188

SEQ ID NO: 98642 - DNA, 1713 bp, Arabidopsis thaliana
  misc_feature (1)..(1713): Ceres Seq. ID no. 13601189
  misc_feature (1)..(1713): Ortholog of  Ceres SEQ ID NO 13546266 as cited in SEQ ID NO 65659
aatctctctctccctctttcttcctcttctctcattgaaatcgaacgaggatggggaagaagaaatcgaaggtaacggagccggaatctcaaaacgatgaatctcagacaatcttctccactctcttctccggcgaggttgaaagctctggctttgcgagtctcttctccgctgataaccctttccggcgaaaacaacctcaagaaatcaaagagtcgtcaattcctgatgagaagaaaggggataaacgaaatgcagagaacgaagaagaagaagaagaaacagatttgcctgtgaagacgaagaaatctaaaaaggaaaaaaagcttacagattccggcgacgagaaagagacgatttcggaggctgtagaagaaagtgggttggtttcaaagaggaagaagaggaagagagatgagattgagaacgaatacgagacgaagaagtatggaagcgttgagatgaaagagaagaaggttggtgagaagaggaagaaagctgatgaagtagctgatacaatggtttcaaaggaaggttttgatgatgagagtaagcttcttagaactgttttcgttgggaatttgcctttgaaggttaagaaaaaagtcatcttgaaggagtttagtaaatttggtgaggttgaatctgtgaggatacgctctgtgcctattgttgattcgaagaggacaaggaaaggagctataatgctgaaacaaatcaatgagaaagcttcaagtgttcatgcttatgttgtgtttgaaacagagcaatctgctgcagcttctctggcacataacatgtctctgattgatgggaatcatgtccgcgttgatagagcatgtccgcctcgtaagaaacagaaagggcatgatgatactcatttgtatgatcctaagaggacagtctttatgggtaatctccctttcgatgtgaaggacgaggaagtgtatcaactgtttacgggtaagagtaatctggagaacagtatagaagctgttcgtgtcattagagatcctcacttgaacattgggaaaggaatagcttacgtcttgtttaaaacacgggaagctgcaaatctcgtactcaagaaaggatacttgaagcttagagaaagagagttacggatttctcgagtcaaacctgatacgccatcaaagagaaagagcaatccgtctgaagcttactcgccggcccagaaaagactgcagaaggacaaagtggtcacaccaactccaacagggaaggctaatctttcatatcaaggtgtacgagcttcaaaatctggtgatgataagaaaacaccttatcagaaaagctccgcgcagacaaagatgagacctagaggtagcagcagcaatgacaacaaaaaatctgggaataatagtgcttcaaaggaaagaagtcagaagcgaccagctgttgcagcaagaaaggcgaaagcaaacgcaaaaggttcaaaagagagcggtggtaagcggtttgcagggacaaagcgtaaacaagaaaaccggacgcctgaaagcttctctaagaagaaaaaaacaaaacggttttagacggtttctttcaaccataatggtgaacctctttcttcttccttagttttgatactagtagtcgttttgtattgttctcttatatcaatcaatgatgatatactgtaatgttgcaacaattatgttttcgtgcaagtttaaaaggaaagctattttg

SEQ ID NO: 98643 - protein, 501 aa, Arabidopsis thaliana
  peptide (1)..(501): Ceres Seq. ID no. 13601190
MGKKKSKVTEPESQNDESQTIFSTLFSGEVESSGFASLFSADNPFRRKQPQEIKESSIPDEKKGDKRNAENEEEEEETDLPVKTKKSKKEKKLTDSGDEKETISEAVEESGLVSKRKKRKRDEIENEYETKKYGSVEMKEKKVGEKRKKADEVADTMVSKEGFDDESKLLRTVFVGNLPLKVKKKVILKEFSKFGEVESVRIRSVPIVDSKRTRKGAIMLKQINEKASSVHAYVVFETEQSAAASLAHNMSLIDGNHVRVDRACPPRKKQKGHDDTHLYDPKRTVFMGNLPFDVKDEEVYQLFTGKSNLENSIEAVRVIRDPHLNIGKGIAYVLFKTREAANLVLKKGYLKLRERELRISRVKPDTPSKRKSNPSEAYSPAQKRLQKDKVVTPTPTGKANLSYQGVRASKSGDDKKTPYQKSSAQTKMRPRGSSSNDNKKSGNNSASKERSQKRPAVAARKAKANAKGSKESGGKRFAGTKRKQENRTPESFSKKKKTKRF

SEQ ID NO: 98644 - protein, 364 aa, Arabidopsis thaliana
  peptide (1)..(364): Ceres Seq. ID no. 13601191
MKEKKVGEKRKKADEVADTMVSKEGFDDESKLLRTVFVGNLPLKVKKKVILKEFSKFGEVESVRIRSVPIVDSKRTRKGAIMLKQINEKASSVHAYVVFETEQSAAASLAHNMSLIDGNHVRVDRACPPRKKQKGHDDTHLYDPKRTVFMGNLPFDVKDEEVYQLFTGKSNLENSIEAVRVIRDPHLNIGKGIAYVLFKTREAANLVLKKGYLKLRERELRISRVKPDTPSKRKSNPSEAYSPAQKRLQKDKVVTPTPTGKANLSYQGVRASKSGDDKKTPYQKSSAQTKMRPRGSSSNDNKKSGNNSASKERSQKRPAVAARKAKANAKGSKESGGKRFAGTKRKQENRTPESFSKKKKTKRF

SEQ ID NO: 98645 - protein, 345 aa, Arabidopsis thaliana
  peptide (1)..(345): Ceres Seq. ID no. 13601192
MVSKEGFDDESKLLRTVFVGNLPLKVKKKVILKEFSKFGEVESVRIRSVPIVDSKRTRKGAIMLKQINEKASSVHAYVVFETEQSAAASLAHNMSLIDGNHVRVDRACPPRKKQKGHDDTHLYDPKRTVFMGNLPFDVKDEEVYQLFTGKSNLENSIEAVRVIRDPHLNIGKGIAYVLFKTREAANLVLKKGYLKLRERELRISRVKPDTPSKRKSNPSEAYSPAQKRLQKDKVVTPTPTGKANLSYQGVRASKSGDDKKTPYQKSSAQTKMRPRGSSSNDNKKSGNNSASKERSQKRPAVAARKAKANAKGSKESGGKRFAGTKRKQENRTPESFSKKKKTKRF

SEQ ID NO: 98646 - DNA, 1422 bp, Arabidopsis thaliana
  misc_feature (1)..(1422): Ceres Seq. ID no. 13601197
  misc_feature (1)..(1422): Ortholog of  Ceres SEQ ID NO 14301916 as cited in SEQ ID NO 69281
atttagaacctttagtaccttaccatgtgagtgaagagttcaaaaacctctgcaaaaactttcttttttatctctctctcttctttaaacttactttcaaacactaaatagccaaaacttaagataccaaatttcaacaggggaaaaaatgtataagaatcagcttcaagagcttgcacagagaagttgtttcaacttaccatcatatacttgcataagagaaggaccagatcatgctccaagattcaaagcttctgttaacttcaatggtgagatatttgagagtcccacttactgttctactctcagacaagctgagcatgcagctgctgaagtttcccttaatgtcctttcgtctagagtcccttcaaagtctctaactgctaagattcttgatgagacagggatttacaagaacctgcttcaagagacagcacatagagctggtcttgatctaccaatgtacacaagtgtgagatcaggatcttgtcacttcccaggtttctcttgtactgttgaacttgctgggatgacgtttacaggagaatcagcaaagacaaagaaacaagctgagaaaaacgcagccattgcagcttggtcctctttgaagaaaatgtcaagcttggattcacaagatgaagagaaggaacaagaagcagtagcaagagtactctcaagatttaaacccaaagaagtaagaagacgagagacaacaaaccaatggagaagaagaacaagtcaacaagattcaaacaaggatttgttgattgagagattgagatggatcaatcttttgaccaatcaagcttcttcatcatcatcaacatcaacaccgaatcaacacaaaaactccagtttcatctctctaattcccccaccaccaccacctaaatcctccaaaattttgccatttatccagcaatacaaagacagatcatcacaagaagctaagacagagacagcgacagagatgatcaacagcaaagccaaagtcaatgaaacatcaaccagattgagtaagcaaatgcccttttccgacatgaacagatacaactttgtcggagggtgtagcgtaaacccttatagtctggctccagcggttcaaatgagatcagtgattccagttttcgcagctccaccaccgaaaccaaaccccaaccttaacccatcatcattatcatcatcagtcaatgaattcacctcatccaataattcctgctctgttctgaatacgccgggattgggaggccaagagaagaagaatctaactcgcgaaatgatcaaacttggttcagaatcgagaattttggatcaaacccatgatagttagctaaatttggttaatgggttaatctcaaattaaatccttgtcaagtgtttgtcacatagataaattatagaccagtatgtttccgtttcttg

SEQ ID NO: 98647 - protein, 393 aa, Arabidopsis thaliana
  peptide (1)..(393): Ceres Seq. ID no. 13601198
MYKNQLQELAQRSCFNLPSYTCIREGPDHAPRFKASVNFNGEIFESPTYCSTLRQAEHAAAEVSLNVLSSRVPSKSLTAKILDETGIYKNLLQETAHRAGLDLPMYTSVRSGSCHFPGFSCTVELAGMTFTGESAKTKKQAEKNAAIAAWSSLKKMSSLDSQDEEKEQEAVARVLSRFKPKEVRRRETTNQWRRRTSQQDSNKDLLIERLRWINLLTNQASSSSSTSTPNQHKNSSFISLIPPPPPPKSSKILPFIQQYKDRSSQEAKTETATEMINSKAKVNETSTRLSKQMPFSDMNRYNFVGGCSVNPYSLAPAVQMRSVIPVFAAPPPKPNPNLNPSSLSSSVNEFTSSNNSCSVLNTPGLGGQEKKNLTREMIKLGSESRILDQTHDS

SEQ ID NO: 98648 - protein, 289 aa, Arabidopsis thaliana
  peptide (1)..(289): Ceres Seq. ID no. 13601199
MYTSVRSGSCHFPGFSCTVELAGMTFTGESAKTKKQAEKNAAIAAWSSLKKMSSLDSQDEEKEQEAVARVLSRFKPKEVRRRETTNQWRRRTSQQDSNKDLLIERLRWINLLTNQASSSSSTSTPNQHKNSSFISLIPPPPPPKSSKILPFIQQYKDRSSQEAKTETATEMINSKAKVNETSTRLSKQMPFSDMNRYNFVGGCSVNPYSLAPAVQMRSVIPVFAAPPPKPNPNLNPSSLSSSVNEFTSSNNSCSVLNTPGLGGQEKKNLTREMIKLGSESRILDQTHDS

SEQ ID NO: 98649 - protein, 266 aa, Arabidopsis thaliana
  peptide (1)..(266): Ceres Seq. ID no. 13601200
MTFTGESAKTKKQAEKNAAIAAWSSLKKMSSLDSQDEEKEQEAVARVLSRFKPKEVRRRETTNQWRRRTSQQDSNKDLLIERLRWINLLTNQASSSSSTSTPNQHKNSSFISLIPPPPPPKSSKILPFIQQYKDRSSQEAKTETATEMINSKAKVNETSTRLSKQMPFSDMNRYNFVGGCSVNPYSLAPAVQMRSVIPVFAAPPPKPNPNLNPSSLSSSVNEFTSSNNSCSVLNTPGLGGQEKKNLTREMIKLGSESRILDQTHDS

SEQ ID NO: 98650 - DNA, 3631 bp, Arabidopsis thaliana
  misc_feature (1)..(3631): Ceres Seq. ID no. 13601204
  misc_feature (1)..(3631): Ortholog of  Ceres SEQ ID NO 14310024 as cited in SEQ ID NO 20634
  misc_feature (1)..(3631): Ortholog of  Ceres SEQ ID NO 12587358 as cited in SEQ ID NO 62228
  misc_feature (1)..(3631): Ortholog of  Ceres SEQ ID NO 12635930 as cited in SEQ ID NO 0
atggtttcaaagagaaagtcaagaacttcaaagactatagaagattcttgtatccatctatgttctgtcttcttcagattcttgtactatactcttcctgcattatttctcttcttctttcttctttatctttgtttatctttcaccaccggaatctcctacaacaacttccatatgtgtatcttctctcgaaagttcaacgacccttattgtaacacggctggttctaaacccggtttccaaataatttctgaagaaaatgtaactttcgccggagagatcgcaggagatagagtttctaaggatcacaacaagattcttaattcagttcctgttcaagaacacaaaacaaagaacaaggttgatctcaattcactcattgaactaaaagccgaggaagaatacagcaaatacatcaaacctacgagtgaagatgagggatatgcgttaagggcagccatcaagtatctttacctacaaagatcatggctatctccgggagatgaaaacctcaataaaccgcgatcgtgtgaaggtaaaggagtttacgtttatgatttaccgtcaaaattcaacagcgatttgttggtaggatgcaacgatatacttccaggggttaacttgtgtagctacttcaagaatgaaggctttggagaagctattaagaatcttggcaaaggttggtttgctacacacatgtattctcttgagcccatcttacactctagggttttgaagcatccttgtagggtttacaacgagacccaagctaagctcttctttgtcccttactatggcgggtatgatgttttgagatggcactataggaatgtttctgaagatgtgaaggaccgtttggggatcgaggttttaaaatggcttaattcaaaggaatcatggaggagaaacgccgggaaagatcatgtgttcgttctaggaaaaataacttgggattttaggagagataaggacccttggggctcaaggttccttgagctacaagaaatgcaaaaccctaccaagctactcatagaaagacagccatggcaggtcaacgacatcgccattcctcacccaacttatttccatccgcgaacagatgatgatatcacccgctggcagatcaagatcatgagtaaacttcgccggaatctagtaagcttcgcgggaggtgcaagacccgataaccctaataacatccgatcaacgctaatcgagcaatgcatatcttccaaccaatgtcggttcttaaattgtacaaacgaaagctgcacgaatcccaagaatgtccttgatttgtttcaagattcagagttttgtctgcagccgcctggagatagtgcaacaaggagatcagtatttgattcactaatctccggctgcattccggtgatctttactccgtacacagcttattaccagtacgcgtggcatcttcctgaggatcatcggaagtactcagtgtatataagcgaacaagatgtgaaggaaaagagagtaaatgtggtggagatattgaaggcaaagactctaaaggagaaaaaggatatgaaaagttacatagttcaacagcttttgcctggattggtatatggagactccaatgctaagtttgaaaagtttcgagatgcttttgatattacttttgattgtttacttaagaaaatcaacagtgttctgaaaactttttccgatacacaaaatcggaggaagaagaagatgaagctcaaagtgtatgcggataggatgtcacagccatctcgtgctgtcctcatattctgcaaggttaacgaaatccaattcgacgagattttgatttccttggggaaacgtcaacagttatcccctgaattcaaagaaattaacccaatggggaaagttccagctattgttgatggcagacttaagctatttgagagtcacgctatattgatatatctttcctcagcatacgcaagtgtagttgatcattggtacccgaatgatctttccaaaagagccaagattcactccgttttggattggcatcacaccaatttacgccctggtgcatctggatatgttctgaatagcgttctagctccagctcttggtcttccactgaatccgaaagcagctgctgaagctgagaacatactaacaaactctctgtccactctagagactttttggcttaagggcagtgccaagtttttactcgggggcaagcaaccatctatagctgatctcagccttgtatgtgaacttatgcagctgcaggttttggatgacaaagatcgtcttagattgcttagccctcataagaaagttgaacaatggattgagagtacgagaaaagcgacaatgcctcactctgatgaggtccatgaggtccttttcagagccaaagatagatttcagaagcagcgagagatggcaaccgcatctaaaccgggtcctcaatctaagattatccaatttagtagtattggtgggacgagtgatggtccaaacctcgttcaagacacaaccgatcgtaaagctcgaagacgcaaatggagtccacctgacgatgtcattctcattagtgcttggttaaatactagtaaggatcgtaaagttgtcgtttatgatgaacaacaagcacatactttttggaagagaattggtgcacatgtttcaaatagcgcttcacttgcaaatctaccaaagcgagagtggaatcactgcaggcaaagatggaggaaaattaacgactacgtctgcaaatttgttggatgttatgatcaagctttgaatcaaagagctagtggtcaatctgaagatgatgttttccaagttgcataccaattgtactacaacaattacatgagtaatttcaaacttgagcatgcatggcgggagctccgacacaataaaaaatggtgtagtacatacacctctgaaaattctaaggggggtggaagctcaaagagaacaaagttgaatggaggtggtgtatattcttcaagctgtaatccggagagtgtgcctatagctctagatggagaggagcaagttatggatcgccctcttggtgtgaagtcgtcaaagcaaaaagagaagaaagttgctactaaaacaatgcttgaagaaagggaggccgattctagatcaagacttgagaacttgtgggtactagatgaagaggagcaagttatggatcttcctcttggtgtgaagtcatcgaagcagaaagagaggaaagttgctactaaaacaatgattgaagaaagggaggcagccaattttcgatcaagacttgggaacttgtggctactaaaggagaaagaagaaagggaggcagattcccgatcaagacttgagaacttgtgggcactgaaggagaaagacatagaagagcaaaagaaactaacaaggatggaagtccttaaaagtcttcttggaagaagaacaggtgaaacttctgaaaaggaagaaactttgaagaacaagctcattgatgagatgctctaatctctatgttctcgttgtatttatctctttattttctctatgtttatctcactatcaacttagtgacaggctatagacggcttttctagaaatagatactaactgaatcttccttaactatgttcaacgtttgttt

SEQ ID NO: 98651 - protein, 1164 aa, Arabidopsis thaliana
  peptide (1)..(1164): Ceres Seq. ID no. 13601205
MVSKRKSRTSKTIEDSCIHLCSVFFRFLYYTLPALFLFFFLLYLCLSFTTGISYNNFHMCIFSRKFNDPYCNTAGSKPGFQIISEENVTFAGEIAGDRVSKDHNKILNSVPVQEHKTKNKVDLNSLIELKAEEEYSKYIKPTSEDEGYALRAAIKYLYLQRSWLSPGDENLNKPRSCEGKGVYVYDLPSKFNSDLLVGCNDILPGVNLCSYFKNEGFGEAIKNLGKGWFATHMYSLEPILHSRVLKHPCRVYNETQAKLFFVPYYGGYDVLRWHYRNVSEDVKDRLGIEVLKWLNSKESWRRNAGKDHVFVLGKITWDFRRDKDPWGSRFLELQEMQNPTKLLIERQPWQVNDIAIPHPTYFHPRTDDDITRWQIKIMSKLRRNLVSFAGGARPDNPNNIRSTLIEQCISSNQCRFLNCTNESCTNPKNVLDLFQDSEFCLQPPGDSATRRSVFDSLISGCIPVIFTPYTAYYQYAWHLPEDHRKYSVYISEQDVKEKRVNVVEILKAKTLKEKKDMKSYIVQQLLPGLVYGDSNAKFEKFRDAFDITFDCLLKKINSVLKTFSDTQNRRKKKMKLKVYADRMSQPSRAVLIFCKVNEIQFDEILISLGKRQQLSPEFKEINPMGKVPAIVDGRLKLFESHAILIYLSSAYASVVDHWYPNDLSKRAKIHSVLDWHHTNLRPGASGYVLNSVLAPALGLPLNPKAAAEAENILTNSLSTLETFWLKGSAKFLLGGKQPSIADLSLVCELMQLQVLDDKDRLRLLSPHKKVEQWIESTRKATMPHSDEVHEVLFRAKDRFQKQREMATASKPGPQSKIIQFSSIGGTSDGPNLVQDTTDRKARRRKWSPPDDVILISAWLNTSKDRKVVVYDEQQAHTFWKRIGAHVSNSASLANLPKREWNHCRQRWRKINDYVCKFVGCYDQALNQRASGQSEDDVFQVAYQLYYNNYMSNFKLEHAWRELRHNKKWCSTYTSENSKGGGSSKRTKLNGGGVYSSSCNPESVPIALDGEEQVMDRPLGVKSSKQKEKKVATKTMLEEREADSRSRLENLWVLDEEEQVMDLPLGVKSSKQKERKVATKTMIEEREAANFRSRLGNLWLLKEKEEREADSRSRLENLWALKEKDIEEQKKLTRMEVLKSLLGRRTGETSEKEETLKNKLIDEML

SEQ ID NO: 98652 - protein, 1106 aa, Arabidopsis thaliana
  peptide (1)..(1106): Ceres Seq. ID no. 13601206
MCIFSRKFNDPYCNTAGSKPGFQIISEENVTFAGEIAGDRVSKDHNKILNSVPVQEHKTKNKVDLNSLIELKAEEEYSKYIKPTSEDEGYALRAAIKYLYLQRSWLSPGDENLNKPRSCEGKGVYVYDLPSKFNSDLLVGCNDILPGVNLCSYFKNEGFGEAIKNLGKGWFATHMYSLEPILHSRVLKHPCRVYNETQAKLFFVPYYGGYDVLRWHYRNVSEDVKDRLGIEVLKWLNSKESWRRNAGKDHVFVLGKITWDFRRDKDPWGSRFLELQEMQNPTKLLIERQPWQVNDIAIPHPTYFHPRTDDDITRWQIKIMSKLRRNLVSFAGGARPDNPNNIRSTLIEQCISSNQCRFLNCTNESCTNPKNVLDLFQDSEFCLQPPGDSATRRSVFDSLISGCIPVIFTPYTAYYQYAWHLPEDHRKYSVYISEQDVKEKRVNVVEILKAKTLKEKKDMKSYIVQQLLPGLVYGDSNAKFEKFRDAFDITFDCLLKKINSVLKTFSDTQNRRKKKMKLKVYADRMSQPSRAVLIFCKVNEIQFDEILISLGKRQQLSPEFKEINPMGKVPAIVDGRLKLFESHAILIYLSSAYASVVDHWYPNDLSKRAKIHSVLDWHHTNLRPGASGYVLNSVLAPALGLPLNPKAAAEAENILTNSLSTLETFWLKGSAKFLLGGKQPSIADLSLVCELMQLQVLDDKDRLRLLSPHKKVEQWIESTRKATMPHSDEVHEVLFRAKDRFQKQREMATASKPGPQSKIIQFSSIGGTSDGPNLVQDTTDRKARRRKWSPPDDVILISAWLNTSKDRKVVVYDEQQAHTFWKRIGAHVSNSASLANLPKREWNHCRQRWRKINDYVCKFVGCYDQALNQRASGQSEDDVFQVAYQLYYNNYMSNFKLEHAWRELRHNKKWCSTYTSENSKGGGSSKRTKLNGGGVYSSSCNPESVPIALDGEEQVMDRPLGVKSSKQKEKKVATKTMLEEREADSRSRLENLWVLDEEEQVMDLPLGVKSSKQKERKVATKTMIEEREAANFRSRLGNLWLLKEKEEREADSRSRLENLWALKEKDIEEQKKLTRMEVLKSLLGRRTGETSEKEETLKNKLIDEML

SEQ ID NO: 98653 - protein, 932 aa, Arabidopsis thaliana
  peptide (1)..(932): Ceres Seq. ID no. 13601207
MYSLEPILHSRVLKHPCRVYNETQAKLFFVPYYGGYDVLRWHYRNVSEDVKDRLGIEVLKWLNSKESWRRNAGKDHVFVLGKITWDFRRDKDPWGSRFLELQEMQNPTKLLIERQPWQVNDIAIPHPTYFHPRTDDDITRWQIKIMSKLRRNLVSFAGGARPDNPNNIRSTLIEQCISSNQCRFLNCTNESCTNPKNVLDLFQDSEFCLQPPGDSATRRSVFDSLISGCIPVIFTPYTAYYQYAWHLPEDHRKYSVYISEQDVKEKRVNVVEILKAKTLKEKKDMKSYIVQQLLPGLVYGDSNAKFEKFRDAFDITFDCLLKKINSVLKTFSDTQNRRKKKMKLKVYADRMSQPSRAVLIFCKVNEIQFDEILISLGKRQQLSPEFKEINPMGKVPAIVDGRLKLFESHAILIYLSSAYASVVDHWYPNDLSKRAKIHSVLDWHHTNLRPGASGYVLNSVLAPALGLPLNPKAAAEAENILTNSLSTLETFWLKGSAKFLLGGKQPSIADLSLVCELMQLQVLDDKDRLRLLSPHKKVEQWIESTRKATMPHSDEVHEVLFRAKDRFQKQREMATASKPGPQSKIIQFSSIGGTSDGPNLVQDTTDRKARRRKWSPPDDVILISAWLNTSKDRKVVVYDEQQAHTFWKRIGAHVSNSASLANLPKREWNHCRQRWRKINDYVCKFVGCYDQALNQRASGQSEDDVFQVAYQLYYNNYMSNFKLEHAWRELRHNKKWCSTYTSENSKGGGSSKRTKLNGGGVYSSSCNPESVPIALDGEEQVMDRPLGVKSSKQKEKKVATKTMLEEREADSRSRLENLWVLDEEEQVMDLPLGVKSSKQKERKVATKTMIEEREAANFRSRLGNLWLLKEKEEREADSRSRLENLWALKEKDIEEQKKLTRMEVLKSLLGRRTGETSEKEETLKNKLIDEML

SEQ ID NO: 98654 - DNA, 797 bp, Arabidopsis thaliana
  misc_feature (1)..(797): Ceres Seq. ID no. 13601208
  misc_feature (1)..(797): Ortholog of  Ceres SEQ ID NO 13595158 as cited in SEQ ID NO 51008
  misc_feature (1)..(797): Ortholog of  Ceres SEQ ID NO 14304144 as cited in SEQ ID NO 59152
  misc_feature (1)..(797): Ortholog of  Ceres SEQ ID NO 13662050 as cited in SEQ ID NO 61580
  misc_feature (1)..(797): Ortholog of  Ceres SEQ ID NO 14309388 as cited in SEQ ID NO 0
gttcccaactccttacgcgctctctctctatctctttagctttctctttctagcggcgaagccatgggttatccggtggggtacactgagctcctcctcccaagaatcttccttcacttactctctctcttaggcttaatacgaacactcatagacacgggttttcggatattgggtctacccgactttctcgaatccgacccggtttcatcgtcatcgtcatggctggaaccaccgtatatgtccacggcggcgcatcatcaccaagaaagctcatttttcttcccagtggcggcgaggctagctggagaaatcttgcccgtcatcagattctcggagctaactcgacccggattcggatccggatccgattgctgcgcggtgtgcctccacgagttcgagaacgatgacgagatccgacggctgacgaattgtcaacacatatttcaccggagctgtttagaccgttggatgatgggttataatcagatgacgtgtccactttgtagaacgccgtttatttctgatgagttacaagttgcttttaaccaacgagtttggtctgaatctgaacttctcgcagaatcaaattagaatctttcttgtttgggtggaattagtttctactaatgagaaaattaatttctatcttttttttttttttttgtttaatctttagctgagtggttgatatatgtaaatataaaattataggtggtgatgcttagtaaattagaagaatgaaatttgtattatccgttgaggaaaaaaaagaaatgaatggaaatcttaatttt

SEQ ID NO: 98655 - protein, 176 aa, Arabidopsis thaliana; identical to SEQ ID NO: 43604
  peptide (1)..(176): Ceres Seq. ID no. 13601209

SEQ ID NO: 98656 - protein, 117 aa, Arabidopsis thaliana; identical to SEQ ID NO: 43605
  peptide (1)..(117): Ceres Seq. ID no. 13601210

SEQ ID NO: 98657 - DNA, 747 bp, Arabidopsis thaliana
  misc_feature (1)..(747): Ceres Seq. ID no. 13601223
  misc_feature (1)..(747): Ortholog of  Ceres SEQ ID NO 12584790 as cited in SEQ ID NO 62648
  misc_feature (1)..(747): Ortholog of  Ceres SEQ ID NO 13545965 as cited in SEQ ID NO 67378
attcgcttccgtttcttaaagcataaaaaccaaaactttctctttcgttttgctttcttccaatcatctgcaggagtgaatcgcaaaaccaaatttggaggattctttctgaggggtttctcagtgagaaaatggcttcgaaacggatcttgaaggagctgaaggatctccagaaagaccctccaacctcctgcagtgcaggtccagttgctgaagacatgtttcattggcaagctacaattatgggtcctgcagagagtccgtattcaggcggtgtgtttctcgttaccattcacttccctccggactatccattcaaaccaccaaaggttgcatttaggacgaaggtgtttcaccctaatatcaacagcaacggaagcatttgccttgacattttgaaagaacaatggagccctgccctcaccatttccaaggtgttgctctcgatatgttcgctgttaacagatccaaatccagatgaccctttggtaccagagattgcacacatgtacaaaaccgacagagccaaatacgaggctactgcaagaaactggactcagaagtatgccatgggctaaacaaagattcgtatgcttcagcacctgtttatgttttcatgtctgtttctttcttcttcttgttttaactttaataaaaatgtctaaaatatcaactttttcgtctgtactatatatgtttatgggttttattatcatcatctttatctgaaatttgaagatggaattc

SEQ ID NO: 98658 - protein, 148 aa, Arabidopsis thaliana; identical to SEQ ID NO: 98183
  peptide (1)..(148): Ceres Seq. ID no. 13601224

SEQ ID NO: 98659 - protein, 119 aa, Arabidopsis thaliana; identical to SEQ ID NO: 98184
  peptide (1)..(119): Ceres Seq. ID no. 13601225

SEQ ID NO: 98660 - protein, 111 aa, Arabidopsis thaliana; identical to SEQ ID NO: 98185
  peptide (1)..(111): Ceres Seq. ID no. 13601226

SEQ ID NO: 98661 - DNA, 2271 bp, Arabidopsis thaliana
  misc_feature (1)..(2271): Ceres Seq. ID no. 13601247
  misc_feature (1)..(2271): Ortholog of  Ceres SEQ ID NO 13590691 as cited in SEQ ID NO 66290
aacactagcaagcaaaaattcttcatcgactcaaattcaaaaactcatctctctctatctctatttctctggttccatagctcaccgtcgcatcgcagatctactccttccgcaataaattttaccggcggaggtatcagatctcgccgatctgttgtagcagctactgtattttgggcttctcatttgatattggggaaacgaggagtagaggacgatggaaaatctgatctctctggttaacaagatacagagagcttgcacggctttaggagaccatggagactccagcgctttacctactctttgggattccttgcctgcgatcgccgtcgttggtggtcagagctcagggaagtcttcagtcctggagagcatcgtgggaaaggactttttaccccgtggatctggcattgttactcgaaggccccttgtcttacagttgcaaaagatcgatgatggaacccgggagtatgcagagtttcttcacctcccgaggaaaaagtttactgattttgctgctgtgaggaaggagattcaagatgagactgacagagagactggacgcagcaaggctatttctagtgttcccattcaccttagcatatactctcccaatgttgtcaacttgacactgatagatcttccagggcttacaaaagttgctgttgatggacaatctgatagtatagtgaaggacattgaaaacatggttcggtcctacattgaaaagcccaactgcatcattttggcaatctcacctgcaaaccaagatcttgctacctcagatgcaattaaaatttcccgtgaggttgatccatcgggggacagaacatttggtgtcttgacaaagattgatcttatggacaaggggacggatgcagtggaaattctggaagggagatcttttaaacttaaatatccgtgggttggtgtcgtcaaccgttcccaagcagatattaacaagaatgtcgacatgattgcggctcggaaaagagagagggagtacttttccaatactactgagtataggcaccttgctaataaaatgggttccgagcatttggcaaagatgctctccaagcatctagaacgtgtgatcaagtcgagaattcctggcattcagtcacttattaacaaaacagtattagagctggaaactgaactaagtcgccttggaaagcctattgcagctgatgcaggggggaagttgtactcaataatggagatatgtcggctttttgatcaaatattcaaagagcatcttgatggagtgcgtgctggtggtgaaaaagtgtacaacgtgtttgataaccagcttcctgcggctctgaagagactccaatttgacaagcagctagcgatggacaacatccggaagctggtcactgaggctgatggttaccagcctcacttgattgctcctgagcaaggttaccgtcgtctcattgagtcttctattgtctccatcagaggccctgctgaagcatctgttgacaccgttcatgctatcttaaaggatctggttcacaagtctgtgaatgaaactgtggaactaaaacaatacccagctctgagagtggaggtgacaaatgcggcgatagagtcgctggataaaatgcgggaaggaagtaagaaagcaacactgcagctggttgacatggagtgcagttacctcactgttgatttcttcaggaaacttccccaggatgttgagaagggtggtaaccccacacactccattttcgaccgctacaacgattcctatctcagacgaatcggatccaatgttttgtcttacgtgaacatggtctgtgctggcctgcggaattcaatccccaagtccatcgtatactgccaagtccgagaagcgaagcgcagtctcctcgaccatttctttgcggagctcggtaccatggatatgaagaggctctcgtcgctattgaacgaagatccagcaatcatggagagacgcagtgccatctcaaagcggctagaattgtatcgagcagcccaatccgagatcgatgctgttgcttggtccaagtgataccggcatgtcatgtccactgttttgctcggttctggtcggtgtggctcagactcggagcagagatttagggtctgtaatttgtataagatgatcttcccgataccatgcagtatcgttttatataacatccacattgtttgtcctacctctatgttttttgtccatcacccgatatgttacgtatcgttttataacatccacattgtttgtcctgcctc

SEQ ID NO: 98662 - protein, 610 aa, Arabidopsis thaliana; identical to SEQ ID NO: 97587
  peptide (1)..(610): Ceres Seq. ID no. 13601248

SEQ ID NO: 98663 - protein, 446 aa, Arabidopsis thaliana; identical to SEQ ID NO: 97588
  peptide (1)..(446): Ceres Seq. ID no. 13601249

SEQ ID NO: 98664 - protein, 395 aa, Arabidopsis thaliana; identical to SEQ ID NO: 97589
  peptide (1)..(395): Ceres Seq. ID no. 13601250

SEQ ID NO: 98665 - DNA, 1588 bp, Arabidopsis thaliana
  misc_feature (1)..(1588): Ceres Seq. ID no. 13601255
  misc_feature (1)..(1588): Ortholog of  Ceres SEQ ID NO 13596816 as cited in SEQ ID NO 62287
ctctctctctctctctctcacttcatctatggcttcttcttctctgcagtctctcttctctctgttttgccttgctctgttctctcttcctctcatcgtctcctccatcggcatcaactatggccaggtcgctaacaaccttcctccccctaaaaacgtcatccctctcctcaagtctgtgggagctacaaaagtcaagctctatgacgccgatccacaagccctacgtgccttcgccggctccggcttcgagctcaccgtggccctcggtaacgagtacctggctcagatgagcgaccctattaaagcccaaggctgggtgaaggagaacgtccaagcttacctcccaaacaccaagatcgtggccatcgtagtgggaaacgaagtcctcacctcaaaccagtcagccctcacggcagccctcttcccggctatgcaaagcatccacggtgctctggtggattgtggcctaaacaagcagatctttgtgacgacggctcactcactagccatcttggatgtatcctaccctccctcggccacttccttccgccgcgacctcctcggctccctcactcccatcttggacttccacgtcaagactggctcaccaatcctcatcaacgcctaccctttcttcgcctacgaagaaaaccccaaacacgtttctctcgacttcgtactcttccaaccaaatcaaggcttcaccgatcctggctctaatttccactacgacaacatgctcttcgctcaggtcgacgcagtctatcacgctcttgacgctgtcggcatcagctacaagaaagttcccattgtcgtctccgagaccggatggccttccaacggtgacccgcaagaagtcggagccacctgcgacaatgctcgcaagtacaatgggaatctgatcaagatgatgatgagcaagaagatgaggacgcctatacgacctgagtgcgatctcaccatcttcgtctttgctctctttaacgagaacatgaagcctggaccaacctccgagaggaactacggtctcttcaaccctgacggaactccggtttactcacttgggatcaagacctcttccactcatagtagtggtagtggtagcagcaactccactggtggtagtagcagtggcggtggcggtaacactggtggctcttccagcggtggtggcatctatcagccagtcacgggtaacccatcaccggattacatgtccatttcctccgccgggggaaaaggcagattcgttgagtgtgtgttgttcttcttcttgctttgcatcatcaagcttcggttgtaaaagcttctccactagatctcgtcggctttgtacttttactcggttgatgacgtgatatagcccccaaatttaatttaattagttttgtgttggtgttttggtcggaggatgatttaggagacataccatctttgttgtgccgacctcctctccaactctttttttttttccttttccattctcctttttcttgtttaagcatagattatttaaataatgaatcttagttgattagatttttctaaagaagatgatgattttcgataattgtataacttgaag

SEQ ID NO: 98666 - protein, 434 aa, Arabidopsis thaliana; identical to SEQ ID NO: 28815
  peptide (1)..(434): Ceres Seq. ID no. 13601256

SEQ ID NO: 98667 - protein, 425 aa, Arabidopsis thaliana; identical to SEQ ID NO: 28816
  peptide (1)..(425): Ceres Seq. ID no. 13601257

SEQ ID NO: 98668 - protein, 338 aa, Arabidopsis thaliana; identical to SEQ ID NO: 28817
  peptide (1)..(338): Ceres Seq. ID no. 13601258

SEQ ID NO: 98669 - DNA, 786 bp, Arabidopsis thaliana
  misc_feature (1)..(786): Ceres Seq. ID no. 13601270
  misc_feature (1)..(786): Ortholog of  Ceres SEQ ID NO 14309220 as cited in SEQ ID NO 0
aacaacacttagagaacaagcagaggaatataactttttttttctttttcctttttgcttttttacaaccaaaaaaataaagcaagccgtagagagcaagagacggtgtaaagatgcactacacacgcatctcgccggctttagtaccatctctatcaccaaccgccgcggctgaatctagcggtggtgggacgatgatagctactgttttcatggcccttctcctcccctgcgtcggcatgtgcatcgtcttcctaatctatctattcctcttgtggtgctccacacggcgtcgtatcgaacgccttcgatttgctgaaccggttaaaccggtcacaggtaaaggcctttcggtgttggagctcgagaaaatccctaaactcaccggaagagagctagccgtaatagctagatcaacggaatgtgctgtttgccttgaagatatagagagtggtcaatcgactcgtctagttcccggttgcaaccatgggtttcaccaattatgtgctgatacgtggctatctaaccacacggtttgtccagtttgccgcgccgagctggctccgaacctacctcaatgtaatgaaaatcaaagtccatgttagaaacagaattttcaaaaacattctttccttcttttttactcgttttgtgtacttctcttgtttttcccttttcttagttttgtgtaagcgttatagagagagaagtttccaggttgtaactagccttgttgtttttttttgtacatgaaattagttttagagtaaattacgaaatttacag

SEQ ID NO: 98670 - protein, 163 aa, Arabidopsis thaliana; identical to SEQ ID NO: 26881
  peptide (1)..(163): Ceres Seq. ID no. 13601271

SEQ ID NO: 98671 - protein, 136 aa, Arabidopsis thaliana; identical to SEQ ID NO: 26882
  peptide (1)..(136): Ceres Seq. ID no. 13601272

SEQ ID NO: 98672 - protein, 130 aa, Arabidopsis thaliana; identical to SEQ ID NO: 26883
  peptide (1)..(130): Ceres Seq. ID no. 13601273

SEQ ID NO: 98673 - DNA, 1352 bp, Arabidopsis thaliana
  misc_feature (1)..(1352): Ceres Seq. ID no. 13601278
  misc_feature (1)..(1352): Ortholog of  Ceres SEQ ID NO 13596581 as cited in SEQ ID NO 62420
  misc_feature (1)..(1352): Ortholog of  Ceres SEQ ID NO 13591273 as cited in SEQ ID NO 65904
  misc_feature (1)..(1352): Ortholog of  Ceres SEQ ID NO 13623086 as cited in SEQ ID NO 0
accagaaaaacacacaccaaacaaaacaaaacaaaaaacagagagatggaaaacggaaactcctccagcgacaacaaatcttcacataaaccgatccgatgcaaagcggcggttagtaggaaggctggagagccgttggtgatggaagaaatcatggtggcgccgccgcagcctttcgaggttcggattcgaatcatctgcaccgcgttatgtcacagtgacgtcactttctggaaactccaagttcctccagcctgctttccgaggatactaggccacgaggcaataggcgtagtggaaagtgttggtgaaaatgtgaaggaagtggtagaaggagacaccgtactaccaacgttcatgcctgactgtggtgactgtgttgattgcaaatctcacaaaagcaacttatgtagcaaatttcctttcaaggtatccccttggatgccaagatacgataattccagcagattcaccgacctcaatggcgaaactctctttcatttcttgaacgtctccagcttcagcgaatacacggttcttgatgtcgctaacgttgttaagattgattcttcgattcctcctagtcgtgcttgcctcctaagctgcggagtctccaccggtgttggtgctgcttgggagaccgccaaagttgaaaaaggatcaaccgttgtgattttcggacttggttctatcggattagcggttgcagagggtgcgagactttgtggtgcctctagaatcattggtgtggatataaaccctaccaaattccaagttggccagaaatttggagttaccgagtttgtaaactctatgacatgtgagaaaaaccgtgttagcgaggtgatcaatgagatgactgatgggggagcggactattgcttcgaatgtgttggaagtagttctttggttcaagaagcttatgcttgctgtagacagggatggggaaagacaataactttaggggtggacaagccgggttcacaaatatgtttagattcgtttgatgttcttcaccatgggaagattctgatgggttcgttgtttggaggtttaaaggctaaaacacacattccaattcttcttaaacgctacttgagcaatgaacttgaattggataagtttgtgacacatgagatgaaattcgaggagatcaacgacgcattccagctacttcttgaagggaaatgcatcaggtgtgtcttatggatgggctaagtgaattgacttattttatctttccatcttttgcatcaatttcatatgtttcatgtttaactatttttattggtttgtaatcaaaacaagcaaatgccaaagtgacagcaaaataaaaagtcaatgaattgtaa

SEQ ID NO: 98674 - protein, 405 aa, Arabidopsis thaliana; identical to SEQ ID NO: 35100
  peptide (1)..(405): Ceres Seq. ID no. 13601279

SEQ ID NO: 98675 - protein, 390 aa, Arabidopsis thaliana; identical to SEQ ID NO: 35101
  peptide (1)..(390): Ceres Seq. ID no. 13601280

SEQ ID NO: 98676 - protein, 358 aa, Arabidopsis thaliana; identical to SEQ ID NO: 35102
  peptide (1)..(358): Ceres Seq. ID no. 13601281

SEQ ID NO: 98677 - DNA, 1351 bp, Arabidopsis thaliana
  misc_feature (1)..(1351): Ceres Seq. ID no. 13601282
  misc_feature (1)..(1351): Ortholog of  Ceres SEQ ID NO 13584616 as cited in SEQ ID NO 65234
cggtcgggatatttggcgagccgacccgtcgcgtcgtgggtttaggtttaacgtattggcgcgccagtgaagaaaatagacgacgatggcgatgatgcatcctccgcagccgccgcaaggctcctatcaccatcctcagacgctcgaagaagttcgaactctttggattggtgatttgcagtactgggtcgacgaaaattacctcacttcctgcttctcccaaaccggcgagctcgtttctgtcaaggtaatacgtaacaagatcacgggacagccagaggggtatggttttatagagtttatatctcatgcagcagcagagagaactctgcagacgtacaatgggacacagatgcctggaactgagttaacttttcggttaaattgggcttcttttggttcaggacagaaagttgatgctggacctgatcattctatctttgttggagatttagcacctgatgttacagattatcttcttcaagagacattccgtgttcattattcttctgttagaggtgccaaggttgttactgatccaagtactggacgatcaaagggttatggatttgtaaaatttgcagaggaaagtgaaaggaatcgggctatggctgaaatgaatggtttgtattgctcaacaaggcctatgcgtattagcgcagcaacacctaaaaaaaacgtcggtgtgcagcaacaatatgtcaccaaagttacagtcccatctgcagttgctgcaccagtccaagcatacgttgctccacctgaaagtgatgtcacctgtacaacgatttcagttgccaatttggaccaaaatgttacagaggaagagctgaagaaagcattctcccaattaggagaggttatttatgtcaaaatacctgcaacaaagggatatggttatgttcaattcaaaaccaggccttctgcagaagaagctgttcaaagaatgcagggacaagtgattggtcaacaagcagttcgcatctcttggagtaaaaatccaggacaggatggttgggttacacaagcagatccgaatcagtggaatgggtattatggttatgggcaaggctatgatgcatatgcttatggggcaactcaagatccatccgtgtacgcatatggtggatatggctatccccagtatccgcaacagggagagggtacacaagacatttcgaactctgcggcgggtggagtagcaggtgcagagcaagagttgtatgatcctctggccactcctgatgtagacaagttaaatgctgcttacctttcggttcatgcaagtgccatattaggaaggccaatgtggcagcggacctcatcgctcacatcacaattgggcaaatga

SEQ ID NO: 98678 - protein, 421 aa, Arabidopsis thaliana
  peptide (1)..(421): Ceres Seq. ID no. 13601283
MAMMHPPQPPQGSYHHPQTLEEVRTLWIGDLQYWVDENYLTSCFSQTGELVSVKVIRNKITGQPEGYGFIEFISHAAAERTLQTYNGTQMPGTELTFRLNWASFGSGQKVDAGPDHSIFVGDLAPDVTDYLLQETFRVHYSSVRGAKVVTDPSTGRSKGYGFVKFAEESERNRAMAEMNGLYCSTRPMRISAATPKKNVGVQQQYVTKVTVPSAVAAPVQAYVAPPESDVTCTTISVANLDQNVTEEELKKAFSQLGEVIYVKIPATKGYGYVQFKTRPSAEEAVQRMQGQVIGQQAVRISWSKNPGQDGWVTQADPNQWNGYYGYGQGYDAYAYGATQDPSVYAYGGYGYPQYPQQGEGTQDISNSAAGGVAGAEQELYDPLATPDVDKLNAAYLSVHASAILGRPMWQRTSSLTSQLGK

SEQ ID NO: 98679 - protein, 419 aa, Arabidopsis thaliana
  peptide (1)..(419): Ceres Seq. ID no. 13601284
MMHPPQPPQGSYHHPQTLEEVRTLWIGDLQYWVDENYLTSCFSQTGELVSVKVIRNKITGQPEGYGFIEFISHAAAERTLQTYNGTQMPGTELTFRLNWASFGSGQKVDAGPDHSIFVGDLAPDVTDYLLQETFRVHYSSVRGAKVVTDPSTGRSKGYGFVKFAEESERNRAMAEMNGLYCSTRPMRISAATPKKNVGVQQQYVTKVTVPSAVAAPVQAYVAPPESDVTCTTISVANLDQNVTEEELKKAFSQLGEVIYVKIPATKGYGYVQFKTRPSAEEAVQRMQGQVIGQQAVRISWSKNPGQDGWVTQADPNQWNGYYGYGQGYDAYAYGATQDPSVYAYGGYGYPQYPQQGEGTQDISNSAAGGVAGAEQELYDPLATPDVDKLNAAYLSVHASAILGRPMWQRTSSLTSQLGK

SEQ ID NO: 98680 - protein, 418 aa, Arabidopsis thaliana
  peptide (1)..(418): Ceres Seq. ID no. 13601285
MHPPQPPQGSYHHPQTLEEVRTLWIGDLQYWVDENYLTSCFSQTGELVSVKVIRNKITGQPEGYGFIEFISHAAAERTLQTYNGTQMPGTELTFRLNWASFGSGQKVDAGPDHSIFVGDLAPDVTDYLLQETFRVHYSSVRGAKVVTDPSTGRSKGYGFVKFAEESERNRAMAEMNGLYCSTRPMRISAATPKKNVGVQQQYVTKVTVPSAVAAPVQAYVAPPESDVTCTTISVANLDQNVTEEELKKAFSQLGEVIYVKIPATKGYGYVQFKTRPSAEEAVQRMQGQVIGQQAVRISWSKNPGQDGWVTQADPNQWNGYYGYGQGYDAYAYGATQDPSVYAYGGYGYPQYPQQGEGTQDISNSAAGGVAGAEQELYDPLATPDVDKLNAAYLSVHASAILGRPMWQRTSSLTSQLGK

SEQ ID NO: 98681 - DNA, 1020 bp, Arabidopsis thaliana
  misc_feature (1)..(1020): Ceres Seq. ID no. 13601286
  misc_feature (1)..(1020): Ortholog of  Ceres SEQ ID NO 15176185 as cited in SEQ ID NO 1082
ttacccaaaagaacccataatgtttagagtgaccggaactctctcggcggcatcatctccagcggtggcggcggcgtctttctccgccgctctaagactttccataactcccactctcgctatcgcctctcctccccatctccgttggttctcgaagttttctcgtcaatttctcggcggacgcatctcttcactccgaccacgcattccttctccgtgcccgattcgactctctggtttcccggctctcaaaatgagagcttcgtttagcagtgggagtagtggaagtagtgcaagtagagagattctggtgcagcatttgcttgttaagaataatgatgttgagctctttgccgaactccaaaagaaattcttggatggagaggagatgagtgatcttgcggctgagtattcgatttgtccttccaaaaaggacggtggtatacttggatgggtaaaactgggtcaaatggtaccagagtttgaggaagctgcgtttaaagcagagctgaatcaggtggtgaggtgtagaacccaatttggcttgcacttattgcaagttctatctgagagagaaccggtgaaagatatccaggtagaggagctgcattccaaaatgcaagatccagttttcatggatgaggctcagttaattgatgtcagagaacccaatgagatagagatagcatccttgccaggattcaaagtgttcccactccgccaatttggaacatgggcaccagacatcacttcaaagctgaaccctgagaaggatacatttgtcttgtgcaaggttggtggcaggtcaatgcaggttgccaactggttacagtctcagggcttcaagagtgtgtacaacattactggtgggatacaagcttattctctcaaggttgacccatcaattcctacttactgaaattgagcatcttagtctctttttcttgtatcctcctaattccaaattagatttgcaaattcgtattcaataaactatataatataaggttcatttttgag

SEQ ID NO: 98682 - protein, 305 aa, Arabidopsis thaliana
  peptide (1)..(305): Ceres Seq. ID no. 13601287
YPKEPIMFRVTGTLSAASSPAVAAASFSAALRLSITPTLAIASPPHLRWFSKFSRQFLGGRISSLRPRIPSPCPIRLSGFPALKMRASFSSGSSGSSASREILVQHLLVKNNDVELFAELQKKFLDGEEMSDLAAEYSICPSKKDGGILGWVKLGQMVPEFEEAAFKAELNQVVRCRTQFGLHLLQVLSEREPVKDIQVEELHSKMQDPVFMDEAQLIDVREPNEIEIASLPGFKVFPLRQFGTWAPDITSKLNPEKDTFVLCKVGGRSMQVANWLQSQGFKSVYNITGGIQAYSLKVDPSIPTY

SEQ ID NO: 98683 - protein, 299 aa, Arabidopsis thaliana; identical to SEQ ID NO: 35921
  peptide (1)..(299): Ceres Seq. ID no. 13601288

SEQ ID NO: 98684 - protein, 221 aa, Arabidopsis thaliana; identical to SEQ ID NO: 35922
  peptide (1)..(221): Ceres Seq. ID no. 13601289

SEQ ID NO: 98685 - DNA, 1680 bp, Arabidopsis thaliana
  misc_feature (1)..(1680): Ceres Seq. ID no. 13601290
  misc_feature (1)..(1680): Ortholog of  Ceres SEQ ID NO 13657915 as cited in SEQ ID NO 66051
gctcaaaagaaattgtgatacgcgaaagaaagaaaaaaattactttcaactaaaagaagcacacagcacaaaagaggtagtctcgttgtgatgtcagtataaagccagttgacgcaattccatctcccgatcgaacctgtacaaaccatggcaacaacgagctccgaccggttaatcgccggtttaacggcgtcgatcggctcaatcgaatctcgttacgcaaatccagctcaatccgtttctctaatctgtcgaaatcaaatcaatggcgcaccgcctatcgtcttgcggtcctctcgaaggtccaggctgtggttaatcgaggcgattcctccggcaaagtcctggaacggatctaacgatggcgacgaagatatcaagaagtcagacactcgtaattacgcgatcggtggaaccggtggtcacgcggtcgccggaaaagatgacagaacgatggagatagtaatagcagcggcgaccacggcggcgctgggtgtcgggaatcgcgtactgtataagctggctcttattcctctcaagcaatatcccttcttcctcgcgcaactctccacattcgggtatgtagctgtatacttttcgattttgtatttcagataccgagctggaattgttacaaaagagatgctatcagttccaaaacttccatttttaattgttggcgtcttggagtctcttgctctagctgctgggatggcggccgcatcaaatctttctggaccatctactacagttttatctcagacatttcttgtctggcaaattcttttctccattatatttctcgggaggagatatagaataaatcaaatattgggatgtactcttgtagcatttggtgtaatcgtcagtgtagcaagtgggtcgggtgccgctcattcatttaaagatacaggaatactttggagtcttcttatggtgttttcttttctgcttcaaggagcagatacagtaatgaaggaagtcatctttctagatagcaaaaagcgattgaagggtgcttcacttgatttgtttgttgtaaactcatatggttcaattttccaagtcatatgcattgcgttgcttcttccttttctttcaaagctttggggcataccgtttaaccaactaccgagctatatcagagacgggggtgcttgctttctaaatattggttctagaataacaggatgcgaaggggctccccttcttcctgtaatgtttgtcatgatgaacatggcttataacatctctcttctacgcctcatcaagatttcatctgcagttgtgtcgtctctggcatccaccgtttcagtgcccatagcggtgtactgtttcacgcttcccctaccataccttggggtggcatctacactaccaagggggtttgttgcaggcacaatcatccttgtagtcggcatgcttctatatgcttggacaccatctactaacacttccgattcaattatcccctcacccccatccacatagcggcaggaaaattggtttttgtaacattatttggtttccttctctcttctcatcttagcatatgctctttttttgtcaaataagaaatttttttatgcattctttacaaaagaatggttagttttcagttttgcttttcaaaaactatgcagaggataatgtactttgtaatgatgtatatcaattatc

SEQ ID NO: 98686 - protein, 447 aa, Arabidopsis thaliana
  peptide (1)..(447): Ceres Seq. ID no. 13601291
MATTSSDRLIAGLTASIGSIESRYANPAQSVSLICRNQINGAPPIVLRSSRRSRLWLIEAIPPAKSWNGSNDGDEDIKKSDTRNYAIGGTGGHAVAGKDDRTMEIVIAAATTAALGVGNRVLYKLALIPLKQYPFFLAQLSTFGYVAVYFSILYFRYRAGIVTKEMLSVPKLPFLIVGVLESLALAAGMAAASNLSGPSTTVLSQTFLVWQILFSIIFLGRRYRINQILGCTLVAFGVIVSVASGSGAAHSFKDTGILWSLLMVFSFLLQGADTVMKEVIFLDSKKRLKGASLDLFVVNSYGSIFQVICIALLLPFLSKLWGIPFNQLPSYIRDGGACFLNIGSRITGCEGAPLLPVMFVMMNMAYNISLLRLIKISSAVVSSLASTVSVPIAVYCFTLPLPYLGVASTLPRGFVAGTIILVVGMLLYAWTPSTNTSDSIIPSPPST

SEQ ID NO: 98687 - protein, 345 aa, Arabidopsis thaliana
  peptide (1)..(345): Ceres Seq. ID no. 13601292
MEIVIAAATTAALGVGNRVLYKLALIPLKQYPFFLAQLSTFGYVAVYFSILYFRYRAGIVTKEMLSVPKLPFLIVGVLESLALAAGMAAASNLSGPSTTVLSQTFLVWQILFSIIFLGRRYRINQILGCTLVAFGVIVSVASGSGAAHSFKDTGILWSLLMVFSFLLQGADTVMKEVIFLDSKKRLKGASLDLFVVNSYGSIFQVICIALLLPFLSKLWGIPFNQLPSYIRDGGACFLNIGSRITGCEGAPLLPVMFVMMNMAYNISLLRLIKISSAVVSSLASTVSVPIAVYCFTLPLPYLGVASTLPRGFVAGTIILVVGMLLYAWTPSTNTSDSIIPSPPST

SEQ ID NO: 98688 - protein, 282 aa, Arabidopsis thaliana
  peptide (1)..(282): Ceres Seq. ID no. 13601293
MLSVPKLPFLIVGVLESLALAAGMAAASNLSGPSTTVLSQTFLVWQILFSIIFLGRRYRINQILGCTLVAFGVIVSVASGSGAAHSFKDTGILWSLLMVFSFLLQGADTVMKEVIFLDSKKRLKGASLDLFVVNSYGSIFQVICIALLLPFLSKLWGIPFNQLPSYIRDGGACFLNIGSRITGCEGAPLLPVMFVMMNMAYNISLLRLIKISSAVVSSLASTVSVPIAVYCFTLPLPYLGVASTLPRGFVAGTIILVVGMLLYAWTPSTNTSDSIIPSPPST

SEQ ID NO: 98689 - DNA, 1205 bp, Arabidopsis thaliana
  misc_feature (1)..(1205): Ceres Seq. ID no. 13601294
  misc_feature (1)..(1205): Ortholog of  Ceres SEQ ID NO 14311596 as cited in SEQ ID NO 51728
  misc_feature (1)..(1205): Ortholog of  Ceres SEQ ID NO 15177031 as cited in SEQ ID NO 60171
  misc_feature (1)..(1205): Ortholog of  Ceres SEQ ID NO 12617197 as cited in SEQ ID NO 63406
  misc_feature (1)..(1205): Ortholog of  Ceres SEQ ID NO 13597804 as cited in SEQ ID NO 64182
  misc_feature (1)..(1205): Ortholog of  Ceres SEQ ID NO 15179788 as cited in SEQ ID NO 64818
  misc_feature (1)..(1205): Ortholog of  Ceres SEQ ID NO 14302768 as cited in SEQ ID NO 64889
  misc_feature (1)..(1205): Ortholog of  Ceres SEQ ID NO 13598565 as cited in SEQ ID NO 65250
  misc_feature (1)..(1205): Ortholog of  Ceres SEQ ID NO 13598597 as cited in SEQ ID NO 65496
  misc_feature (1)..(1205): Ortholog of  Ceres SEQ ID NO 13596284 as cited in SEQ ID NO 68273
  misc_feature (1)..(1205): Ortholog of  Ceres SEQ ID NO 15178902 as cited in SEQ ID NO 0
acgcattcgtcatttggtccctccacttagagagaagcagacagaacataactaaaatcgagaaaaatggcaaacagtggtgaaggtaaagtggtgtgtgtaacaggagcctccggttacatcgcctcatggctcgtcaagttcctacttagccgtggctacactgttaaggcctccgtccgtgatcccagtgatccgaaaaagacacaacacttagtttcactagaaggtgcaaaggaaagacttcacttgttcaaagcagaccttttggaacaaggttctttcgactctgctattgatggttgccatggagttttccacactgcttctccattttttaatgatgccaaagacccacaggctgaacttattgatcctgcggtcaaggggacgcttaacgttttgaattcgtgcgccaaagcctcttcggttaagagggttgttgtaacctcctccatggctgccgttggttacaatggaaaaccacgcacacctgatgttaccgtcgatgaaacttggttctctgatcctgagctttgcgaggcctccaagatgtggtatgttctatccaagactttggcggaagatgcagcttggaaactcgctaaagagaaaggcttagacattgttactattaacccggctatggtgatcggtcctctcctacagccaactctgaacacgagtgctgctgctatattaaacttaatcaatggtgcaaagactttcccaaacttgagtttcggatgggttaatgtaaaagacgtagccaatgcgcacatccaagcatttgaggtcccttcagctaatgggcgttattgtttggtcgagcgtgtcgttcaccactccgagattgttaacattctacgtgagctttacccaaatctcccactacctgaaaggtgtgtggacgagaatccctacgtgccaacgtatcaagtgtccaaggataaaacgaggagccttggcatagactacatacccttgaaggttagcatcaaggagaccgtcgagtccttgaaggaaaaaggtttcgcacagttctgagaaagcatttgagccaatggatttaatccagattagataaagtatttggaagactatttcagaaataatatttggaacatgtcaatgttctcaaggagatattagtatgttcttgtgtactttattgttgttccatcaaatgagttacttttcctttt

SEQ ID NO: 98690 - protein, 326 aa, Arabidopsis thaliana
  peptide (1)..(326): Ceres Seq. ID no. 13601295
MANSGEGKVVCVTGASGYIASWLVKFLLSRGYTVKASVRDPSDPKKTQHLVSLEGAKERLHLFKADLLEQGSFDSAIDGCHGVFHTASPFFNDAKDPQAELIDPAVKGTLNVLNSCAKASSVKRVVVTSSMAAVGYNGKPRTPDVTVDETWFSDPELCEASKMWYVLSKTLAEDAAWKLAKEKGLDIVTINPAMVIGPLLQPTLNTSAAAILNLINGAKTFPNLSFGWVNVKDVANAHIQAFEVPSANGRYCLVERVVHHSEIVNILRELYPNLPLPERCVDENPYVPTYQVSKDKTRSLGIDYIPLKVSIKETVESLKEKGFAQF

SEQ ID NO: 98691 - protein, 196 aa, Arabidopsis thaliana
  peptide (1)..(196): Ceres Seq. ID no. 13601296
MAAVGYNGKPRTPDVTVDETWFSDPELCEASKMWYVLSKTLAEDAAWKLAKEKGLDIVTINPAMVIGPLLQPTLNTSAAAILNLINGAKTFPNLSFGWVNVKDVANAHIQAFEVPSANGRYCLVERVVHHSEIVNILRELYPNLPLPERCVDENPYVPTYQVSKDKTRSLGIDYIPLKVSIKETVESLKEKGFAQF

SEQ ID NO: 98692 - protein, 164 aa, Arabidopsis thaliana
  peptide (1)..(164): Ceres Seq. ID no. 13601297
MWYVLSKTLAEDAAWKLAKEKGLDIVTINPAMVIGPLLQPTLNTSAAAILNLINGAKTFPNLSFGWVNVKDVANAHIQAFEVPSANGRYCLVERVVHHSEIVNILRELYPNLPLPERCVDENPYVPTYQVSKDKTRSLGIDYIPLKVSIKETVESLKEKGFAQF

SEQ ID NO: 98693 - DNA, 1382 bp, Arabidopsis thaliana
  misc_feature (1)..(1382): Ceres Seq. ID no. 13601305
  misc_feature (1)..(1382): Ortholog of  Ceres SEQ ID NO 13597747 as cited in SEQ ID NO 69071
agttccccacaaagctcgttgtcgtcatcgcgcgagcttgaaccaaaaaaaccatgaacagtgagaaggaagacgagccattggaagagatcggcgattcgaataatgttctcgatctcactagctatcagctccacagtctcgatacggtcgagttaccgccgaacctgattgagctggaccttacggcgaaccgtttgtcgggattggactcgaggatcgctcagctctccacgcttaagaagctttctctccgccaaaacctaattgatgattccgccgtcgaaccgttgtctcactgggacgccttgtccgatctcgaggagttagttctcagagataacaagctagcgaaagtaccagatgtcagcatattcacgaagcttttggtttacgacatatctttcaatgaaatcacttctttggaaggaatatccaaggcctctagcacactgaaggaactctatgtgtctaaaaatgaagttaacaagattatggagattgaacacttacacaacttgcagattcttgaactggggtctaatagattgcgggtgatggaaaatctggaaaacttcacaaaattagaagaactatggctcggaagaaaccgtatcaaagttgttaacctgtgtgggctcaaatgcataaaaaagattagcttgcagagcaatcgattgacctctatgaaaggatttgaggaatgtgttgctcttgaagagttatatttgagccataatggtatctccaaaatggaaggcttgagtgcattggtcaacctacgggtattggacgtgtcgaacaacaagcttacttcagttgatgacattcagaacctcacaaagttggaagatttgtggcttaatgacaaccagatagaatcactggaagcaatcacagaagctgttacaggatctaaagagaagcttaccactatctacctcgaaaataacccttgtgccaagtcttctgattatgttgctgcggtcagacaaatcttcccgaatgtggagcaaattgattctaacttatttgcttagagatggatatattccttgtcgtgctgtttgtatgaatgtctgcttcctcatcccatgggcatgggcatcgaatttaggaaatcaggtacaacacggattcctcaaaatatacatgtgtctgctgtttatcataaagaagtgcaaatgagcaaattaaatcgctctcgtcatggatatttattaaaacgtttttgaaattctagtgttcccttgcaagtaaaccaattcttgtttttggtctgtaatagtatgtggactgtgtctgtaaaagggaatccccgagtctgaagttgtctttgtttcaagtttcaaccgagaacactaacttgaatactttgatcc

SEQ ID NO: 98694 - protein, 328 aa, Arabidopsis thaliana
  peptide (1)..(328): Ceres Seq. ID no. 13601306
MNSEKEDEPLEEIGDSNNVLDLTSYQLHSLDTVELPPNLIELDLTANRLSGLDSRIAQLSTLKKLSLRQNLIDDSAVEPLSHWDALSDLEELVLRDNKLAKVPDVSIFTKLLVYDISFNEITSLEGISKASSTLKELYVSKNEVNKIMEIEHLHNLQILELGSNRLRVMENLENFTKLEELWLGRNRIKVVNLCGLKCIKKISLQSNRLTSMKGFEECVALEELYLSHNGISKMEGLSALVNLRVLDVSNNKLTSVDDIQNLTKLEDLWLNDNQIESLEAITEAVTGSKEKLTTIYLENNPCAKSSDYVAAVRQIFPNVEQIDSNLFA

SEQ ID NO: 98695 - protein, 181 aa, Arabidopsis thaliana
  peptide (1)..(181): Ceres Seq. ID no. 13601307
MEIEHLHNLQILELGSNRLRVMENLENFTKLEELWLGRNRIKVVNLCGLKCIKKISLQSNRLTSMKGFEECVALEELYLSHNGISKMEGLSALVNLRVLDVSNNKLTSVDDIQNLTKLEDLWLNDNQIESLEAITEAVTGSKEKLTTIYLENNPCAKSSDYVAAVRQIFPNVEQIDSNLFA

SEQ ID NO: 98696 - DNA, 1166 bp, Arabidopsis thaliana
  misc_feature (1)..(1166): Ceres Seq. ID no. 13601308
  misc_feature (1)..(1166): Ortholog of  Ceres SEQ ID NO 14302761 as cited in SEQ ID NO 65542
atacttgtaaaagctagagtcaacgccgttcagtctcagaccagacgaaacaacgatgcttaactctatcactttaacccggaaaccaccactcccgttcaactctgttgggttttcaggtaatcactcttcgtcttttggtcgaagaactataacggaaggtagttcgagcaaggctctttcgtttgggtacaaaaatgttggttcactgaagtgtggtcggagcaattggccggggcgttctgggactgcgtttgggcatctagtccgggtctctgcggtcccaggtgggaattcaggtggctctggcgggttaggtggttcaggcggtggtggtggtggttccggcggcggtggtggtgatggaagcgacggaaaaggaaagaagtggtcacttctctcatggtaccaggctcttctctcaaactctcctgttttgaccaaagctgtgaccgcagcacttttgaacctcgttggagatttgatctgtcagcttactatcaacaagacctcatcgctggacaagaagaggacactcacctttaccttcttgggcttagggctagtcggtccaacattgcatttctggtatttgtatttgagcaaagtggtgacagcttctggattatcaggcgcagttatacgacttctactggatcagtttgtttttgctcctatttttgttggagttttcttatcagcagttgtgacacttgaaggaaaaccatcaaatgtcataccgaagctacaacaggagtggactggtgcaatgatagcaaattggcagctatggataccatttcagtttcttaacttcagatttgttccacagaactaccaggtacttgcttcaaacgtagtggctttggcttggaatgtgattttatcattcaaagctcacaaagaagttgttgcaaagtagacatgtttcttacctggagcctagaggtggttgctggattgttatcggcagagttttggggaaacggtcttgtctgctgatgcaaatgtttggtgtttcgaaacaattatttgggaaccctgcacttgacattttcttagagttgaaacaagcttttcttcaagcacttcaaatatttccccatcatcaatgtttcatatatttattgtttcctcattcagagaatttttttagttcgtatgaa

SEQ ID NO: 98697 - protein, 288 aa, Arabidopsis thaliana
  peptide (1)..(288): Ceres Seq. ID no. 13601309
MLNSITLTRKPPLPFNSVGFSGNHSSSFGRRTITEGSSSKALSFGYKNVGSLKCGRSNWPGRSGTAFGHLVRVSAVPGGNSGGSGGLGGSGGGGGGSGGGGGDGSDGKGKKWSLLSWYQALLSNSPVLTKAVTAALLNLVGDLICQLTINKTSSLDKKRTLTFTFLGLGLVGPTLHFWYLYLSKVVTASGLSGAVIRLLLDQFVFAPIFVGVFLSAVVTLEGKPSNVIPKLQQEWTGAMIANWQLWIPFQFLNFRFVPQNYQVLASNVVALAWNVILSFKAHKEVVAK

SEQ ID NO: 98698 - DNA, 1688 bp, Arabidopsis thaliana
  misc_feature (1)..(1688): Ceres Seq. ID no. 13601310
  misc_feature (1)..(1688): Ortholog of  Ceres SEQ ID NO 14307863 as cited in SEQ ID NO 20504
ataaacctaatttgccaacgaagttgaaccaaaaaaagaagatctcactctcaccgccttcatttcctcgatctccgtcttcctccttctccgtctgtcgcagagcatcgctcgaattagggtttctgctgagagaagatgagggaaattattagcattcatatcggacaagccgggatccaagtcggaaattcctgctgggagctttactgtctcgaacatggaatccagcccgacggaatgatgccgagtgatactacagttggtgttgcacacgatgcgttcaatactttctttagcgagactggagctgggaagcatgttcctagggctgtcttcgttgatctcgagcctaccgttatcgacgaagttcgtactggtacttaccgtcaacttttccatccagagcagctcatttctgggaaagaagatgctgctaacaacttcgctagaggacattacactgttggaaaggaaattgtggatctatgtcttgaccgtgtgaggaagcttgccgacaactgtactggcttacaagggtttttggtgttcaatgctgttggtggtggaactggttctggattgggttctctgttgctagagcgtttgtctgtagattacggaaagaagtctaagcttggttttaccatatacccttctcctcaggtttctactgctgttgtagagccttacaacagtgtgctttcaacgcattcccttcttgaacataccgatgtagctgtcctcttggataacgaagccatctatgacatttgccgcagatccctagatatcgagaggccaacctacacaaacttgaacaggttgatatcacagatcatttcatccttgacaacatctttgaggtttgatggtgccatcaacgtggatatcactgagttccagaccaatcttgtcccatatccccgtatccatttcatgctgtcatcttatgcaccagtcatctcagccgccaaggcttaccacgagcagctatcagtccctgagatcaccaatgccgtgtttgagccagcgagcatgatggcaaagtgtgacccaaggcacggaaagtacatggcatgttgtttgatgtaccgaggagatgttgttcccaaagatgttaatgctgccgttggcaccatcaagacaaagaggactgttcagtttgttgactggtgcccaactgggttcaaatgtggaatcaactaccaacctccaacagttgttccaggtggtgacctcgctaaggttcagagagctgtatgcatgatcagtaacaacacagcagttgcagaggtgttctcacggatcgaccacaagtttgatctcatgtatgcgaagagggcattcgtgcactggtacgttggtgaaggaatggaggaaggtgaattctctgaggcacgtgaagacttggccgcactggagaaagactacgaagaagttggtgctgaaggtggagacgatgaagaagatgaaggtgaagactattgacaccttttctcaagcaatgtgctaccaaaaagttttttcgtttatctgttttcattaatgattcttgttgattacatgtttgttttaatcctgtacaatattcgatcctccttcgtgtttcatctcggttagatacattttcattggtagagcgaccattggggaagatcccgagttcattatcaagcttttgttgt

SEQ ID NO: 98699 - protein, 450 aa, Arabidopsis thaliana; identical to SEQ ID NO: 38746
  peptide (1)..(450): Ceres Seq. ID no. 13601311

SEQ ID NO: 98700 - protein, 416 aa, Arabidopsis thaliana; identical to SEQ ID NO: 38747
  peptide (1)..(416): Ceres Seq. ID no. 13601312

SEQ ID NO: 98701 - protein, 415 aa, Arabidopsis thaliana; identical to SEQ ID NO: 38748
  peptide (1)..(415): Ceres Seq. ID no. 13601313

SEQ ID NO: 98702 - DNA, 1285 bp, Arabidopsis thaliana
  misc_feature (1)..(1285): Ceres Seq. ID no. 13601322
  misc_feature (1)..(1285): Ortholog of  Ceres SEQ ID NO 15172792 as cited in SEQ ID NO 52134
  misc_feature (1)..(1285): Ortholog of  Ceres SEQ ID NO 13502622 as cited in SEQ ID NO 56443
  misc_feature (1)..(1285): Ortholog of  Ceres SEQ ID NO 12624901 as cited in SEQ ID NO 62597
ttttgttctttctcagagatctaaaccatcatggctacttccttcttccggcgactcgctaggtcagctccgattacattccctgtcgcatttggatctcaaagcaaatctggttctggcgctttccggttctccaccggtgcaatcgcggcactttccggtggattctcctattactacttgacatccggcaacaatctggtttatctggatcaagctaaggaagagacaggaccaaaaaccgctctaaaccctgataaatggctcgagttcaagcttcaagacactgctagagttagccacaacactcagttgttcaggttctcatttgacccctcagctgagttgggtctacatgttgcttcttgtctcctgacaagggctcctttaggctataatgctgaagggaaaacgaaatatgtcattagaccttacactcctatatcagatccagaggctaagggctattttgatttactgattaaggtatatcctgacggaaaaatgagtcagcattttgccagcttaaaaccgggggatgtgttggaagtaaaaggacccgttgaaaagttcaaatactcgccgaatatgaagaaacatattggcatgattgccggtggaagtgggattactccaatgcttcaggtgattgatgccattgtgaagaatcctgaggacaacacgcagatatcattgctttatgccaatgtgtcaccagatgatatactcctgaagcagaagcttgatgtacttcaggctaaccacccaaatttgaagatattctatactgttgacaaccctactaaaaactggaaaggaggagtaggttacatttcaaaggatatggctctgaaaggcttacctcttcctaccgacgatactcttatccttgtatgcggtcctcctgggatgatggagcatatatctggaggcaaagctccagactggtcacaaggagaggtcaaggggattctcaaggaactcggatacacagaggaaatggtgttcaaattctgagtggactagagaatcagaatacgatctcaaggaggtttcctttcatgtaataaaatggccccaagcaaacattaattgatgcagagtgagcttgacaatcgagctaccgagctttgaaaataaacaaagcaaaacggatcagttagtcatttgtctctgcaggtaatagcggaacttgattttgatggtaaatttctatgcaaccaagatattgaatatggttcgaaagatgataattgtgcgtttaaaattcgcgtctgtgttttgg

SEQ ID NO: 98703 - protein, 328 aa, Arabidopsis thaliana; identical to SEQ ID NO: 22461
  peptide (1)..(328): Ceres Seq. ID no. 13601323

SEQ ID NO: 98704 - protein, 170 aa, Arabidopsis thaliana; identical to SEQ ID NO: 22462
  peptide (1)..(170): Ceres Seq. ID no. 13601324

SEQ ID NO: 98705 - DNA, 1086 bp, Arabidopsis thaliana
  misc_feature (1)..(1086): Ceres Seq. ID no. 13601332
  misc_feature (1)..(1086): Ortholog of  Ceres SEQ ID NO 15224625 as cited in SEQ ID NO 1390
  misc_feature (1)..(1086): Ortholog of  Ceres SEQ ID NO 13581868 as cited in SEQ ID NO 52227
  misc_feature (1)..(1086): Ortholog of  Ceres SEQ ID NO 14306339 as cited in SEQ ID NO 0
ctctctttcttcttcattcatcattctcacttaagtttcccagaaaataaaagagctatgaagtttggtaagagtctcagcaatcagatcgagcaaactcttcctgaatggcaagacaagttcttgtcttacaaagaactcaaaaaacgactcaaactcatcggttccaaaaccgccgatcgtcccgttaaacgactccgtttagatgagttttccgtcggaatatcgaaagaagagatcaatttcatccaattgttagaagacgagttggagaaattcaacaatttcttcgttgagaaggaagaagaatatatcatcagactaaaggaatttagagatagaattgcgaaagctaaggattcaatggagaagatgataaaaatcaggaaggagattgttgatttccatggagaaatggttcttcttgagaattacagtgctcttaattacactggattggttaagatactgaagaagtatgacaaaagaactggtgatctcatgcgtttacctttcatccagaaagttcttcagcaacctttttacactactgacttattgttcaagcttgtcaaggaatctgaggcaatgcttgatcagatcttccctgctaacgaaactgagtctgagattatccaagcagagttatcagagcataagttcatggagagtcttcatatgaagagcacaatcgctgccttgcgggttttgaaggagatcaggagtggaagttctactgttagtgtgttttcattgccgcctctacagttaaatggcttagatgagacatggaagaagattccattgttggagcaagaagccaaatagagagtgagacagaggcacactcgctctattccacttttttatacaatagaagaagctaacagattaaacaagacattatcatcaatgtacacaaaaaggcagaagaaactataggatcatgtttctggatatcatctttggtcggtcataagtccttaggttacacaaaactgcaatgtaactttgtttctgtgttgggtgtgttgtagttgatgtaatatataccacttcagattaattattgatttcttcttttcc

SEQ ID NO: 98706 - protein, 275 aa, Arabidopsis thaliana; identical to SEQ ID NO: 22207
  peptide (1)..(275): Ceres Seq. ID no. 13601333

SEQ ID NO: 98707 - protein, 256 aa, Arabidopsis thaliana; identical to SEQ ID NO: 22208
  peptide (1)..(256): Ceres Seq. ID no. 13601334

SEQ ID NO: 98708 - protein, 154 aa, Arabidopsis thaliana; identical to SEQ ID NO: 22209
  peptide (1)..(154): Ceres Seq. ID no. 13601335

SEQ ID NO: 98709 - DNA, 1187 bp, Arabidopsis thaliana
  misc_feature (1)..(1187): Ceres Seq. ID no. 13601348
  misc_feature (1)..(1187): Ortholog of  Ceres SEQ ID NO 12636774 as cited in SEQ ID NO 372
  misc_feature (1)..(1187): Ortholog of  Ceres SEQ ID NO 12582113 as cited in SEQ ID NO 58349
  misc_feature (1)..(1187): Ortholog of  Ceres SEQ ID NO 12615466 as cited in SEQ ID NO 62761
  misc_feature (1)..(1187): Ortholog of  Ceres SEQ ID NO 14314080 as cited in SEQ ID NO 63105
  misc_feature (1)..(1187): Ortholog of  Ceres SEQ ID NO 13597295 as cited in SEQ ID NO 63743
  misc_feature (1)..(1187): Ortholog of  Ceres SEQ ID NO 12617090 as cited in SEQ ID NO 64005
  misc_feature (1)..(1187): Ortholog of  Ceres SEQ ID NO 13597439 as cited in SEQ ID NO 64081
  misc_feature (1)..(1187): Ortholog of  Ceres SEQ ID NO 13597233 as cited in SEQ ID NO 64370
  misc_feature (1)..(1187): Ortholog of  Ceres SEQ ID NO 13598327 as cited in SEQ ID NO 68040
  misc_feature (1)..(1187): Ortholog of  Ceres SEQ ID NO 13599438 as cited in SEQ ID NO 0
aaactcaagtagaaacaatggagaagccaaagttcaagactgtccaagaggtggttgcagctggcgaaggactgccggagagatatctccacgcacccaccggagacggcgaagttcaacctcttaacgcagcggtaccggagatggatattccggccatcgatctgaatcttctcctctcttcttctgaagctggtcaacaagagctgagtaaacttcactcggcactctctacatggggcgttgttcaggtgatgaatcatggaattacaaaagcgtttcttgacaagatttacaagctaaccaaggagttctttgcgcttccgaccgaagagaaacagaagtgcgcgagagagattgatagtatccaaggatatggtaacgacatgattctttgggatgatcaagttcttgattggatcgaccgtttgtatattactacttaccctgaagatcaaagacaacttaatttctggcctgaagtcccacttggattcagggaaactttacatgaatacacaatgaagcaacggatagtgattgagcaattttttaaggccatggctagatctttggaattagaagagaatagttttctagacatgtatggagaaagtgctacgttggatactagattcaacatgtatccaccatgtccgagcccggacaaggttattggtgttaaaccgcacgctgatggctcggctatcactcttctcttacccgacaaagatgtcggagggcttcagttccagaaagatgggaagtggtataaagctcctatagtccctgatacaattttgatcaatgttggtgatcaaatggagataatgagcaatgggatatacaagagcccggttcatagagtggtgactaacagagaaaaggaaagaatatctgtggcaactttttgcattccaggtgcagataaagagattcagcctgtgaatgagcttgtgtctgaggcaagaccaagattatataaaacagttaagaagtatgtggagctctacttcaagtactatcaacaaggccgaagacctattgaagctgcattgatctgatcacacttttcaagtctcatttattggtttcacaaatgaatctgtttctttcgttacttgagatcctttataagaataaaactgtttccttgtttgttggaatgtgaggctgcattgtgttgc

SEQ ID NO: 98710 - protein, 353 aa, Arabidopsis thaliana
  peptide (1)..(353): Ceres Seq. ID no. 13601349
TQVETMEKPKFKTVQEVVAAGEGLPERYLHAPTGDGEVQPLNAAVPEMDIPAIDLNLLLSSSEAGQQELSKLHSALSTWGVVQVMNHGITKAFLDKIYKLTKEFFALPTEEKQKCAREIDSIQGYGNDMILWDDQVLDWIDRLYITTYPEDQRQLNFWPEVPLGFRETLHEYTMKQRIVIEQFFKAMARSLELEENSFLDMYGESATLDTRFNMYPPCPSPDKVIGVKPHADGSAITLLLPDKDVGGLQFQKDGKWYKAPIVPDTILINVGDQMEIMSNGIYKSPVHRVVTNREKERISVATFCIPGADKEIQPVNELVSEARPRLYKTVKKYVELYFKYYQQGRRPIEAALI

SEQ ID NO: 98711 - protein, 348 aa, Arabidopsis thaliana; identical to SEQ ID NO: 24459
  peptide (1)..(348): Ceres Seq. ID no. 13601350

SEQ ID NO: 98712 - protein, 306 aa, Arabidopsis thaliana; identical to SEQ ID NO: 24460
  peptide (1)..(306): Ceres Seq. ID no. 13601351

SEQ ID NO: 98713 - DNA, 1750 bp, Arabidopsis thaliana
  misc_feature (1)..(1750): Ceres Seq. ID no. 13601356
  misc_feature (1)..(1750): Ortholog of  Ceres SEQ ID NO 13659033 as cited in SEQ ID NO 66372
  misc_feature (1)..(1750): Ortholog of  Ceres SEQ ID NO 13655724 as cited in SEQ ID NO 68973
  misc_feature (1)..(1750): Ortholog of  Ceres SEQ ID NO 12625899 as cited in SEQ ID NO 69079
  misc_feature (1)..(1750): Ortholog of  Ceres SEQ ID NO 15180366 as cited in SEQ ID NO 0
aacacatataatttgaccaaagtcgcatctcacggtgagatgagttcttcgtagctccaatggtggtggtggcttcacaatgtcgacttcttcttctttccctcgaaccatcgtctcctacactgtgacaacttcgctcttcatcgttatcttcctatgcagcgtcttcttcttcactagacgcactctcgaaccttctctctctccttaccacaccgccgacatccctctccccgccgtcgatctaccacctcctacgcctctcctccctcaaatcgagcctcacgatggtgacgtcaccgtggaaacgaatcctaaggaggtagaagattcgcgccgcggaggcgatgacgtcgcggtagagactgagctgaaactgaaagatgtggaagattcgcacacggagaaaaccgaggaggaggaagaaggtagaggagaatcgcccggtgaagtttccgtagaatctgtggaacatgcggtgattgagaagatgagaggctgtgatttgtacaagggatcgtgggttaagggcgatgatgagtatccattgtatcagcctggatcgtgtccttatgtggacgatgcttttgattgccagaggaatgggaggcgtgattctgactatcttaattggagatggaagcctgacggttgtgatcttccacggtttaatgctacagacttcttggtgaagctacgaggtaaaagtttgatgttggttggagattcaatgaatcgtaaccagtttgaatcaatgctttgcgttctacgagaaggtttatcggataagagtagaatgtatgaggttcatggccataatataacaaaagggagaggctactttgtattcaagtttgaagattataattgcacagtagagtttgtgaggtcacattttcttgtgagggaaggagttagagcaaatgctcaaggaaatactaatccgaccctttccattgatcgcattgacaagtcacatgctaaatggaagcgagctgacattcttgtctttaacactggacattggtgggttcatggaaagaccgccagagggaaaaactactacaaagaaggtgactacatctacccgaaatttgatgctactgaagcatacagaaggtcgttgaagacttgggcaaaatggatcgatcagaatgtgaatcccaaaaagcagcttgtattttatcgcggatactcctctgcccattttcggggaggtgagtgggactcgggagggtcatgcaacggggaggtagaacctgtgaagaagggttcaatcatcgattcctatcctttgaaaatgaagatagtccaggaagccataaaggagatgcaagttcctgtgattcttctaaacgtgacaaagctgactaatttccgcaaagacggacatccatcaatctacggtaagaccaacacggatggtaagaaagtgtcgacaaggcgacaggattgcagccactggtgcctgccgggagttcccgatgtttggaaccatcttatctacgcatctttgctccttcaaccacattcttaaagttgagctcatacatcaacaaaattagatagaaagagaagagcagaaacaaatgaccagtccagtcttcactgttgtagtagtgatgtcaaattttgtgtaatttattgcccttggagctgataagtagttttttgttactttcatgtagaggtgtgaacaaacggaatcaggatgaaattttcagggttttttaatggcaaacaatttttc

SEQ ID NO: 98714 - protein, 485 aa, Arabidopsis thaliana
  peptide (1)..(485): Ceres Seq. ID no. 13601357
MSTSSSFPRTIVSYTVTTSLFIVIFLCSVFFFTRRTLEPSLSPYHTADIPLPAVDLPPPTPLLPQIEPHDGDVTVETNPKEVEDSRRGGDDVAVETELKLKDVEDSHTEKTEEEEEGRGESPGEVSVESVEHAVIEKMRGCDLYKGSWVKGDDEYPLYQPGSCPYVDDAFDCQRNGRRDSDYLNWRWKPDGCDLPRFNATDFLVKLRGKSLMLVGDSMNRNQFESMLCVLREGLSDKSRMYEVHGHNITKGRGYFVFKFEDYNCTVEFVRSHFLVREGVRANAQGNTNPTLSIDRIDKSHAKWKRADILVFNTGHWWVHGKTARGKNYYKEGDYIYPKFDATEAYRRSLKTWAKWIDQNVNPKKQLVFYRGYSSAHFRGGEWDSGGSCNGEVEPVKKGSIIDSYPLKMKIVQEAIKEMQVPVILLNVTKLTNFRKDGHPSIYGKTNTDGKKVSTRRQDCSHWCLPGVPDVWNHLIYASLLLQPHS

SEQ ID NO: 98715 - protein, 348 aa, Arabidopsis thaliana
  peptide (1)..(348): Ceres Seq. ID no. 13601358
MRGCDLYKGSWVKGDDEYPLYQPGSCPYVDDAFDCQRNGRRDSDYLNWRWKPDGCDLPRFNATDFLVKLRGKSLMLVGDSMNRNQFESMLCVLREGLSDKSRMYEVHGHNITKGRGYFVFKFEDYNCTVEFVRSHFLVREGVRANAQGNTNPTLSIDRIDKSHAKWKRADILVFNTGHWWVHGKTARGKNYYKEGDYIYPKFDATEAYRRSLKTWAKWIDQNVNPKKQLVFYRGYSSAHFRGGEWDSGGSCNGEVEPVKKGSIIDSYPLKMKIVQEAIKEMQVPVILLNVTKLTNFRKDGHPSIYGKTNTDGKKVSTRRQDCSHWCLPGVPDVWNHLIYASLLLQPHS

SEQ ID NO: 98716 - protein, 274 aa, Arabidopsis thaliana; identical to SEQ ID NO: 35406
  peptide (1)..(274): Ceres Seq. ID no. 13601359

SEQ ID NO: 98717 - DNA, 781 bp, Arabidopsis thaliana
  misc_feature (1)..(781): Ceres Seq. ID no. 13601366
  misc_feature (1)..(781): Ortholog of  Ceres SEQ ID NO 12474478 as cited in SEQ ID NO 96
  misc_feature (1)..(781): Ortholog of  Ceres SEQ ID NO 14302025 as cited in SEQ ID NO 52138
  misc_feature (1)..(781): Ortholog of  Ceres SEQ ID NO 15172672 as cited in SEQ ID NO 53908
tttgcacacataaccctaatttggtctcttactctaacccgagagataatggctcctacacaaaatctcttccttgtcgctattgccttcgccgtcattttcaccgcctccaccgtacatggtcgtcataatggtgcagaagatatcgtgcattcctcctgcgaacacgcgagctatccatcactatgcgtccgtactctttcgtcatactccggtccaaccatcaccaaccgccgcgatctagctcaagccgccataaaaatcagcctctcccacgctcaaagcgccgcgaagaaactcgcggtggtgcgagactcggtggggaagaagaagcaagagaaagcggcgcttgtggactgtgtggagatgattggagactctgtggacgagctaagccgtacgctcggcgttttgaagcacctccgtgtctctggcggttcagctaaagagttccggtggcagatgagcaatgcacagacgtgggctagcgcggcacttacggatgacgacacgtgtctcgatgggtttcaagggatggacgacggtgaaatcaaaacggaggtgaagcagtggatgacgaaagtggccagggttacgagcaacgcgctttacatggtcaaccagctagatgagacacgtggcaaaccccacgacgtacatctttgatgttaatgcactagatcgttttaatggacggtctttattgtgtgtgttggtttttcgttcatgtgttttaagtgtgagattatctatcgctacgatatatagaaatgagtttttg

SEQ ID NO: 98718 - protein, 221 aa, Arabidopsis thaliana; identical to SEQ ID NO: 26084
  peptide (1)..(221): Ceres Seq. ID no. 13601367

SEQ ID NO: 98719 - protein, 205 aa, Arabidopsis thaliana; identical to SEQ ID NO: 26085
  peptide (1)..(205): Ceres Seq. ID no. 13601368

SEQ ID NO: 98720 - DNA, 1974 bp, Arabidopsis thaliana
  misc_feature (1)..(1974): Ceres Seq. ID no. 13601380
  misc_feature (1)..(1974): Ortholog of  Ceres SEQ ID NO 14310841 as cited in SEQ ID NO 53666
  misc_feature (1)..(1974): Ortholog of  Ceres SEQ ID NO 15178736 as cited in SEQ ID NO 56439
  misc_feature (1)..(1974): Ortholog of  Ceres SEQ ID NO 14308493 as cited in SEQ ID NO 60320
ctctcctctcattttctactcttcttcaaaagcacactcaatatttcgagatcctctcggcttgttcgttcttcgtgaacgatcccatctattgtttctcgctagtctcagattcgactaacttggatatctccgatactgaagaagcctccttcttctttttccgctcttcccgatgccgatcgataagatcttcaaagatgatgctagtgaagagaagggagaacgtgcgaggatggcatcatttgttggtgcaatggctatcagtgatctggttaagtctactttagggccaaagggcatggataaaatcttgcaatctactggtagaggtcatgcggtcactgttactaacgatggtgctactattctcaagtcacttcacatagacaaccctgcagctaaagttcttgttgacatctcgaaagttcaagatgatgaggttggtgatggaactacctctgttgttgtcttggccggcgagcttctgagggaagcagaaaagcttgtggcttctaagattcaccctatgaccatcatagcaggttacagaatggcttcggaatgtgctcgtaatgctttactgaaaagagtcattgataacaaggacaatgcagagaagtttaggtcagacttgttgaagattgcgatgactactttatgttccaaaattctctcacaggacaaggaacattttgcagaaatggccgtggatgctgttttcaggctaaagggaagcacaaacttggaagctattcagatcatcaaaaaacctggagggtctctgaaggattcgtttttggatgaagggtttattcttgacaagaaaataggaattgggcagcctaagcgcatagagaatgcaaatatcttagtagctaatactgctatggataccgataaagtgaagatttacggtgcacgtgtccgtgtggattccatgaccaaggttgctgagattgaaggggctgagaaggaaaaaatgaaagacaaggtgaagaagatcataggccacggaatcaactgctttgttaacaggcagttgatctacaatttccctgaggaactctttgctgatgctggtatacttgctattgagcatgctgactttgagggaatagagcgtcttggtttggttactggtggtgaaattgcttcgacctttgacaacccagagtctgttaagcttgggcattgcaagcttatagaagaaatcatgattggtgaagacaagttgattcatttctctggttgtgaaatgggccaggcttgttcaattgtcctaagaggggccagtcaccatgtcctagatgaggctgaaagatcactccatgatgccttatgtgtactctctcaaacagtgaatgatactagagttttgcttggaggtggatggccagagatggtgatggcaaaggaagtagatgagcttgcaaggaaaactgctggcaaaaaatctcatgccattgaagctttctcacgtgctctagttgctataccgacaacaatcgctgacaacgctggtttagacagtgccgaattggttgctcagcttcgtgcagagcaccacactgaagggtgtaacgctgggatcgacgtcatcactggagctgtaggagatatggaagagagaggaatctatgaagcattcaaagtgaagcaagcggttctgctttcagccacagaagcatctgagatgatattgcgagtggatgaaatcattacatgtgctcctaggaggagagaagacaggatgtgaaaaactcaacacaaacacatgaacgtggtgggagcctagagattccatgattgtgttttcgatttggatcagaatacaacttttctaatatgtttaatgttttgctcctccttagaactcatctttttgttttgtttccttttaatcttgttttgagtttgaatttagacgtttgaaaaaagtgttagctccaaagtttttaatttgtttggttg

SEQ ID NO: 98721 - protein, 527 aa, Arabidopsis thaliana; identical to SEQ ID NO: 29071
  peptide (1)..(527): Ceres Seq. ID no. 13601381

SEQ ID NO: 98722 - protein, 507 aa, Arabidopsis thaliana; identical to SEQ ID NO: 29072
  peptide (1)..(507): Ceres Seq. ID no. 13601382

SEQ ID NO: 98723 - protein, 500 aa, Arabidopsis thaliana; identical to SEQ ID NO: 29073
  peptide (1)..(500): Ceres Seq. ID no. 13601383

SEQ ID NO: 98724 - DNA, 1774 bp, Arabidopsis thaliana
  misc_feature (1)..(1774): Ceres Seq. ID no. 13601391
  misc_feature (1)..(1774): Ortholog of  Ceres SEQ ID NO 13663328 as cited in SEQ ID NO 66678
  misc_feature (1)..(1774): Ortholog of  Ceres SEQ ID NO 13624495 as cited in SEQ ID NO 0
gattttctagagatttgtgacaaatgtcaaatgggttgttgaatcttcacgtgtcctcttttctcctcttatctcatctaatttgtttctttagttttgttcaactcaagcacatccgagaaagtcatagtctttgaacatcaaattgccttttgtttgtcaaatgacttaagttcttgatctttttcttgtagggtttttttctctgcactccacggtcatggcttcgtctacggctcagagcaagaagcagtttaagaggtctatgactaagaaatcacattcatggtggtgggatagtcacaattgtcccaagaactcaaaatggcttgcagagaatctagaaaagatggatgatcgagtgaaccacatgttaaaactgattgaagaagacgcagactcttttgcaaagaaagctcagatgtattttcagaaacgtcccgagttaatccagcttgtcgaggaattctaccgcatgtatcgcgcattggctgagcgttatgatcaagctagtggtgaacttcagaagaaccatacatctgagatccagtcacagagctctcttgagatatcatctcctaccaaagagaagttgagtcgccgtcaatctagccataaagaagaggaagattcatcgtctttgacagattctggttctgattctgatcattcctctgccaatgatgaagacggtgacgaggcattgatccgtagaatggctgaacttgagcttgagcttcaagagacgaaacagaagctccttctccagcaggaaagtgttgatggtgacaacaatgttgatctccttcacaaaattactacatatgagggagagcttaaagaagctaatgagaagatgcgaatgcacgaagacgagattgctaatctgaagaatcagcttcagagcttcatgtcttttgacacagaggatcatcttggtgctgaacaaaagagtgttgatttggataaagaggacactaaagaagatgcagtagctacaaaagtgctagccttggaggaagagctgagtatcgcgaaagagaagcttcagcactttgagaaagagacttattctctgaaaaatgagctcgagatcggcaaagccgctgaggagaagctgaagagcttacaacatgagctcgagttggctcagagagacgctgatacctacataaacaagctcaacgcagagaagaaagaagtcttgaagttgcaggagagattggcaatggtgaaaactagtttacaggatagagataacgagataagggcattgaaaactgcggtttcagacgctgaacagaagatattccccgaaaaagcacagatcaagggagaaatgtcgaagatgcttgaagaacgaagccaacttggagagcaactgagagagctggaatcacatataaggctgatcaaggaagagaaagctgaaacagaggagaagcttagaggaggaactgagaaaatcagcggaatgagagacgagagcaatgtgctaagagaagagattgggaagagagaagagaagataaaggaaacggaaaagcatatggaggagcttcacatggagcaagtgaggctgagaagacggtcaagtgagcttacggaagaagtggaaaggacgagagtgtctgcatcggaaatggctgagcagaaaagagaagctataagacagctttgtatgtctcttgaccattacagagatgggtacgacagactttggagagttgttgcaggacataagagtaagagagtagtggtcttatcaacttga

SEQ ID NO: 98725 - protein, 517 aa, Arabidopsis thaliana
  peptide (1)..(517): Ceres Seq. ID no. 13601392
MASSTAQSKKQFKRSMTKKSHSWWWDSHNCPKNSKWLAENLEKMDDRVNHMLKLIEEDADSFAKKAQMYFQKRPELIQLVEEFYRMYRALAERYDQASGELQKNHTSEIQSQSSLEISSPTKEKLSRRQSSHKEEEDSSSLTDSGSDSDHSSANDEDGDEALIRRMAELELELQETKQKLLLQQESVDGDNNVDLLHKITTYEGELKEANEKMRMHEDEIANLKNQLQSFMSFDTEDHLGAEQKSVDLDKEDTKEDAVATKVLALEEELSIAKEKLQHFEKETYSLKNELEIGKAAEEKLKSLQHELELAQRDADTYINKLNAEKKEVLKLQERLAMVKTSLQDRDNEIRALKTAVSDAEQKIFPEKAQIKGEMSKMLEERSQLGEQLRELESHIRLIKEEKAETEEKLRGGTEKISGMRDESNVLREEIGKREEKIKETEKHMEELHMEQVRLRRRSSELTEEVERTRVSASEMAEQKREAIRQLCMSLDHYRDGYDRLWRVVAGHKSKRVVVLST

SEQ ID NO: 98726 - protein, 502 aa, Arabidopsis thaliana; identical to SEQ ID NO: 70514
  peptide (1)..(502): Ceres Seq. ID no. 13601393

SEQ ID NO: 98727 - protein, 474 aa, Arabidopsis thaliana; identical to SEQ ID NO: 70515
  peptide (1)..(474): Ceres Seq. ID no. 13601394

SEQ ID NO: 98728 - DNA, 878 bp, Arabidopsis thaliana
  misc_feature (1)..(878): Ceres Seq. ID no. 13601399
  misc_feature (1)..(878): Ortholog of  Ceres SEQ ID NO 13638567 as cited in SEQ ID NO 51303
  misc_feature (1)..(878): Ortholog of  Ceres SEQ ID NO 14301396 as cited in SEQ ID NO 51789
  misc_feature (1)..(878): Ortholog of  Ceres SEQ ID NO 12610031 as cited in SEQ ID NO 55811
  misc_feature (1)..(878): Ortholog of  Ceres SEQ ID NO 12610896 as cited in SEQ ID NO 55861
  misc_feature (1)..(878): Ortholog of  Ceres SEQ ID NO 12619664 as cited in SEQ ID NO 66048
  misc_feature (1)..(878): Ortholog of  Ceres SEQ ID NO 12635952 as cited in SEQ ID NO 0
cactcaacaaagcttaaccataaactgtgagtaaaaaagagaagaaagaaaaatggtgctaaaggtgtacggacctcactttgcttcaccaaagagagctttggtcacactgatcgagaagggcgttgccttcgagaccatccccgtcgatctcatgaaaggagaacacaagcagcctgcttatctcgctctacagccttttggtactgttcctgctgttgttgacggtgactacaaaatcttcgagtcccgtgcggtgatgaggtacgtagctgagaagtacaggtcacaaggacctgatcttttggggaaaaccgttgaagacagaggtcaagttgaacaatggcttgatgtggaagcgaccacttaccacccaccgctattgaacttaacgcttcacataatgttcgcatcagtcatgggattcccatctgatgagaagctgatcaaggagagtgaagagaagcttgcgggtgttcttgatgtctacgaggcacatctctcaaagagcaagtacttggccggtgacttcgtgagcttggctgatttggctcacctcccgttcactgattacttggttggtccgattgggaaagcttacatgatcaaagataggaaacacgtgagcgcgtggtgggatgatattagcagccgtcctgcgtggaaggagactgttgccaagtattcattcccagcttaagatgtgttcatcttcttggtgatgtggtttgtgttttatgagaggtttaataaaagtggaactaaatgtacctcttaatgtaatgttgccacctctgtgttctctttccttttgtagtttaataagtatctttatggctttgtgaggctttcaattttaaggaaatgatcttttcccc

SEQ ID NO: 98729 - protein, 215 aa, Arabidopsis thaliana; identical to SEQ ID NO: 21525
  peptide (1)..(215): Ceres Seq. ID no. 13601400

SEQ ID NO: 98730 - protein, 181 aa, Arabidopsis thaliana; identical to SEQ ID NO: 21526
  peptide (1)..(181): Ceres Seq. ID no. 13601401

SEQ ID NO: 98731 - protein, 146 aa, Arabidopsis thaliana; identical to SEQ ID NO: 21527
  peptide (1)..(146): Ceres Seq. ID no. 13601402

SEQ ID NO: 98732 - DNA, 1182 bp, Arabidopsis thaliana
  misc_feature (1)..(1182): Ceres Seq. ID no. 13601410
  misc_feature (1)..(1182): Ortholog of  Ceres SEQ ID NO 14310701 as cited in SEQ ID NO 53113
  misc_feature (1)..(1182): Ortholog of  Ceres SEQ ID NO 14303079 as cited in SEQ ID NO 67486
atcattcatcatcatcagacatcaggtgcgtcataagctccacaaaaaactcatccatggcgattcttagttacatctcagcaacatcaaccacaccaccaattcctcaagatcaatctcccaattctcgtctaccaaccaaaatcattctacccaataagaaacctgagaaatggtccaccggagttgctcccggagagtacggtggtcctccgactaccaccaagctccgaaagtactggggaggtgaaaaagaagatcccattacttccacagacttaatctggaacagagattttatggatcaaatgaagaaattgtttgatgatcctaatgattcttctctcgacccatctccttcaaaggaaaagtcttctgggtttctgagctttagcagagttatgagtcttgacagtatggatgttgatttaagtaaagagcttgcatcgtcttctaaatccgttgtgaaaaatcgtcttgacacctccaagtcagaagctaaaaagcaaatgagtaaggctattgtgtctcctaaatggaagctggcacctacacgtcgtgagcaagagaaatgggatagagcaacgaaggctgcaactggtggcagtgatgtgatgtttagggagctgagacggccacgtggtgacccagaagtacaagctgctaaagacagggaacaatattttaagctgaaaaataagattcaggttctcacactcggtattggtggtgttggtttagtctcagcttatatctcatacaccccagagatagcacttagttttggtgctggcttgttgggttcacttgcatatatgaggatgcttggtaactctgtagatgccatggcagatggagccagaggagttgccaaaggtgcagctaaccagccacggttactagtccccgttgtgttggttatgatattcaatagatggaacgcaatacttgttcctgagtatggattcatgcatttggagttgataccaatgttggttgggttctttacttacaaaattgctacgttctttcaagctatagaagaagccatctccattactactcaaaaacccgaatcaatctctccagacacacaggccagtgattaataaggtcaaggtcagtgttgtaagaaatgtaattaaacacagaagtgttaatgtaataaaaactaataactca

SEQ ID NO: 98733 - protein, 368 aa, Arabidopsis thaliana; identical to SEQ ID NO: 22994
  peptide (1)..(368): Ceres Seq. ID no. 13601411

SEQ ID NO: 98734 - protein, 350 aa, Arabidopsis thaliana; identical to SEQ ID NO: 22995
  peptide (1)..(350): Ceres Seq. ID no. 13601412

SEQ ID NO: 98735 - protein, 269 aa, Arabidopsis thaliana; identical to SEQ ID NO: 22996
  peptide (1)..(269): Ceres Seq. ID no. 13601413

SEQ ID NO: 98736 - DNA, 1237 bp, Arabidopsis thaliana
  misc_feature (1)..(1237): Ceres Seq. ID no. 13601414
  misc_feature (1)..(1237): Ortholog of  Ceres SEQ ID NO 15177935 as cited in SEQ ID NO 60258
  misc_feature (1)..(1237): Ortholog of  Ceres SEQ ID NO 13659033 as cited in SEQ ID NO 66372
  misc_feature (1)..(1237): Ortholog of  Ceres SEQ ID NO 12625899 as cited in SEQ ID NO 69079
  misc_feature (1)..(1237): Ortholog of  Ceres SEQ ID NO 15180051 as cited in SEQ ID NO 0
cttggcgaccttaaatacaaaatgggactctgtttccaactcaacttagcctctctgtctctcatactcttctcttcattccctggacttttagcacaatctcaacaacatttcttgggacaaaacaacacaagcttgttgagtggagggagatgcaatttggctagaggcaaatgggtctatgattcttcatatcctctctatagtgcttttagttgtcccttcatcgattccgaattcaactgccagaaagcgggtcgtccggacactaactatcaacacttccgttggcagcctttctcctgtcctctccctagattcgatggggcgaattttatgaggagaatgagagggaagaagataatgatggtaggtgactcactgagtcttaacatgttcgaatcgttggcctgcttgcttcatgcttctctccctaatgctaagtactctcttcgtcgaagccaacctctcacttccctcactttccaggattatggagtgacgataaatttgtatagaacacagtttctagtagatgtggttcaagaaaaggcaggacgagtgcttgtgcttgactccatcaaacaagccgatgcttggcttggcatggatgttcttatcttcaactcgtggcactggtggactcacacctccggacttcagccctgggattatatgagggaaggaaaccaattgtacaaagacatgaacaggcttgtggcttattacaaaggacttaacacatgggctcgttggattaacaataacattgtcccttcacgtactcaagtcttctttcaaggtgtttctcctgtccactatgacggaagagagtggaacgaaccattgaagtcgtgcaatggtcaaactcagccgttcatgggacaaagatatccaggaggattgcccttaggttgggttgtggttaacaaagtgttgagccgaattagaaaaccggtccatcttctcgatctcactactctctcggagtatcgcaaagacgcacatccaagtctctacaatggtatctcaaaggatctagactgtagccattggtgcctccctggactccctgatacttggaacttacttctctactcatctcttacttcctagtccttgttttacatatttgtttgtttctaccattttataaatagtttgtgatgatcctgtgtgattgtgattgatatttttccttcgttaatttaatcttaaatgtaattaacattgttac

SEQ ID NO: 98737 - protein, 371 aa, Arabidopsis thaliana
  peptide (1)..(371): Ceres Seq. ID no. 13601415
LGDLKYKMGLCFQLNLASLSLILFSSFPGLLAQSQQHFLGQNNTSLLSGGRCNLARGKWVYDSSYPLYSAFSCPFIDSEFNCQKAGRPDTNYQHFRWQPFSCPLPRFDGANFMRRMRGKKIMMVGDSLSLNMFESLACLLHASLPNAKYSLRRSQPLTSLTFQDYGVTINLYRTQFLVDVVQEKAGRVLVLDSIKQADAWLGMDVLIFNSWHWWTHTSGLQPWDYMREGNQLYKDMNRLVAYYKGLNTWARWINNNIVPSRTQVFFQGVSPVHYDGREWNEPLKSCNGQTQPFMGQRYPGGLPLGWVVVNKVLSRIRKPVHLLDLTTLSEYRKDAHPSLYNGISKDLDCSHWCLPGLPDTWNLLLYSSLTS

SEQ ID NO: 98738 - protein, 364 aa, Arabidopsis thaliana
  peptide (1)..(364): Ceres Seq. ID no. 13601416
MGLCFQLNLASLSLILFSSFPGLLAQSQQHFLGQNNTSLLSGGRCNLARGKWVYDSSYPLYSAFSCPFIDSEFNCQKAGRPDTNYQHFRWQPFSCPLPRFDGANFMRRMRGKKIMMVGDSLSLNMFESLACLLHASLPNAKYSLRRSQPLTSLTFQDYGVTINLYRTQFLVDVVQEKAGRVLVLDSIKQADAWLGMDVLIFNSWHWWTHTSGLQPWDYMREGNQLYKDMNRLVAYYKGLNTWARWINNNIVPSRTQVFFQGVSPVHYDGREWNEPLKSCNGQTQPFMGQRYPGGLPLGWVVVNKVLSRIRKPVHLLDLTTLSEYRKDAHPSLYNGISKDLDCSHWCLPGLPDTWNLLLYSSLTS

SEQ ID NO: 98739 - protein, 259 aa, Arabidopsis thaliana; identical to SEQ ID NO: 23519
  peptide (1)..(259): Ceres Seq. ID no. 13601417

SEQ ID NO: 98740 - DNA, 2216 bp, Arabidopsis thaliana
  misc_feature (1)..(2216): Ceres Seq. ID no. 13601436
  misc_feature (1)..(2216): Ortholog of  Ceres SEQ ID NO 13596509 as cited in SEQ ID NO 62004
  misc_feature (1)..(2216): Ortholog of  Ceres SEQ ID NO 13659971 as cited in SEQ ID NO 67565
  misc_feature (1)..(2216): Ortholog of  Ceres SEQ ID NO 13500385 as cited in SEQ ID NO 67583
acaaccgattaacaaatagaaaacgaagcacaaaagatatcagaagaagagagaagtctcctcccaaaaaaaccaaaaaaaaaaaaaaaaaagagaaagaaaagaactcgagtgcaaaaagcttctctcttccttcccatggggtgcatttgaactaatctcctccttgaaatcgcttgattgattgttataaatcgattaatcgattcaaaccgttggatattattccaaaacaacccaaaaagagaatcccatgggaagttgtgtttcgtcgccattgaaaggctctccttttggaaagagaccggtaagaaggcgacacagtagtaatagcagaacatcctctgttcctcgtttcgattcttcaactaatctttcccggagattgattttccagccaccaagccgcgttctccccgagcctatcggtgatggaattcacctcaagtatgatttgggaaaagaactaggccgtggtgaatttggtgtcactcatgaatgtatcgagatcagtacccgagaaagatttgcgtgtaagaggatatcgaaggagaagctaaggacggagatagatgtggaggatgtgagaagagaggttgagatcatgagatgtttaccaaaacatcctaatattgttagctttaaggaagcttttgaggacaaagacgctgtctatcttgtcatggagatttgtgaaggaggtgaactttttgaccgcattgtctctagagggcattacactgaacgcgccgctgcatctgttgctaaaaccattcttgaagttgtcaaggtgtgtcatgaacatggagtgattcatcgtgatcttaaaccagagaacttcctcttttcgaatggaactgagactgcacaactcaaagccattgattttggtctctccattttcttcaaaccggcccagcggttcaatgagattgtgggaagtccttactacatggctccagaggttttgagacgaaattacggtcctgagatcgatgtttggagtgctggtgttatactctatatcttgctttgtggtgttcctcccttttgggcagaaaccgaggaaggaatcgcgcacgctattgtgagagggaacatcgatttcgagagagatccatggccaaaagtctcacatgaagccaaggaactcgttaagaacatgcttgatgcaaatccttatagcagactcacagtccaagaagtgcttgaacatccatggatccggaacgcagagagagcaccaaatgtgaatcttggagataacgtcaggaccaagattcaacaattcttgttgatgaacaggttcaagaagaaagtcctcaggattgtagcggacaatctaccaaacgaggagatagcagcgatagtacagatgtttcaaacaatggacactgataagaatggtcacttgacttttgaggagctaagagatggactgaagaagattggacaagttgttcccgatggcgatgtgaagatgctaatggatgcagcggatacagatggaaatgggatgttgagctgtgatgagtttgtgacactctcaatacatttgaagagaatgggatgtgatgagcatttgcaggaagcattcaagtattttgacaagaacgggaacggatttatcgagctagatgagctcaaggtagctctttgcgatgataagctaggccacgctaacggtaacgaccagtggatcaaagatatcttctttgacgtcgacctcaacaaggatggacggataagctttgatgagtttaaggcaatgatgaaatcagggacggattggaaaatggcgtcgaggcagtactcgagggcgttgttgaatgctctaagcatcaagatgttcaaagaagattttggggacaatggtcctaagtcacattccatggagttccctatagcaaggaagagggctaagctgcttgatgctcccaagaacaaatcaatggagcttcagatctccaaaacctataaaccctcaggtctaagaaactaaagaagagaaaaaatgaacaagcaaaagactctttgattctttttaatgtgtttgtttttggtgctacaagtgcaaaaagtgtgatttaatgggcttaactctgcgttgttcatctttttccttaaaggtcgttaaacacattcatttaatttattaagttgtagcattaagaatggcgtcacatgtagtgtaaagttttccaagctgtgcaaac

SEQ ID NO: 98741 - protein, 582 aa, Arabidopsis thaliana
  peptide (1)..(582): Ceres Seq. ID no. 13601437
MGSCVSSPLKGSPFGKRPVRRRHSSNSRTSSVPRFDSSTNLSRRLIFQPPSRVLPEPIGDGIHLKYDLGKELGRGEFGVTHECIEISTRERFACKRISKEKLRTEIDVEDVRREVEIMRCLPKHPNIVSFKEAFEDKDAVYLVMEICEGGELFDRIVSRGHYTERAAASVAKTILEVVKVCHEHGVIHRDLKPENFLFSNGTETAQLKAIDFGLSIFFKPAQRFNEIVGSPYYMAPEVLRRNYGPEIDVWSAGVILYILLCGVPPFWAETEEGIAHAIVRGNIDFERDPWPKVSHEAKELVKNMLDANPYSRLTVQEVLEHPWIRNAERAPNVNLGDNVRTKIQQFLLMNRFKKKVLRIVADNLPNEEIAAIVQMFQTMDTDKNGHLTFEELRDGLKKIGQVVPDGDVKMLMDAADTDGNGMLSCDEFVTLSIHLKRMGCDEHLQEAFKYFDKNGNGFIELDELKVALCDDKLGHANGNDQWIKDIFFDVDLNKDGRISFDEFKAMMKSGTDWKMASRQYSRALLNALSIKMFKEDFGDNGPKSHSMEFPIARKRAKLLDAPKNKSMELQISKTYKPSGLRN

SEQ ID NO: 98742 - protein, 465 aa, Arabidopsis thaliana
  peptide (1)..(465): Ceres Seq. ID no. 13601438
MRCLPKHPNIVSFKEAFEDKDAVYLVMEICEGGELFDRIVSRGHYTERAAASVAKTILEVVKVCHEHGVIHRDLKPENFLFSNGTETAQLKAIDFGLSIFFKPAQRFNEIVGSPYYMAPEVLRRNYGPEIDVWSAGVILYILLCGVPPFWAETEEGIAHAIVRGNIDFERDPWPKVSHEAKELVKNMLDANPYSRLTVQEVLEHPWIRNAERAPNVNLGDNVRTKIQQFLLMNRFKKKVLRIVADNLPNEEIAAIVQMFQTMDTDKNGHLTFEELRDGLKKIGQVVPDGDVKMLMDAADTDGNGMLSCDEFVTLSIHLKRMGCDEHLQEAFKYFDKNGNGFIELDELKVALCDDKLGHANGNDQWIKDIFFDVDLNKDGRISFDEFKAMMKSGTDWKMASRQYSRALLNALSIKMFKEDFGDNGPKSHSMEFPIARKRAKLLDAPKNKSMELQISKTYKPSGLRN

SEQ ID NO: 98743 - protein, 439 aa, Arabidopsis thaliana
  peptide (1)..(439): Ceres Seq. ID no. 13601439
MEICEGGELFDRIVSRGHYTERAAASVAKTILEVVKVCHEHGVIHRDLKPENFLFSNGTETAQLKAIDFGLSIFFKPAQRFNEIVGSPYYMAPEVLRRNYGPEIDVWSAGVILYILLCGVPPFWAETEEGIAHAIVRGNIDFERDPWPKVSHEAKELVKNMLDANPYSRLTVQEVLEHPWIRNAERAPNVNLGDNVRTKIQQFLLMNRFKKKVLRIVADNLPNEEIAAIVQMFQTMDTDKNGHLTFEELRDGLKKIGQVVPDGDVKMLMDAADTDGNGMLSCDEFVTLSIHLKRMGCDEHLQEAFKYFDKNGNGFIELDELKVALCDDKLGHANGNDQWIKDIFFDVDLNKDGRISFDEFKAMMKSGTDWKMASRQYSRALLNALSIKMFKEDFGDNGPKSHSMEFPIARKRAKLLDAPKNKSMELQISKTYKPSGLRN

SEQ ID NO: 98744 - DNA, 1199 bp, Arabidopsis thaliana
  misc_feature (1)..(1199): Ceres Seq. ID no. 13601440
  misc_feature (1)..(1199): Ortholog of  Ceres SEQ ID NO 13593955 as cited in SEQ ID NO 54278
  misc_feature (1)..(1199): Ortholog of  Ceres SEQ ID NO 13597380 as cited in SEQ ID NO 64054
  misc_feature (1)..(1199): Ortholog of  Ceres SEQ ID NO 12625474 as cited in SEQ ID NO 64169
  misc_feature (1)..(1199): Ortholog of  Ceres SEQ ID NO 13597502 as cited in SEQ ID NO 64681
aaatccaccaaaaacaaaaaatgtcgacttctaaagccataaccttaactctcttcattgcaacaacattactagcgccctgcaacgcagccgcaaacgcaacaacgaagccgctcttcccagcgattctaatcttcggtgattcaaccgtcgatacaggaaacaacaactaccctttaccaacaatcttcagagctgaacactttccttacggcatggatcttccagacggaaaagctaacggaagattctcaaacggaaaacttatctccgacataatcgcaaccaaactcaacatcaaagagtttattcctcctttcttacaaccaaatctctccgaccaagacattctaaccggagtctgtttcgcatcagctggtgccggttacgacgacctgaccagtctctcgacacaagccattcgtgtctcggaacaaccaaacatgttcaagagttacattgctcgtctcaaaggtatcgtgggagacaagaaagcgatggagatcataaacaatgccttcgtggttgtgagtgcagggcctaacgatttcattttgaactattacgaaattccctcaaggcgtctcgagtatcctttcatttctggttaccaagactttattcttaagaggcttgaaaatttcgtgcgggagctttacagtttaggtgtccggaatgttttggttggaggtttaccgccaatggggtgtttaccgatccatatgactgctaaattccgcaacatttttagattctgcttggaacaccataacaaagactctgttttatacaatgagaaacttcagaatctcttgccccaaatcgaagcatctcttccaggaagcaaattcctttacgccgatgtctataatcctatgatggagatgatccaaaaccctagcaaatacgggttcaaagagacgaagagaggatgttgtggaacagggttcctggagacgagcttcatgtgtaatgttttttctcctgtgtgtcaaaatcggtcggagtttttgttctttgactcgattcatccatcggaagctacctataatgtcataggcaatcttctggatcctctaattcgtggaaagttccaggcttaagtcatcacgagttgcaaaactgacacaattaattttcttgtttctttaatgcgactagttgtggactttcgtttatgaatcaaatgtaactttggc

SEQ ID NO: 98745 - protein, 366 aa, Arabidopsis thaliana
  peptide (1)..(366): Ceres Seq. ID no. 13601441
IHQKQKMSTSKAITLTLFIATTLLAPCNAAANATTKPLFPAILIFGDSTVDTGNNNYPLPTIFRAEHFPYGMDLPDGKANGRFSNGKLISDIIATKLNIKEFIPPFLQPNLSDQDILTGVCFASAGAGYDDLTSLSTQAIRVSEQPNMFKSYIARLKGIVGDKKAMEIINNAFVVVSAGPNDFILNYYEIPSRRLEYPFISGYQDFILKRLENFVRELYSLGVRNVLVGGLPPMGCLPIHMTAKFRNIFRFCLEHHNKDSVLYNEKLQNLLPQIEASLPGSKFLYADVYNPMMEMIQNPSKYGFKETKRGCCGTGFLETSFMCNVFSPVCQNRSEFLFFDSIHPSEATYNVIGNLLDPLIRGKFQA

SEQ ID NO: 98746 - protein, 360 aa, Arabidopsis thaliana
  peptide (1)..(360): Ceres Seq. ID no. 13601442
MSTSKAITLTLFIATTLLAPCNAAANATTKPLFPAILIFGDSTVDTGNNNYPLPTIFRAEHFPYGMDLPDGKANGRFSNGKLISDIIATKLNIKEFIPPFLQPNLSDQDILTGVCFASAGAGYDDLTSLSTQAIRVSEQPNMFKSYIARLKGIVGDKKAMEIINNAFVVVSAGPNDFILNYYEIPSRRLEYPFISGYQDFILKRLENFVRELYSLGVRNVLVGGLPPMGCLPIHMTAKFRNIFRFCLEHHNKDSVLYNEKLQNLLPQIEASLPGSKFLYADVYNPMMEMIQNPSKYGFKETKRGCCGTGFLETSFMCNVFSPVCQNRSEFLFFDSIHPSEATYNVIGNLLDPLIRGKFQA

SEQ ID NO: 98747 - protein, 295 aa, Arabidopsis thaliana
  peptide (1)..(295): Ceres Seq. ID no. 13601443
MDLPDGKANGRFSNGKLISDIIATKLNIKEFIPPFLQPNLSDQDILTGVCFASAGAGYDDLTSLSTQAIRVSEQPNMFKSYIARLKGIVGDKKAMEIINNAFVVVSAGPNDFILNYYEIPSRRLEYPFISGYQDFILKRLENFVRELYSLGVRNVLVGGLPPMGCLPIHMTAKFRNIFRFCLEHHNKDSVLYNEKLQNLLPQIEASLPGSKFLYADVYNPMMEMIQNPSKYGFKETKRGCCGTGFLETSFMCNVFSPVCQNRSEFLFFDSIHPSEATYNVIGNLLDPLIRGKFQA

SEQ ID NO: 98748 - DNA, 611 bp, Arabidopsis thaliana
  misc_feature (1)..(611): Ceres Seq. ID no. 13601448
  misc_feature (1)..(611): Ortholog of  Ceres SEQ ID NO 13598758 as cited in SEQ ID NO 61555
agctaaaaccctaaagccctaaaatcaaaattacgctaaacagagaaggcgacaatggatcacatcgctgcggcggaagagcaaatcgtatcggagagacttcgaagaaagcttgaagaagttaatgtagctgctcagactcagctttctcctatccaagatcacatcaatttcacccttcagcaagcttatttcaaatgtgcatatgagtgctttgatagaagaagaaagcaagaggagataagtaactgcgtcgagcactgcagtgttcccgttgtcaaatctcaacagtatttcgagaacgaaatggctcaatttcaggaaagattgaacagatcactggtggtgtgtcaagacaagtttgaggcctcaaagctccagaagataaggcctgaagcggttaacgagatggagagttgtgtgcacaaatccattgaggaaaatctcaatacattaccacatattgtgcagagaatgaagacagcatttaacataaccaactaaaagctctcgtgaaaaaccttggattccagaacttgactagccatattgtttgaaaagaccttttcttttgtcttaatatgatctacaaatttgttttcctttttctt

SEQ ID NO: 98749 - protein, 149 aa, Arabidopsis thaliana; identical to SEQ ID NO: 35790
  peptide (1)..(149): Ceres Seq. ID no. 13601449

SEQ ID NO: 98750 - DNA, 1602 bp, Arabidopsis thaliana
  misc_feature (1)..(1602): Ceres Seq. ID no. 13601450
  misc_feature (1)..(1602): Ortholog of  Ceres SEQ ID NO 13594345 as cited in SEQ ID NO 58043
  misc_feature (1)..(1602): Ortholog of  Ceres SEQ ID NO 12614112 as cited in SEQ ID NO 60891
  misc_feature (1)..(1602): Ortholog of  Ceres SEQ ID NO 13597574 as cited in SEQ ID NO 64677
  misc_feature (1)..(1602): Ortholog of  Ceres SEQ ID NO 14302832 as cited in SEQ ID NO 64926
  misc_feature (1)..(1602): Ortholog of  Ceres SEQ ID NO 13662880 as cited in SEQ ID NO 65422
  misc_feature (1)..(1602): Ortholog of  Ceres SEQ ID NO 12779098 as cited in SEQ ID NO 67698
  misc_feature (1)..(1602): Ortholog of  Ceres SEQ ID NO 13596180 as cited in SEQ ID NO 67941
  misc_feature (1)..(1602): Ortholog of  Ceres SEQ ID NO 13591190 as cited in SEQ ID NO 68044
  misc_feature (1)..(1602): Ortholog of  Ceres SEQ ID NO 13596089 as cited in SEQ ID NO 68373
  misc_feature (1)..(1602): Ortholog of  Ceres SEQ ID NO 14313563 as cited in SEQ ID NO 68700
atatatccgataaatacttccgtcataacagagtaagagtttgtatgtaacaaatttcaacaaaaagaagagaaaaacaatgggagagaaagcgaaagcaaatgtgttagtcttctcatttccgatacaaggtcacataaaccctctcctccaattctcaaaacgcctactctctaaaaacgtcaacgtcacattcctcaccacttcctccacccacaactccatcctccgccgtgccatcaccggcggagccactgctcttcctctctcttttgtccccattgacgatggattcgaggaagatcacccatctacggacacatctcccgactacttcgcaaagttccaagaaaacgtatctcgaagcctctcagagcttatctcctcgatggacccaaaaccaaacgccgtcgtttacgactcgtgcctgccttatgtcctcgacgtttgccggaaacatcctggcgttgctgcggcgtcgtttttcactcagtcctccaccgtgaacgcgacctatattcatttcttgcgtggagagtttaaggagtttcaaaatgatgtcgttttgcctgcaatgcctccgctgaagggtaatgacttaccggtgtttctgtacgataacaatctctgccggccgttgtttgagctcattagtagccagttcgtgaatgttgacgacattgacttcttcttggttaactctttcgacgaactcgaagtcgaggtgctacaatggatgaaaaaccaatggccggtcaagaacataggaccgatgattccatcaatgtacttagacaaacgattagcaggtgacaaagactacggaatcaacctcttcaatgcccaagtcaacgaatgccttgattggcttgactcaaaaccgcccggttcagtgatctacgtgtcttttggaagcttggccgtcttaaaagacgatcaaatgatagaagtcgcggctggtctaaaacaaactggccataacttcttatgggttgttagagaaactgaaacaaagaagcttccaagcaattacatagaggacatttgtgacaagggattgatagtgaattggagtcctcaattacaagttcttgcacataaatcaatcggttgtttcatgactcattgcgggtggaattcgactttagaggcattgagcttaggagttgctttgataggaatgccggcttatagcgaccagccgactaatgctaagtttattgaagatgtgtggaaggttggggttagggttaaggcagatcaaaatgggtttgttccgaaggaagagattgtgagatgtgttggagaagttatggaagatatgtcggagaaagggaaggagattagaaaaaatgctcggaggttgatggagtttgcaagggaagctttgtctgatggaggaaattctgataagaatattgatgagtttgttgctaaaattgtgaggtaaagtgactgtatgattaatctttgatgcttaattaataatgtgtttttaagagttttcaaaggacgaaatgtttagaatgtaacttgttggtttctttcaaagttatttatgatgtgaacaatgtgatctaaaatggtgttgaacttgggaaa

SEQ ID NO: 98751 - protein, 456 aa, Arabidopsis thaliana; identical to SEQ ID NO: 40585
  peptide (1)..(456): Ceres Seq. ID no. 13601451

SEQ ID NO: 98752 - protein, 353 aa, Arabidopsis thaliana; identical to SEQ ID NO: 40586
  peptide (1)..(353): Ceres Seq. ID no. 13601452

SEQ ID NO: 98753 - protein, 291 aa, Arabidopsis thaliana; identical to SEQ ID NO: 40587
  peptide (1)..(291): Ceres Seq. ID no. 13601453

SEQ ID NO: 98754 - DNA, 1421 bp, Arabidopsis thaliana
  misc_feature (1)..(1421): Ceres Seq. ID no. 13601454
  misc_feature (1)..(1421): Ortholog of  Ceres SEQ ID NO 14314300 as cited in SEQ ID NO 57386
  misc_feature (1)..(1421): Ortholog of  Ceres SEQ ID NO 14311993 as cited in SEQ ID NO 60371
  misc_feature (1)..(1421): Ortholog of  Ceres SEQ ID NO 13596509 as cited in SEQ ID NO 62004
  misc_feature (1)..(1421): Ortholog of  Ceres SEQ ID NO 13659971 as cited in SEQ ID NO 67565
  misc_feature (1)..(1421): Ortholog of  Ceres SEQ ID NO 13500385 as cited in SEQ ID NO 67583
atcatcgatatatacaccgatacatacaccgacacatacgcatgagtgtaagtatacgctcaagtgtgggagcaatctcagatccctccatgaaaacaacgctttataagatgactcattttctgaaacgaactcaactccaagtgtgacacattctcaacgagagatcgtgatcgtacttatatacacacacgcacacttgcaaagcttgggaggaagaagtgatggacaagtatgaggttgtgaaggatttgggagctggaaattttggtgtggctcgtcttcttagacacaaagagaccaaagagctcgttgctatgaaatacattgagagaggtcgcaagattgatgagaatgtggcaagagagattatcaatcatagatcacttaggcatcctaatatcatcagattcaaggaggtgattctgactccaactcatcttgcaattgtaatggagtatgcttctggaggagagctctttgaaagaatctgtaatgctggtagattcagtgaagctgaggctagatacttctttcagcagctgatttgtggcgtggattactgtcattcactgcaaatatgtcatagagatttgaagcttgagaatacactgcttgatggtagtccagccccgcttttgaaaatctgtgattttggttactccaagtcatctctgcttcactctagacctaaatcaactgttggtactccagcttatatcgcacctgaagttctttcccgaagagaatatgacggaaagcatgcggatgtttggtcctgtggtgtgactctttatgtgatgttagttggaggttatccgtttgaagacccggatgatccgagaaacttcaggaaaacaatccaacgtataatggctgtccagtacaagatcccggattacgttcatatatcgcaggagtgcagacaccttctctctcgcatatttgtcactaattcagctaagagaatcacacttaaagagatcaagaagcatccatggtacttaaagaacttgccaaaggagcttacagagcctgctcaagcggcgtactacaagagagaaaccccaagcttttccctccaaagcgtagaggacataatgaagatcgttggagaagccaggaatccagctccgtcttctaatgccgtcaagggctttgatgatgatgaggaagatgtggaggacgaggttgaagaagaagaagaagaagaagaagaagaggaggaagaagaggaagaggaagaagatgaatacgagaagcatgttaaagaggcccattcttgtcaagagcctcccaaagcttaagaaactctcactctgttgtgtaatattcaatctccttgtatctttacgtttatgtgaattcgaagtttcaaaactttatctacgcaattgaccaattagttatcatagcatttg

SEQ ID NO: 98755 - protein, 360 aa, Arabidopsis thaliana
  peptide (1)..(360): Ceres Seq. ID no. 13601455
MDKYEVVKDLGAGNFGVARLLRHKETKELVAMKYIERGRKIDENVAREIINHRSLRHPNIIRFKEVILTPTHLAIVMEYASGGELFERICNAGRFSEAEARYFFQQLICGVDYCHSLQICHRDLKLENTLLDGSPAPLLKICDFGYSKSSLLHSRPKSTVGTPAYIAPEVLSRREYDGKHADVWSCGVTLYVMLVGGYPFEDPDDPRNFRKTIQRIMAVQYKIPDYVHISQECRHLLSRIFVTNSAKRITLKEIKKHPWYLKNLPKELTEPAQAAYYKRETPSFSLQSVEDIMKIVGEARNPAPSSNAVKGFDDDEEDVEDEVEEEEEEEEEEEEEEEEEEDEYEKHVKEAHSCQEPPKA

SEQ ID NO: 98756 - protein, 329 aa, Arabidopsis thaliana
  peptide (1)..(329): Ceres Seq. ID no. 13601456
MKYIERGRKIDENVAREIINHRSLRHPNIIRFKEVILTPTHLAIVMEYASGGELFERICNAGRFSEAEARYFFQQLICGVDYCHSLQICHRDLKLENTLLDGSPAPLLKICDFGYSKSSLLHSRPKSTVGTPAYIAPEVLSRREYDGKHADVWSCGVTLYVMLVGGYPFEDPDDPRNFRKTIQRIMAVQYKIPDYVHISQECRHLLSRIFVTNSAKRITLKEIKKHPWYLKNLPKELTEPAQAAYYKRETPSFSLQSVEDIMKIVGEARNPAPSSNAVKGFDDDEEDVEDEVEEEEEEEEEEEEEEEEEEDEYEKHVKEAHSCQEPPKA

SEQ ID NO: 98757 - protein, 284 aa, Arabidopsis thaliana
  peptide (1)..(284): Ceres Seq. ID no. 13601457
MEYASGGELFERICNAGRFSEAEARYFFQQLICGVDYCHSLQICHRDLKLENTLLDGSPAPLLKICDFGYSKSSLLHSRPKSTVGTPAYIAPEVLSRREYDGKHADVWSCGVTLYVMLVGGYPFEDPDDPRNFRKTIQRIMAVQYKIPDYVHISQECRHLLSRIFVTNSAKRITLKEIKKHPWYLKNLPKELTEPAQAAYYKRETPSFSLQSVEDIMKIVGEARNPAPSSNAVKGFDDDEEDVEDEVEEEEEEEEEEEEEEEEEEDEYEKHVKEAHSCQEPPKA

SEQ ID NO: 98758 - DNA, 1680 bp, Arabidopsis thaliana
  misc_feature (1)..(1680): Ceres Seq. ID no. 13601458
  misc_feature (1)..(1680): Ortholog of  Ceres SEQ ID NO 13596216 as cited in SEQ ID NO 68515
tgaatctaaaaccactcagctctccgcaccatgtgaaaggttggtgtagtggcaagaactctttcgaatctgaacgccttaagctctgagagacgagcattttccagaaaattcccattacctaatccccaggattcgatgaacccagaaatgatggttttcgaaaggctctagctttctcaaatccagattttgctgaggagctcgttgaaagaatgcaaaatagaccatctctctcttgtcctttgtctttcagatcgtttctctttcaacgtgatattagagtacaatactagataccgtgaggtcctttgtattattggaccttgagttgtcttgtctaagtgggataacctttctagtgaacattttcttggtcagttcatctagtgaactttttttggtctcgtgaagaaatagaagttttctttttcgggcttgatgggtaaagagaatcagttggagacaacaaattgtggagtcaatgatcacgattgtccacccgtcaagaacgaggaactagcagctgaggcgcgttatagtacagacagtgactcgggtttgccaacctgtcgtgtatgccattctgcagaatccgacagacgaggagataccgccttggggtttttggggattacccctccggttccagaagctcgtaaaagcaatgtagatggaaccgctgatgatgtcagcaaagctacagagtctgagctgaagaattctgttgtcaaaagcaatggaagggaatctggcttcatcgaattaacaagtcctgatgcggaagttttcatttgcacaaatgatatagaaatgggaatccagcagcatcaggatgcattgcttgagcttggatgttcttgcaaaaacgagcttgctttggtacactacgcttgcgcgctcaagtggtttctcaaccatggatccaccgtgtgtgaaatctgtggacatcctgcagaaaatataaagactgctgatttcaacaaagtggtcattgccttgagagattacacagcaataagagaaagaactgctgatggaggagatcaaatccctgtattaccggtgaatacagattcaaccattgattcagatgaagttgctgtcattcgaaggcaacgacttagtgagataacgtcatggtttggtccccattccctgaacaacaacaacaacaacaatagttctgttgcggctatccctgaccaacctttaggtgttgtgaacttcgacatcttacctatggaaaaccgtgcaactaaatgggctgtggaaggtactgggattctacttgctacaggtttactcactgttactttggtctggctcattgcccctcgtgttggaaagaaaactgctaggagcggacttcacatacttcttggtggtctctgtgctttaacaatagtcatcttcttcagatttgttgtgctcactagaatcaggtatggtcctgcacgctactgggcaatcttattcatcttctggtttcttgtgtttggtatttgggcttctcgttctaatgcttctcacaatagcccttgaatccaccatctctctcaatctctcatgtctctctatctatctgagtctgtgtattctttctcttggagaaaaatgtacattgcttcattaaagaagaaataagctcatgcttcattgaatatatatatgattcat

SEQ ID NO: 98759 - protein, 367 aa, Arabidopsis thaliana
  peptide (1)..(367): Ceres Seq. ID no. 13601459
MGKENQLETTNCGVNDHDCPPVKNEELAAEARYSTDSDSGLPTCRVCHSAESDRRGDTALGFLGITPPVPEARKSNVDGTADDVSKATESELKNSVVKSNGRESGFIELTSPDAEVFICTNDIEMGIQQHQDALLELGCSCKNELALVHYACALKWFLNHGSTVCEICGHPAENIKTADFNKVVIALRDYTAIRERTADGGDQIPVLPVNTDSTIDSDEVAVIRRQRLSEITSWFGPHSLNNNNNNNSSVAAIPDQPLGVVNFDILPMENRATKWAVEGTGILLATGLLTVTLVWLIAPRVGKKTARSGLHILLGGLCALTIVIFFRFVVLTRIRYGPARYWAILFIFWFLVFGIWASRSNASHNSP

SEQ ID NO: 98760 - protein, 243 aa, Arabidopsis thaliana
  peptide (1)..(243): Ceres Seq. ID no. 13601460
MGIQQHQDALLELGCSCKNELALVHYACALKWFLNHGSTVCEICGHPAENIKTADFNKVVIALRDYTAIRERTADGGDQIPVLPVNTDSTIDSDEVAVIRRQRLSEITSWFGPHSLNNNNNNNSSVAAIPDQPLGVVNFDILPMENRATKWAVEGTGILLATGLLTVTLVWLIAPRVGKKTARSGLHILLGGLCALTIVIFFRFVVLTRIRYGPARYWAILFIFWFLVFGIWASRSNASHNSP

SEQ ID NO: 98761 - DNA, 1801 bp, Arabidopsis thaliana
  misc_feature (1)..(1801): Ceres Seq. ID no. 13601461
  misc_feature (1)..(1801): Ortholog of  Ceres SEQ ID NO 12625335 as cited in SEQ ID NO 63326
ccgctttctctctctgtctttccttgttcaaccctcgagagattacggatagtgaaagagaagctacaaaatttcccaatttatcaaaaaatagaaatttcttacttttttcaaaattcatttctccccaaaaaaaatatcttgtgaaaactgcaactgtgatccatggcggaggatatggctgccgacgaagttacggctcctcctcgtaaggttcttatcatctccgctggtgctagccactccgtcgctcttctctctggtgacattgtttgttcttggggtcgaggagaggatggacagttaggtcatggcgatgcagaggatcgaccttctccgactcagcttagcgctttagatggccaccaaattgtttccgttacctgtggtgctgatcacactgttgcttattcacaatcaggcatggaagtctacagttggggatggggtgattttgggagattaggccatggtaactcaagcgacttgtttactccgctaccaatcaaagcattgcacggtattcggatcaagcagattgcttgtggggatagtcattgtttggctgtcactatggaaggagaggtccagagttggggccgcaaccagaatggtcaacttggtctgggggacaccgaagattctctagtgcctcagaagattcaagcctttgagggaatacgaatcaaaatggttgctgctggtgcagaacacactgctgcagttacagaagatggtgacctctatggatggggctggggaagatacggaaatttgggattaggtgaccggactgaccgcttagttcctgaaagagttacctctactggtggtgagaaaatgtcaatggttgcttgtggatggcggcacacaatatcagtttcctactctggagcattgtatacttatggatggagcaaatatggacagctaggacatggagacttggaggatcaccttattcctcacaaactggaagcactgagcaacagttttatctcccagatttcgggaggttggagacatacaatggcattgacttcagatggaaaactatatggatggggttggaataagtttggacaagtaggagtcggcaataatttagatcagtgttctcctgtgcaagtgcgatttcccgatgatcagaaagtagttcaagtctcatgtggatggagacataccttggctgtcactgaaagaaataacgtgtttgcttggggtagaggtacaaatggacagctcggcattggagagtcggttgacaggaactttcccaagattatagaggcactcagcgtcgatggagcaagtggacaacatatagaatcttctaatatcgatccatcttcagggaaaagctgggtgtcgcctgcagagagatatgcagttgttcctgatgaaacgggcctaacggatggttcaagcaaaggtaatggaggtgatatcagtgttccacaaactgatgtcaagcgtgtacgaatttgagcctgagtcaattccgttttttttttacttccggttcttccgttggattcgaaggtttttcagtgatctcttttgggttgaggtttgtactaagagtacgtctgtctagtttgggattgtactttttgttgttgttgttagtttgtaacttgtgatgcttccctccccctagctctcttattacatgggcgttgtaaactgtgtgtactactactactagtctctagggtatgtactttttttttcctcaccataataataccttctggttctatatctttcatttcttaaaaagttttctgttttttccttc

SEQ ID NO: 98762 - protein, 440 aa, Arabidopsis thaliana; identical to SEQ ID NO: 98159
  peptide (1)..(440): Ceres Seq. ID no. 13601462

SEQ ID NO: 98763 - protein, 436 aa, Arabidopsis thaliana; identical to SEQ ID NO: 98160
  peptide (1)..(436): Ceres Seq. ID no. 13601463

SEQ ID NO: 98764 - protein, 354 aa, Arabidopsis thaliana; identical to SEQ ID NO: 98161
  peptide (1)..(354): Ceres Seq. ID no. 13601464

SEQ ID NO: 98765 - DNA, 493 bp, Arabidopsis thaliana
  misc_feature (1)..(493): Ceres Seq. ID no. 13601467
  misc_feature (1)..(493): Ortholog of  Ceres SEQ ID NO 12337178 as cited in SEQ ID NO 20526
attctgcagaagacgcgtcttctttcttcttcggtaaacttcaaatcagaagcgaagaagagatcaaatcaatctgatcgtagatgggttgtttcagttgcttcgacggaacccaaaaggaacagcgtaaggaagaagagagacaagcctccgccgaagctcgtgccaaagccgccgaagctgcccagcgacggaaagagcagtttgataagtctgcagctggaagagctgcacaagctcaattacaacaaatggctaaacaatctgcaaatactaacaaaggagagcctgttcttaagtggcaaatgacgtagtgatgagtcctggtttcaaaaggaatcaatttgtgcgatttggttctttgtaaattgtgtgttcttcaatgtttgcaatactttggttatgtgaattgaagcttattttcttccttattcatctgattatcttttgacttttgtaaaacaaaaaagaaataacagagtacaatgttaag

SEQ ID NO: 98766 - protein, 102 aa, Arabidopsis thaliana
  peptide (1)..(102): Ceres Seq. ID no. 13601468
ILQKTRLLSSSVNFKSEAKKRSNQSDRRWVVSVASTEPKRNSVRKKRDKPPPKLVPKPPKLPSDGKSSLISLQLEELHKLNYNKWLNNLQILTKESLFLSGK

SEQ ID NO: 98767 - protein, 76 aa, Arabidopsis thaliana; identical to SEQ ID NO: 23164
  peptide (1)..(76): Ceres Seq. ID no. 13601469

SEQ ID NO: 98768 - DNA, 1251 bp, Arabidopsis thaliana
  misc_feature (1)..(1251): Ceres Seq. ID no. 13601474
  misc_feature (1)..(1251): Ortholog of  Ceres SEQ ID NO 15178181 as cited in SEQ ID NO 58740
  misc_feature (1)..(1251): Ortholog of  Ceres SEQ ID NO 12614739 as cited in SEQ ID NO 68587
aacttcgtggtactcttttgctttacccatttttcaatgtcttacgatgagatgctttctgctgcgaagaaagctgtttctctcgctgctcgtctcagcaacgaagtgaggaaatctctgttggtaactgacgtttggaacaaatcagatgatagtcctgttactgttgctgattatggttcgcaggcggtggttagccttgtactggaaagggaactccagaatgaacctgtgtctttagtggctgaagaggattctggtgagttaaggaagattgctgctgagaccgttttggctcgtattacagagcttgtcaaagatactcttgcaagtgatgaatcatatgctattgcttctcctttgacttcggatgatgtgctcaacgctatagatcgtggtaaatcagaaggaggtcctaagggtcgccactggatcttggatcctattggtggcactagaggatttataagaggagaacaatatgcaataggattagcattgttggtggaaggcaaagtagtactaggtgtaatggcttgtcctaagcttccattggcatcaactgctggtaatgcactcaagtctttacctgaaaaagttggttgccttttctatggttcggttggcaatgggacttatgtccagtctctcagtgtcgactctcttcctgcgaaggtggaggttagcagcatagatgatcctgcgaaagcgagtttcttcgagtcataccacacacctgtccccatccataacaccattgctacgaaattggggataaaagaatctccaatcaagatcaacagccagactaagtatgcagctttatctagaggagatggagaggtttacttgaggtttactcgcaaagcaagacccgaatcaatatggaatcacgctgctggctcaatcattgtttcagaagcaggagggaaagtgactgatgcagcagggaatccattggacttttcgaaagggaagtatcttgattacaagagaggaatcgtcgttacgacgcagaaactgttgccaaggcttttaacagcagtaagagaatcaattaaagaagaagaagaggaagaagaaaaagctgcttctctaaaacttcactaacacgcaactgtaatatacttattattgttgtctttgggtatactctgttgtctctgtgtttttcacagtctatttattgaaaaccagaaacaaaaaaaaaactcacctttgatatatataagaaacactaattctcttttg

SEQ ID NO: 98769 - protein, 369 aa, Arabidopsis thaliana; identical to SEQ ID NO: 38592
  peptide (1)..(369): Ceres Seq. ID no. 13601475

SEQ ID NO: 98770 - protein, 357 aa, Arabidopsis thaliana; identical to SEQ ID NO: 38593
  peptide (1)..(357): Ceres Seq. ID no. 13601476

SEQ ID NO: 98771 - protein, 352 aa, Arabidopsis thaliana; identical to SEQ ID NO: 38594
  peptide (1)..(352): Ceres Seq. ID no. 13601477

SEQ ID NO: 98772 - DNA, 845 bp, Arabidopsis thaliana
  misc_feature (1)..(845): Ceres Seq. ID no. 13601478
  misc_feature (1)..(845): Ortholog of  Ceres SEQ ID NO 13638893 as cited in SEQ ID NO 55835
  misc_feature (1)..(845): Ortholog of  Ceres SEQ ID NO 13661656 as cited in SEQ ID NO 61607
  misc_feature (1)..(845): Ortholog of  Ceres SEQ ID NO 14309331 as cited in SEQ ID NO 0
ctcattttccaccattaaaaaacctctctactctctcctcaaaaactcaaaagagcaaaaaaaagagaagaagaatcaaaatcccacacaatggcaacacactcttccttcaccgcaacaacacctctctttctcatcgttcttctatccctatcctccgtctcagttctcggcgcatctcaccaccacgcaacggcgccggctccgtctgtagactgttcgactctcatactcaacatggctgactgtttatccttcgtttcgagcggaggcacggtggcgaaaccggaaggtacatgttgctctggtcttaagacggtgcttaaagctgactctcagtgtctatgtgaagcgtttaagagcagtgcttctcttggagttactttgaatatcactaaggcttctactcttcccgccgcatgcaagcttcacgctccttctatcgctacttgtggattgtctgttgctccaagtactgctccaggtcttgctccaggagtagctgctgctggacctgagacagccggatttctagctccaaatccttcttcagggaacgatggatcttctttgattccgacctcgttcacaactgtactcagtgccgtactgttcgttttgttcttctctagtgcgtaaaaaaaaacctgaatcttttttcaccagctagatttggctgtatgaaattgattaatggtttttattagggttaatctatgtatgttttggagtgttctgtttttagaccatatcggtttctctattactagcgtttactcttttagtttatgttattactttgtctcacaacattggtccttttattcgatctatcgcttattcct

SEQ ID NO: 98773 - protein, 182 aa, Arabidopsis thaliana; identical to SEQ ID NO: 38534
  peptide (1)..(182): Ceres Seq. ID no. 13601479

SEQ ID NO: 98774 - protein, 133 aa, Arabidopsis thaliana; identical to SEQ ID NO: 38535
  peptide (1)..(133): Ceres Seq. ID no. 13601480

SEQ ID NO: 98775 - DNA, 1234 bp, Arabidopsis thaliana
  misc_feature (1)..(1234): Ceres Seq. ID no. 13601481
  misc_feature (1)..(1234): Ortholog of  Ceres SEQ ID NO 13598714 as cited in SEQ ID NO 62656
  misc_feature (1)..(1234): Ortholog of  Ceres SEQ ID NO 13597519 as cited in SEQ ID NO 64759
  misc_feature (1)..(1234): Ortholog of  Ceres SEQ ID NO 13597870 as cited in SEQ ID NO 64982
  misc_feature (1)..(1234): Ortholog of  Ceres SEQ ID NO 13656123 as cited in SEQ ID NO 65212
  misc_feature (1)..(1234): Ortholog of  Ceres SEQ ID NO 13595926 as cited in SEQ ID NO 67778
acaacaaacacaacttctacaagactcaaatagtttctatttaattactaaaaagaaaaatgggtcgtggttacaatttgctattcgttctagtaacgtttttagtattggttgcagctgtaaccgcacaagggaaccgtggctcaaacagcggtggtggtcgaagaccacatgttgggttttatgggaatagatgccgaaacgtagagtctattgtgagatctgtagttcagtctcatgtccggtctatcccggctaatgcacctggaattttgcgaatgcatttccacgattgctttgtccatggctgcgatggctcggttctcctcgctggtaacacctcagagagaaccgcagttccgaaccgttcattgagagggttcgaagttattgaagaagctaaggctcggcttgagaaggcttgtcctcgtaccgtttcttgtgctgatattctcacccttgcagcccgagacgccgtcgttttgaccggtggacaacgctgggaagtgcccttgggacgtctcgacggccgaatctcgcaagcctcagacgtgaacttgcccggaccaagcgactccgttgctaagcagaagcaagacttcgctgctaaaactctcaacacattagacctcgtgactcttgttggcggacacacaataggaactgctggctgcggtctagtaaggggaaggttcgttaacttcaacggcacaggacaacctgacccatcaatcgacccgagttttgtgccgctgattctggctcagtgccctcaaaatggaggcacccgagtggagttagacgagggaagtgttgacaagtttgacacatcgttcctaaggaaggtgacgtcaagtcgcgtggttctccaatccgatctagtcctatggaaggatcccgagacccgagccatcattgaacgtttattaggattacgccgaccatccttgaggttcggaaccgagttcgggaagtcgatggtcaaaatgagtctcatagaagttaagactggatcagatggggagattcgtcgggtttgttccgccatcaactaagatttaaaaaaacacaaatgtgagctttgtttttcatttatgaattcgttaattaataatcacttgttttaaataaaagcttgctacagcattttgtggtcgatggttacgttttgattttcaagtgtaagattgtacttgtaaacaaaaaatgtattatataaaagtgttatttgttt

SEQ ID NO: 98776 - protein, 331 aa, Arabidopsis thaliana; identical to SEQ ID NO: 26687
  peptide (1)..(331): Ceres Seq. ID no. 13601482

SEQ ID NO: 98777 - protein, 258 aa, Arabidopsis thaliana; identical to SEQ ID NO: 26688
  peptide (1)..(258): Ceres Seq. ID no. 13601483

SEQ ID NO: 98778 - DNA, 648 bp, Arabidopsis thaliana
  misc_feature (1)..(648): Ceres Seq. ID no. 13601491
  misc_feature (1)..(648): Ortholog of  Ceres SEQ ID NO 12635845 as cited in SEQ ID NO 0
tttagttgtttttccgatcgatctgcgagtcgagtagtttttttatttgccggcgccgggagagatcctttgatctttttccgatggaggagcaattcggcgggagcgatgagagatggaaaggatcattggagaatataacggagatggcatcgaatctcgattcgcttcagaaacttctcctcaagaaagcagtcttcgttgaagaagacactttctctagagcttctctcgtctccgagcaagcccgaacaatcaaggttcttgagcaaagagtacaaacactagaaagagaactagatgctgccattacagctgctgctcatgctcggtctgagaaacgccaagctgagtcctctcaaaaggctgctgaatcacgtgcccaagatgtcacaaaagagcttgaaaacaccacaaaggttttcaagctgcatatggaagagcttcgaggaatgcaagaacagatatccaaacgcgataacgagatcaaactcttagaagctataatccaaacgctcggcggcaaagagcggttgggaaaaagcgacgtgaatggatgatgatgatgcgttttttcacttgtaaaggtttgtactcctgagtttgtggagatgtatcacttcgaagataaatgtatttttgtctgtc

SEQ ID NO: 98779 - protein, 158 aa, Arabidopsis thaliana; identical to SEQ ID NO: 30138
  peptide (1)..(158): Ceres Seq. ID no. 13601492

SEQ ID NO: 98780 - protein, 137 aa, Arabidopsis thaliana; identical to SEQ ID NO: 30139
  peptide (1)..(137): Ceres Seq. ID no. 13601493

SEQ ID NO: 98781 - DNA, 647 bp, Arabidopsis thaliana
  misc_feature (1)..(647): Ceres Seq. ID no. 13601497
  misc_feature (1)..(647): Ortholog of  Ceres SEQ ID NO 12609890 as cited in SEQ ID NO 51792
  misc_feature (1)..(647): Ortholog of  Ceres SEQ ID NO 12597253 as cited in SEQ ID NO 62959
  misc_feature (1)..(647): Ortholog of  Ceres SEQ ID NO 15173341 as cited in SEQ ID NO 63800
  misc_feature (1)..(647): Ortholog of  Ceres SEQ ID NO 12635416 as cited in SEQ ID NO 0
  misc_feature (1)..(647): Ortholog of  Ceres SEQ ID NO 12635564 as cited in SEQ ID NO 0
  misc_feature (1)..(647): Ortholog of  Ceres SEQ ID NO 12636917 as cited in SEQ ID NO 0
  misc_feature (1)..(647): Ortholog of  Ceres SEQ ID NO 14309430 as cited in SEQ ID NO 0
aaatcacaaatcttcaacttccgatactttcaatctctctaaactctcaatttcagtaatcgataaccgtagcaatggaatccaccggaaaagtgaagaaagctttcggaggaagaaaaccacctggtgccccaaaaaccaaatcggtttcgaaatcgatgaaagccggtcttcaattcccagtgggaagaatcactcgtttcctgaagaaaggacgatacgctcagagacttggtggtggtgctccggtttacatggccgccgttcttgaatacctcgccgcagaagttctggagcttgctggtaacgctgcgagagataacaagaaatcaaggataattccgaggcatcttcttctcgcgataaggaacgatgaagaattggggaaacttctgagtggtgtcacaatcgctcacggtggtgttttgcctaacatcaactctgttctattgcctaagaagtctgccactaaaccagctgaagaaaaggctaccaaatcaccagtcaagtctccaaagaaagcttaatctgctagagttttcgttgctagtttgtgtttgagctctggtgaatgtagaaatttgaagcttttggatcttagtttctatgtatttggtgatttagaatgttgttcaaaatccttttcc

SEQ ID NO: 98782 - protein, 150 aa, Arabidopsis thaliana; identical to SEQ ID NO: 31039
  peptide (1)..(150): Ceres Seq. ID no. 13601498

SEQ ID NO: 98783 - protein, 122 aa, Arabidopsis thaliana; identical to SEQ ID NO: 31040
  peptide (1)..(122): Ceres Seq. ID no. 13601499

SEQ ID NO: 98784 - protein, 90 aa, Arabidopsis thaliana; identical to SEQ ID NO: 31041
  peptide (1)..(90): Ceres Seq. ID no. 13601500

SEQ ID NO: 98785 - DNA, 1119 bp, Arabidopsis thaliana
  misc_feature (1)..(1119): Ceres Seq. ID no. 13601501
  misc_feature (1)..(1119): Ortholog of  Ceres SEQ ID NO 13581848 as cited in SEQ ID NO 51340
  misc_feature (1)..(1119): Ortholog of  Ceres SEQ ID NO 13595392 as cited in SEQ ID NO 56164
  misc_feature (1)..(1119): Ortholog of  Ceres SEQ ID NO 14316412 as cited in SEQ ID NO 59209
  misc_feature (1)..(1119): Ortholog of  Ceres SEQ ID NO 12618341 as cited in SEQ ID NO 64256
attgtaacttgtaaccagtgtcggctaatttcgacttttgtagatctttttctgctctttctctctctctctctctctctctctctctctctctctctcttgtattatttctatctcccccgccgtcgaaagagaaacgtcgatcggagaacctttgaaatgtcgactggattagatatgtctctcgacgacatgatcgccaagaaccgtaagtctcgtggtggagccggccccgctcgtggaaccggatccggatccggaccgggtccgactcgccgcaacaaccctaatcggaaatcaacccgatctgctccataccaatcagccaaggcgccggagtccacctggggtcacgacatgttctccgatagatctgaagatcaccgatcgggacgttcctccgccggaatcgaaactggaaccaagctctacatttccaatttggattacggtgtcatgaacgaagacatcaaggaactgtttgctgaagttggagaacttaaacgctacacagttcattttgatagaagtggaagatcaaagggaactgctgaagtagtgtattctcggcgtggcgatgcactcgcagctgtgaagaagtataatgatgttcagctggatggaaaacccatgaagatagagattgtgggcactaatcttcaaactgctgcagccccgtctggtagacctgcgaatggaaactccaatggtgctccatggagaggaggacaagggagaggaggtcaacaacgaggtggtggacgaggaggcggtggccgaggtggtggtggtcgtggtaggcgtcctggtaagggccctgcagagaagatttctgcggaagatcttgatgcggatcttgataagtaccattctggagatatggagacaaactaaggaacgtgactgatcttctcaaaccggtaggggttttaggaggaagagaatcgagaaaatgtttgccagaggctttaccacttagcgcctttttggctgtgttgttcatttgtttcattagaatgactttacagaattgagaatatgtgttatttaaagttgttgtctatcttaataccctcaagtgaaaggcagaggaaggaataccaatttcgtttacagatc

SEQ ID NO: 98786 - protein, 297 aa, Arabidopsis thaliana
  peptide (1)..(297): Ceres Seq. ID no. 13601502
IVTCNQCRLISTFVDLFLLFLSLSLSLSLSLSLLYYFYLPRRRKRNVDRRTFEMSTGLDMSLDDMIAKNRKSRGGAGPARGTGSGSGPGPTRRNNPNRKSTRSAPYQSAKAPESTWGHDMFSDRSEDHRSGRSSAGIETGTKLYISNLDYGVMNEDIKELFAEVGELKRYTVHFDRSGRSKGTAEVVYSRRGDALAAVKKYNDVQLDGKPMKIEIVGTNLQTAAAPSGRPANGNSNGAPWRGGQGRGGQQRGGGRGGGGRGGGGRGRRPGKGPAEKISAEDLDADLDKYHSGDMETN

SEQ ID NO: 98787 - protein, 244 aa, Arabidopsis thaliana; identical to SEQ ID NO: 20888
  peptide (1)..(244): Ceres Seq. ID no. 13601503

SEQ ID NO: 98788 - protein, 238 aa, Arabidopsis thaliana; identical to SEQ ID NO: 20889
  peptide (1)..(238): Ceres Seq. ID no. 13601504

SEQ ID NO: 98789 - DNA, 976 bp, Arabidopsis thaliana
  misc_feature (1)..(976): Ceres Seq. ID no. 13601511
  misc_feature (1)..(976): Ortholog of  Ceres SEQ ID NO 15173410 as cited in SEQ ID NO 61812
acacaaacaaaatatcaacactcttgaaaacagagccatggaacattctctcatcatcctcctcttcaccgtcctcctcctcctcaccaccactcccggaatcctatctcagccctctccagccgtcgctccggccccaccaggacccacaaacgttaccaaaatcctagagaaagctggtcaattcaccgtcttcatccgactcctcaaatccactggagtcgctaaccaactctacggccaactaaacaactccgacaatggaatcactatattcgcaccgagtgattcctcgttcaccggtctcaaagccgggaccctaaattcgttaaccgatgagcaacaagtagagcttattcagtttcatgtcataccaagttacgtctcttcctcaaacttccaaacaataagtaaccctctccggactcaggccggtgactccgccgatggacattttcctctcaacgttaccaccagtggcaataccgtaaatatcacgtccggcgtaaccaacaccaccgtctccggcaatgtctacagcgatggacagctcgctgtttatcaggtcgataaggttttgcttccacaacaagttttcgatcctcgtcctcctgctccggctccggctccgtctgtatcgaaatcaaagaagaagaaggatgacagtgatagttccagtgatgattctccggcggatgcttcgtttgctttgcgtaatgttggttctgtgtgtgatgcggtgtcgttttgcgtcatgagtgtaatgctcgcatggttttatttgtgatgaaaagctttttttttttttgtgctgataaattgttattttttattactcatgattttctgccatgtgggtgattttggggatatatttgtgtcttggttttcatacgattttgtgttaatcaatccatttgttttttatattttcgtttatttttattaatacaaatcatattttccgttttcgtgc

SEQ ID NO: 98790 - protein, 261 aa, Arabidopsis thaliana
  peptide (1)..(261): Ceres Seq. ID no. 13601512
HKQNINTLENRAMEHSLIILLFTVLLLLTTTPGILSQPSPAVAPAPPGPTNVTKILEKAGQFTVFIRLLKSTGVANQLYGQLNNSDNGITIFAPSDSSFTGLKAGTLNSLTDEQQVELIQFHVIPSYVSSSNFQTISNPLRTQAGDSADGHFPLNVTTSGNTVNITSGVTNTTVSGNVYSDGQLAVYQVDKVLLPQQVFDPRPPAPAPAPSVSKSKKKKDDSDSSSDDSPADASFALRNVGSVCDAVSFCVMSVMLAWFYL

SEQ ID NO: 98791 - protein, 249 aa, Arabidopsis thaliana
  peptide (1)..(249): Ceres Seq. ID no. 13601513
MEHSLIILLFTVLLLLTTTPGILSQPSPAVAPAPPGPTNVTKILEKAGQFTVFIRLLKSTGVANQLYGQLNNSDNGITIFAPSDSSFTGLKAGTLNSLTDEQQVELIQFHVIPSYVSSSNFQTISNPLRTQAGDSADGHFPLNVTTSGNTVNITSGVTNTTVSGNVYSDGQLAVYQVDKVLLPQQVFDPRPPAPAPAPSVSKSKKKKDDSDSSSDDSPADASFALRNVGSVCDAVSFCVMSVMLAWFYL

SEQ ID NO: 98792 - DNA, 1100 bp, Arabidopsis thaliana
  misc_feature (1)..(1100): Ceres Seq. ID no. 13601514
  misc_feature (1)..(1100): Ortholog of  Ceres SEQ ID NO 14303471 as cited in SEQ ID NO 59423
aaaaaccccaaacttcttgattctcccctccgataaccaaaaaatccctattttccgagatgaataatacacgagaagaagtaggggaattcactcaaatcttcaacgctttaatgagtcttatgaggaaatttatattcaaagttctacgcgtcggtccaatccctactaacatttctttcatcatggatggaaaccgtaggttcgccaagaaacgcaatcttgaaggcctagacgcaggacacagagctggtttcatatccgtcaaatatattcttcaatactgcaaagagattggtgtaccgtatgtcacactctacgcatttggtatggacaatttcaagagaggacctgaagaagtcaagtgtgtgatggatctaatgcttgagaaagtcgagctcacgatcgatcaagctgtatcagggaatatgaacggcgtgagaataatctttgccggcgatttgaattcgttaaacgagcgttttagagctgcgacaaagaaactgatggagcttacggaggagaacagagatctgattgttgtggtttgcgttgcttatagcacaagtgtcgagattgttcacgctgttcgagattcttgtgttagaaagagtaaaactggagatggttcttcagctttggagttgagtgatattgaagagtgtatgtatacatcggttgtgccggttccggatcttgtggtaagaaccggaggaggagatcggctgagtaacttcatgacgtggcaaacttctagggcacttcttcatagaacggaggctctttggccggagttagggctatggcatttggtttgggccattctgaaattccagagaatgcaagattacttgcagaagaagaagaagctccactaaatagtttctaagttaaaccctagaatgaacttaaacccttatgtttgattacatgtttcttgtggtgtaagaaacaacgaaccgaaactgagaaaccacaagaaaatcctttttattatgtatgggatacaaaataacaaaaacagacataaaacatcgataattattcaatttaacgatgctaaaacactacaattagaggcttaattaaaagacagtttg

SEQ ID NO: 98793 - protein, 272 aa, Arabidopsis thaliana
  peptide (1)..(272): Ceres Seq. ID no. 13601515
MNNTREEVGEFTQIFNALMSLMRKFIFKVLRVGPIPTNISFIMDGNRRFAKKRNLEGLDAGHRAGFISVKYILQYCKEIGVPYVTLYAFGMDNFKRGPEEVKCVMDLMLEKVELTIDQAVSGNMNGVRIIFAGDLNSLNERFRAATKKLMELTEENRDLIVVVCVAYSTSVEIVHAVRDSCVRKSKTGDGSSALELSDIEECMYTSVVPVPDLVVRTGGGDRLSNFMTWQTSRALLHRTEALWPELGLWHLVWAILKFQRMQDYLQKKKKLH

SEQ ID NO: 98794 - protein, 254 aa, Arabidopsis thaliana
  peptide (1)..(254): Ceres Seq. ID no. 13601516
MSLMRKFIFKVLRVGPIPTNISFIMDGNRRFAKKRNLEGLDAGHRAGFISVKYILQYCKEIGVPYVTLYAFGMDNFKRGPEEVKCVMDLMLEKVELTIDQAVSGNMNGVRIIFAGDLNSLNERFRAATKKLMELTEENRDLIVVVCVAYSTSVEIVHAVRDSCVRKSKTGDGSSALELSDIEECMYTSVVPVPDLVVRTGGGDRLSNFMTWQTSRALLHRTEALWPELGLWHLVWAILKFQRMQDYLQKKKKLH

SEQ ID NO: 98795 - protein, 251 aa, Arabidopsis thaliana
  peptide (1)..(251): Ceres Seq. ID no. 13601517
MRKFIFKVLRVGPIPTNISFIMDGNRRFAKKRNLEGLDAGHRAGFISVKYILQYCKEIGVPYVTLYAFGMDNFKRGPEEVKCVMDLMLEKVELTIDQAVSGNMNGVRIIFAGDLNSLNERFRAATKKLMELTEENRDLIVVVCVAYSTSVEIVHAVRDSCVRKSKTGDGSSALELSDIEECMYTSVVPVPDLVVRTGGGDRLSNFMTWQTSRALLHRTEALWPELGLWHLVWAILKFQRMQDYLQKKKKLH

SEQ ID NO: 98796 - DNA, 1943 bp, Arabidopsis thaliana
  misc_feature (1)..(1943): Ceres Seq. ID no. 13601524
  misc_feature (1)..(1943): Ortholog of  Ceres SEQ ID NO 14302588 as cited in SEQ ID NO 0
gtcgcacacactaaaatggcgttccgcgttttgctcctcttctcactcaccgcacttctcatcttctccgccgtttctccttctttcgccgcttcttcctccgacgacgttgacgatgaggatctcagcttcctcgaagatctcaaagaagacgacgttcccggcgctgactcactctcttcctcaactggatttgacgaattcgaaggaggagaagaagaagatcccgatatgtacaacgacgatgacgatgaagaaggagatttttccgatctaggtaatccggattccgatccgttaccgacgccggagattgatgagaaagacgttgtggttatcaaggagcgtaacttcactgatgtgattgagaataatcaatacgttttggttgagttttatgctccgtggtgtggtcattgtcagtctcttgctcctgagtatgctgctgctgccacggagcttaaggaagatggtgttgttttggctaagattgatgcgacggaggagaatgagttagctcaggagtatcgtgttcagggctttccgacgcttcttttcttcgttgatggtgagcacaagccttacactggaggaaggactaaagaaacaattgtgacatgggtgaagaagaagattggtcctggtgtgtataatctaactacattagatgatgctgagaaagtgttgacttctgggaacaaagttgttttgggatacttgaactccttggtgggtgttgagcacgatcagcttaatgctgcttccaaagctgaagacgatgtgaacttttatcaaacagtgaatcctgatgttgcaaagatgtttcaccttgatccggagtctaaaaggcctgctcttgtcctagttaagaaggaagaggagaaaattagccattttgatggagaatttgttaagtctgctctagttagttttgtgtctgccaacaagcttgctttggtctctgttttcaccagagagactgctccggaaatttttgagagtgcaatcaagaaacagttgttgttgtttgtaaccaaaaatgaatctgaaaaggttcttacggaatttcaagaagcagcgaaatcattcaaaggaaagctcatctttgtatctgtggatctggataatgaggattatgggaagccagtcgctgaatactttggtgtgtctggaaatggtcctaaacttattggctacacagggaatgaagaccctaaaaaatactttttcgatggcgagatccagtcagataaaattaagatatttggggaggatttcctgaacgacaagttaaagcctttctataagtcagaccccattcctgaaaagaacgatgaagatgtgaaaatagtggttggagataactttgatgaaattgttctggacgattctaaagatgtgcttctcgaggtctacgcaccatggtgtggccattgccaagcccttgagccaatgtataacaaacttgccaagcatttacgaagtattgattctctcgtcataaccaagatggatggaacaaccaatgaacatcccaaggcaaaggctgaggggttccctaccattctcttcttccctgcgggcaacaagacttcagagccgattactgtagatacagaccgcactgtggttgcattttacaagttcttaaggaaacacgcaacgatcccattcaaactggagaaacctgcatcaaccgaatcacctaaaactgcagagtccacaccaaaagtagaaactaccgagaccaaagaatcacccgatagcacgacaaagagtagccaaagtgactcgaaggacgaattgtgatcagaaaagggtataatatatattacatgtctccttaagttgttatatgtatgatcagaattgtcacatcatgagtttggactagataaagatgggaattaaagtaattttagttttgagaaagacaatttctt

SEQ ID NO: 98797 - protein, 602 aa, Arabidopsis thaliana
  peptide (1)..(602): Ceres Seq. ID no. 13601525
VAHTKMAFRVLLLFSLTALLIFSAVSPSFAASSSDDVDDEDLSFLEDLKEDDVPGADSLSSSTGFDEFEGGEEEDPDMYNDDDDEEGDFSDLGNPDSDPLPTPEIDEKDVVVIKERNFTDVIENNQYVLVEFYAPWCGHCQSLAPEYAAAATELKEDGVVLAKIDATEENELAQEYRVQGFPTLLFFVDGEHKPYTGGRTKETIVTWVKKKIGPGVYNLTTLDDAEKVLTSGNKVVLGYLNSLVGVEHDQLNAASKAEDDVNFYQTVNPDVAKMFHLDPESKRPALVLVKKEEEKISHFDGEFVKSALVSFVSANKLALVSVFTRETAPEIFESAIKKQLLLFVTKNESEKVLTEFQEAAKSFKGKLIFVSVDLDNEDYGKPVAEYFGVSGNGPKLIGYTGNEDPKKYFFDGEIQSDKIKIFGEDFLNDKLKPFYKSDPIPEKNDEDVKIVVGDNFDEIVLDDSKDVLLEVYAPWCGHCQALEPMYNKLAKHLRSIDSLVITKMDGTTNEHPKAKAEGFPTILFFPAGNKTSEPITVDTDRTVVAFYKFLRKHATIPFKLEKPASTESPKTAESTPKVETTETKESPDSTTKSSQSDSKDEL

SEQ ID NO: 98798 - protein, 597 aa, Arabidopsis thaliana; identical to SEQ ID NO: 40245
  peptide (1)..(597): Ceres Seq. ID no. 13601526

SEQ ID NO: 98799 - protein, 525 aa, Arabidopsis thaliana; identical to SEQ ID NO: 40246
  peptide (1)..(525): Ceres Seq. ID no. 13601527

SEQ ID NO: 98800 - DNA, 2337 bp, Arabidopsis thaliana
  misc_feature (1)..(2337): Ceres Seq. ID no. 13601528
  misc_feature (1)..(2337): Ortholog of  Ceres SEQ ID NO 13623192 as cited in SEQ ID NO 1286
  misc_feature (1)..(2337): Ortholog of  Ceres SEQ ID NO 13594171 as cited in SEQ ID NO 60359
  misc_feature (1)..(2337): Ortholog of  Ceres SEQ ID NO 14301866 as cited in SEQ ID NO 60955
  misc_feature (1)..(2337): Ortholog of  Ceres SEQ ID NO 13590645 as cited in SEQ ID NO 62109
agaaaccaccattaaccctaatttttgccgaactcgtcttctgctgaaaaccctagatctacagatctcccgaatctcccagggagataatttgaagatggtgtctgacgctagcaagaagaaggcagctcagaagaaagctgctgccgccgctaaaagaggtggtaaagctgctgctccatccaaatccgccgctacttcttccaacggtgttgatagcttgtcaagcggtgtcgatgctcttcaaatttctgatcggacttgtaccggagttctctgttctcatcctcaatctagagatatccgaatagaatctctgtctgtgacgtttcatggttatgaccttattgttgattcaatgttggagcttaactatggaaggcgttatggtctccttgggttgaatggttgtggaaagtccactcttttaactgcaatcggacgcagagagataccgattccggatcaaatggatatctaccatttgtctcacgagattgaagctactgacatgtcttccctggaggctgttgttagctgtgatgaggagaggttgaggttagagaaagaagttgaaattcttgtacagcaggatgatggaggcggagagcgtcttcaatctatctatgagaggttagacgccatggatgcagaaaccgctgagaaacgtgctgctgaaattctgtttggacttggtttcgacaaggaaatgcaggcgaagaagacaaaagatttctctggtggttggaggatgagaattgcattggcaagagcactcttcattatgccgacaatccttttgcttgatgagccgactaatcatttagatttggaagcttgtgtgtggctagaagagagcctgaagaattttgatcgcatccttgttgtggtatcccactcacaggatttcttgaatggagtgtgtacaaacatcatccacatgcagagcaaacagctcaagtactacactggtaactttgatcagtattgccagactcgttctgaacttgaagagaaccagatgaaacaatacagatgggagcaggagcagatttctcacatgaaggagtacattgctcggtttggtcacggttcagccaaacttgctcgtcaagcacagagtaaggagaaaacattggcaaagatggagagaggtgggctcactgaaaaggttgctagagacagtgttctcgttttccgttttgctgatgttgggaagcttccaccgccagtgcttcagtttgttgaagtgtcttttggttacacaccggactatcttatttacaagaacattgactttggtgtcgacttggactcgagggttgcccttgtgggacctaatggagctggaaagagtacacttttgaagctcatgactggtgaattgcacccaactgaaggaatggtgcgacgtcacaaccacttgaagattgctcagtaccatcagcatctggctgagaagctagacttggaattgcctgcacttctctacatgatgagggagttcccgggtactgaagaggagaaaatgagagctgcgattggtaggtttggtctaactggtaaggctcaagtgatgccaatgaagaatctatctgacggacaaaggagcagagtgatctttgcgtggttagcttataagcagcctaacatgcttcttcttgatgagcctactaaccatttggatatcgagacaatcgactcgcttgctgaggcattgaatgagtgggatggtggtttggttctggttagtcacgacttcaggttgatcaaccaagtggctcatgagatatgggtttgcgagaaacaatgcatcactaaatggaatggtgacattatggacttcaagaggcaccttaaggctaaagccggacttgaagattgaagatagagagtcgagtcttcttctcttgatggaaaatggaaaagactcagattggggtcacatgctaagagagagagagggaaggctttggtttttttgatgggtttgggaatggtttttaacgagttctaaagccacacacttgagagacagagaaaccatactcactaatctctgcatttccttaagaggtcagagattctttctatattagtattatcattatcatgtgcaccttctttttttttcgttattgttgttgaacgtttttttgaaggcgaaacagagagaaaagtaatattttttggtggtattgtaggattttttttttctgtttttttaaagactgagatgttgacgattatggtattatatttaatattaaagtgggaatattctcataattatattcgaatattctcataattatattcgaatattcgttggaaagg

SEQ ID NO: 98801 - protein, 627 aa, Arabidopsis thaliana; identical to SEQ ID NO: 29543
  peptide (1)..(627): Ceres Seq. ID no. 13601529

SEQ ID NO: 98802 - protein, 595 aa, Arabidopsis thaliana; identical to SEQ ID NO: 29544
  peptide (1)..(595): Ceres Seq. ID no. 13601530

SEQ ID NO: 98803 - protein, 508 aa, Arabidopsis thaliana; identical to SEQ ID NO: 29545
  peptide (1)..(508): Ceres Seq. ID no. 13601531

SEQ ID NO: 98804 - DNA, 1175 bp, Arabidopsis thaliana
  misc_feature (1)..(1175): Ceres Seq. ID no. 13601532
  misc_feature (1)..(1175): Ortholog of  Ceres SEQ ID NO 13581804 as cited in SEQ ID NO 51424
  misc_feature (1)..(1175): Ortholog of  Ceres SEQ ID NO 14307797 as cited in SEQ ID NO 54802
  misc_feature (1)..(1175): Ortholog of  Ceres SEQ ID NO 15168374 as cited in SEQ ID NO 55652
  misc_feature (1)..(1175): Ortholog of  Ceres SEQ ID NO 13663874 as cited in SEQ ID NO 67003
  misc_feature (1)..(1175): Ortholog of  Ceres SEQ ID NO 13624654 as cited in SEQ ID NO 0
acattcatcaacacaaaagatacccagagagacataagaaagaaagagagagagagatactttggtcatttcagggttgtcgtttctctctcttgttcttgagattttgaagagagagagatatgggaagaggtagggttcagctgaagaggatagagaacaagatcaataggcaagttactttctcaaagagaaggtctggtttgctcaagaaagctcatgagatctctgttctctgcgatgctgaggttgctctcatcgtcttctcttccaaaggcaaactcttcgaatattccaccgactcttgcatggagaggatacttgaacgctatgatcgctatttatattcagacaaacaacttgttggccgagacgtttcacaaagtgaaaattgggttctagaacatgctaagctcaaggcaagagttgaggtacttgagaagaacaaaaggaattttatgggggaagatcttgattcgttgagcttgaaggagctccaaagcttggagcatcagctcgatgcagctatcaagagcattaggtcaagaaagaaccaagctatgttcgaatccatatctgcgctccagaagaaggataaagccttgcaagatcacaacaattcgcttctcaaaaagattaaggagagggagaagaaaacgggtcagcaagaaggacaattagtccaatgctccaactcttcttcagttcttctgcctcaatactgcgtaacctcctccagagatggctttgtggagagagttgggggagagaacggtggtgcatcgtcgttgacggaaccaaactctctgcttccggcttggatgttacgtcctaccactacgaacgagtagaactatctcactctttataatataatgataatataattaatgtttaatattttcataacattcagcatttttttggtgacttatactcattattaataccgatatgttttagctagtcatattatatgtatgatggaactccgttgtcgagacgtatgtacgtaagctatcattagattcactgcgtcttaagaacaaagattcatatcttggtaatgatttctcatgaataattaatgtaacttttactttttaaactgtggtgaacgcaatatatcaatattctatcatttgtaaatgcgatcactatgttttttatgactg

SEQ ID NO: 98805 - protein, 242 aa, Arabidopsis thaliana; identical to SEQ ID NO: 35943
  peptide (1)..(242): Ceres Seq. ID no. 13601533

SEQ ID NO: 98806 - protein, 180 aa, Arabidopsis thaliana; identical to SEQ ID NO: 35944
  peptide (1)..(180): Ceres Seq. ID no. 13601534

SEQ ID NO: 98807 - protein, 130 aa, Arabidopsis thaliana; identical to SEQ ID NO: 35945
  peptide (1)..(130): Ceres Seq. ID no. 13601535

SEQ ID NO: 98808 - DNA, 1765 bp, Arabidopsis thaliana
  misc_feature (1)..(1765): Ceres Seq. ID no. 13601536
  misc_feature (1)..(1765): Ortholog of  Ceres SEQ ID NO 15171245 as cited in SEQ ID NO 52264
  misc_feature (1)..(1765): Ortholog of  Ceres SEQ ID NO 14303576 as cited in SEQ ID NO 68428
aaaaatgtctcattgcttctctcgttctaaaaaaaatcttgctgctatctctctataagtccactcctccttcaagcaaagcaccttcctcttctttttgctcctctgagattggtttaagattaaaccagacccatctaagggatctggaacaagcttcgtctctggttccactctgatcatcagagtattaaaaatggagtctttcttctccagatccacctccatcgtctccaaattgagtttcttggccttatggatcgtcttcttgatttcttcatcttcttttacttcgacagaagcatatgatgcgcttgatccagaaggcaacattacaatgaaatgggatgttatgagctggactcctgatggctatgttgccgtggttacgatgttcaacttccagaaatacagacacattcaatctccaggatggacattaggttggaaatgggcaaagaaggaagttatatggagtatggttggagcacaaacaactgaacaaggtgattgttcaaagtacaaaggaaacataccacattgttgtaagaaggatccaacagttgtagacttgcttccagggactccttataatcagcagattgctaattgctgcaagggtggtgttatgaactcatgggttcaagaccctgccactgcggctagctccttccagattagtgttggtgctgctggaaccacaaacaaaaccgttagggtcccaagaaacttcactctcatgggacctggtccaggttacacttgtggtccagcaaagattgtcagaccaacaaaatttgtcacgactgacacacgcagaaccactcaagctatgatgacatggaacattacgtgcacatactcgcagttccttgctcaaagaactccaacttgctgtgtttctttatcttctttctacaatgaaaccattgttggatgtccaacttgtgcttgcggatgtcaaaacaacagaacagaatccggtgcctgcctcgacccggacacaccacacttagcctcggttgtgtcaccaccaacaaagaaaggaacggttttaccaccattagtgcaatgcacgagacacatgtgcccgatcagagtgcattggcatgtaaagcagaactacaaagagtattggcgtgtgaagatcacaatcacaaacttcaactatcgcttgaactacacacaatggaaccttgttgctcaacatccaaatctcgacaacatcactcaaatcttcagcttcaactacaaatctcttactccttacgctggactaaacgatacggcgatgttatggggagtgaagttctacaacgatttcttatcagaagcaggtcctcttgggaatgttcaatcagagattttgttccgtaaagaccaatcaaccttcacattcgagaaaggttgggcttttccacgaaggatttactttaatggagacaattgcgtcatgcctcctccagactcttacccttttcttcccaacggtggttcccggtcacaattctcattcgtcgccgccgtgctcctccctcttcttgtctttttcttcttctctgcctaatctcggatttacggttttgccactggtttgcttagggttacggcggagtggtataaacgtttatttatgattcttttgtgtcccacaaaaattataatcttttgatactttttaaaaatataaatagttttcaacttccttgtttttaaaagaaatttatatccttgtgttctgttggtccgtcgttgtagaatatcg

SEQ ID NO: 98809 - protein, 456 aa, Arabidopsis thaliana; identical to SEQ ID NO: 30278
  peptide (1)..(456): Ceres Seq. ID no. 13601537

SEQ ID NO: 98810 - protein, 409 aa, Arabidopsis thaliana; identical to SEQ ID NO: 30279
  peptide (1)..(409): Ceres Seq. ID no. 13601538

SEQ ID NO: 98811 - protein, 404 aa, Arabidopsis thaliana; identical to SEQ ID NO: 30280
  peptide (1)..(404): Ceres Seq. ID no. 13601539

SEQ ID NO: 98812 - DNA, 1560 bp, Arabidopsis thaliana
  misc_feature (1)..(1560): Ceres Seq. ID no. 13601540
  misc_feature (1)..(1560): Ortholog of  Ceres SEQ ID NO 15176426 as cited in SEQ ID NO 53944
gaggaggaagaagacgatggttgacacttgacagagtaagctcagaaatggcgactctggtttcgaattgaacttgtgaggaaggtttttagggttataaggtgataaagaaaatggggaatagtggagatttggagcaggctctgcaagatgggaatatctttagacagctcaatgctcttattgtagctcatctccgtcatcacaatctctcacaagttgcaagtgcggttgcttcagcaacaatgacaccattgaatattgaggttcctccaaaccgtcttttggagcttgttgcaaagggtcttgcagcggagaacaatgggacattgagaggtgtttcttcatcagtcttgttaccttcttcttatggatcaatcactactcctcgaacagcttctatcgactttagtgttaatcatgcgaagggctcatcaaagactatcccaaagcatgaatcaaagacgctatcagagcacaagagcgttgttaggtgtgcaagatttagtcctgatggaatgttttttgctactggtggtgcagacacatctattaagctctttgaggtgccaaaagttaaacagatgatttcaggagatactcaagctcgaccattaatacggactttttatgatcatgctgaaccgataaacgatcttgatttccaccctcggagcacaatcctaatatctagtgccaaagacaactgtataaagttcttcgacttctccaaaaccacggctaaacgagcattcaaagtttttcaggatacccataacgtgcgctctatatcttttcatccgtcaggagagtttcttcttgcaggaaccgatcatccaattccacatctgtacgatgtaaacacatatcagtgctttcttccttcaaacttccctgacagtggagtaagtggagccattaatcaggtgagatattcttccacgggatccatctacattacagcctcaaaggatggagctattcgactctttgacggggttagcgcaaagtgtgttcgctccattggcaatgcacatggaaaatcagaggtcacaagcgcagtgttcactaaagatcaaaggtttgttctctcatccggtaaggattccacagttaagttatgggaaataggctcaggtcgaatggtaaaggaatatcttggagcaaagcgggtaaaactgcggtctcaggcaatttttaacgacactgaagagtttgtaatctccatagatgaagcaagcaatgaggtcgttacatgggatgctagaaccgcagataaagtggcaaagtggccttctaaccataacggtgcaccacggtggatcgagcactcgccggttgaatcagtctttgttacttgtggaatagatagatcaattcggttctggaaggaatccgtttagatgagaatccaatcaatcaaagtagtgtattttattctcttaaaacataaaccatacatgaaaaaaaaaaaaaatccgttgttcatgttgctttgtagaagacgcaagtaatcttccaggtcactgcaaaagaacgaaatcaaagcaggtgagcttc

SEQ ID NO: 98813 - protein, 429 aa, Arabidopsis thaliana; identical to SEQ ID NO: 40879
  peptide (1)..(429): Ceres Seq. ID no. 13601541

SEQ ID NO: 98814 - protein, 385 aa, Arabidopsis thaliana; identical to SEQ ID NO: 40880
  peptide (1)..(385): Ceres Seq. ID no. 13601542

SEQ ID NO: 98815 - protein, 294 aa, Arabidopsis thaliana; identical to SEQ ID NO: 40881
  peptide (1)..(294): Ceres Seq. ID no. 13601543

SEQ ID NO: 98816 - DNA, 1721 bp, Arabidopsis thaliana
  misc_feature (1)..(1721): Ceres Seq. ID no. 13601544
  misc_feature (1)..(1721): Ortholog of  Ceres SEQ ID NO 14315028 as cited in SEQ ID NO 57989
aattttctctcactaaatcagaaatgccgccgtcgttaccgtctctgcaactccgacggcttctcctccgtagcttcatttcctcctcctccgtcaatactcttcaatctcagccccgtatcatttcttccaagccgttgttttctcctcttcccccttcccgttcctctatattctcaacatttccttctagattcttctcatctgaaacgaatgcggaatcggaatctttggattcgaatgagatcgctctctctttctcgaaggagctcaccgggaatccagacgccgagtctcaaaccatttcgcagagattcaatctcagcttctcccacatcacgcctaatcccgatttgattctccaaactcttaatctctcaccggaagctggtcgcgcggctctaggttttaacgagtggttagattcgaactctaacttctctcacaccgatgaaacagtttcgtttttcgtcgattactttggccgtcggaaagatttcaaaggaatgctagagatcatctcgaaatacaaaggtatcgccggaggtaaaacactagaatcggcgattgataggcttgttagagctggtagacctaagcaggtcactgatttcttcgagaaaatggagaatgattatggtttgaaacgtgataaagaatcacttaccttggttgtgaagaagctttgtgagaaaggacacgcgagtatcgcagagaagatggtgaagaacactgctaatgaaatatttcctgatgagaatatatgtgatttgttgattagtggatggtgtattgctgagaaactcgatgaagcaactaggttagctggtgaaatgtctagaggaggatttgagataggaaccaaagcgtataacatgatgcttgattgtgtttgtaagctttgtaggaagaaagatccttttaagcttcaacctgaagtagagaaggttttgctggagatggagtttcgtggtgtacctagaaacacagagactttcaatgtgttgattaacaatctttgtaaaatcaggagaactgaagaagcaatgacattgtttggtaggatgggtgaatggggttgtcaaccagatgctgagacttatcttgttctgattaggagtttgtatcaagcagcgaggatcggtgaaggggacgaaatgatcgataagatgaaatcagcgggatatggtgagcttttgaataagaaagagtattacgggtttctcaagatattgtgtgggattgagaggcttgagcatgcgatgagtgtgtttaagagcatgaaagctaatggatgcaaacctgggatcaagacttatgatttgttgatggggaaaatgtgtgcgaataaccagctgactagagctaatggtttgtataaagaagcggctaagaaaggaatcgctgttagccctaaggaatacagagtagatccacggtttatgaaaaagaagaccaaggaagtggatagcaatgttaagaagagggagactttgcctgagaaaaccgcgaggaagaagaaacggctcaagcagatcaatatgagttttgttaagaaaccgcacaataagatgagacggagaatgtgatgctgatgaatcttcaacatctgatagaattttctaaagattattgtctttgttctttcctttttaagatattgtcaagagtactcatcattttgcttgatcatgagcaaattgtcccaataatcttttgtt

SEQ ID NO: 98817 - protein, 528 aa, Arabidopsis thaliana
  peptide (1)..(528): Ceres Seq. ID no. 13601545
FSLTKSEMPPSLPSLQLRRLLLRSFISSSSVNTLQSQPRIISSKPLFSPLPPSRSSIFSTFPSRFFSSETNAESESLDSNEIALSFSKELTGNPDAESQTISQRFNLSFSHITPNPDLILQTLNLSPEAGRAALGFNEWLDSNSNFSHTDETVSFFVDYFGRRKDFKGMLEIISKYKGIAGGKTLESAIDRLVRAGRPKQVTDFFEKMENDYGLKRDKESLTLVVKKLCEKGHASIAEKMVKNTANEIFPDENICDLLISGWCIAEKLDEATRLAGEMSRGGFEIGTKAYNMMLDCVCKLCRKKDPFKLQPEVEKVLLEMEFRGVPRNTETFNVLINNLCKIRRTEEAMTLFGRMGEWGCQPDAETYLVLIRSLYQAARIGEGDEMIDKMKSAGYGELLNKKEYYGFLKILCGIERLEHAMSVFKSMKANGCKPGIKTYDLLMGKMCANNQLTRANGLYKEAAKKGIAVSPKEYRVDPRFMKKKTKEVDSNVKKRETLPEKTARKKKRLKQINMSFVKKPHNKMRRRM

SEQ ID NO: 98818 - protein, 521 aa, Arabidopsis thaliana
  peptide (1)..(521): Ceres Seq. ID no. 13601546
MPPSLPSLQLRRLLLRSFISSSSVNTLQSQPRIISSKPLFSPLPPSRSSIFSTFPSRFFSSETNAESESLDSNEIALSFSKELTGNPDAESQTISQRFNLSFSHITPNPDLILQTLNLSPEAGRAALGFNEWLDSNSNFSHTDETVSFFVDYFGRRKDFKGMLEIISKYKGIAGGKTLESAIDRLVRAGRPKQVTDFFEKMENDYGLKRDKESLTLVVKKLCEKGHASIAEKMVKNTANEIFPDENICDLLISGWCIAEKLDEATRLAGEMSRGGFEIGTKAYNMMLDCVCKLCRKKDPFKLQPEVEKVLLEMEFRGVPRNTETFNVLINNLCKIRRTEEAMTLFGRMGEWGCQPDAETYLVLIRSLYQAARIGEGDEMIDKMKSAGYGELLNKKEYYGFLKILCGIERLEHAMSVFKSMKANGCKPGIKTYDLLMGKMCANNQLTRANGLYKEAAKKGIAVSPKEYRVDPRFMKKKTKEVDSNVKKRETLPEKTARKKKRLKQINMSFVKKPHNKMRRRM

SEQ ID NO: 98819 - protein, 360 aa, Arabidopsis thaliana
  peptide (1)..(360): Ceres Seq. ID no. 13601547
MLEIISKYKGIAGGKTLESAIDRLVRAGRPKQVTDFFEKMENDYGLKRDKESLTLVVKKLCEKGHASIAEKMVKNTANEIFPDENICDLLISGWCIAEKLDEATRLAGEMSRGGFEIGTKAYNMMLDCVCKLCRKKDPFKLQPEVEKVLLEMEFRGVPRNTETFNVLINNLCKIRRTEEAMTLFGRMGEWGCQPDAETYLVLIRSLYQAARIGEGDEMIDKMKSAGYGELLNKKEYYGFLKILCGIERLEHAMSVFKSMKANGCKPGIKTYDLLMGKMCANNQLTRANGLYKEAAKKGIAVSPKEYRVDPRFMKKKTKEVDSNVKKRETLPEKTARKKKRLKQINMSFVKKPHNKMRRRM

SEQ ID NO: 98820 - DNA, 1402 bp, Arabidopsis thaliana
  misc_feature (1)..(1402): Ceres Seq. ID no. 13601552
  misc_feature (1)..(1402): Ortholog of  Ceres SEQ ID NO 14309287 as cited in SEQ ID NO 0
acaaagatatttttctttattctctcgcagttcaattagggtttcaatctctctgctctgcttgtcatcaccaccaccaccaccaccgtcgtcgtctctctgtatctctccggcgggttctctctctacttcccccggaggattaaaagatggaccagtcttttattttgatattccgttagcttgttcagttattgtagaagctgtaccgtcaagacttttaatatctcaaatggatgatggtgggcatcgtgagaatggtcggcataaagcagcagttcagggccagtggttgatgcagcatcagccgtcgatgaaacaagtgatgtcgataatagcagagcgcgatgcagcgattcaggagagaaatctggcgatatcagagaaaaaagcagcagtagctgaaagggacatggcgtttcttcagagggacaccgccattgctgagcgcaacaatgcgataatggagagagacagtgctcttacagcactccaataccgtgagaactctatggttactgctcctgctgccaatatgtcagcatgtccaccaggatgtcaaatatcacgtggtgtaaaacacttgcaccatccgcacatgcatcatcatcatcaacaacatcacatacctcagttgactgaaaatgcatatgaaaccagagagatggagccaaatgatggtctcccaacatcaccacctgccggatccaccttggaatctgccaaaccaaaacgtggtaaaagagtgaacccaaaggcgacaacacaaactgctgctaataagagagggccaaaaaatcagaggaaggttaagaaagagagcgaggacgacttaaacaagataatgtttgtaaagacgacccatgactacacagacgaagattcaagtaagcatatcttaataggatcaaaatctgactggaaaagtcaagaaatggtggggctgaaccaagtggtttacgacgagacaacgatgccaccacctgtatgttcatgtacaggagttctcagacagtgctacaaatggggaaatggaggttggcaatcatcgtgttgcacaactacactatcaatgtatcctttacctgcactgcccaacaaaaggcatgctcgagttggtggacggaaaatgagcggaagcgcgttcaacaagcttctaagccggcttgctgcagaagggcatcatgatctttcaaacccggtcgatctgaaggaccattgggcaaagcacggtacaaaccgctacattacgattaaatgatatgtgcatttaggtgtgagttgttcttacgacattatctgattttaaatcatgtgtactaaattcaaataaactcgagaggaaaagaattgtatgtggagccaatgttatgttgtattatataattcgaaaatttttagt

SEQ ID NO: 98821 - protein, 419 aa, Arabidopsis thaliana
  peptide (1)..(419): Ceres Seq. ID no. 13601553
QRYFSLFSRSSIRVSISLLCLSSPPPPPPSSSLCISPAGSLSTSPGGLKDGPVFYFDIPLACSVIVEAVPSRLLISQMDDGGHRENGRHKAAVQGQWLMQHQPSMKQVMSIIAERDAAIQERNLAISEKKAAVAERDMAFLQRDTAIAERNNAIMERDSALTALQYRENSMVTAPAANMSACPPGCQISRGVKHLHHPHMHHHHQQHHIPQLTENAYETREMEPNDGLPTSPPAGSTLESAKPKRGKRVNPKATTQTAANKRGPKNQRKVKKESEDDLNKIMFVKTTHDYTDEDSSKHILIGSKSDWKSQEMVGLNQVVYDETTMPPPVCSCTGVLRQCYKWGNGGWQSSCCTTTLSMYPLPALPNKRHARVGGRKMSGSAFNKLLSRLAAEGHHDLSNPVDLKDHWAKHGTNRYITIK

SEQ ID NO: 98822 - protein, 342 aa, Arabidopsis thaliana; identical to SEQ ID NO: 27920
  peptide (1)..(342): Ceres Seq. ID no. 13601554

SEQ ID NO: 98823 - protein, 321 aa, Arabidopsis thaliana; identical to SEQ ID NO: 27921
  peptide (1)..(321): Ceres Seq. ID no. 13601555

SEQ ID NO: 98824 - DNA, 1364 bp, Arabidopsis thaliana
  misc_feature (1)..(1364): Ceres Seq. ID no. 13601560
  misc_feature (1)..(1364): Ortholog of  Ceres SEQ ID NO 15177842 as cited in SEQ ID NO 51547
  misc_feature (1)..(1364): Ortholog of  Ceres SEQ ID NO 13594859 as cited in SEQ ID NO 51974
  misc_feature (1)..(1364): Ortholog of  Ceres SEQ ID NO 13597887 as cited in SEQ ID NO 64295
ataattttctaagaggcgtgactttaaaaatctgtaaaaaagcaaatccgaagaaagagagagagagaaggtgattttgaaatttcagataacgcagaatttttttattctcgccggagttttctcctcccaccgtctctgattctcgtcgccgccgtacacagttgttgttctctgccgtttctgcaagatgattggatcgtttcttacaagaggattggtgatggtgttgggctatgcttaccctgcgtatgaatgttacaagactgttgaaaagaataggcctgaaatcgagcaacttcgcttttggtgtcagtactggatattggttgcttgcttgacagtttttgagagagttggtgatgcgtttgtttcatgggttccgatgtacagtgaagctaagttggcattcttcatatacctgtggtatcctaaaaccaggggtactacatatgtctacgagtccttctttaggccatatctctcacagcatgagaatgacatagaccatagtttgctcgagctaaggactagagcaggagatatggctgttatatactggcaacgagttgcaagttatggtcagaccagaatccttgagattttgcagtatgttgctgcacaatcaactccaagaccgcagccacctcagaaacgtggaggtagagctaatcaagctcctgcgaagcctaagaaagcccctgtcccccaatcagaacctgaagaagtatcattgtcctcgtcttctagctcatcttcaagtgaaaatgaaggtaatgagccaacccgtaaagtatcaggcccgtcaagacctagaccaacagtgacatctgtaccagctgcagatcccaaaaacgcgggtaccactcagatagcacagaaatcagtagcttccccaattgtgaacccaccacagtcaaccacccaagtggaaccaatgcagatagaagaagtggaaggagaggcagaatcagggaatgaaaatcccaacccggaaggtccaaaggagacagtgatggaggagacaatcaggatgactcgtgggaggttgaggaagacgcgttcggaagaaagccgttgaaagaagaagaagaagctcaatccaaaaaattgttacttacttgcataacagtggtctctcttctctcttactctatgtttcctgcttctagaattacgttgacaggaactaacaactagtgggaatggttgtatgaaaagttaatctgttggttttgttcttttattcaatttagttgcatctttgacaaaaaaaaaaaaaaaatcaatttagttgcattaagtgtaaaagataacactcttgttttgtttgttcctttcgataactaattcggtaaaatagg

SEQ ID NO: 98825 - protein, 296 aa, Arabidopsis thaliana
  peptide (1)..(296): Ceres Seq. ID no. 13601561
MIGSFLTRGLVMVLGYAYPAYECYKTVEKNRPEIEQLRFWCQYWILVACLTVFERVGDAFVSWVPMYSEAKLAFFIYLWYPKTRGTTYVYESFFRPYLSQHENDIDHSLLELRTRAGDMAVIYWQRVASYGQTRILEILQYVAAQSTPRPQPPQKRGGRANQAPAKPKKAPVPQSEPEEVSLSSSSSSSSSENEGNEPTRKVSGPSRPRPTVTSVPAADPKNAGTTQIAQKSVASPIVNPPQSTTQVEPMQIEEVEGEAESGNENPNPEGPKETVMEETIRMTRGRLRKTRSEESR

SEQ ID NO: 98826 - protein, 285 aa, Arabidopsis thaliana
  peptide (1)..(285): Ceres Seq. ID no. 13601562
MVLGYAYPAYECYKTVEKNRPEIEQLRFWCQYWILVACLTVFERVGDAFVSWVPMYSEAKLAFFIYLWYPKTRGTTYVYESFFRPYLSQHENDIDHSLLELRTRAGDMAVIYWQRVASYGQTRILEILQYVAAQSTPRPQPPQKRGGRANQAPAKPKKAPVPQSEPEEVSLSSSSSSSSSENEGNEPTRKVSGPSRPRPTVTSVPAADPKNAGTTQIAQKSVASPIVNPPQSTTQVEPMQIEEVEGEAESGNENPNPEGPKETVMEETIRMTRGRLRKTRSEESR

SEQ ID NO: 98827 - protein, 231 aa, Arabidopsis thaliana
  peptide (1)..(231): Ceres Seq. ID no. 13601563
MYSEAKLAFFIYLWYPKTRGTTYVYESFFRPYLSQHENDIDHSLLELRTRAGDMAVIYWQRVASYGQTRILEILQYVAAQSTPRPQPPQKRGGRANQAPAKPKKAPVPQSEPEEVSLSSSSSSSSSENEGNEPTRKVSGPSRPRPTVTSVPAADPKNAGTTQIAQKSVASPIVNPPQSTTQVEPMQIEEVEGEAESGNENPNPEGPKETVMEETIRMTRGRLRKTRSEESR

SEQ ID NO: 98828 - DNA, 890 bp, Arabidopsis thaliana
  misc_feature (1)..(890): Ceres Seq. ID no. 13601564
  misc_feature (1)..(890): Ortholog of  Ceres SEQ ID NO 13595341 as cited in SEQ ID NO 56398
  misc_feature (1)..(890): Ortholog of  Ceres SEQ ID NO 15173764 as cited in SEQ ID NO 57550
  misc_feature (1)..(890): Ortholog of  Ceres SEQ ID NO 15227118 as cited in SEQ ID NO 59038
  misc_feature (1)..(890): Ortholog of  Ceres SEQ ID NO 13597299 as cited in SEQ ID NO 63785
  misc_feature (1)..(890): Ortholog of  Ceres SEQ ID NO 13663895 as cited in SEQ ID NO 66923
attgaccgacacaacaaacaacacgttctctctcatttttcttcttctccgatcaatctagggtttactctcaccggcgacgaacaatgatccacctcctttacacagtgatcttcgccgaaatggcactgatccttctcctcctcttcaaaactcctctccgaaagctaatcatcctcaccttcgatcgaatcaaacgtggccgtggtcccgtcgtcgtcaaaaccataggaaccaccgtattcgtcgttctcttgtcgagtatctacagtttggttaatatccaacgccgatctgaagatggtgctgttcttaatcccactgatcaagtccttgcgtctaagcatcttctcgaagcttctcttatggggtttgtgttgtttctctcgcttatgattgatagactacaccattacattagagagcttcgtttgttgaggaagacaatggagactgcaaagaagcagaacagaggttttgaggatgggaaaaccacaagtggggaggaagtgaaagcgctcggggaagagatcgcggcgttaaaagcgaagataaagacgttagaatcggagagtgaaagtaaaggcaaagaattgaaaggtgcacaaggtgaaacagaggctttgagaaagcaagctgatgggtttcttatggagtatgataggttgcttgaggataatcagaatttgaggaaccagttggagtctattgggcatagtcctgagggaaagaagggtatgtaagagtaaaaactaaggattctgttttgtagagaacaaagtaactataggaaatgtggttttactgatttttgcttcatgtaatatgcaatatcgtctcctcttttgaatgtattttactattatattgcaatctagtaagtttggaac

SEQ ID NO: 98829 - protein, 218 aa, Arabidopsis thaliana; identical to SEQ ID NO: 26068
  peptide (1)..(218): Ceres Seq. ID no. 13601565

SEQ ID NO: 98830 - protein, 206 aa, Arabidopsis thaliana; identical to SEQ ID NO: 26069
  peptide (1)..(206): Ceres Seq. ID no. 13601566

SEQ ID NO: 98831 - protein, 125 aa, Arabidopsis thaliana
  peptide (1)..(125): Ceres Seq. ID no. 13601567
MGFVLFLSLMIDRLHHYIRELRLLRKTMETAKKQNRGFEDGKTTSGEEVKALGEEIAALKAKIKTLESESESKGKELKGAQGETEALRKQADGFLMEYDRLLEDNQNLRNQLESIGHSPEGKKGM

SEQ ID NO: 98832 - DNA, 1708 bp, Arabidopsis thaliana
  misc_feature (1)..(1708): Ceres Seq. ID no. 13601576
  misc_feature (1)..(1708): Ortholog of  Ceres SEQ ID NO 13596816 as cited in SEQ ID NO 62287
tttatggataatagatctagtagtcttcgtttactaattctctctcacaaatccaaacaaaaaggaactgtgtacttaaatcctgtaatgacaatttcatacatactaaacaagaactattaaatactaggataatacatacttgaagaaataacaactcttcatgtagtcgtgtctttttacaatttaaaatttgaaaaataaaagttacatttacctttacaacgtcggtcgttttccacacaatagattacccacttctactcgatagttttctctataatatagagacaaaagaagagagcatttaaattctaaagaacaaaaaaggaaaaacagagcagccatgagagcttctgtttattcattgatcctactcttcttctcgtgtttactacatctatcaaagtctcaaccgttcctcggagtaaactacggcctaaccgccgacaatcttccacctccgtcagcgagtgcaaagctccttcaatccacaactttccaaaaagtccgtctttacggatccgacccggctgtaatcaaggccctagcaaacacggggatcgagatcgtcatcggggcgtctaacggcgatgtacccggtctagcatcggacccgagtttcgcccgaagctgggtcgaaaccaacgtggtaccttattatccagcgagcaagattgttctcattgccgtgggaaatgagatcacatcattcggcgacaacagtctcatgtcgcagcttttgccggcgatgaaaaatgtccaaactgccctcgaggcggcgtctcttggtggcgggaaaatcaaagtctcgacagtacacataatgtcggttctagccgggtcagaccctccttcgaccgcggtatttaaaccggagcatgctgatatattgaagggattgctagagtttaatagtgaaaccgggtcgcctttcgcggttaacccctacccgtttttcgcttaccaagatgaccggagacccgaaacgttggcctattgcttgtttcaggccaatcctggccgtgtcgaccccaacagcaacctcaagtatatgaacatgttcgatgctcaggttgatgcggtgtattcagctttgaactcgatggggttcaaggacgtagagataatggtcgctgagactggatggccatacaagggagacccggaggaggctggtgcaacagttgagaacgctagagcttacaataaaaatctcattgctcatttaaaatctgggtccgggacgccacttatgcccgggagagtgatcgacacatacttgttcgcattgtacgacgagaatctcaagcccgggaaaggttctgaacgagccttcggtttgtttagacctgatctaaccatgacttatgatatcgggctcaccaagactaccaattataaccaaacttccatggctccattgtcaccaacaaggccacgtcttccaccagccgcggccccgacgagacaaacattaccttctcctccgcagatgattcttccttcaccagttactccctccgacaaaaactctgggcaaaccgatgttcacaattccactccgcgctctgcctctctggctcacatatgccgctctctctctatttcggcatcgatgttctttgtctccgttttgtatgcattgatcatattgttgtaaaatctcttcatcgatcttatattatgtctcttactaatttaaact

SEQ ID NO: 98833 - protein, 438 aa, Arabidopsis thaliana; identical to SEQ ID NO: 39792
  peptide (1)..(438): Ceres Seq. ID no. 13601577

SEQ ID NO: 98834 - protein, 310 aa, Arabidopsis thaliana; identical to SEQ ID NO: 39793
  peptide (1)..(310): Ceres Seq. ID no. 13601578

SEQ ID NO: 98835 - protein, 303 aa, Arabidopsis thaliana
  peptide (1)..(303): Ceres Seq. ID no. 13601579
MKNVQTALEAASLGGGKIKVSTVHIMSVLAGSDPPSTAVFKPEHADILKGLLEFNSETGSPFAVNPYPFFAYQDDRRPETLAYCLFQANPGRVDPNSNLKYMNMFDAQVDAVYSALNSMGFKDVEIMVAETGWPYKGDPEEAGATVENARAYNKNLIAHLKSGSGTPLMPGRVIDTYLFALYDENLKPGKGSERAFGLFRPDLTMTYDIGLTKTTNYNQTSMAPLSPTRPRLPPAAAPTRQTLPSPPQMILPSPVTPSDKNSGQTDVHNSTPRSASLAHICRSLSISASMFFVSVLYALIILL

SEQ ID NO: 98836 - DNA, 1080 bp, Arabidopsis thaliana
  misc_feature (1)..(1080): Ceres Seq. ID no. 13601587
  misc_feature (1)..(1080): Ortholog of  Ceres SEQ ID NO 12557432 as cited in SEQ ID NO 92
  misc_feature (1)..(1080): Ortholog of  Ceres SEQ ID NO 14305097 as cited in SEQ ID NO 0
ggcttgaaggaaaagaaaagttttgtttctgaactttcgtctctataaaccctttcgacgacgagtgaagaagaaagcgagacgaagaagcaaagatgttcagaaaccaatacgacacagatgttacgacatggagtccaacaggtcgtttattccaagtggaatacgccatggaagcagtgaagcaaggatctgcagcaattggactcagatctcgttctcatgtcgttctcgcttgtgttaacaaagctcaatcggagctttcttcgcatcagaggaagatctttaaagtcgatgaccatatcggtgttgcaatcgctggtctcacagccgacggtcgtgtattgtctcggtatatgagatcggaatcgattaatcactcttttacttatgagtctcctcttcctgttggtcgtctcgttgttcatcttgctgataaagctcaggtctgtacccaacgatcatggaaacgaccctatggtgttggtttgctggtaggtggattggatgagtctggagcccacctttactacaactgtcccagcggaaactacttcgagtaccaagcttttgctattggatcccgttcccaagcagcaaagacctatctggaacgcaggtttgagagctttggggattcttctagagaagatctgatcaaagatgctattttggctgttagggagacattgcaaggggaaacactgaagagttctctctgcacagtcgctattctaggagtcgatgaaccgttccacttcctggaccaggaagcaatacagaaagtgatcgacacatttgagaaagtgccagaggaagaggaaggagaaggcgaggctggtgagggtgaggccgaagctgccgaggctgcaccagcagaacgaggtggtggtgttgcaggtgaccaagacgtggctccaatggaaatgtaaggcttgtgtgtgtaacgctggaactattttatttcgatgttagttggatttttactttgcaaaatggctgcgggtttagattatatgcttgagaagttgaaaccatttcgtcatttaaactcaatagctgccatcaagactttctcgt

SEQ ID NO: 98837 - protein, 278 aa, Arabidopsis thaliana
  peptide (1)..(278): Ceres Seq. ID no. 13601588
MFRNQYDTDVTTWSPTGRLFQVEYAMEAVKQGSAAIGLRSRSHVVLACVNKAQSELSSHQRKIFKVDDHIGVAIAGLTADGRVLSRYMRSESINHSFTYESPLPVGRLVVHLADKAQVCTQRSWKRPYGVGLLVGGLDESGAHLYYNCPSGNYFEYQAFAIGSRSQAAKTYLERRFESFGDSSREDLIKDAILAVRETLQGETLKSSLCTVAILGVDEPFHFLDQEAIQKVIDTFEKVPEEEEGEGEAGEGEAEAAEAAPAERGGGVAGDQDVAPMEM

SEQ ID NO: 98838 - protein, 253 aa, Arabidopsis thaliana
  peptide (1)..(253): Ceres Seq. ID no. 13601589
MEAVKQGSAAIGLRSRSHVVLACVNKAQSELSSHQRKIFKVDDHIGVAIAGLTADGRVLSRYMRSESINHSFTYESPLPVGRLVVHLADKAQVCTQRSWKRPYGVGLLVGGLDESGAHLYYNCPSGNYFEYQAFAIGSRSQAAKTYLERRFESFGDSSREDLIKDAILAVRETLQGETLKSSLCTVAILGVDEPFHFLDQEAIQKVIDTFEKVPEEEEGEGEAGEGEAEAAEAAPAERGGGVAGDQDVAPMEM

SEQ ID NO: 98839 - protein, 191 aa, Arabidopsis thaliana
  peptide (1)..(191): Ceres Seq. ID no. 13601590
MRSESINHSFTYESPLPVGRLVVHLADKAQVCTQRSWKRPYGVGLLVGGLDESGAHLYYNCPSGNYFEYQAFAIGSRSQAAKTYLERRFESFGDSSREDLIKDAILAVRETLQGETLKSSLCTVAILGVDEPFHFLDQEAIQKVIDTFEKVPEEEEGEGEAGEGEAEAAEAAPAERGGGVAGDQDVAPMEM

SEQ ID NO: 98840 - DNA, 1364 bp, Arabidopsis thaliana
  misc_feature (1)..(1364): Ceres Seq. ID no. 13601591
  misc_feature (1)..(1364): Ortholog of  Ceres SEQ ID NO 14303790 as cited in SEQ ID NO 55525
attcttccacaatggattcttcatcttcagtaaaaatcgtctcgaaaagcttcgtgaaacccaaaaccttaccagaagaatcaaagcaaccatactatttatctccatgggactacgcaatgctctctgttcagtacatccaaaaaggtcttctctttcacaagccaccacttgactccattgacactcttcttgagaagctaaaagattctctggccgtcacactagtccatttctaccctctcgcgggtcgcctctcatcgttaacaacggaaaaaccgaaatcttactctgttttcgttgattgtaacgatagccctggcgcggggtttatctacgcgacctcagatttatgtataaaagatattgtgggtgctaagtatgtcccttcaattgttcaatctttctttgaccatcacaaagctgtgaatcatgatggacacaccatgagcctcttatctgtccaggtgacagaattggtagatggaattttcataggactgtctatgaaccatgcgatgggagacggtactgcgttctggaagttctttaccgcatggtccgaaatcttccaaggacaagagagcaaccaaaacgatgacttgtgtcttaagaatccacccgtgttgaagcgttacatccctgaaggatacggtcctctattcagccttccatatagtcatccagatgaatttatcagaacctacgaatctccaattctcaaggagagaatgttctgtttctcatcagaaaccataagaatgcttaaaacaagggtcaaccaaatatgcggaacaacctccatctcatctttccaatcgctaaccgcggttatatggagatgcataacaagggcgaggagattacctctcgatcgagaaacaagttgtagagttgctgctgacaacagaggaagaatgtatccaccgcttcacaaggattacttcggaaactgcctctctgctttgagaacggctgcaaaagctggtgaactattggagaatgatcttggatttgctgctttgaaagtgcatcaagcagtagctgaacatacgagcgaaaaggtatctcaaatgattgatcaatggctaaagtctccttatatttaccatattgatcggctatttgaaccgatgagcgttatgatgggaagctcgccgaggtttaataagtatggttgtgaatttgggttgggaaaaggagtgacgcttagaagtggctatgcgcataagttcgatggaaaggtatctgcttacccgggaagagaaggagggggaagtatagatttggaggtatgtcttgttccagagtttatggaagctttggaatcagatgaagagttcatgtcacttgtttctctttga

SEQ ID NO: 98841 - protein, 453 aa, Arabidopsis thaliana
  peptide (1)..(453): Ceres Seq. ID no. 13601592
SSTMDSSSSVKIVSKSFVKPKTLPEESKQPYYLSPWDYAMLSVQYIQKGLLFHKPPLDSIDTLLEKLKDSLAVTLVHFYPLAGRLSSLTTEKPKSYSVFVDCNDSPGAGFIYATSDLCIKDIVGAKYVPSIVQSFFDHHKAVNHDGHTMSLLSVQVTELVDGIFIGLSMNHAMGDGTAFWKFFTAWSEIFQGQESNQNDDLCLKNPPVLKRYIPEGYGPLFSLPYSHPDEFIRTYESPILKERMFCFSSETIRMLKTRVNQICGTTSISSFQSLTAVIWRCITRARRLPLDRETSCRVAADNRGRMYPPLHKDYFGNCLSALRTAAKAGELLENDLGFAALKVHQAVAEHTSEKVSQMIDQWLKSPYIYHIDRLFEPMSVMMGSSPRFNKYGCEFGLGKGVTLRSGYAHKFDGKVSAYPGREGGGSIDLEVCLVPEFMEALESDEEFMSLVSL

SEQ ID NO: 98842 - protein, 450 aa, Arabidopsis thaliana
  peptide (1)..(450): Ceres Seq. ID no. 13601593
MDSSSSVKIVSKSFVKPKTLPEESKQPYYLSPWDYAMLSVQYIQKGLLFHKPPLDSIDTLLEKLKDSLAVTLVHFYPLAGRLSSLTTEKPKSYSVFVDCNDSPGAGFIYATSDLCIKDIVGAKYVPSIVQSFFDHHKAVNHDGHTMSLLSVQVTELVDGIFIGLSMNHAMGDGTAFWKFFTAWSEIFQGQESNQNDDLCLKNPPVLKRYIPEGYGPLFSLPYSHPDEFIRTYESPILKERMFCFSSETIRMLKTRVNQICGTTSISSFQSLTAVIWRCITRARRLPLDRETSCRVAADNRGRMYPPLHKDYFGNCLSALRTAAKAGELLENDLGFAALKVHQAVAEHTSEKVSQMIDQWLKSPYIYHIDRLFEPMSVMMGSSPRFNKYGCEFGLGKGVTLRSGYAHKFDGKVSAYPGREGGGSIDLEVCLVPEFMEALESDEEFMSLVSL

SEQ ID NO: 98843 - protein, 414 aa, Arabidopsis thaliana
  peptide (1)..(414): Ceres Seq. ID no. 13601594
MLSVQYIQKGLLFHKPPLDSIDTLLEKLKDSLAVTLVHFYPLAGRLSSLTTEKPKSYSVFVDCNDSPGAGFIYATSDLCIKDIVGAKYVPSIVQSFFDHHKAVNHDGHTMSLLSVQVTELVDGIFIGLSMNHAMGDGTAFWKFFTAWSEIFQGQESNQNDDLCLKNPPVLKRYIPEGYGPLFSLPYSHPDEFIRTYESPILKERMFCFSSETIRMLKTRVNQICGTTSISSFQSLTAVIWRCITRARRLPLDRETSCRVAADNRGRMYPPLHKDYFGNCLSALRTAAKAGELLENDLGFAALKVHQAVAEHTSEKVSQMIDQWLKSPYIYHIDRLFEPMSVMMGSSPRFNKYGCEFGLGKGVTLRSGYAHKFDGKVSAYPGREGGGSIDLEVCLVPEFMEALESDEEFMSLVSL

SEQ ID NO: 98844 - DNA, 612 bp, Arabidopsis thaliana
  misc_feature (1)..(612): Ceres Seq. ID no. 13601595
  misc_feature (1)..(612): Ortholog of  Ceres SEQ ID NO 13599549 as cited in SEQ ID NO 505
agaagaagaagaagaaagatgacgttgaagaaggtggacgcgaatccatcaaccttggaatcgagtttacaagaactgaaatcagacgaaacaagccgtagcaagatcaatttcatactcttcctcgccgacaatgatcccaccaccggtcaaagctggtgtccagactgtgttagagctgaacctgtgatttacaagactctagaggaatttccagaggaggtgaagctaattcgtgcttacgccggagacagaccgacgtggcggactccggcgcatccttggagagttgattctcggtttaaactaaccggagtaccaactcttgttcgttgggatggtgactctgttaaaggacgtcttgaagatcatcaagctcaccttcctcacttgattcttccccttcttgcaccatccacttgatttgatcgatatcgatttctcgggactatcgtgggattgaggatcaaatatcttatatatatttctagttgtgaattgttttccaataaatcctttacaatggtaaaggaaagtttgtttcttcgatgatctttacgatttcgtgctcaatgtagtgttatttctctaataaattacggtgatattagc

SEQ ID NO: 98845 - protein, 140 aa, Arabidopsis thaliana
  peptide (1)..(140): Ceres Seq. ID no. 13601596
RRRRRKMTLKKVDANPSTLESSLQELKSDETSRSKINFILFLADNDPTTGQSWCPDCVRAEPVIYKTLEEFPEEVKLIRAYAGDRPTWRTPAHPWRVDSRFKLTGVPTLVRWDGDSVKGRLEDHQAHLPHLILPLLAPST

SEQ ID NO: 98846 - protein, 134 aa, Arabidopsis thaliana
  peptide (1)..(134): Ceres Seq. ID no. 13601597
MTLKKVDANPSTLESSLQELKSDETSRSKINFILFLADNDPTTGQSWCPDCVRAEPVIYKTLEEFPEEVKLIRAYAGDRPTWRTPAHPWRVDSRFKLTGVPTLVRWDGDSVKGRLEDHQAHLPHLILPLLAPST

SEQ ID NO: 98847 - DNA, 2821 bp, Arabidopsis thaliana
  misc_feature (1)..(2821): Ceres Seq. ID no. 13601610
  misc_feature (1)..(2821): Ortholog of  Ceres SEQ ID NO 14310362 as cited in SEQ ID NO 54251
  misc_feature (1)..(2821): Ortholog of  Ceres SEQ ID NO 12583314 as cited in SEQ ID NO 56435
  misc_feature (1)..(2821): Ortholog of  Ceres SEQ ID NO 13654989 as cited in SEQ ID NO 63117
  misc_feature (1)..(2821): Ortholog of  Ceres SEQ ID NO 13584744 as cited in SEQ ID NO 69137
aaaattcttcaattctcttctcgtttttttttttttatcaattccaatgatctgtcacgttttagtaattttcactattctcgtttccgccgtcgtcgacgcaacggcgtcgtatgagcccactgatgtctttctcatcaattgcggcgatacctccaacaacatggactacagtggccggaactggacgacggagaatccgaaatttatgtcatcgaatgcagttgacgacgcgtcgttcacttcatctgcgtcataccaagaatcagggattcctcaagtgccgtacttgaaagctaggattttccgatatgatttcacttacagttttccagtctctcccggctggaaattcctccggttatacttttatccgacccgttacggatccgatttcgacgccgttaaatccttcttctccgtcaacgtcaaccgtttcactctcttgcataacttcagtgtaaaagcttccataccggagtcaagttctctaatcaaagagtttatcgttccggttaaccaaactcttgatctcacgttcacgccctctccgaattcattagctttcgttaacggaatcgagattatctccatgcctgaccggttttactcaaagggaggatttgacgacgttgtaagaaacgttggtagggacgttgacttcgagatagacaactccacggctttcgagaccgtttatcgggtaaacgtaggtggaaaagtggtgggcgacgtcggagattcgggaatgttccggcgttggctttccgatgaaggtttcttactcggtattaattcgggagccattccgaatataacaggtgtaaagatcaactacacggataaaactcccgcgtacgttgcgccggaagatgtatacacgacgtgtcgcctgatggggaacaaagacagtcctgagctaaacctgaatttcaacctgacgtggctctttgaagtcgatgccgggtttgcctatatagtgaggcttcatttctgtgagacgcaaccggaagtcaacaaaacgggtgaccgcgtcttctccatcttcttcggatatcaactggccatgcgtgaaatggacgtgtttcggctgagtggtggttttcggctaccgatgtatctagatttcaaggtacttgtcgacgccgacggaactagccagagacctagtcttcgagttgacttgacaccttacaaagaggactatccaacctattacgacgctattttgagtggtgtagagattctcaagctgagtaattctgatggtaatcttgcggggcttaatccaattcctcaactaagtccaccaccacaatctataacgccactaaaaggaaaaggcaagtcatcacatgttttgccaataataattgcagtggttggttctgcagttgcgctagcgttttttgttcttgttgttgtcctcgttgttatgaagagaaagaagaagagcaacgagtctagtgtagataccacgaacaagccttctacgaactcgtcatggggtcctcttctgcacgggacaggctctacaaatacaaaatctgcctcatctcttccatcagatctctgccgtcgattctccatctacgaaatcaaatccgccacaaatgatttcgaggaaaaactaatcataggagtaggcgggtttggttctgtctacaaaggacgaatagacggtggagccacacttgttgcggttaaacggctggaaattacatcgaaccaaggtgctaaagagttcgatacagagctcgagatgctttcaaagcttcgacatgtacacctcgtctctctaatcggatattgcgatgacgacaacgagatggtacttgtctatgagtatatgccacatggtacacttaaagatcatcttttcaggagagacaaggcctctgatcctccattgtcatggaaacgaaggctagagatttgcattggagcagctcgtggattacagtatcttcatactggagccaagtacacgatcatacatagagacatcaaaaccacaaacatacttctcgatgagaacttcgtcgctaaagtatctgactttggtttatcaagagttggtcctactagtgcttctcaaacgcatgtctccaccgtcgttaaaggaacgtttggttacttggatcccgagtactatcgccgtcaaatcttgaccgaaaaatccgacgtgtactcttttggagttgttctgttggaggttttgtgctgtagaccgatcagaatgcaaagtgttccaccggaacaagcagatttgatccgatgggtgaagtcaaatttcaataaaagaaccgttgatcagatcattgactcagatttaaccgctgatatcacttcgacctcgatggagaagttttgtgagatagccattagatgtgttcaagaccgtggtatggaacggccaccgatgaacgacgttgtttgggcgcttgagtttgctcttcagcttcacgagactgctaagaagaagaatgacaacgtggagtctctggatctaatgccaagtggtgaagttggtacgaccacggacggagaagatgacttgtttagtaggactacaggacacgttgggaaatcgaccacgaccgatgactctgttctagttgttggtgatgagaggagtggttcgagttggggagtattttcggagatcaatgaacctaaagcacggtagatttgatggcttggtaaacaagtatcacattctggttagggttgatatatatttgtgtatgtataattgttgaataaacacattattgtatttaaattacattttgatgattatttagcagcttaaatttag

SEQ ID NO: 98848 - protein, 895 aa, Arabidopsis thaliana
  peptide (1)..(895): Ceres Seq. ID no. 13601611
KFFNSLLVFFFLSIPMICHVLVIFTILVSAVVDATASYEPTDVFLINCGDTSNNMDYSGRNWTTENPKFMSSNAVDDASFTSSASYQESGIPQVPYLKARIFRYDFTYSFPVSPGWKFLRLYFYPTRYGSDFDAVKSFFSVNVNRFTLLHNFSVKASIPESSSLIKEFIVPVNQTLDLTFTPSPNSLAFVNGIEIISMPDRFYSKGGFDDVVRNVGRDVDFEIDNSTAFETVYRVNVGGKVVGDVGDSGMFRRWLSDEGFLLGINSGAIPNITGVKINYTDKTPAYVAPEDVYTTCRLMGNKDSPELNLNFNLTWLFEVDAGFAYIVRLHFCETQPEVNKTGDRVFSIFFGYQLAMREMDVFRLSGGFRLPMYLDFKVLVDADGTSQRPSLRVDLTPYKEDYPTYYDAILSGVEILKLSNSDGNLAGLNPIPQLSPPPQSITPLKGKGKSSHVLPIIIAVVGSAVALAFFVLVVVLVVMKRKKKSNESSVDTTNKPSTNSSWGPLLHGTGSTNTKSASSLPSDLCRRFSIYEIKSATNDFEEKLIIGVGGFGSVYKGRIDGGATLVAVKRLEITSNQGAKEFDTELEMLSKLRHVHLVSLIGYCDDDNEMVLVYEYMPHGTLKDHLFRRDKASDPPLSWKRRLEICIGAARGLQYLHTGAKYTIIHRDIKTTNILLDENFVAKVSDFGLSRVGPTSASQTHVSTVVKGTFGYLDPEYYRRQILTEKSDVYSFGVVLLEVLCCRPIRMQSVPPEQADLIRWVKSNFNKRTVDQIIDSDLTADITSTSMEKFCEIAIRCVQDRGMERPPMNDVVWALEFALQLHETAKKKNDNVESLDLMPSGEVGTTTDGEDDLFSRTTGHVGKSTTTDDSVLVVGDERSGSSWGVFSEINEPKAR

SEQ ID NO: 98849 - protein, 880 aa, Arabidopsis thaliana
  peptide (1)..(880): Ceres Seq. ID no. 13601612
MICHVLVIFTILVSAVVDATASYEPTDVFLINCGDTSNNMDYSGRNWTTENPKFMSSNAVDDASFTSSASYQESGIPQVPYLKARIFRYDFTYSFPVSPGWKFLRLYFYPTRYGSDFDAVKSFFSVNVNRFTLLHNFSVKASIPESSSLIKEFIVPVNQTLDLTFTPSPNSLAFVNGIEIISMPDRFYSKGGFDDVVRNVGRDVDFEIDNSTAFETVYRVNVGGKVVGDVGDSGMFRRWLSDEGFLLGINSGAIPNITGVKINYTDKTPAYVAPEDVYTTCRLMGNKDSPELNLNFNLTWLFEVDAGFAYIVRLHFCETQPEVNKTGDRVFSIFFGYQLAMREMDVFRLSGGFRLPMYLDFKVLVDADGTSQRPSLRVDLTPYKEDYPTYYDAILSGVEILKLSNSDGNLAGLNPIPQLSPPPQSITPLKGKGKSSHVLPIIIAVVGSAVALAFFVLVVVLVVMKRKKKSNESSVDTTNKPSTNSSWGPLLHGTGSTNTKSASSLPSDLCRRFSIYEIKSATNDFEEKLIIGVGGFGSVYKGRIDGGATLVAVKRLEITSNQGAKEFDTELEMLSKLRHVHLVSLIGYCDDDNEMVLVYEYMPHGTLKDHLFRRDKASDPPLSWKRRLEICIGAARGLQYLHTGAKYTIIHRDIKTTNILLDENFVAKVSDFGLSRVGPTSASQTHVSTVVKGTFGYLDPEYYRRQILTEKSDVYSFGVVLLEVLCCRPIRMQSVPPEQADLIRWVKSNFNKRTVDQIIDSDLTADITSTSMEKFCEIAIRCVQDRGMERPPMNDVVWALEFALQLHETAKKKNDNVESLDLMPSGEVGTTTDGEDDLFSRTTGHVGKSTTTDDSVLVVGDERSGSSWGVFSEINEPKAR

SEQ ID NO: 98850 - protein, 841 aa, Arabidopsis thaliana
  peptide (1)..(841): Ceres Seq. ID no. 13601613
MDYSGRNWTTENPKFMSSNAVDDASFTSSASYQESGIPQVPYLKARIFRYDFTYSFPVSPGWKFLRLYFYPTRYGSDFDAVKSFFSVNVNRFTLLHNFSVKASIPESSSLIKEFIVPVNQTLDLTFTPSPNSLAFVNGIEIISMPDRFYSKGGFDDVVRNVGRDVDFEIDNSTAFETVYRVNVGGKVVGDVGDSGMFRRWLSDEGFLLGINSGAIPNITGVKINYTDKTPAYVAPEDVYTTCRLMGNKDSPELNLNFNLTWLFEVDAGFAYIVRLHFCETQPEVNKTGDRVFSIFFGYQLAMREMDVFRLSGGFRLPMYLDFKVLVDADGTSQRPSLRVDLTPYKEDYPTYYDAILSGVEILKLSNSDGNLAGLNPIPQLSPPPQSITPLKGKGKSSHVLPIIIAVVGSAVALAFFVLVVVLVVMKRKKKSNESSVDTTNKPSTNSSWGPLLHGTGSTNTKSASSLPSDLCRRFSIYEIKSATNDFEEKLIIGVGGFGSVYKGRIDGGATLVAVKRLEITSNQGAKEFDTELEMLSKLRHVHLVSLIGYCDDDNEMVLVYEYMPHGTLKDHLFRRDKASDPPLSWKRRLEICIGAARGLQYLHTGAKYTIIHRDIKTTNILLDENFVAKVSDFGLSRVGPTSASQTHVSTVVKGTFGYLDPEYYRRQILTEKSDVYSFGVVLLEVLCCRPIRMQSVPPEQADLIRWVKSNFNKRTVDQIIDSDLTADITSTSMEKFCEIAIRCVQDRGMERPPMNDVVWALEFALQLHETAKKKNDNVESLDLMPSGEVGTTTDGEDDLFSRTTGHVGKSTTTDDSVLVVGDERSGSSWGVFSEINEPKAR

SEQ ID NO: 98851 - DNA, 1504 bp, Arabidopsis thaliana
  misc_feature (1)..(1504): Ceres Seq. ID no. 13601614
  misc_feature (1)..(1504): Ortholog of  Ceres SEQ ID NO 14313049 as cited in SEQ ID NO 54099
  misc_feature (1)..(1504): Ortholog of  Ceres SEQ ID NO 14314054 as cited in SEQ ID NO 56939
  misc_feature (1)..(1504): Ortholog of  Ceres SEQ ID NO 14303592 as cited in SEQ ID NO 68603
cttaccacaagattgttggagaaatggtttcatcacttaacatcatcgaagtggcacgagtcaccccttcaaactctgactcggccgagtcactcagtctcccactcacttatttcgaccttatctattataaacttcgcgccgtcgaacgagtcatcttctaccgaatcaccaacgtaactcgccctttctttgactcagtcatcgtcccaaatctcaaaacctctctatcctcatgcctctctcactatctcccactcgctggcaaacttatatgggaaccacttgatcacaaaccaaccattgtctactcccaaaacgacgacgtttcattcagcgtcgccgaaacaaacgctgatttctctagtttatccggcaatgaaccattcccctccaccgagttgtacccgttagtccccgcgttacaaagctccgacgactcggcctccattgtgtcgttccaagtcacgttatttccaaaccaaggattttgcatcggcgtaagtgcacatcatgccgttttagatggaaaaacgacaaccatgtttctcaaatcctgggctcacatatgtaaacatcaagatttttctctaccgcaggatttaatcccaacttacgatcgtacggtcattaaaagtccaacggatagtgaaaacaaagttttgaatgagtggcgctctttcaccaaaatattagctggtggtaaagaacctgccaaccccaagagtttaaagcttaatccatcatttgagattggtcctgacgttgtccgatacactctccagctcacgcgtgaagatatccaaacgcttcgcgagagacttaagagagaagtttcctcctcctcctcctcaacctcatcctcaaaagagcttcgcttgtctacatttgttattgtttactcgtatgtattagtatgcataataagagctcgaggcggggaaccacatagaccggttggatatgcgttttcggtggattgtcgaagcctcatgaatccgccgactccaaattattttggaaattgcatcgctggttgctctagaatgatgctgacggcaaaaatgtttatgggtgaagaaggacttttggctgctgcgacaatggtcagcgattcgatcgaagaatgggacgagagttttgcgtggaagattccggattttgtagcatatgcaactcttccaccagagacacaacttattttagtttcagggtctaaccgatttggagtatacgagttggattttgggtggggtagacctgataaagtgatggttgtgtcgatcagtccaggcaatgggatttccatggcggaaagtagagaccaaaacggcagtgtggagattggcttctcactcaagaagcacgaaatggacacattgattgatttgcttcattgtgaactaactatttaaataaacttttctttacatgaataaaattgattctctaaacaatatctttaaaacgataacaccaacttatctaatcaaattatttttag

SEQ ID NO: 98852 - protein, 470 aa, Arabidopsis thaliana
  peptide (1)..(470): Ceres Seq. ID no. 13601615
YHKIVGEMVSSLNIIEVARVTPSNSDSAESLSLPLTYFDLIYYKLRAVERVIFYRITNVTRPFFDSVIVPNLKTSLSSCLSHYLPLAGKLIWEPLDHKPTIVYSQNDDVSFSVAETNADFSSLSGNEPFPSTELYPLVPALQSSDDSASIVSFQVTLFPNQGFCIGVSAHHAVLDGKTTTMFLKSWAHICKHQDFSLPQDLIPTYDRTVIKSPTDSENKVLNEWRSFTKILAGGKEPANPKSLKLNPSFEIGPDVVRYTLQLTREDIQTLRERLKREVSSSSSSTSSSKELRLSTFVIVYSYVLVCIIRARGGEPHRPVGYAFSVDCRSLMNPPTPNYFGNCIAGCSRMMLTAKMFMGEEGLLAAATMVSDSIEEWDESFAWKIPDFVAYATLPPETQLILVSGSNRFGVYELDFGWGRPDKVMVVSISPGNGISMAESRDQNGSVEIGFSLKKHEMDTLIDLLHCELTI

SEQ ID NO: 98853 - protein, 463 aa, Arabidopsis thaliana; identical to SEQ ID NO: 24175
  peptide (1)..(463): Ceres Seq. ID no. 13601616

SEQ ID NO: 98854 - protein, 290 aa, Arabidopsis thaliana; identical to SEQ ID NO: 24176
  peptide (1)..(290): Ceres Seq. ID no. 13601617

SEQ ID NO: 98855 - DNA, 772 bp, Arabidopsis thaliana
  misc_feature (1)..(772): Ceres Seq. ID no. 13601645
  misc_feature (1)..(772): Ortholog of  Ceres SEQ ID NO 15172821 as cited in SEQ ID NO 57953
accttcacttaacacagcagaaaccctttcttcagtcttctcctgcgttctccttcttcacttcccaactaaatctcgccggacgatcgtaaccggagagcttccgtcgaccggtcaagtgtttgatatctaaagaagatgttgaagtttctatcaaaagtaagaattgagttcaacacattagatccaagacttgcgtcttgtgttgaattcttagctcaatgcaatgcaaggaaggccaaagaatcgaatcccaattgtcaggttttggtgaaacgtagaaccgatgagcagccgccgcagatcactgtcacttttgttaatggtgttgaggaagcttttgatgcagctgcaacctcggctcagtcgattagaaagatgattcttgataaaggtcagtatcttgagacagagcaaatgtttcgtgaagctggagaacaatggcctgtgattatccctgatgaagaacttctccaagaggctcctggtgttaagccgagaaaagcagaagacaagaagtgatgctgcaccaagcacgatcaatatctcttggtgtaatctcattgatttgacaaatctagcttttcggaatgtaagatcgtttgctgtgtgcaactcgatatgtgtctcaagcttagggtttcgactgatagatttgtattgttttcttgtttatgtgaaccgcaatggatgaacttttggtcaggaaccgggactatgacactgttatggaagctattgaagctctgggaataaaaaccaatttttatag

SEQ ID NO: 98856 - protein, 127 aa, Arabidopsis thaliana; identical to SEQ ID NO: 47616
  peptide (1)..(127): Ceres Seq. ID no. 13601646

SEQ ID NO: 98857 - protein, 77 aa, Arabidopsis thaliana
  peptide (1)..(77): Ceres Seq. ID no. 13601647
MKNFSKRLLVLSREKQKTRSDAAPSTINISWCNLIDLTNLAFRNVRSFAVCNSICVSSLGFRLIDLYCFLVYVNRNG

SEQ ID NO: 98858 - DNA, 1745 bp, Arabidopsis thaliana
  misc_feature (1)..(1745): Ceres Seq. ID no. 13601656
  misc_feature (1)..(1745): Ortholog of  Ceres SEQ ID NO 14314620 as cited in SEQ ID NO 56872
  misc_feature (1)..(1745): Ortholog of  Ceres SEQ ID NO 15178460 as cited in SEQ ID NO 66107
acggttccttctcttctctctctctctttctccgtctgtcgctgtctctctcgtcctctcctctgtttcgtagcttctgcagcagatctctctttgtccttctctctccctcagatcactatggcacagcaggaagctagtccttcccctggtgctgaggttgttggtcgtgcctttgtggagcaatactatcatattcttcaccaatctcccggtttagttcatcggttttatcaagattcgagctttttaacccgacctgatgttaccggtgctgtgactactgtcacaactatgcaagcgatcaacgacaagattctgtcgttgaaatatgaagactacacggctgagatagaaactgctgatgctcaggagtctcatgagagaggtgttattgtgctggttacaggacgcttaaccgggaacgataatgttaggaagaagtttagtcaatcttttttcttggctccacaagacaaaggatactttgtcttaaacgacgtgtttcgattccttgaggagaaagaggtgactgcacaagcccgctctgtccccatcaatggaaccactagggatgttcaggctcctattgaaccagaacgtgttgttgttagtcacgagcccgaggtagaacccgagccagttgcttctatcgaggaagaagatcttgacaatgtggcggaagtgtatgatccttctgataaagatgaaggagttgttgttgacgttgagcctattgaacctcccactcaaataagtcataatgaaatcttatcagtgcctcaaggagatgctcctaagcattcttatgcttcaatcctcaagcagatgaaaagcagtccagcaccaacaacacacgttgctagaaacaagccaagaccagctccagtcaaccagaagctgaccgcgcctcctgctgagcctgcagcaagacccgaggcttcagctcatgagaatgttccgaatagtagccatgttgatgtggaagatgatggtcattcgatttatgttcgaaatttgccgtttgactccacaccaacacaacttgaagaggtgttcaagaactttggtgcaatcaagcatgaggggattcaagtcagaagcaacaagcagcaaggtttctgttttggttttgtggaatttgaaacatctagcggaaagcaaagtgccctcgaggcctcaccagttacaattggagatcgtcaagctgttgtagaggagaagaaaacaaatagtcgaggaggaggcaacaatggaggtagcaggggaaggtacttttccggaagaggaagtttccgaaatgaaagcttcaaaggaggacgcggtggtgggggaagaggaggctatggaagaggaggaggtgagttttctggtagaccaaagagctcaaacccacgaaatggaggagaaggttaccaaagggttcctcaaaacggaggaggtggaagaggaggccgcggagaaggaggtcgtggtggagctcgaggtggtggttcatcttgactttgcttttaacgctcctctacaagagagtagttttaatttttgttttgcgtctttctttttgcctactacttgagttgatgtggtattggcttttttgtcggtctagtttttcaatattcttgctttttttcctctcttttttgtttttcatctttcaatctttctttggggtaatgtactcttcataaacaaacattcaatttcataaggaatccattatagagttgtgttctttacgc

SEQ ID NO: 98859 - protein, 500 aa, Arabidopsis thaliana; identical to SEQ ID NO: 42649
  peptide (1)..(500): Ceres Seq. ID no. 13601657

SEQ ID NO: 98860 - protein, 460 aa, Arabidopsis thaliana; identical to SEQ ID NO: 42650
  peptide (1)..(460): Ceres Seq. ID no. 13601658

SEQ ID NO: 98861 - protein, 402 aa, Arabidopsis thaliana; identical to SEQ ID NO: 42651
  peptide (1)..(402): Ceres Seq. ID no. 13601659

SEQ ID NO: 98862 - DNA, 1716 bp, Arabidopsis thaliana
  misc_feature (1)..(1716): Ceres Seq. ID no. 13601660
  misc_feature (1)..(1716): Ortholog of  Ceres SEQ ID NO 14310452 as cited in SEQ ID NO 54426
  misc_feature (1)..(1716): Ortholog of  Ceres SEQ ID NO 15169663 as cited in SEQ ID NO 64659
  misc_feature (1)..(1716): Ortholog of  Ceres SEQ ID NO 13656177 as cited in SEQ ID NO 64997
ttttctcagccaacaaacactagtctcttctgatttgtaccctaacgtttactcgacttatctaaagccgtgaacctcgccggaattcttaaagtcgcgatttttccttaacgccgtttgattcccttacggcctttgaggtccaggagatagcaaatttgttggtgagtactgaaaaatggaggaagagaacgaagtagtgaagacgtttgcagagcttggtgtgcgtgaggagcttgttaaagcttgcgagagattgggatggaagaacccttccaaaattcaagccgaagcccttccttttgctcttgaagggaaagatgtaattggacttgcgcaaaccggttctggtaaaaccggagcttttgcaattcctatattgcaagcactacttgagtatgtttatgattctgagcctaagaaaggacgtagaccggatcctgctttcttcgcttgtgttttatctccaactcgagaacttgcaatccagattgctgaacagtttgaagctcttggtgctgatataagtcttaggtgtgctgtgcttgttggaggtatagacaggatgcaacaaactattgctcttgggaaacggcctcatgttattgttgcaacacctggtcgtctttgggatcatatgtctgatacaaaaggcttttctctgaaatcattgaaatatctggttcttgatgaagcagatagactgttgaatgaagattttgagaaatctcttaaccagattttggaagagatccctcttgagcggaaaacatttcttttttcagcgactatgactaaaaaggttcgaaaacttcaaagggcatgtttgaggaatcctgtgaagattgaagctgcctccaaatattccactgtcgatactcttaagcagcagtatcggtttgttgccgctaaatacaaggattgctatctggtatacattctgagtgaaatgcctgaatcaacatctatgattttcacccgaacatgtgatggtactcgctttctggctttggtgcttcggagccttggttttagagctattcctatcagtggtcaaatgactcagtcaaagagactgggagctttaaataagttcaaagcaggggaatgtaatatcttggtttgtaccgatgtggctagtagagggctcgatatcccatcagttgatgtggttatcaattatgatattcccacaaattcaaaggattacatccatagagtaggaagaaccgctcgtgctggacgttctggtgttgggatatcacttgtaaaccagtatgagctcgaatggtatatacaaatagaaaaactcattggcaagaaactacctgaatatcccgctgaggaagatgaagtcttgtcattgttggagagagttgcagaagcgaaaaagctatctgcaatgaatatgaaagaatcaggaggtaggaagagaaggggagaagatgatgaagaaagtgagaggttcttgggaggtaacaaggacagaggcaacaaggaaagaggtggtaacaaagacaagaagtcttctaagaagttcaaacgataaaatagctctgtttttactgttttccgataactcaccaaagttttgaattgaagttttccatatgaactagggaaatttaatccattttgtactcgtaatttgtatgttcttttctttttgctttgtttctcaatgacagattatacaatttaagttgaaagatgttt

SEQ ID NO: 98863 - protein, 456 aa, Arabidopsis thaliana; identical to SEQ ID NO: 25574
  peptide (1)..(456): Ceres Seq. ID no. 13601661

SEQ ID NO: 98864 - protein, 327 aa, Arabidopsis thaliana; identical to SEQ ID NO: 25575
  peptide (1)..(327): Ceres Seq. ID no. 13601662

SEQ ID NO: 98865 - protein, 303 aa, Arabidopsis thaliana; identical to SEQ ID NO: 25576
  peptide (1)..(303): Ceres Seq. ID no. 13601663

SEQ ID NO: 98866 - DNA, 2072 bp, Arabidopsis thaliana
  misc_feature (1)..(2072): Ceres Seq. ID no. 13601664
  misc_feature (1)..(2072): Ortholog of  Ceres SEQ ID NO 13655755 as cited in SEQ ID NO 65117
actatctcacggcttttagttttcaccattctgattaaagagaaaccaaacgtttcatttttcaatatctagagagaaagatgcagacttcggtgaccccagatgccatctccaccgttttgtcaaacccatcctttgattcgtcttccgatcgatctgagatcgttgttcaagttgtggatcttaaacctatcggcaatcgctatacatttagtgcaaatgacggaaagacgaaagtcaaagcaatgtttactgcttcactcacacctgaaatcatttctgggaagatccagaacttgggtctaattcgtctcattgatttcactgttaacgacatttcaagcaaatctacaaaatatttccttgtgactaaatgtgaggctgttggttctgtgcttgattctgagattaacttggacagtaagagcggagaggaggaggctcgtgagcccaagaagcagaaactagagcattctcctgtcagtcctctgaatgatgttgtttctactggtatcacattgaaaccgaagcaggaatttgtagccaaatcagcttctcagataatgagtgaacaaaggggaaatgctgcaccagctgcaagaatggccatgactagaagggttcatccacttgtgtcattaaatccatatcaaggaaactggaccatcaaagtccgagttacaaacaagggagtgatgagaaattacaaaaacgctaggggtgaaggatgtgtcttcaatgttgaactaacagatgaagaaggaacacaaattcaagcaacgatgtttaatgatgctgcaaggaagttttttgacagattccagttgggaaaggtttattatatatcaagggggtcactaaaactcgctaacaagcagttcaaaacagttcagaatgattatgagatgacactgaatgaaaattcagaggttgaggaagctagtagcgaagaaatgttcatccctgagacaaaattcaacttcgtacccattgaagagttgggtctgtatgttaatcagaaggaacttattgatcttattggagttgttcaaagtgtatctcctaccatgagtattagaaggagaactgacaatgagatgattcctaagagggatataactttggctgatgagtcaaggaaaactgttgtggtgtccctgtggaatgatcttgcaactggcataggtcaggagctactagacatggctgatcagtcacctgtgattgcaatcaagtctctcaaagttggagattttcaaggtgtttcgttgtctaccatcagcagaagcaatgtggttattaacccggaatcaccagaagctaaaaagttgaaatcttggtttgattctgaaggcaaggaaatatccatgtcttctattggctcagggatgagcccttctgccaaaaatggatctcggtctttgtatactgaccgagtgcttctctctcacatcacaagcaatccatctttattcgaagaaaagcctgtatttttcagcactagggcttacataagcttcatcaaaccagaccaaacaatgtggtaccaagcttgtaagacttgtaacaagaaagtgacagaagcacttgactctggttactggtgtgaaggatgccagagaaagtatgaagaatgcagcttaaggtacataatggcggtgaaagtcaccgactcatctggagaaacttggatttcgtcattcaacgatgaagcagagaagattcttggatgttcagctgatgagctcaacaaactaaaatcagaggaaggtgaagtaaatgaatatcagacaaaactgaaagaggcaacatggtcatctcatgtcttccgggttagtgtcacacagaatgagtataacggtgagaagagacagagggtaactgtaaaaggagtagctcctcttgattttgctgctgaaacaagattgttgcttcaagacatctccaacaagaacaaaacatctcagtagtagcttttacttctttttttttctctattggcctaaaaaagtctcaaaacttttccttgtataatataagcctttctgcaatttataaaattagggttttgc

SEQ ID NO: 98867 - protein, 629 aa, Arabidopsis thaliana; identical to SEQ ID NO: 40682
  peptide (1)..(629): Ceres Seq. ID no. 13601665

SEQ ID NO: 98868 - protein, 574 aa, Arabidopsis thaliana; identical to SEQ ID NO: 40683
  peptide (1)..(574): Ceres Seq. ID no. 13601666

SEQ ID NO: 98869 - protein, 468 aa, Arabidopsis thaliana; identical to SEQ ID NO: 40684
  peptide (1)..(468): Ceres Seq. ID no. 13601667

SEQ ID NO: 98870 - DNA, 1562 bp, Arabidopsis thaliana
  misc_feature (1)..(1562): Ceres Seq. ID no. 13601668
  misc_feature (1)..(1562): Ortholog of  Ceres SEQ ID NO 15169110 as cited in SEQ ID NO 58675
tttacttttcctctgctcgtagacagctttgtgcttgagacgattcccagtttctgcgattccaagtcgaagatataacctctcctatttgcgtctcagcttctacagagcttttagcattaaaagttgttaaaatggctggggggtcaaagaggtctaaaagagcaagacttgacagtgaatcggaagacataagcgaccaagaaaaccttaaggccgaaagcgacaatgaagatgatcaattacctgatgggatagaggatgatgaagtagatagcatggaagatgatgagggagagagtgaggaagacgatgaaggagataccgaggaagatgatgaaggagatagcgaggaagatgatgaaggagagaacaaggaagacgaggatggagaaagcgaggactttgaagatggaaatgataaagagagtgagagtggcgatgaaggtaatgatgacaataaagatgctcagatggaagagcttgagaaagaggtcaaggagcttcgttcacaagagcaggatatattgaagaacttgaagcgtgataagggtgaagatgctgttaaaggtcaagcggtgaagaatcagaaggctctttgggataagattctggagttcagattcttacttcagaaagcatttgatcgttcaaacagattaccacaggagcctgtgaaatcgttattttgttcagaagatgaggatgtctcaacagcatatacagatctagttacttcatctaagaagacattagattccctcttggagttgcaagaggctttgtttgagaagaacccctcggttgatcaacaagtgaatgcaacagctagtgaagaatccaataaatcagatgcagaagatagcgatgaatggcagcgaatatctgacttgcagaaaagaatgtctgtgttccgaaacaaggctgtggacaaatggcagagaaaaacacaagtcacaactggtgcagctgctattaaaggaaagctccacgcctttaaccagaacgttagtgaacaggttgcttcctacatgagggatccaagtagaatgattaaacagatgcaacaatcaagatctactgttgctgtttttggaactgtccctcaggaagccatggaaccaaatccagaggaaaaacaagaagaaggagaccctgaacttgtggaagatgctgagttctataggcagttactaaaggagtttctcgagactatcgatccagcttcctcagaggcggctttctacgagatgaagaagttccagacgaagaagaggaaagttgtggatcgacgtgcctcaaagagcagaaagatcaggtataatgttcatgagaagattgtcaactttatggctccacgaccagcgaagattcctccaaacacggcggatttgcttaagaatctcttcggtctcaagaccagaaacgttcagtctgaagcttaatatcaaacaaaccacaattttgaaacgctgtaatagatcgtccctttttctgtggtgtgttgtaatactactattgacaccgtttctatcgaaagccatatgtgaaagcatctagtt

SEQ ID NO: 98871 - protein, 436 aa, Arabidopsis thaliana
  peptide (1)..(436): Ceres Seq. ID no. 13601669
MAGGSKRSKRARLDSESEDISDQENLKAESDNEDDQLPDGIEDDEVDSMEDDEGESEEDDEGDTEEDDEGDSEEDDEGENKEDEDGESEDFEDGNDKESESGDEGNDDNKDAQMEELEKEVKELRSQEQDILKNLKRDKGEDAVKGQAVKNQKALWDKILEFRFLLQKAFDRSNRLPQEPVKSLFCSEDEDVSTAYTDLVTSSKKTLDSLLELQEALFEKNPSVDQQVNATASEESNKSDAEDSDEWQRISDLQKRMSVFRNKAVDKWQRKTQVTTGAAAIKGKLHAFNQNVSEQVASYMRDPSRMIKQMQQSRSTVAVFGTVPQEAMEPNPEEKQEEGDPELVEDAEFYRQLLKEFLETIDPASSEAAFYEMKKFQTKKRKVVDRRASKSRKIRYNVHEKIVNFMAPRPAKIPPNTADLLKNLFGLKTRNVQSEA

SEQ ID NO: 98872 - protein, 388 aa, Arabidopsis thaliana
  peptide (1)..(388): Ceres Seq. ID no. 13601670
MEDDEGESEEDDEGDTEEDDEGDSEEDDEGENKEDEDGESEDFEDGNDKESESGDEGNDDNKDAQMEELEKEVKELRSQEQDILKNLKRDKGEDAVKGQAVKNQKALWDKILEFRFLLQKAFDRSNRLPQEPVKSLFCSEDEDVSTAYTDLVTSSKKTLDSLLELQEALFEKNPSVDQQVNATASEESNKSDAEDSDEWQRISDLQKRMSVFRNKAVDKWQRKTQVTTGAAAIKGKLHAFNQNVSEQVASYMRDPSRMIKQMQQSRSTVAVFGTVPQEAMEPNPEEKQEEGDPELVEDAEFYRQLLKEFLETIDPASSEAAFYEMKKFQTKKRKVVDRRASKSRKIRYNVHEKIVNFMAPRPAKIPPNTADLLKNLFGLKTRNVQSEA

SEQ ID NO: 98873 - protein, 323 aa, Arabidopsis thaliana
  peptide (1)..(323): Ceres Seq. ID no. 13601671
MEELEKEVKELRSQEQDILKNLKRDKGEDAVKGQAVKNQKALWDKILEFRFLLQKAFDRSNRLPQEPVKSLFCSEDEDVSTAYTDLVTSSKKTLDSLLELQEALFEKNPSVDQQVNATASEESNKSDAEDSDEWQRISDLQKRMSVFRNKAVDKWQRKTQVTTGAAAIKGKLHAFNQNVSEQVASYMRDPSRMIKQMQQSRSTVAVFGTVPQEAMEPNPEEKQEEGDPELVEDAEFYRQLLKEFLETIDPASSEAAFYEMKKFQTKKRKVVDRRASKSRKIRYNVHEKIVNFMAPRPAKIPPNTADLLKNLFGLKTRNVQSEA

SEQ ID NO: 98874 - DNA, 1327 bp, Arabidopsis thaliana
  misc_feature (1)..(1327): Ceres Seq. ID no. 13601676
  misc_feature (1)..(1327): Ortholog of  Ceres SEQ ID NO 15227099 as cited in SEQ ID NO 53558
  misc_feature (1)..(1327): Ortholog of  Ceres SEQ ID NO 14314563 as cited in SEQ ID NO 59349
  misc_feature (1)..(1327): Ortholog of  Ceres SEQ ID NO 12616360 as cited in SEQ ID NO 63543
atggcagcattgactcttcatcatcatcatcatcatcgtcatcactcgtgtcttcaagcgtctggacatctgtcacgtcgtctatatcaccgaatattctcgagctttccacgaaatcccgtcaaagatctcaactttcgtctaagtcttgccgatttctcgagtttttctttatctacacgtggcactgtgtttgctgtaagagctctgagtacagtcgcggtagaagagtcgtccgagaagaagatggtgaaagggattagggtttatgagcatggcggtcctgaggttctgaaatgggaagatgtggaagtaggggaaccaaaggagggtgagatacgtgtgaagaacaaggctatcgggcttaactttattgatgtttacttcaggaaaggtgtttacaagccagcttctatgcccttcacaccaggtatggaggctgttggagaggtggtagctgttgggtcgggattgactggcagaatgatcggtgatctcgttgcttatgctggaaatccgatgggtgcgtatgctgaggaacaaatccttccagcggataaagtggttcctgttccttcatctattgatcctatcgttgcagcatcaatcatgctcaagggtatgactgcacagtttctccttcgccgttgcttcaaggtcgaacctgggcacacaatccttgttcatgctgcagctggtggagttgggtctctgttgtgtcaatgggcaaatgcgcttggagccactgtgattggaactgtctcgaccaatgagaaagcggctcaagccaaagaagatggatgccaccatgttattatgtacaagaacgaggattttgtttcccgagtcaatgacattacatcgggtaaaggagtaaatgttgtttatgactctgtgggaaaagacacctttaagggatcgttagcatgtttgaagagccgaggatacatggtgagctttggacaatcctcaggatctccagatccgattccattatctgatcttgctccaaagtcgctcttcttgacaagaccttccatgatgcattacaatgaaactcgagatgagctcttggaatgtgcaggagaggttttcgctaatgttacctccggcatcttaaaggctcgtgtgaatcacaagtacccgttgtctcgagtcgctgacgcccacgcagatcttgagaataggatcacctctggctccgttgtgctcttgccatgaaaacatatacaatgatgttagtatctttcaataagggcaatgagattcctttgtgatggaaagaatattaaatgtaccttttggacctgaatgacaatttgagaat

SEQ ID NO: 98875 - protein, 406 aa, Arabidopsis thaliana
  peptide (1)..(406): Ceres Seq. ID no. 13601677
MAALTLHHHHHHRHHSCLQASGHLSRRLYHRIFSSFPRNPVKDLNFRLSLADFSSFSLSTRGTVFAVRALSTVAVEESSEKKMVKGIRVYEHGGPEVLKWEDVEVGEPKEGEIRVKNKAIGLNFIDVYFRKGVYKPASMPFTPGMEAVGEVVAVGSGLTGRMIGDLVAYAGNPMGAYAEEQILPADKVVPVPSSIDPIVAASIMLKGMTAQFLLRRCFKVEPGHTILVHAAAGGVGSLLCQWANALGATVIGTVSTNEKAAQAKEDGCHHVIMYKNEDFVSRVNDITSGKGVNVVYDSVGKDTFKGSLACLKSRGYMVSFGQSSGSPDPIPLSDLAPKSLFLTRPSMMHYNETRDELLECAGEVFANVTSGILKARVNHKYPLSRVADAHADLENRITSGSVVLLP

SEQ ID NO: 98876 - protein, 324 aa, Arabidopsis thaliana; identical to SEQ ID NO: 23832
  peptide (1)..(324): Ceres Seq. ID no. 13601678

SEQ ID NO: 98877 - protein, 268 aa, Arabidopsis thaliana; identical to SEQ ID NO: 23833
  peptide (1)..(268): Ceres Seq. ID no. 13601679

SEQ ID NO: 98878 - DNA, 815 bp, Arabidopsis thaliana
  misc_feature (1)..(815): Ceres Seq. ID no. 13601680
  misc_feature (1)..(815): Ortholog of  Ceres SEQ ID NO 13638658 as cited in SEQ ID NO 51921
  misc_feature (1)..(815): Ortholog of  Ceres SEQ ID NO 14306522 as cited in SEQ ID NO 53365
  misc_feature (1)..(815): Ortholog of  Ceres SEQ ID NO 15175175 as cited in SEQ ID NO 0
agaatcagccgacgtttcctcttcaccactttcctctgtttctctgtttcgctctctctacaaaatttctccatgaacatacttaacaagctaggtataggatcaagtagacaaaccaacatggatccttctccaatcgcacaagtaatcgacgacgaagctccggcgccgggaaaccagtttactcaattcggcgccggttgtttctggagcgtggaattagcgtaccagagagttccaggagtgactcaaacagaggttggttattctcaagggatcactcacgatccttcttacaaagatgtttgttcaggtaccacgaatcatgccgagattgttcgtgttcaatatgatccaaaagagtgtagttaccagtcgctgcttgatttgttctggtctaagcatgatcccaccactttgaatcggcagggaaatgatgtgggaacccaataccgttcagggatatatttctacaacccggagcaagagaaactagcacgcgagtcactggagcggcaccagcaacaagttgacaggaaggttgtgacagagatcttaccggctaagaaattttatagagctgaggaacatcaccagcaatacttgtctaaaggagggaggtttggtcttaagcaatcaacggaaaaaggctgcaacgacccaatccgctgctacgggtaaaagccttgcttctaaccgaaagcagaggatgcttccacttatctatgatagattatagcaattatcgttgaaaaataaagaagccgaggctacttatgtaacttgttcttgttcataaaactttttaagtgttc

SEQ ID NO: 98879 - protein, 226 aa, Arabidopsis thaliana
  peptide (1)..(226): Ceres Seq. ID no. 13601681
RISRRFLFTTFLCFSVSLSLQNFSMNILNKLGIGSSRQTNMDPSPIAQVIDDEAPAPGNQFTQFGAGCFWSVELAYQRVPGVTQTEVGYSQGITHDPSYKDVCSGTTNHAEIVRVQYDPKECSYQSLLDLFWSKHDPTTLNRQGNDVGTQYRSGIYFYNPEQEKLARESLERHQQQVDRKVVTEILPAKKFYRAEEHHQQYLSKGGRFGLKQSTEKGCNDPIRCYG

SEQ ID NO: 98880 - protein, 202 aa, Arabidopsis thaliana
  peptide (1)..(202): Ceres Seq. ID no. 13601682
MNILNKLGIGSSRQTNMDPSPIAQVIDDEAPAPGNQFTQFGAGCFWSVELAYQRVPGVTQTEVGYSQGITHDPSYKDVCSGTTNHAEIVRVQYDPKECSYQSLLDLFWSKHDPTTLNRQGNDVGTQYRSGIYFYNPEQEKLARESLERHQQQVDRKVVTEILPAKKFYRAEEHHQQYLSKGGRFGLKQSTEKGCNDPIRCYG

SEQ ID NO: 98881 - protein, 186 aa, Arabidopsis thaliana
  peptide (1)..(186): Ceres Seq. ID no. 13601683
MDPSPIAQVIDDEAPAPGNQFTQFGAGCFWSVELAYQRVPGVTQTEVGYSQGITHDPSYKDVCSGTTNHAEIVRVQYDPKECSYQSLLDLFWSKHDPTTLNRQGNDVGTQYRSGIYFYNPEQEKLARESLERHQQQVDRKVVTEILPAKKFYRAEEHHQQYLSKGGRFGLKQSTEKGCNDPIRCYG

SEQ ID NO: 98882 - DNA, 1130 bp, Arabidopsis thaliana
  misc_feature (1)..(1130): Ceres Seq. ID no. 13601688
  misc_feature (1)..(1130): Ortholog of  Ceres SEQ ID NO 13600141 as cited in SEQ ID NO 0
aatcaacaattacacttattttgctatcgtttgagcatctcaaaaatttctccggggagatttgtttgtatatactcttccacaaagaagatgctcaaggtccctgaacaccaagttgctggtcacattgctagtgatgggaagctcggtccactcgtagatgaccaaggccggttcttcaagccacttcagggagattctcgtggcgaacacgaggctaagttctatgagtctttcacatcgaacatgaaggttccagatcacatccatagatacttcccggtgtatcacggcactcagctagttgaagcatctgatggatctggcaagcttcctcatcttgttcttgatgatgttgtttcagggtacgcaaacccgtcggtaatggatgttaagattggatctaggacatggtacccggatgtatcagaagaatacttcaagaaatgtattaagaaagatagacagaccaccacggtttcgttggggttcagggtttcaggttttaagatttttgatcaccaagaatcaagtttttggagagctgagaagaagcttgttcttgggtataatgcagatggtgctagattggctctgaggaagtttgtgtcatcgaactctcccgctgactctaacttgacaccaaactgtgcttttgcatcagaggtttatggcggttgtaacgggatcttagcgcagttgttggagcttaaagattggttcgaaacccaaacgctttaccatttcaattcctgctcgattctgatgatttacgagaatgaatcaatcttgatgcaaggaggagatgatgcaccggcaccacgggcacaagtgaagctggtggatttcgcgcatgttcttgatggaaacggtgtcatcgaccataatttcttgggtggactctgctctttcataaagttcatcaaagatattcttcagagcgttgaaaagcacgatgaaaccgatacttccctacttgagaacgggcgctagagaaacgtcgttcttcccggctccatttcaaataatctccaagtttttcctttcttggactagttgggttttggacatgaacgtttgtccctttcaattgtataatttcgttaactaaaccattgtactttctcatt

SEQ ID NO: 98883 - protein, 330 aa, Arabidopsis thaliana
  peptide (1)..(330): Ceres Seq. ID no. 13601689
NQQLHLFCYRLSISKISPGRFVCIYSSTKKMLKVPEHQVAGHIASDGKLGPLVDDQGRFFKPLQGDSRGEHEAKFYESFTSNMKVPDHIHRYFPVYHGTQLVEASDGSGKLPHLVLDDVVSGYANPSVMDVKIGSRTWYPDVSEEYFKKCIKKDRQTTTVSLGFRVSGFKIFDHQESSFWRAEKKLVLGYNADGARLALRKFVSSNSPADSNLTPNCAFASEVYGGCNGILAQLLELKDWFETQTLYHFNSCSILMIYENESILMQGGDDAPAPRAQVKLVDFAHVLDGNGVIDHNFLGGLCSFIKFIKDILQSVEKHDETDTSLLENGR

SEQ ID NO: 98884 - protein, 300 aa, Arabidopsis thaliana; identical to SEQ ID NO: 30774
  peptide (1)..(300): Ceres Seq. ID no. 13601690

SEQ ID NO: 98885 - protein, 248 aa, Arabidopsis thaliana; identical to SEQ ID NO: 30775
  peptide (1)..(248): Ceres Seq. ID no. 13601691

SEQ ID NO: 98886 - DNA, 1166 bp, Arabidopsis thaliana
  misc_feature (1)..(1166): Ceres Seq. ID no. 13601692
  misc_feature (1)..(1166): Ortholog of  Ceres SEQ ID NO 13655124 as cited in SEQ ID NO 62896
  misc_feature (1)..(1166): Ortholog of  Ceres SEQ ID NO 14301898 as cited in SEQ ID NO 69243
acacccaaacacgcgacgcgagcgaagaagacgatgacgaacaaggagaaagctcgagagagaagggagaaaagaatgcaggagatctctctccttcgaactattccttactctgaccaccataggtggtggtcttgtgaaaatgtagcagtagtgactggttcaaaccgcgggattggattcgagattgcaagacagcttgcggttcacggattgacggttgttcttacagctagaaacgtgaatgctggtcttgaagcagttaaatctttgaggcaccaagaagaaggtctcaaggtttattttcatcaacttgatgtcacagactcttcgtcgattagagagtttggttgctggcttaagcaaacatttggaggtttagatattctcgtgaataatgcaggtgttaactacaatctcggctcagataatacggttgaatttgctgaaacagttatatctactaactaccaaggaaccaaaaacatgacaaaagctatgatacccttgatgagaccatctcctcatggcgctcgtgtagtcaatgttagttctcggctaggtagagtaaatggaagacgtaatagactggcaaatgtagagttgagagatcagctaagcagtccagatttgctgaccgaggaacttatagacagaactgtctctaaattcatcaaccaagtaaaagacggaacttgggaatcaggcgggtggcctcagacattcactgactactccatgtctaagcttgcagtcaatgcttacacgagactaatggcaaaagaacttgagagacgaggagaggaagagaagatttatgttaacagcttttgccctggttgggtgaagactgcgatgactggctacgccggaaatatgccacctgaagatgcagctgatactggagtttggcttagcctggtcctttccgaagaggcagtaaccggaaaattcttcgcagagagacgtgagatcaacttctgagggttgttgaatgtttgtaaacgttggaatagattgtgtcgtcttcgtttagtgccatagttttagtcaaaggtttacaaaatcaattgtaattggtaagtgaatggttgtagtcatgatacgcgtcagatttgccacaaaactaggagtttataatttaaatataattaatttttaattgc

SEQ ID NO: 98887 - protein, 327 aa, Arabidopsis thaliana
  peptide (1)..(327): Ceres Seq. ID no. 13601693
TPKHATRAKKTMTNKEKARERREKRMQEISLLRTIPYSDHHRWWSCENVAVVTGSNRGIGFEIARQLAVHGLTVVLTARNVNAGLEAVKSLRHQEEGLKVYFHQLDVTDSSSIREFGCWLKQTFGGLDILVNNAGVNYNLGSDNTVEFAETVISTNYQGTKNMTKAMIPLMRPSPHGARVVNVSSRLGRVNGRRNRLANVELRDQLSSPDLLTEELIDRTVSKFINQVKDGTWESGGWPQTFTDYSMSKLAVNAYTRLMAKELERRGEEEKIYVNSFCPGWVKTAMTGYAGNMPPEDAADTGVWLSLVLSEEAVTGKFFAERREINF

SEQ ID NO: 98888 - protein, 316 aa, Arabidopsis thaliana
  peptide (1)..(316): Ceres Seq. ID no. 13601694
MTNKEKARERREKRMQEISLLRTIPYSDHHRWWSCENVAVVTGSNRGIGFEIARQLAVHGLTVVLTARNVNAGLEAVKSLRHQEEGLKVYFHQLDVTDSSSIREFGCWLKQTFGGLDILVNNAGVNYNLGSDNTVEFAETVISTNYQGTKNMTKAMIPLMRPSPHGARVVNVSSRLGRVNGRRNRLANVELRDQLSSPDLLTEELIDRTVSKFINQVKDGTWESGGWPQTFTDYSMSKLAVNAYTRLMAKELERRGEEEKIYVNSFCPGWVKTAMTGYAGNMPPEDAADTGVWLSLVLSEEAVTGKFFAERREINF

SEQ ID NO: 98889 - protein, 302 aa, Arabidopsis thaliana
  peptide (1)..(302): Ceres Seq. ID no. 13601695
MQEISLLRTIPYSDHHRWWSCENVAVVTGSNRGIGFEIARQLAVHGLTVVLTARNVNAGLEAVKSLRHQEEGLKVYFHQLDVTDSSSIREFGCWLKQTFGGLDILVNNAGVNYNLGSDNTVEFAETVISTNYQGTKNMTKAMIPLMRPSPHGARVVNVSSRLGRVNGRRNRLANVELRDQLSSPDLLTEELIDRTVSKFINQVKDGTWESGGWPQTFTDYSMSKLAVNAYTRLMAKELERRGEEEKIYVNSFCPGWVKTAMTGYAGNMPPEDAADTGVWLSLVLSEEAVTGKFFAERREINF

SEQ ID NO: 98890 - DNA, 1669 bp, Arabidopsis thaliana
  misc_feature (1)..(1669): Ceres Seq. ID no. 13601696
  misc_feature (1)..(1669): Ortholog of  Ceres SEQ ID NO 13662164 as cited in SEQ ID NO 67158
atcttcaaatgaaaatcgctgggctctcgctgtcaacgctgggcgtgagtgagatctaacaatcggtagcgaattttgtaaattttgttccggttttgaagtctcaatctcggggttccggttttagcaactacttcttctgacatttcagctgttctagttgatctttatatactttatatgatctgggattttgaagagtttttagggaggaaccaaaatttctgagagagaaaaatgaagttatcgagctgcgttttgatcttccttctatgtaacacattctcctcgatttctgctttccgtctgagtcggagtcaaccaactgagcgaatttcaggtagtgctggtgatgtgttggaagatgatcccgtgggaagactgaaagtctttgtttatgagcttccaagtaaatacaacaagaagatacttcagaaggatccgagatgtctaaaccacatgtttgctgctgagatatatatgcaacggtttcttttatctagcccagttcgaacacttaatcccgaggaagctgattggttctacgtacctgtgtacaccacttgtgatctcacgcctaatgggcttcctcttccttttaaatctccacgaatgatgagaagtgccattcagcttattgcttccaattggccatactggaatcgcacagaaggagcagaccacttctttgttgtgcctcatgactttggagcctgtttccattatcaagaagagaaggcaataggaagaggaatactacccttgcttcaacgagctacactggtgcagacatttggacaaaggaatcatgtttgcttgaaagaaggttcaatcactgttcctccatatgctccaccacagaagatgcagtcacacttaattcccgaaaaaactcctcgatccatcttcgtttatttcagaggattgttttatgatgtgggaaatgaccctgagggtggttattatgcgaggggtgcaagagcagctgtatgggaaaacttcaaagacaatccgctgtttgacatctcaacagagcacccaacaacatattatgaggacatgcagagagcaatcttctgcctatgcccacttggatgggccccatggagtccaagactggtggaagcagtgatattcggttgcatccctgtgatcatagcagacgacatcgtgttaccttttgcagatgcaatcccttgggaagatattggtgtgtttgtggatgagaaagatgtcccttacctggacacaatactcacatcgatcccaccagaggttatactgagaaaacagaggttgttggcaaacccgtcgatgaaacaagccatgctgttcccgcaaccggctcaaccaggggatgcgtttcatcaagtattgaatgggttggctcgtaagctgcctcatgagaggagtgtgtatctgagaccaggtgagaagctgttgaactggacggcaggaccggtcgctgatctgaaaccttggtaaggaccagtgttggaatttgattgaatgagctattgtttggttggtttctgtcttctcgtgtctgtattttgtagaatcataacttttttttgctatgtagaagggaaaaagctttgtcattgtaatgtaactagaatccttttgacatctcacgagaaagacaagtaaaagaaaaattattgtt

SEQ ID NO: 98891 - protein, 415 aa, Arabidopsis thaliana; identical to SEQ ID NO: 22908
  peptide (1)..(415): Ceres Seq. ID no. 13601697

SEQ ID NO: 98892 - protein, 341 aa, Arabidopsis thaliana; identical to SEQ ID NO: 22909
  peptide (1)..(341): Ceres Seq. ID no. 13601698

SEQ ID NO: 98893 - protein, 334 aa, Arabidopsis thaliana; identical to SEQ ID NO: 22910
  peptide (1)..(334): Ceres Seq. ID no. 13601699

SEQ ID NO: 98894 - DNA, 1136 bp, Arabidopsis thaliana
  misc_feature (1)..(1136): Ceres Seq. ID no. 13601700
  misc_feature (1)..(1136): Ortholog of  Ceres SEQ ID NO 14315455 as cited in SEQ ID NO 56988
ttcttctgctttcgtgactttcaggggacacttttgtttttataacttacgcttaaaatcctatgaattcgccgccggttgacgcaatgattaccggagaatcatcgtcacaaagatctatcccaacgccgtttctcacaaaaacgtttaacctcgttgaagatagttccatcgacgatgttatctcatggaacgaagatggttcctctttcatcgtatggaatccgacagatttcgctaaagatttgcttcctaaacacttcaaacacaacaatttctctagtttcgttcgtcagctcaacacttacggattcaaaaaagttgtaccggatcgatgggagttttcaaacgatttctttaagagaggagaaaaacgtcttctccgtgagatccaacgtcggaaaataacaacgacgcatcaaacagttgttgctccttcgtcggaacaacgaaaccagacgatggttgtatcaccgtcaaattccggggaagataataataataatcaggtgatgtcttcgtctccgtcgtcgtggtattgtcatcaaacgaagacgactgggaatggtggtttatcagtggagttattggaagagaacgagaagcttcggagtcaaaacattcagctaaaccgtgagcttactcagatgaaatctatctgcgataatatctatagtctcatgtcgaattacgtcggatctcagcccactgatcggagttattctcccggaggtagtagtagtcaaccgatggagtttttaccggcgaagcggttttcggagatggagattgaagaagaagaagaagcgagtccgaggttgtttggtgttccgattgggttaaaacggacgagaagtgaaggtgttcaggtgaagacgacggcggtggttggggaaaattccgatgaggagacgccgtggttgagacattataatcgaaccaatcagagagtttgtaattaaaaacgaacggtttagatttgtggtgtagatatgtgcgcgaagtagacgattacagctttttaagacaagcagagcacgtgtcccatctgtttcaagaagtttctgcaatcttgacttcttcttttaacactttgtgttttttattatttaattaataacaataaatgttctttt

SEQ ID NO: 98895 - protein, 299 aa, Arabidopsis thaliana; identical to SEQ ID NO: 21940
  peptide (1)..(299): Ceres Seq. ID no. 13601701

SEQ ID NO: 98896 - protein, 291 aa, Arabidopsis thaliana; identical to SEQ ID NO: 21941
  peptide (1)..(291): Ceres Seq. ID no. 13601702

SEQ ID NO: 98897 - protein, 166 aa, Arabidopsis thaliana; identical to SEQ ID NO: 21942
  peptide (1)..(166): Ceres Seq. ID no. 13601703

SEQ ID NO: 98898 - DNA, 1668 bp, Arabidopsis thaliana
  misc_feature (1)..(1668): Ceres Seq. ID no. 13601704
  misc_feature (1)..(1668): Ortholog of  Ceres SEQ ID NO 14315196 as cited in SEQ ID NO 57698
gatctcataacttagccattctaaaacccattcaccgtctctgtttcgttcgccgtgattcatagtcgtctcgtctcaccgtcaccatcaccgtcttcttcttccattgacaggatcttgtttagattctgcaatggctttcaggcaaactttatctataaggtccaggcttttcgctcgtcgtaaccaaccagtttatcatattatccctcgtgagagtgatcatgaaagggattcattctgtcaagaaacatctcagagaagttaccatagctttcttcaccaaagatccgttaacaattctgatttctccaaagtttctggaggaagcttacatttgcctcttgctcccacgtctggttttgctttctatcgttatatgtcaagtgcacctggtgttggttcagagaagattggtgtgatgtctgacattgcagaagtcataaccgactcaacattgcaagatgtgccagctcaggctgctgctgctgtcagtgaagttacacttgcagctgctgactctttcttccctatcgcggcccttcagcagtgcattgatatggtgcatacattcacaggctttgagtggtgggcatccattgttgtagcaaccattttgatccgatcatcaacagttcctctcttgatcaaacaaatgaaagacacaaccaagttagcgctgatgaggccacggttggagtccatccgggaggaaatgcaaaacaagggaatggactcggttacgatggcagaaggtcaaaaaaagatgaagaatttgtttaaagaatatggtgtcactccattcaccccaatgaaagggatgtttattcagggaccgctgttcatctgctttttccttgctattcgaaatatggcagagaaggtaccttcattccaaacaggaggtgcattatggtttaccgatctaacaactcccgacagcttatacatcttgccggttataacaggattgacattcttgataaccgttgagtgtaatgcacaagaaggcatggaagggaatccgatggctggcactgtaaaaactgtttgtcgggtttttgctctcctcacagtcccgatgacaatgagttttccacaggccatattttgttactggatcacatccaacctgttctctctcatgtatggacttgtgataaagcgtcctcaagtgaagaagatgttacgcatacctgatctgcctccacctcctccaggtcaacaaccttcatttgacctgttttcagctctcaagaaaatgaaagccatgacacaggaccatacacagaaccagatagaaccaccttcgccagtaaacccgaggctttcctcaacatcgctgagtcctgttagtaagaggctcaaggctttggagagccaagtaaagggaaggaagaagaatagcagcaagaagaagtgatttaaaacggtgcatactatttttgttaagagggccaaacgaaaaaaataataaagcttttgagtcgaaagtgaacacagaattttctcactgatgaaactactctgtgagctaaaaagctggaggcagctattgtaagtttgttttgaccaattatagaatagaagattgtttttatagaaacattttggataacatatacttttttatcttgttaagtaacagaacttgaacaacattggatc

SEQ ID NO: 98899 - protein, 429 aa, Arabidopsis thaliana; identical to SEQ ID NO: 38335
  peptide (1)..(429): Ceres Seq. ID no. 13601705

SEQ ID NO: 98900 - protein, 347 aa, Arabidopsis thaliana; identical to SEQ ID NO: 38336
  peptide (1)..(347): Ceres Seq. ID no. 13601706

SEQ ID NO: 98901 - protein, 333 aa, Arabidopsis thaliana; identical to SEQ ID NO: 38337
  peptide (1)..(333): Ceres Seq. ID no. 13601707

SEQ ID NO: 98902 - DNA, 486 bp, Arabidopsis thaliana
  misc_feature (1)..(486): Ceres Seq. ID no. 13601724
  misc_feature (1)..(486): Ortholog of  Ceres SEQ ID NO 12635836 as cited in SEQ ID NO 0
  misc_feature (1)..(486): Ortholog of  Ceres SEQ ID NO 13599004 as cited in SEQ ID NO 0
atatcctgatttccccactcgacgctgatttcttctctgcttctgtaatttctccaattcattgatcagatcagccatggaagacgagattgaattgaaaactgctcctgctgatttccggtttcctacaacaaatcaaactaggcactgcttcactcggtacatcgagtttcacaggtgtacaactgcaaagggagaggagtctaatgactgtgaaaggtttgccaagtattaccgtgccctctgtcctggagaatgggttgacaagtggaacgagcagagggagagtggaacttttccaggtcctctttgaaccaagccttcaatcttgatgaagaggcaatcaagtccgtaataatacatggtttcaaagttaatttcttgcttgcgtgtgtatgttttggccttattatttcctctctagtgtaagtgttttattgggatgtctaagaaaggccaatcaaattataatatgaaaacattcgc

SEQ ID NO: 98903 - protein, 78 aa, Arabidopsis thaliana; identical to SEQ ID NO: 35309
  peptide (1)..(78): Ceres Seq. ID no. 13601725

SEQ ID NO: 98904 - protein, 41 aa, Arabidopsis thaliana; identical to SEQ ID NO: 35310
  peptide (1)..(41): Ceres Seq. ID no. 13601726

SEQ ID NO: 98905 - DNA, 1120 bp, Arabidopsis thaliana
  misc_feature (1)..(1120): Ceres Seq. ID no. 13601727
  misc_feature (1)..(1120): Ortholog of  Ceres SEQ ID NO 15224924 as cited in SEQ ID NO 64061
aacgttacgagttcttcagtttctcagttctccaaacgacaacttcgagccaaaacaatggcggctactacattgtacaattcctgtcttcttcaaccgaagtatggcttcaccactcgccgcctaaaccagtctctcgttaactctcttacgaacccaacaagagtttcggttttgtggaagagtcgtagagatgttattgcgaaagcttcgattgaaatggcggaatcgaattcgatatcttccgttgttgtcaattcctctggtcctatcatcgtgattgataattacgacagcttcacttacaatctctgccagtatatgggagagctagggtgccattttgaagtttaccgcaatgatgaacttacagttgaggagctgaaaagaaaaaagccaagaggattgttgatttctcctggacctggtacccctcaagactctgggatttccttgcaaactgttttggaactcggaccacttgttcctttatttggagtatgtatgggtttgcagtgtataggagaagcatttggaggaaagattgtgcggtcaccatttggtgttatgcatgggaaaagctcaatggttcactatgatgagaaaggagaagaaggcttgttctctggattatccaaccctttccttgtaggtagatatcacagtctcgtgatcgaaaaagattcatttcctagtgatgaactcgaggttacagcatggacagaagatggtctggttatggctgcccgtcacagaaagtacaagcatatacagggagttcaatttcatccggagagtattataacaaccgaaggcaagacaattgttcgcaatttcatcaaactcgtagagaaaaaggaatctgagaagctggcataggcttagcctgaatgagaaaatcagctgtgttcgattagtgcttccctgtaataatgtctgccaatgcaaaatgttccttggcatcttaccattgtttctacccggaatgtgtctagttctttcagttcaggacgaatctggaaaggctcgatagtattcagtgctgttggaacataacagtacatgagataagatctaatcagatctcactttcttattgtcatactggctttccttggtc

SEQ ID NO: 98906 - protein, 292 aa, Arabidopsis thaliana
  peptide (1)..(292): Ceres Seq. ID no. 13601728
NVTSSSVSQFSKRQLRAKTMAATTLYNSCLLQPKYGFTTRRLNQSLVNSLTNPTRVSVLWKSRRDVIAKASIEMAESNSISSVVVNSSGPIIVIDNYDSFTYNLCQYMGELGCHFEVYRNDELTVEELKRKKPRGLLISPGPGTPQDSGISLQTVLELGPLVPLFGVCMGLQCIGEAFGGKIVRSPFGVMHGKSSMVHYDEKGEEGLFSGLSNPFLVGRYHSLVIEKDSFPSDELEVTAWTEDGLVMAARHRKYKHIQGVQFHPESIITTEGKTIVRNFIKLVEKKESEKLA

SEQ ID NO: 98907 - protein, 273 aa, Arabidopsis thaliana
  peptide (1)..(273): Ceres Seq. ID no. 13601729
MAATTLYNSCLLQPKYGFTTRRLNQSLVNSLTNPTRVSVLWKSRRDVIAKASIEMAESNSISSVVVNSSGPIIVIDNYDSFTYNLCQYMGELGCHFEVYRNDELTVEELKRKKPRGLLISPGPGTPQDSGISLQTVLELGPLVPLFGVCMGLQCIGEAFGGKIVRSPFGVMHGKSSMVHYDEKGEEGLFSGLSNPFLVGRYHSLVIEKDSFPSDELEVTAWTEDGLVMAARHRKYKHIQGVQFHPESIITTEGKTIVRNFIKLVEKKESEKLA

SEQ ID NO: 98908 - protein, 219 aa, Arabidopsis thaliana; identical to SEQ ID NO: 27453
  peptide (1)..(219): Ceres Seq. ID no. 13601730

SEQ ID NO: 98909 - DNA, 1498 bp, Arabidopsis thaliana
  misc_feature (1)..(1498): Ceres Seq. ID no. 13601739
  misc_feature (1)..(1498): Ortholog of  Ceres SEQ ID NO 15174737 as cited in SEQ ID NO 52912
  misc_feature (1)..(1498): Ortholog of  Ceres SEQ ID NO 13624551 as cited in SEQ ID NO 0
ctctcgatttttcttgggaagaagaaactcatgggaattttcaggaattttgtcagccattttctctcatttgagaaaccactaaattagagcttcaaaaaacttctaaaggaatgaatgtttctttgatttccaagagagttttggttcgttgactgagtttagttttggagatctagcaactgaaagctggttaaatacttaaatggacgtagcaggctactgtttgtgaatcctctcgatggcgatgttgtttgtgtggaaaaagtatggcctgtttcagatgtttctctgttgattcaagttttaaacgagagccaagagtcagaaatcaggtcacaggctcgtgaaagctgctttgagtcaaacccatgtcaggtgctcctagagttcagtccatgaatgtggctgaagcagagaccaggtcaactctggggtctactgctaaaaaggctagtcctttcatcacacacaaagctgtatcaaagtcactgcgaaagcttgaaagatcctcatctgggcgtactggatcagatgagaaaacatcttatgctacaccaacagaaactgtgtcttcttcttctcagaagcatactcttaatgcggcttctatactacgacggcatgagcagaacctgaattctaatctgtcacttaatgcatcgttttcatctgatgcctccatggactcgttccacagccgagcatcaactggtcgcttgattaggtcgtacagtgttggaagtagaagtaagtcttacccttccaagccaagaagtgttgtctctgaaggtgctttggattcaccacctaatggttcagagactaagaagaggtgtacttgggtgacaccaaactccgatccatgttatatagttttccatgatgaagaatggggtgtgccagttcacgatgacaagaggttgtttgaactccttgtgctttcgggtgctttggccgaacacacatggcctacgatactgagcaagagacaggctttcagggaagtttttgctgattttgaccccaatgccattgtgaaaatcaatgagaagaagataattggtccaggaagcccggcaagcactttattgtctgatcttaagctaagggcagtcattgagaatgcacgccagatacttaaggtgatagaagaatacggatcatttgacaagtatatatggagttttgtgaagaataaggcgattgtgagcaagttcaggtaccagcgacaagtacctgcaaaaactccaaaagcagaagtgataagtaaagatctagtgagaagagggttccgcagcgtcggaccaacggtggtttactccttcatgcaggcagcagggataacaaacgatcatcttaccagttgtttcaggttccaccattgtatattcgaacatgaaaggtatgtctgaaaagaaggacttcctaaaacttgttaaagtccttttatgttttgtaaagcctccaatttgagtctattattagtattcaaaac

SEQ ID NO: 98910 - protein, 347 aa, Arabidopsis thaliana
  peptide (1)..(347): Ceres Seq. ID no. 13601740
MSGAPRVQSMNVAEAETRSTLGSTAKKASPFITHKAVSKSLRKLERSSSGRTGSDEKTSYATPTETVSSSSQKHTLNAASILRRHEQNLNSNLSLNASFSSDASMDSFHSRASTGRLIRSYSVGSRSKSYPSKPRSVVSEGALDSPPNGSETKKRCTWVTPNSDPCYIVFHDEEWGVPVHDDKRLFELLVLSGALAEHTWPTILSKRQAFREVFADFDPNAIVKINEKKIIGPGSPASTLLSDLKLRAVIENARQILKVIEEYGSFDKYIWSFVKNKAIVSKFRYQRQVPAKTPKAEVISKDLVRRGFRSVGPTVVYSFMQAAGITNDHLTSCFRFHHCIFEHERYV

SEQ ID NO: 98911 - protein, 338 aa, Arabidopsis thaliana
  peptide (1)..(338): Ceres Seq. ID no. 13601741
MNVAEAETRSTLGSTAKKASPFITHKAVSKSLRKLERSSSGRTGSDEKTSYATPTETVSSSSQKHTLNAASILRRHEQNLNSNLSLNASFSSDASMDSFHSRASTGRLIRSYSVGSRSKSYPSKPRSVVSEGALDSPPNGSETKKRCTWVTPNSDPCYIVFHDEEWGVPVHDDKRLFELLVLSGALAEHTWPTILSKRQAFREVFADFDPNAIVKINEKKIIGPGSPASTLLSDLKLRAVIENARQILKVIEEYGSFDKYIWSFVKNKAIVSKFRYQRQVPAKTPKAEVISKDLVRRGFRSVGPTVVYSFMQAAGITNDHLTSCFRFHHCIFEHERYV

SEQ ID NO: 98912 - protein, 243 aa, Arabidopsis thaliana
  peptide (1)..(243): Ceres Seq. ID no. 13601742
MDSFHSRASTGRLIRSYSVGSRSKSYPSKPRSVVSEGALDSPPNGSETKKRCTWVTPNSDPCYIVFHDEEWGVPVHDDKRLFELLVLSGALAEHTWPTILSKRQAFREVFADFDPNAIVKINEKKIIGPGSPASTLLSDLKLRAVIENARQILKVIEEYGSFDKYIWSFVKNKAIVSKFRYQRQVPAKTPKAEVISKDLVRRGFRSVGPTVVYSFMQAAGITNDHLTSCFRFHHCIFEHERYV

SEQ ID NO: 98913 - DNA, 1382 bp, Arabidopsis thaliana
  misc_feature (1)..(1382): Ceres Seq. ID no. 13601745
  misc_feature (1)..(1382): Ortholog of  Ceres SEQ ID NO 14308867 as cited in SEQ ID NO 55300
aaacctctctcctcgaccctttaatttctaatcaccgaccaaaattgatcggaaacctagagctcttcgtattgctccgccaccatgcatatccggcgccagatcttcgttaaatctcctgactgtcaaaaagtcgtcgctctgcaattggatcctgcgcaatctctattaactctttcgggtatcacttccttactcgaatcgtcgcagcgtatatcgttttcggcttgctcgattactctagatgggaagcttttgaatggctctacacggatccaagtatcgaagcttccttctgtatccatgctcactcttttccctcgcctccgtggaggtggaggagatggtggggcaacgggagccgagtctcgcgattgctatctcaatatgtacgcggagaagaaacctgacaaggttgatcctaatgagcagaggctctccaaatggttgaattgtgctttgtctaacgagcctttggctgagccgtgcgtgattgatctccttgggaatttgttcaataaagaagttttggtgcacgctttgttgtctaagaggttgcctaaacaattctcgtacattaagggtttgaaagatatggtgaatattaagcttacgcctgttgctggttctgatggttcatcgcaagatacgactagtgcacagtttcagtgtccggtctcagggcttgaattcaatggaaagtacaagtttttcgctttgaggggatgtggacatgtgatgagcgcaaaggcgttgaaggaagtgaagtcttcttcttgtttggtgtgtcatgcggatgtcaaagattctgataagattgtgatcaatggtactgaggaggaagtagatttgttgagggagaggatggaggaggagaaagctaagctgagagagaagaaaggtgtctcaaagaagagtaagaacggtgctgctgtggtggctgatacaggtgcgaaggtcgcaaagagacagatagaggatgggaatgtcaatggcaatggtataactgtgaagaaattcaaggcggcggataaagtgccggttaatgctactaaggaagtctatgcttctctctttacttcctctaagaagaagtctgatttcagggagacttactcttgcaggtcacttcctctcggcaggaattgatttgttggatcaatgttgtttacctgctcgcttcatttgctctgtaatctgttttgattatattgatatatcaacttgcttttgtaatttcgcctactggataatataatgtttttcttttccttttgcaattggtaaaaacagtaaacatgtttgcatccactatgctaaaactagtaaaagtgttgtatcataagctgcaattgtaacaagaggatatgtatgttgtttac

SEQ ID NO: 98914 - protein, 354 aa, Arabidopsis thaliana
  peptide (1)..(354): Ceres Seq. ID no. 13601746
MHIRRQIFVKSPDCQKVVALQLDPAQSLLTLSGITSLLESSQRISFSACSITLDGKLLNGSTRIQVSKLPSVSMLTLFPRLRGGGGDGGATGAESRDCYLNMYAEKKPDKVDPNEQRLSKWLNCALSNEPLAEPCVIDLLGNLFNKEVLVHALLSKRLPKQFSYIKGLKDMVNIKLTPVAGSDGSSQDTTSAQFQCPVSGLEFNGKYKFFALRGCGHVMSAKALKEVKSSSCLVCHADVKDSDKIVINGTEEEVDLLRERMEEEKAKLREKKGVSKKSKNGAAVVADTGAKVAKRQIEDGNVNGNGITVKKFKAADKVPVNATKEVYASLFTSSKKKSDFRETYSCRSLPLGRN

SEQ ID NO: 98915 - protein, 281 aa, Arabidopsis thaliana
  peptide (1)..(281): Ceres Seq. ID no. 13601747
MLTLFPRLRGGGGDGGATGAESRDCYLNMYAEKKPDKVDPNEQRLSKWLNCALSNEPLAEPCVIDLLGNLFNKEVLVHALLSKRLPKQFSYIKGLKDMVNIKLTPVAGSDGSSQDTTSAQFQCPVSGLEFNGKYKFFALRGCGHVMSAKALKEVKSSSCLVCHADVKDSDKIVINGTEEEVDLLRERMEEEKAKLREKKGVSKKSKNGAAVVADTGAKVAKRQIEDGNVNGNGITVKKFKAADKVPVNATKEVYASLFTSSKKKSDFRETYSCRSLPLGRN

SEQ ID NO: 98916 - protein, 253 aa, Arabidopsis thaliana
  peptide (1)..(253): Ceres Seq. ID no. 13601748
MYAEKKPDKVDPNEQRLSKWLNCALSNEPLAEPCVIDLLGNLFNKEVLVHALLSKRLPKQFSYIKGLKDMVNIKLTPVAGSDGSSQDTTSAQFQCPVSGLEFNGKYKFFALRGCGHVMSAKALKEVKSSSCLVCHADVKDSDKIVINGTEEEVDLLRERMEEEKAKLREKKGVSKKSKNGAAVVADTGAKVAKRQIEDGNVNGNGITVKKFKAADKVPVNATKEVYASLFTSSKKKSDFRETYSCRSLPLGRN

SEQ ID NO: 98917 - DNA, 957 bp, Arabidopsis thaliana
  misc_feature (1)..(957): Ceres Seq. ID no. 13601753
  misc_feature (1)..(957): Ortholog of  Ceres SEQ ID NO 14306264 as cited in SEQ ID NO 1386
  misc_feature (1)..(957): Ortholog of  Ceres SEQ ID NO 13600592 as cited in SEQ ID NO 1398
  misc_feature (1)..(957): Ortholog of  Ceres SEQ ID NO 15179159 as cited in SEQ ID NO 0
ctctttgcaattactctgttttttgcttgtttaaaagtttttgaagaggaagagcaaatcattgattaggaaaatggagaaagcagttcactcgtcgaccacgtctggaccggcggttccaggggagacaacaaagaccggaacctccataattgacactgcagcctccgctgttcaaagttttgcaccggttaaccaaatccaccaacatctctgcgcgttccatttctatgctgacgacatggcacgacaagtagaggctcaccatttctgcagtcacgtgaacgaagagatgcgtcagtgtttgatctacgacggtccggatgcaaacgctcgtctaattggattggagtacatagtgtcagagaagctgttcatgactttgcctgacgaagagaagaagctttggcactcgcacgagtgggaagtgaaaggagggttcttgttcatgcctggtgttccaggtgccattcagcgtaaagatcttgataaagtcgctaagacttatgggaaagttttccatttttggcaagttgatttgggccatgagcttcccattggtttacctaatgtcatgatggctgttacacgcgatggccagcttttccacgagatgattcaggaggcagagaagcggtttggggtatcggtagagggggagagggactcacgggcgtatatgtctggacctgagctcgggatccatccattggcgaatggaggaggcaaagggatgaaactagagctacgagaggtcgatatcaagccggttgagtctgtcggcagcgtctttgtctgagtttacttaaaacctctaataatgccctcaaagcaagcaatgtatgttttggtaaacacaaaacgtacggaactagacaacaagattacttaaaatagtttggattatttctttgtggatcatatttataattagtaataagataagaaataatatct

SEQ ID NO: 98918 - protein, 241 aa, Arabidopsis thaliana
  peptide (1)..(241): Ceres Seq. ID no. 13601754
MEKAVHSSTTSGPAVPGETTKTGTSIIDTAASAVQSFAPVNQIHQHLCAFHFYADDMARQVEAHHFCSHVNEEMRQCLIYDGPDANARLIGLEYIVSEKLFMTLPDEEKKLWHSHEWEVKGGFLFMPGVPGAIQRKDLDKVAKTYGKVFHFWQVDLGHELPIGLPNVMMAVTRDGQLFHEMIQEAEKRFGVSVEGERDSRAYMSGPELGIHPLANGGGKGMKLELREVDIKPVESVGSVFV

SEQ ID NO: 98919 - protein, 185 aa, Arabidopsis thaliana
  peptide (1)..(185): Ceres Seq. ID no. 13601755
MARQVEAHHFCSHVNEEMRQCLIYDGPDANARLIGLEYIVSEKLFMTLPDEEKKLWHSHEWEVKGGFLFMPGVPGAIQRKDLDKVAKTYGKVFHFWQVDLGHELPIGLPNVMMAVTRDGQLFHEMIQEAEKRFGVSVEGERDSRAYMSGPELGIHPLANGGGKGMKLELREVDIKPVESVGSVFV

SEQ ID NO: 98920 - protein, 168 aa, Arabidopsis thaliana
  peptide (1)..(168): Ceres Seq. ID no. 13601756
MRQCLIYDGPDANARLIGLEYIVSEKLFMTLPDEEKKLWHSHEWEVKGGFLFMPGVPGAIQRKDLDKVAKTYGKVFHFWQVDLGHELPIGLPNVMMAVTRDGQLFHEMIQEAEKRFGVSVEGERDSRAYMSGPELGIHPLANGGGKGMKLELREVDIKPVESVGSVFV

SEQ ID NO: 98921 - DNA, 2022 bp, Arabidopsis thaliana
  misc_feature (1)..(2022): Ceres Seq. ID no. 13601765
  misc_feature (1)..(2022): Ortholog of  Ceres SEQ ID NO 12465083 as cited in SEQ ID NO 68239
acagtaacaatctctctctcgcaccttcttaaaagctgctctatttcttcgcttccctcttctcttcactcacaaaacattttgttctaatcccgcaactgctaaaaacaaacccttttgtcaaaaatctctcctttcggtggtgacagaaatctatggcaggaaatggcagaagcagcatacacagtagcatcagacagtgaaaacactggagaggagaaatcatcatcatctccttcattacccgaaatcgcccttggtatcgacattggtacttctcaatgcagtatagctgtttggaacggttctcaagttcacatcttgaggaacacaagaaaccagaagctcatcaaatcatttgtcactttcaaagatgaagttcctgctggtggtgttagcaaccagctcgcacatgagcaggaaatgctaaccggagccgctatcttcaacatgaagcggctcgttggtcgtgtagacactgatcctgtggttcacgctagcaagaaccttcctttcttggttcaaactcttgatattggagttagaccgtttattgcagctttggtgaacaatgcttggagatcaacaacaccagaggaagttttagctatatttctggtggagttacgtctgatggctgaagctcagttgaaacgtcctgtgagaaatgtagtgcttacggttccggtttcgttctctaggttccagctcacacggttcgaaagagcttgcgctatggctggacttcatgttcttcgtttgatgccggaaccaactgctattgcgttgctttatgcgcaacagcagcagatgactacccatgataacatgggaagcggaagcgagaggcttgcggttatattcaatatgggagctggttactgcgatgttgcggttactgctactgctggtggtgtttcacagataaaagctttagctggtagccccattgggggtgaagacattttgcagaacacaattcgccatatcgctccacctaatgaagaagcttcggggttgcttcgtgtagcggcacaggacgcgattcacaggctaacggatcaagaaaatgtccaaattgaagtggatttgggaaatggtaacaagatatccaaggttcttgataggttagagtttgaggaagtgaaccagaaggtatttgaggaatgtgagagacttgttgtgcagtgcctgcgagatgcgagagtcaatggtggtgatatcgatgatttgataatggttggagggtgttcgtacatcccgaaagtaagaactattatcaagaacgtatgcaagaaggatgagatatacaaaggcgtgaatcctttagaagctgcggttagaggagctgctttggaaggtgcggtgacttcagggattcatgatccttttgggagcttagatctgttaaccatacaagccacacctcttgcagttggagtaagagctaacggaaacaaattcatacccgtgattccgcgtaacacaatggttccagcgcggaaagacctcttcttcacaacggttcaagacaaccagaaggaagctctgatcattatatacgaaggagaaggagagactgttgaagagaatcatcttcttggttatttcaagctcgttgggattccgccagcaccgaaaggtgttccagagatcaatgtgtgtatggacattgatgcatcaaatgctttacgggttttcgcagctgtgttgatgccgggatcttcgagtccagtggttcctgtgattgaggtgaggatgcctacggttgatgatggacatggttggtgtgctcaagctttgaatgtgaaatatggagctactcttgatttgattactcttcagagaaagatgtaagattaaaataaaatggtgttggtgatagattttagattagatgtaagatacgaggatgcttcgtatagaaaagagtttgtaaagtttgtgtgtgttttggggtttgtcgttgaagtggtaaacaatgtttatgtgtgtaatgaagtaataatgctttgcagattg

SEQ ID NO: 98922 - protein, 563 aa, Arabidopsis thaliana; identical to SEQ ID NO: 77902
  peptide (1)..(563): Ceres Seq. ID no. 13601766

SEQ ID NO: 98923 - protein, 477 aa, Arabidopsis thaliana; identical to SEQ ID NO: 77903
  peptide (1)..(477): Ceres Seq. ID no. 13601767

SEQ ID NO: 98924 - protein, 468 aa, Arabidopsis thaliana; identical to SEQ ID NO: 77904
  peptide (1)..(468): Ceres Seq. ID no. 13601768

SEQ ID NO: 98925 - DNA, 604 bp, Arabidopsis thaliana
  misc_feature (1)..(604): Ceres Seq. ID no. 13601769
  misc_feature (1)..(604): Ortholog of  Ceres SEQ ID NO 13595763 as cited in SEQ ID NO 57864
ctgactgcttcagggtttaagggttactctcactcacacttccgctggtttgacaagattggataaaagcagccatggcaagtctgataatgactacaccattcccaggttctgtcactacatgtaagaagacaaataacctgtcagttcaaagagcctttagggtgacttgtatgcagacagagaaaccattagaggagctatacaatgttaaagtggaacggaaagtttcacagaaacggttggaggaacttggggtttcgagatggtcagtttggaagacagggaaatgcaaattgccatgggattggcaggtggatcagttggtttacattgaacaaggagaggttcgagttgttcccgaaggaagcaagaggtatatgcagtttttagctggagatcttgttcggtatccgaaatggttggaagctgatcttttctttaacgctccttatattgagcggtattgtttcaaggcctatggtgatgattgatccaactttgacttttgagtttttagtagagccaagaaactttacacttgttgtgtgttgttgtagcctgatggatctttttgtgataatataagaaaacaagttctctc

SEQ ID NO: 98926 - protein, 139 aa, Arabidopsis thaliana; identical to SEQ ID NO: 20992
  peptide (1)..(139): Ceres Seq. ID no. 13601770

SEQ ID NO: 98927 - protein, 134 aa, Arabidopsis thaliana; identical to SEQ ID NO: 20993
  peptide (1)..(134): Ceres Seq. ID no. 13601771

SEQ ID NO: 98928 - protein, 106 aa, Arabidopsis thaliana; identical to SEQ ID NO: 20994
  peptide (1)..(106): Ceres Seq. ID no. 13601772

SEQ ID NO: 98929 - DNA, 1526 bp, Arabidopsis thaliana
  misc_feature (1)..(1526): Ceres Seq. ID no. 13601777
  misc_feature (1)..(1526): Ortholog of  Ceres SEQ ID NO 13581947 as cited in SEQ ID NO 51812
agaggatattcttcgtcacaaaattaaaaaaaaaaagagtaggagaagagggaagcgactagcaccttttgtagttttccgtttattttctgtataaggcgggtgatttcggctccttcatcggaaattatgagcaacgttatcggcgatcgcactgaagacggcctttccaccgccgctgcggcctctggctctacggctgtccagagttctcctcccactgatcgtcctgtccgcgtctacgccgatgggatctacgatcttttccactttggtcatgctcgatctctcgaacaagccaaattagcgtttccaaacaacacttaccttcttgttggatgttgcaatgatgagactacccataagtacaagggaaggactgtaatgactgcagaagagcgatatgaatcacttcgacattgcaagtgggtggatgaagtcatccctgatgcaccatgggtggtcaaccaggagtttcttgacaagcaccagattgactatgttgcccacgattctcttccctatgctgattcaagcggagctggaaaggatgtctatgaatttgttaagaaagttgggaggtttaaggaaacacagcgaactgaaggaatatcgacctcggatataataatgagaatagtgaaagattacaatcagtatgtcatgcgtaacttggatagaggatactcaagggaagatcttggagttagctttgtcaaggaaaagagacttagagttaatatgaggctaaagaaactccaggagagggtcaaagaacaacaagaaagagtgggagaaaagatccaaactgtaaaaatgctgcgcaacgagtgggtagagaatgcagatcgatgggtcgctggatttcttgaaatatttgaagaaggttgccataagatgggaactgcaatcgtagacagtatccaagaaaggttaatgagacaaaagtcggcagagaggctggagaacggtcaggatgatgacacagacgaccagttctatgaagaatacttcgatcatgacatgggtagtgacgatgatgaagatgaaaaattctacgacgaggaagaagtaaaggaagaagagacagagaaaactgttatgacggatgctaaagacaacaagtaagaacaaatttggcttgcagaaacctcagattagctctacttatggccacttctactaaactcccttaagcctcgcactctctctcgaaattcatctacttaacatataataccaatgtttagaaagagagagtgtgtgatgtgtttgtttgtgtgtgttgaacaaacgaacgtgcgtggttgtctttggtgagttggtctcatctttgttgatttttgaatgcgcatgtatttttttcttctttttcatgacgggcaaagtgttatgaagtacaatgcaattgtctaaaacaggataagtcaatggttcgtgtgtgccataaagtaaacatcgctgtgtacatcttccatgttccaaactcaactcgttttcttcaaatattgaaatacaaattggtc

SEQ ID NO: 98930 - protein, 332 aa, Arabidopsis thaliana; identical to SEQ ID NO: 23873
  peptide (1)..(332): Ceres Seq. ID no. 13601778

SEQ ID NO: 98931 - protein, 247 aa, Arabidopsis thaliana; identical to SEQ ID NO: 23874
  peptide (1)..(247): Ceres Seq. ID no. 13601779

SEQ ID NO: 98932 - DNA, 930 bp, Arabidopsis thaliana
  misc_feature (1)..(930): Ceres Seq. ID no. 13601780
  misc_feature (1)..(930): Ortholog of  Ceres SEQ ID NO 14304569 as cited in SEQ ID NO 53472
  misc_feature (1)..(930): Ortholog of  Ceres SEQ ID NO 13584234 as cited in SEQ ID NO 64110
agatcctcgattccttcgttttctcgcttatcagtgcgatcaatggcggattcagctttcaggaaaattcagatccaaagagatgacactacatttgatgcctatgtggtcggtaaagatgatgcgcctgggattgtggtgattcaagaatggtggggtgttgactttgagatcaagaaccatgctattaaaatctcacaacttgagcctggattcaaagcccttatacctgacttgtatcgaggaaaggttggtttggatactgcagaggcacagcatctaatggatggccttgattggccaggtgctatcaaagatatccgcgcttctgttaattggctaaaatccaatggctcaaaaaaggttggtgtcactggaatgtgcatgggaggtgcattagctatagctagctctgtattggttcctgaggtggatgctgttgttggattctatggaaccccttcctcagagctcgcagatccagcacaagctaaggcacctattcaggctcattttggagagctcgacaattttgtcggtttttctgatgtcacggcagcaaagaatctcgaagagaagctgaaagcgtctggagtagcacatgaagttcacatctatccaggtaatggacacgcgttcttgaacaggagtccagaaggagtgagcagaaggaaaagcatgggactttctgatgaagatgaagccgcagtggagcttgcttggtctcgcttcacctcctggatgaaacagtacttggcttaagctttcttccatcaggcagcaatggttgatgtaagtcccaaaacgttgtgtgatgcccaatcatctttaaataaggacattgctcttagaacttttaatctgaaccaaataaagaggtttgtttacttgtgaatcagtattgagtggaaatgttcgaagccttttttg

SEQ ID NO: 98933 - protein, 253 aa, Arabidopsis thaliana
  peptide (1)..(253): Ceres Seq. ID no. 13601781
RSSIPSFSRLSVRSMADSAFRKIQIQRDDTTFDAYVVGKDDAPGIVVIQEWWGVDFEIKNHAIKISQLEPGFKALIPDLYRGKVGLDTAEAQHLMDGLDWPGAIKDIRASVNWLKSNGSKKVGVTGMCMGGALAIASSVLVPEVDAVVGFYGTPSSELADPAQAKAPIQAHFGELDNFVGFSDVTAAKNLEEKLKASGVAHEVHIYPGNGHAFLNRSPEGVSRRKSMGLSDEDEAAVELAWSRFTSWMKQYLA

SEQ ID NO: 98934 - protein, 239 aa, Arabidopsis thaliana
  peptide (1)..(239): Ceres Seq. ID no. 13601782
MADSAFRKIQIQRDDTTFDAYVVGKDDAPGIVVIQEWWGVDFEIKNHAIKISQLEPGFKALIPDLYRGKVGLDTAEAQHLMDGLDWPGAIKDIRASVNWLKSNGSKKVGVTGMCMGGALAIASSVLVPEVDAVVGFYGTPSSELADPAQAKAPIQAHFGELDNFVGFSDVTAAKNLEEKLKASGVAHEVHIYPGNGHAFLNRSPEGVSRRKSMGLSDEDEAAVELAWSRFTSWMKQYLA

SEQ ID NO: 98935 - protein, 159 aa, Arabidopsis thaliana
  peptide (1)..(159): Ceres Seq. ID no. 13601783
MDGLDWPGAIKDIRASVNWLKSNGSKKVGVTGMCMGGALAIASSVLVPEVDAVVGFYGTPSSELADPAQAKAPIQAHFGELDNFVGFSDVTAAKNLEEKLKASGVAHEVHIYPGNGHAFLNRSPEGVSRRKSMGLSDEDEAAVELAWSRFTSWMKQYLA

SEQ ID NO: 98936 - DNA, 2801 bp, Arabidopsis thaliana
  misc_feature (1)..(2801): Ceres Seq. ID no. 13601800
  misc_feature (1)..(2801): Ortholog of  Ceres SEQ ID NO 12616314 as cited in SEQ ID NO 64355
gttttcttctctcaatctgatgaaagttgttgtttttaggttttggggttatttctcaaatcgattcctgtcaccaaaatcaaaatctgaaagcaaatggttgatgaggatcacttggaagattttgtctgtgtttgactatggagttgcacataaatggttagggatcagaggaataagttgactcaggaagtttcttctgctttcagcggcaagctcaacatccttcctcctacactacaagacaggaagagctaaaagcatgcttaaatgattgcaaatccagtggtttagtggtgtctggttcggttagagatcagagggataagttgattcagtggcaagctcaacattcttaaatccaaggcatcggatgcaagtgaggaaactatcaatactacattcgatatcaatgtctttgggacgataactcttataaagttggtcactcctcatatgctaaaacaaggaggcggtcattttgttgtgataagcagtgctgcaggaaaggtaccatcacctggacaggctatatattctgcttcaaaacatgctctgcacggctacttccacagcttgcgttctgagttctgtcaggagggaatcaaagtgaccgtcgttattcctggtccaatagaaacgttgaatggtacaggaacatcaacttcggaagacaagaagtctcatgagaagcgtgtgtcatctgaatgatatgcagaactgactataatcgccgcgtctcatagcttgaaggaagcttggatttcatatcagccagtactgcttgtgatgtatctagtgcagtacatgccttcccttggcttttgctatttagtttctttgcgctcaagaggttttcagatgcagctacgagataaatcggactactgtatatagtaatccaacaggcttttgagcccagtggacttgagttcctagaaaagaaaaaccgaaaagaaagttatgtgatgcgtatattgaagactaatgaaaagcttttggggattcacttgctgccagaaactcacagacaacactcctgccaaagctgtcacaaggctgatcactgttcattctttccttctctgcagatatgtgccggcagtaatttaatttttgatgtcaatagatctaaaagtttatacaagaagaaaaggtgaactcggaaaccgaaaagatggagaaggaaagtcaggaaaactcgaccagacccgatgcttcgtctactgttttctcttcctctaagagtacatgcgcaagccctagctatctcaaagaagctggagacttgatcagtaggttgcctgatgatattctccaactaattctctcctatcttccaaccagattggcgatcaaaacttccgttttatccaggcgatggaggcatgtatggtctgatacatggtccctctccttccatagggacagaccggatgctccttgtattaacagaatcctagatcgctacagggctcccaagatgatgagttttcgtatctgttcttgttgcagggcagcctgtatcagcagacccgacacgcatgctgacatcgacagttggatcaacttcgccatgtcccgaaacgtggagaatctgtccctgtatctcgatgaggataaatatgatatccctgaattcctttacatcaattcctctctcaagcaactctaccttgatttcggctgcaaaaaggattttatatctctgaatcccaaatgttctgtgtcttggacatccctgaagaacctgtcattgtatcattgcaacatctctgatgaatccattgctattattctatctggttgtcccattctcgaaagcttattgttgtttttctgcaagaaactgaaggtccttgatctcagcaaatcaccgcgtctgataacattagaaatcactcgtagatgtcgaatggagccaacacagctcgttgcaccacatatccgttgtctcagattgataaactctgagaaaccatgtgctttagttgatgtctcctctttatcccaagctgaactagacattaccgcttacgcaatagttgataataaactggaggctgattttcatcagaccatggtggtaaagatgttagaaaagtgtcagaatgtggagaagcttactttgggggcaaactttcttaagatgttatctcttgccgagctccgtggtgtttcttttccaaagttgaaggctaaagctctgatacttgagacaatgatctctcgatatgttattcatggtatagtaaaggtgctacaaaactcgcctgacttgaagaagctaaccatacacccaatggggtctgccggctcatatcccataccggtaattatgaatattccttgaccccgaattttgaatcatcatattgaaatatacttgcattacaggaagagcatattgacatatacttggattctcatggcttgaattgggatccatcctggagctcggagtttaagaacacttcccgcaggaatgtagagtcaaagcaagtggcttcgtttctgcaacttgtgcttaaaaccatatcaacattagagttgattgtcgcaaggttggaaggttatatcaaaggaagacgttttgtagagttgcgtcagatggttccaatgcttcctcgcaacaacgatgtctccattgtgctcagctcaagaagaaaacgattcagagtgacttaagtcattttacatttaagtagtacactagatgaaaatctcttgtttgtttttcttactgaaataatcgaattctgttaaattgattttaagttgtgaaattgtttttacgtttt

SEQ ID NO: 98937 - protein, 391 aa, Arabidopsis thaliana
  peptide (1)..(391): Ceres Seq. ID no. 13601801
MEKESQENSTRPDASSTVFSSSKSTCASPSYLKEAGDLISRLPDDILQLILSYLPTRLAIKTSVLSRRWRHVWSDTWSLSFHRDRPDAPCINRILDRYRAPKMMSFRICSCCRAACISRPDTHADIDSWINFAMSRNVENLSLYLDEDKYDIPEFLYINSSLKQLYLDFGCKKDFISLNPKCSVSWTSLKNLSLYHCNISDESIAIILSGCPILESLLLFFCKKLKVLDLSKSPRLITLEITRRCRMEPTQLVAPHIRCLRLINSEKPCALVDVSSLSQAELDITAYAIVDNKLEADFHQTMVVKMLEKCQNVEKLTLGANFLKMLSLAELRGVSFPKLKAKALILETMISRYVIHGIVKVLQNSPDLKKLTIHPMGSAGSYPIPVIMNIP

SEQ ID NO: 98938 - protein, 289 aa, Arabidopsis thaliana
  peptide (1)..(289): Ceres Seq. ID no. 13601802
MMSFRICSCCRAACISRPDTHADIDSWINFAMSRNVENLSLYLDEDKYDIPEFLYINSSLKQLYLDFGCKKDFISLNPKCSVSWTSLKNLSLYHCNISDESIAIILSGCPILESLLLFFCKKLKVLDLSKSPRLITLEITRRCRMEPTQLVAPHIRCLRLINSEKPCALVDVSSLSQAELDITAYAIVDNKLEADFHQTMVVKMLEKCQNVEKLTLGANFLKMLSLAELRGVSFPKLKAKALILETMISRYVIHGIVKVLQNSPDLKKLTIHPMGSAGSYPIPVIMNIP

SEQ ID NO: 98939 - protein, 288 aa, Arabidopsis thaliana
  peptide (1)..(288): Ceres Seq. ID no. 13601803
MSFRICSCCRAACISRPDTHADIDSWINFAMSRNVENLSLYLDEDKYDIPEFLYINSSLKQLYLDFGCKKDFISLNPKCSVSWTSLKNLSLYHCNISDESIAIILSGCPILESLLLFFCKKLKVLDLSKSPRLITLEITRRCRMEPTQLVAPHIRCLRLINSEKPCALVDVSSLSQAELDITAYAIVDNKLEADFHQTMVVKMLEKCQNVEKLTLGANFLKMLSLAELRGVSFPKLKAKALILETMISRYVIHGIVKVLQNSPDLKKLTIHPMGSAGSYPIPVIMNIP

SEQ ID NO: 98940 - DNA, 1799 bp, Arabidopsis thaliana
  misc_feature (1)..(1799): Ceres Seq. ID no. 13601804
  misc_feature (1)..(1799): Ortholog of  Ceres SEQ ID NO 13594209 as cited in SEQ ID NO 59089
  misc_feature (1)..(1799): Ortholog of  Ceres SEQ ID NO 15169627 as cited in SEQ ID NO 64517
  misc_feature (1)..(1799): Ortholog of  Ceres SEQ ID NO 14307952 as cited in SEQ ID NO 66029
  misc_feature (1)..(1799): Ortholog of  Ceres SEQ ID NO 12614124 as cited in SEQ ID NO 68392
ttattcaaaatattttcaccaactaaaaaaagatacatcgaaacaaatctctctaatcatatctaagttataacttttctttataaacaataaacaatagctttgatttgaagcaagaggagcaacaatggagatcaccactatcatattcctcatcatatcctctctcaccttctccatcttccttaaactcatcttcttcttctcaactcacaaactcccaccgggaccacctcgttttccggtcatcggaaacatcatctggcttaagaaaaacaacttctccgatttccaaggcgttctccgtgacttagcctcccgtcacggaccaatcataacactccacgtaggctccaaaccttccatctgggtcacagacagatcactcgctcaccaagcccttgtccaaaacggtgccgttttctccgaccgttctctcgctctccctaccaccaaagtcatcaccagcaaccaacacgacatccactcctccgtctatggctctctctggagaaccctccgccgcaacctcacctccgaaatcctccagccctcgcgcgtgaaagcacacgcgccgtcgaggaaatggtctctcgagattctcgtggatctgttcgagacagagcagagagagaaaggacatatctccgacgctttagatcatttacgtcacgctatgttttatttgttggctctgatgtgtttcggagagaaactgagaaaagaagagatcagagagatcgaagaagctcagtaccaaatgctcataagctacaccaagttcagcgtcctcaacatcttcccaagcgtaaccaagttcttgctccggcgaaaatggaaagagtttttagaactaaggaaatctcaagagagcgttatacttcgatacgtgaacgcaagaagcaaagaaaccaccggagatgttctctgttacgtcgatacgctgctgaatcttgagatcccgacggaggagaaagaaggagggaagaagaggaaactgagtgactcggagatcgtgagtctgtgttcggagtttcttaacgcagctacggatccaacggcgacgtcgatgcagtggatcatggcgatcatggtgaagtatccagagatacagaggaaagtatacgaggaaatgaagactgtgttcgccggagaagaagaagaaagagaagagatcagagaagaggatttggggaagttgagttacctcaaagctgtgatcttggagtgtctaagaagacaccctcctggtcattacttgtcttaccataaggtcacacacgacaccgttttgggtggatttctcattccgcgccaaggtactataaactttatggtaggagaaatgggccgggacccaaaaatatgggaagatcctctaacgttcaagccagaaagatttctagagaacggagaagcatgtgattttgatatgacgggaactcgcgagattaaaatgatgccgtttggagcgggacgacggatgtgtcccggctacgcgctttcgttgcttcacctggaatattatgtggccaatttggtttggaaattcgagtggaaatgtgtggaaggtgaagaagttgatctatccgagaagcaacagttcatcacaatggtcatgaaaaaccctttcaaagcaaatatttatccaaggagaaagtgatatttgcttttgtcatattatcaaaaaggcccattgggcttatttgtcgtatgtatattaaaaactttgtctcatatgtattaaaacaatttgggcctttaatgggtttcaatataaagatgtcaacacttttagt

SEQ ID NO: 98941 - protein, 511 aa, Arabidopsis thaliana
  peptide (1)..(511): Ceres Seq. ID no. 13601805
MEITTIIFLIISSLTFSIFLKLIFFFSTHKLPPGPPRFPVIGNIIWLKKNNFSDFQGVLRDLASRHGPIITLHVGSKPSIWVTDRSLAHQALVQNGAVFSDRSLALPTTKVITSNQHDIHSSVYGSLWRTLRRNLTSEILQPSRVKAHAPSRKWSLEILVDLFETEQREKGHISDALDHLRHAMFYLLALMCFGEKLRKEEIREIEEAQYQMLISYTKFSVLNIFPSVTKFLLRRKWKEFLELRKSQESVILRYVNARSKETTGDVLCYVDTLLNLEIPTEEKEGGKKRKLSDSEIVSLCSEFLNAATDPTATSMQWIMAIMVKYPEIQRKVYEEMKTVFAGEEEEREEIREEDLGKLSYLKAVILECLRRHPPGHYLSYHKVTHDTVLGGFLIPRQGTINFMVGEMGRDPKIWEDPLTFKPERFLENGEACDFDMTGTREIKMMPFGAGRRMCPGYALSLLHLEYYVANLVWKFEWKCVEGEEVDLSEKQQFITMVMKNPFKANIYPRRK

SEQ ID NO: 98942 - protein, 328 aa, Arabidopsis thaliana
  peptide (1)..(328): Ceres Seq. ID no. 13601806
MFYLLALMCFGEKLRKEEIREIEEAQYQMLISYTKFSVLNIFPSVTKFLLRRKWKEFLELRKSQESVILRYVNARSKETTGDVLCYVDTLLNLEIPTEEKEGGKKRKLSDSEIVSLCSEFLNAATDPTATSMQWIMAIMVKYPEIQRKVYEEMKTVFAGEEEEREEIREEDLGKLSYLKAVILECLRRHPPGHYLSYHKVTHDTVLGGFLIPRQGTINFMVGEMGRDPKIWEDPLTFKPERFLENGEACDFDMTGTREIKMMPFGAGRRMCPGYALSLLHLEYYVANLVWKFEWKCVEGEEVDLSEKQQFITMVMKNPFKANIYPRRK

SEQ ID NO: 98943 - protein, 321 aa, Arabidopsis thaliana
  peptide (1)..(321): Ceres Seq. ID no. 13601807
MCFGEKLRKEEIREIEEAQYQMLISYTKFSVLNIFPSVTKFLLRRKWKEFLELRKSQESVILRYVNARSKETTGDVLCYVDTLLNLEIPTEEKEGGKKRKLSDSEIVSLCSEFLNAATDPTATSMQWIMAIMVKYPEIQRKVYEEMKTVFAGEEEEREEIREEDLGKLSYLKAVILECLRRHPPGHYLSYHKVTHDTVLGGFLIPRQGTINFMVGEMGRDPKIWEDPLTFKPERFLENGEACDFDMTGTREIKMMPFGAGRRMCPGYALSLLHLEYYVANLVWKFEWKCVEGEEVDLSEKQQFITMVMKNPFKANIYPRRK

SEQ ID NO: 98944 - DNA, 1500 bp, Arabidopsis thaliana
  misc_feature (1)..(1500): Ceres Seq. ID no. 13601808
  misc_feature (1)..(1500): Ortholog of  Ceres SEQ ID NO 15177652 as cited in SEQ ID NO 56858
  misc_feature (1)..(1500): Ortholog of  Ceres SEQ ID NO 13596932 as cited in SEQ ID NO 62984
  misc_feature (1)..(1500): Ortholog of  Ceres SEQ ID NO 13662197 as cited in SEQ ID NO 63622
acgtgtgattctatcttcaaagtatcaaagtatggaccatcaagtgtctctgccacaatctaccaccactggtctttctttcaaggtgcatcgccagcagcgggagctagtcactccggctaaaccaacgccacgagagctcaagcctctctccgacatagacgaccaacaaggactaagatttcaaattccagttatttttttctatagacctaacctttcaagtgatcttgatccggtccaggtgataaagaaagccctcgccgatgcgctggtttactactatccgttcgctggtaggctccgggaactttcaaaccggaaactcgcggtggactgcaccggtgaaggcgttttgttcatcgaggctgaagctgacgtggcgcttgctgagctggaagaggctgatgctcttcttcctccattccctttcctagaagagcttctctttgatgtggaaggctctagtgatgtgcttaacactcctctgcttctcgtccaggtcacgcgattgaaatgctgtggatttatcttcgcactccgcttcaaccataccatgaccgatggagccggcctgtcgctctttctgaaatcactatgcgagttggcgtgtgggcttcacgcaccctcggttccacccgtatggaaccgacacttgttgactgtgagtgcttcggaggcgcgtgtgacccacacacaccgtgagtacgatgatcaggtgggaatcgatgtggtcgccactggacaccctttggttagccggtctttctttttcagagcagaagagatctccgctataaggaaactccttccgcctgatctacacaatacctcatttgaagctttgtcgtcatttttgtggcgttgtcggactattgcgttgaatcctgaccccaacactgagatgcgtctaacttgcatcatcaactcgcgttccaagcttagaaacccaccgctagagcctggttactacggaaatgtgtttgtcattcccgcggcaatagcgacagcaagagatctaatagagaaaccgcttgagtttgctttgaggttgatacaagaaacgaagtcaagtgtaaccgaggactacgtccgttcagtgaccgccctaatggcgactagaggccggcctatgtttgtggcatcagggaactacataatatcggacttgagacattttgatttaggaaaaattgattttggaccgtggggtaagccagtgtacggtggaaccgctaaggccggtatcgcgcttttcccgggagtgagcttctacgtgccgtttaagaataaaaaaggtgagacaggtacagttgtggcgattagcttgccggtacgggcgatggagacgttcgtagcagagctaaatggagtgctaaatgtgtctaaaggatgagagcttagtcgagactcgagacgttattagtaatgtagtaaatagttccttttcttattcgacatcatagtgtagtaactaatatttatatcattgcatctttc

SEQ ID NO: 98945 - protein, 464 aa, Arabidopsis thaliana
  peptide (1)..(464): Ceres Seq. ID no. 13601809
RVILSSKYQSMDHQVSLPQSTTTGLSFKVHRQQRELVTPAKPTPRELKPLSDIDDQQGLRFQIPVIFFYRPNLSSDLDPVQVIKKALADALVYYYPFAGRLRELSNRKLAVDCTGEGVLFIEAEADVALAELEEADALLPPFPFLEELLFDVEGSSDVLNTPLLLVQVTRLKCCGFIFALRFNHTMTDGAGLSLFLKSLCELACGLHAPSVPPVWNRHLLTVSASEARVTHTHREYDDQVGIDVVATGHPLVSRSFFFRAEEISAIRKLLPPDLHNTSFEALSSFLWRCRTIALNPDPNTEMRLTCIINSRSKLRNPPLEPGYYGNVFVIPAAIATARDLIEKPLEFALRLIQETKSSVTEDYVRSVTALMATRGRPMFVASGNYIISDLRHFDLGKIDFGPWGKPVYGGTAKAGIALFPGVSFYVPFKNKKGETGTVVAISLPVRAMETFVAELNGVLNVSKG

SEQ ID NO: 98946 - protein, 454 aa, Arabidopsis thaliana
  peptide (1)..(454): Ceres Seq. ID no. 13601810
MDHQVSLPQSTTTGLSFKVHRQQRELVTPAKPTPRELKPLSDIDDQQGLRFQIPVIFFYRPNLSSDLDPVQVIKKALADALVYYYPFAGRLRELSNRKLAVDCTGEGVLFIEAEADVALAELEEADALLPPFPFLEELLFDVEGSSDVLNTPLLLVQVTRLKCCGFIFALRFNHTMTDGAGLSLFLKSLCELACGLHAPSVPPVWNRHLLTVSASEARVTHTHREYDDQVGIDVVATGHPLVSRSFFFRAEEISAIRKLLPPDLHNTSFEALSSFLWRCRTIALNPDPNTEMRLTCIINSRSKLRNPPLEPGYYGNVFVIPAAIATARDLIEKPLEFALRLIQETKSSVTEDYVRSVTALMATRGRPMFVASGNYIISDLRHFDLGKIDFGPWGKPVYGGTAKAGIALFPGVSFYVPFKNKKGETGTVVAISLPVRAMETFVAELNGVLNVSKG

SEQ ID NO: 98947 - protein, 279 aa, Arabidopsis thaliana
  peptide (1)..(279): Ceres Seq. ID no. 13601811
MTDGAGLSLFLKSLCELACGLHAPSVPPVWNRHLLTVSASEARVTHTHREYDDQVGIDVVATGHPLVSRSFFFRAEEISAIRKLLPPDLHNTSFEALSSFLWRCRTIALNPDPNTEMRLTCIINSRSKLRNPPLEPGYYGNVFVIPAAIATARDLIEKPLEFALRLIQETKSSVTEDYVRSVTALMATRGRPMFVASGNYIISDLRHFDLGKIDFGPWGKPVYGGTAKAGIALFPGVSFYVPFKNKKGETGTVVAISLPVRAMETFVAELNGVLNVSKG

SEQ ID NO: 98948 - DNA, 912 bp, Arabidopsis thaliana
  misc_feature (1)..(912): Ceres Seq. ID no. 13601823
  misc_feature (1)..(912): Ortholog of  Ceres SEQ ID NO 13574681 as cited in SEQ ID NO 19
tcaatctgcgaatttctcttaaaccctaaccctctcgctgccgtccggtggtttttccgacgacgaactatgacgattcacgctgcagtaatccagaagcttctgaacaccggagcacatctcggccgtcgtgccgccgagcaccatttcaagcaatacgcttacgggacgcgtaacggaatgacaattatcgactccgacaaaaccctaatttgcctccgtagcgccgctcatttcgtcgctaacctcgcccacatgagaggtaacatcttcttcgtcaacacgaatcctctcttcgacgaaatcattgagctcacttctcgtcggatccaaggagattcgtataatcacaaccgtgcgatgaatctgtggaagatgggagggtttttgactaacagctacagtcctaagaagtttcgatctaggcataaaaagctttgctttggtccaactactatgcctgattgtgtcgttgtgtttgattctgagaggaagagctctgtgatacttgaggcatcgaagcttcagattccggttgttgcaattgtggacccgaatgtgccattggagttctttgagaagattacgtatcctgtgccagctcgtgattcggtcaagtttgtgtatttgttctgtaatgtgatcaccaagtgctttgtggcagaacagatgaagttggggatcaaagaagggagcaatgaagatttgatgaaggatttagctgcttgattttgatatttgcaacaaaagtatgaaactttacagttgtttttctgagtctggaataattgttcttcagaattgtggttacttcaactttgaaattctgggagttttttacacatggatgattttgtttctctgatggatatttctgtataagattgttgagttctagtgttctacatcttg

SEQ ID NO: 98949 - protein, 242 aa, Arabidopsis thaliana
  peptide (1)..(242): Ceres Seq. ID no. 13601824
SICEFLLNPNPLAAVRWFFRRRTMTIHAAVIQKLLNTGAHLGRRAAEHHFKQYAYGTRNGMTIIDSDKTLICLRSAAHFVANLAHMRGNIFFVNTNPLFDEIIELTSRRIQGDSYNHNRAMNLWKMGGFLTNSYSPKKFRSRHKKLCFGPTTMPDCVVVFDSERKSSVILEASKLQIPVVAIVDPNVPLEFFEKITYPVPARDSVKFVYLFCNVITKCFVAEQMKLGIKEGSNEDLMKDLAA

SEQ ID NO: 98950 - protein, 219 aa, Arabidopsis thaliana
  peptide (1)..(219): Ceres Seq. ID no. 13601825
MTIHAAVIQKLLNTGAHLGRRAAEHHFKQYAYGTRNGMTIIDSDKTLICLRSAAHFVANLAHMRGNIFFVNTNPLFDEIIELTSRRIQGDSYNHNRAMNLWKMGGFLTNSYSPKKFRSRHKKLCFGPTTMPDCVVVFDSERKSSVILEASKLQIPVVAIVDPNVPLEFFEKITYPVPARDSVKFVYLFCNVITKCFVAEQMKLGIKEGSNEDLMKDLAA

SEQ ID NO: 98951 - protein, 182 aa, Arabidopsis thaliana
  peptide (1)..(182): Ceres Seq. ID no. 13601826
MTIIDSDKTLICLRSAAHFVANLAHMRGNIFFVNTNPLFDEIIELTSRRIQGDSYNHNRAMNLWKMGGFLTNSYSPKKFRSRHKKLCFGPTTMPDCVVVFDSERKSSVILEASKLQIPVVAIVDPNVPLEFFEKITYPVPARDSVKFVYLFCNVITKCFVAEQMKLGIKEGSNEDLMKDLAA

SEQ ID NO: 98952 - DNA, 1124 bp, Arabidopsis thaliana
  misc_feature (1)..(1124): Ceres Seq. ID no. 13601831
  misc_feature (1)..(1124): Ortholog of  Ceres SEQ ID NO 13596474 as cited in SEQ ID NO 62169
  misc_feature (1)..(1124): Ortholog of  Ceres SEQ ID NO 13596969 as cited in SEQ ID NO 63375
  misc_feature (1)..(1124): Ortholog of  Ceres SEQ ID NO 13597519 as cited in SEQ ID NO 64759
  misc_feature (1)..(1124): Ortholog of  Ceres SEQ ID NO 13597870 as cited in SEQ ID NO 64982
  misc_feature (1)..(1124): Ortholog of  Ceres SEQ ID NO 13595926 as cited in SEQ ID NO 67778
acattgcaacactttctacaaaaacaagatgaagattgcaacgttttctgttctactcttgcttttatttattttccccgtggcattagcgcagctgaaatttaagttttacagtgaatcgtgccctaatgcagagactatcgtagaaaacctggttcgccagcagtttgctcgtgacccttcaatcacggccgccttgactcgtatgcattttcacgactgttttgtccagggctgcgacgcttctctcctcatagacccaacgacgtctcaactatcggaaaaaaacgccggcccaaactttagcgtgagagggttcgagctgatcgacgagatcaagacggcactcgaagctcaatgtccctctacggtctcgtgctccgatatagtcacgctcgccacacgtgacgccgtgttcttaggtggaggaccaagctacgtggtccccaccggacgtcgcgatggctttgtgtcgaatcctgaagacgccaatgagatcctccctccaccattcatatccgtcgaaggcatgttaagttttttcggcaacaaaggaatgaatgtttttgattccgtagctcttttgggggcgcacacggttgggatcgcgtcttgtggtaattttgtggaccgggtcacgaactttcaaggaaccggactgcccgacccatccatggaccccactttggctggcaggctaaggaacacatgtgcggttccaggcggcttcgcggcactggaccagtcgatgccagtaacgccggtctcattcgacaacttgttctttggtcagatcagagagaggaaaggaattttgcttattgaccaactgatcgcaagcgacccggccacttctggtgttgtacttcagtacgcgtccaacaacgaactattcaaacgtcagttcgcaatcgcaatggtgaagatgggagccgttgacgtgcttaccggttcagctggtgagatcaggacgaattgtagagcattcaactaaagctttataacaagtttctatatctgattattgattgtttttcccttaatttccgcttctgatgatgaattgtgaatggtgattgtttgcctatatatgtatgtacgtatatctttaaaataaggtttgg

SEQ ID NO: 98953 - protein, 330 aa, Arabidopsis thaliana
  peptide (1)..(330): Ceres Seq. ID no. 13601832
HCNTFYKNKMKIATFSVLLLLLFIFPVALAQLKFKFYSESCPNAETIVENLVRQQFARDPSITAALTRMHFHDCFVQGCDASLLIDPTTSQLSEKNAGPNFSVRGFELIDEIKTALEAQCPSTVSCSDIVTLATRDAVFLGGGPSYVVPTGRRDGFVSNPEDANEILPPPFISVEGMLSFFGNKGMNVFDSVALLGAHTVGIASCGNFVDRVTNFQGTGLPDPSMDPTLAGRLRNTCAVPGGFAALDQSMPVTPVSFDNLFFGQIRERKGILLIDQLIASDPATSGVVLQYASNNELFKRQFAIAMVKMGAVDVLTGSAGEIRTNCRAFN

SEQ ID NO: 98954 - protein, 321 aa, Arabidopsis thaliana
  peptide (1)..(321): Ceres Seq. ID no. 13601833
MKIATFSVLLLLLFIFPVALAQLKFKFYSESCPNAETIVENLVRQQFARDPSITAALTRMHFHDCFVQGCDASLLIDPTTSQLSEKNAGPNFSVRGFELIDEIKTALEAQCPSTVSCSDIVTLATRDAVFLGGGPSYVVPTGRRDGFVSNPEDANEILPPPFISVEGMLSFFGNKGMNVFDSVALLGAHTVGIASCGNFVDRVTNFQGTGLPDPSMDPTLAGRLRNTCAVPGGFAALDQSMPVTPVSFDNLFFGQIRERKGILLIDQLIASDPATSGVVLQYASNNELFKRQFAIAMVKMGAVDVLTGSAGEIRTNCRAFN

SEQ ID NO: 98955 - protein, 262 aa, Arabidopsis thaliana
  peptide (1)..(262): Ceres Seq. ID no. 13601834
MHFHDCFVQGCDASLLIDPTTSQLSEKNAGPNFSVRGFELIDEIKTALEAQCPSTVSCSDIVTLATRDAVFLGGGPSYVVPTGRRDGFVSNPEDANEILPPPFISVEGMLSFFGNKGMNVFDSVALLGAHTVGIASCGNFVDRVTNFQGTGLPDPSMDPTLAGRLRNTCAVPGGFAALDQSMPVTPVSFDNLFFGQIRERKGILLIDQLIASDPATSGVVLQYASNNELFKRQFAIAMVKMGAVDVLTGSAGEIRTNCRAFN

SEQ ID NO: 98956 - DNA, 1937 bp, Arabidopsis thaliana
  misc_feature (1)..(1937): Ceres Seq. ID no. 13601856
  misc_feature (1)..(1937): Ortholog of  Ceres SEQ ID NO 12465151 as cited in SEQ ID NO 67782
atgagcagagaaagcttcaagccaatctgtcacattaacttggttgaaccagatgtctcttgcagtatatattgcttcttgagaaacgtagacatctgcttcgcgaattcggagcttccacagcaaaccttccattcatcttctccgatctccatcgccattttttctctcttttctccaatcctcacttctgttgactggtgtaagatcaaaagtcatctaattgggccttttcataaacgggcttttcaaaaatgggccttttctttatcttcttcctttttttattcatcatcttctatatgtgaattattcagaaacagaagcgagaagtttcttacaatttgtaaagagatctgttttagggttttgccttgttcttgtggcgggaataacaaagacatcgccgatatggggaaagacgaagaggaaatgcgaggtgagatcgaggagcgactaatcaatgaagagtacaagatctggaagaagaacactcctttcctctacgatctcgttattactcacgctctcgagtggccttcacttactgttgaatggcttcctgaccgtgaagaaccttccggtaaagactactccgttcagaagatgattctcggtacccatacctccgagagcgagcccaattacttgatgctagcccaagttcagcttcctcttgacgataccgagagtgaagctcgtcagtacgatgatgaccgctctgaatttggtggctttggctgtgcaactggaaaggtacaaattatccagcagataaatcatgatggtgaggttaatcgagctcgctatatgcctcaaaaccctttcataattgctaccaagacagttaatgcggaggtctatgttttcgattacagtaagcatccatctaagcctcctcttgatggggcttgtaatcctgatttaaagcttagaggtcacagctctgagggatatggtctctcttggagtaagttcaagcagggtcatttgcttagtggctctgatgatgctcagatctgcttgtgggatattaacgctactcctaaaaacaaatctctggacgctcagcagatttttaaggctcatgaaggggttgtggaagatgttgcatggcatctgagacatgagtacctgtttggatcagttggagatgaccaataccttctcatatgggatctgcgttctccatctgccagtaaaccagtacagtctgtggttgctcattcgatggaggttaactgcttagccttcaatccatttaatgagtgggttgtggcaacaggatcaactgacaagactgttaaattattcgatctacggaagctaagcaccgctcttcacacatttgatagccacaaagaggaggtttttcaagttggttggaacccaaagaacgagactattttagcttcatgttgccttggtagaagacttatggtttgggaccttagcaggatcgatgaggaacagacagtggaggacgcagaagacggcccacctgagctgctgtttattcacggtggtcacactagcaaaatttcagatttctcgtggaacccttgtgaagattgggttatttccagtgttgctgaggacaacatactccaaatatggcaaatggctgaaaacatctatcatgatgaggatgacgctccaggggaagaaccatcaaaagcttcttagcttgttatttagtatccaaagcgcactgatcttatgggacagtatttatttatacatctctgctattgtttagttcaagtatttagtgttcattgtgtaaaatgaggcatgagaggatggtagcaagtgggaatttttctttataacatgaaggagttgattctaatctcactaagtagtgtcaaccaaagctataactcttagtttatacccagattgggcgacattagaaagaaattacaaatttgaat

SEQ ID NO: 98957 - protein, 561 aa, Arabidopsis thaliana
  peptide (1)..(561): Ceres Seq. ID no. 13601857
MSRESFKPICHINLVEPDVSCSIYCFLRNVDICFANSELPQQTFHSSSPISIAIFSLFSPILTSVDWCKIKSHLIGPFHKRAFQKWAFSLSSSFFYSSSSICELFRNRSEKFLTICKEICFRVLPCSCGGNNKDIADMGKDEEEMRGEIEERLINEEYKIWKKNTPFLYDLVITHALEWPSLTVEWLPDREEPSGKDYSVQKMILGTHTSESEPNYLMLAQVQLPLDDTESEARQYDDDRSEFGGFGCATGKVQIIQQINHDGEVNRARYMPQNPFIIATKTVNAEVYVFDYSKHPSKPPLDGACNPDLKLRGHSSEGYGLSWSKFKQGHLLSGSDDAQICLWDINATPKNKSLDAQQIFKAHEGVVEDVAWHLRHEYLFGSVGDDQYLLIWDLRSPSASKPVQSVVAHSMEVNCLAFNPFNEWVVATGSTDKTVKLFDLRKLSTALHTFDSHKEEVFQVGWNPKNETILASCCLGRRLMVWDLSRIDEEQTVEDAEDGPPELLFIHGGHTSKISDFSWNPCEDWVISSVAEDNILQIWQMAENIYHDEDDAPGEEPSKAS

SEQ ID NO: 98958 - protein, 424 aa, Arabidopsis thaliana; identical to SEQ ID NO: 23265
  peptide (1)..(424): Ceres Seq. ID no. 13601858

SEQ ID NO: 98959 - protein, 417 aa, Arabidopsis thaliana; identical to SEQ ID NO: 23266
  peptide (1)..(417): Ceres Seq. ID no. 13601859

SEQ ID NO: 98960 - DNA, 784 bp, Arabidopsis thaliana
  misc_feature (1)..(784): Ceres Seq. ID no. 13601860
  misc_feature (1)..(784): Ortholog of  Ceres SEQ ID NO 13582876 as cited in SEQ ID NO 68251
  misc_feature (1)..(784): Ortholog of  Ceres SEQ ID NO 15179090 as cited in SEQ ID NO 0
gagctgagatgctgaacctgcaagtaaccgggaagacgatcttatctagtattcgttgtcagagaaagatgtcgtctacttgttcttcgtacgcatttgggccgtacaaaatcgatccccgtgaagtgttctacgcaacgcctctctcttatgccatggttaatctccgtccgcttcttcctgcacatgttcttgtctgcccgagacgccttgtgccacgatttactgatcttacagctgatgagaccagtgacctgtggcttactgctcagaaggttggctctaagcttgagaccttccataatgcgtcttctctcacattagccatccaagatggccctcaagcgggacagactgttccccatgtacacattcatatcttgcctcgtaaaggtggtgactttgagaagaatgatgaaatctatgatgctcttgatgagaaggagaaggaactgaagcagaagcttgatctagataaagaccgggttgataggagcattcaggagatggctgacgaggcttcccaatacagatctcttttcgattgctagttatcatttatcaatatcaaatcaaaccaagctatccagtagctttaataaggaccattgtgacaagtgactttcagtttgaaattttatgtcagagactttgattcaaatttgtaatttctttctaatgtcgcccaatctgggtataaactaagagttatagctttggttgacactacttagtgagattagaatcaactccttcatgttataaagaaaaattcccacttgct

SEQ ID NO: 98961 - protein, 182 aa, Arabidopsis thaliana
  peptide (1)..(182): Ceres Seq. ID no. 13601861
AEMLNLQVTGKTILSSIRCQRKMSSTCSSYAFGPYKIDPREVFYATPLSYAMVNLRPLLPAHVLVCPRRLVPRFTDLTADETSDLWLTAQKVGSKLETFHNASSLTLAIQDGPQAGQTVPHVHIHILPRKGGDFEKNDEIYDALDEKEKELKQKLDLDKDRVDRSIQEMADEASQYRSLFDC

SEQ ID NO: 98962 - protein, 180 aa, Arabidopsis thaliana
  peptide (1)..(180): Ceres Seq. ID no. 13601862
MLNLQVTGKTILSSIRCQRKMSSTCSSYAFGPYKIDPREVFYATPLSYAMVNLRPLLPAHVLVCPRRLVPRFTDLTADETSDLWLTAQKVGSKLETFHNASSLTLAIQDGPQAGQTVPHVHIHILPRKGGDFEKNDEIYDALDEKEKELKQKLDLDKDRVDRSIQEMADEASQYRSLFDC

SEQ ID NO: 98963 - protein, 160 aa, Arabidopsis thaliana
  peptide (1)..(160): Ceres Seq. ID no. 13601863
MSSTCSSYAFGPYKIDPREVFYATPLSYAMVNLRPLLPAHVLVCPRRLVPRFTDLTADETSDLWLTAQKVGSKLETFHNASSLTLAIQDGPQAGQTVPHVHIHILPRKGGDFEKNDEIYDALDEKEKELKQKLDLDKDRVDRSIQEMADEASQYRSLFDC

SEQ ID NO: 98964 - DNA, 1645 bp, Arabidopsis thaliana
  misc_feature (1)..(1645): Ceres Seq. ID no. 13601864
  misc_feature (1)..(1645): Ortholog of  Ceres SEQ ID NO 13590307 as cited in SEQ ID NO 67154
actctgtcgcttggcgcgctctctctccatagttccagttctgaaatctcactttcacagtttgtgtctgtgcgataatggccatggcagagctctcaacccccaaaacgacgtcgccttttctcaactcttcgtctcggcttcgtctctcttcaaaattgcacctttcaaaccactttcgccatcttcttcttccacctctccacacaacaactcccaactccaaaatctcttgctccgtttctcaaaatagccaagctcctgttgctgtgcaagaaaatggattggtgaagacgaagaaagagtgttatggagtgttctgcctcacctatgatcttaaagctgaagaagagacaagatcatggaagaagttaattaatattgcagtttcaggtgctgcaggaatgatttctaaccatcttctcttcaaacttgcttcaggggaagtatttggtccagatcaacccattgcattgaaactgctaggatcagagagatcaattcaagctcttgaaggtgttgcaatggaactggaggattcattgttcccattgttgagagaagttgatataggaacagatccaaatgaagtgttccaagatgtggagtgggctattctgattggagcaaaacctcgaggccctggaatggaacgtgctgacttgttggacatcaatggccaaatctttgctgagcagggcaaagctctgaacaaagctgcctctcctaacgtcaaggttcttgtagtgggaaacccttgcaacaccaatgccttgatttgtcttaaaaatgctcccaacattcctgcaaagaacttccatgccctcacgaggttagacgaaaatcgtgccaaatgccagcttgctcttaaagccggtgttttctatgacaaagtgtctaatatgaccatatggggaaatcactccacgactcaggtgccagacttcttaaatgccagaattaatggcctgcctgtgaaggaggttattacagatcacaaatggttagaagagggattcactgagagtgtgcagaagagaggtgggttattaattcagaaatggggtcgatcttctgctgcttctactgctgtttccattgttgatgctataaagtctcttgtaactcctactcctgagggtgattggttttcgactggggtgtacacggatggaaatccttatggtattgaagagggccttgtcttcagtatgccatgccggtcgaagggagatggagattatgaacttgtcaaggatgtagaaattgatgactaccttcgccaacgaatcgccaagtcggaagcggaactgttggctgagaagagatgtgttgcacacctcactggagagggcattgcctactgtgatcttggtccggtagatactatgcttcctggggaagtttgatttttgcaggacgttgaacatctcaagtaagcattctcttccgggttgttagctgtacagagcacagccacattacttatgattattgttcagaataagaaaatgaaactcttatttcttatttacatgcatctgtatgtgatttttcttgagcaatgctccaaaagtcatatacagtagtatttgtaaacacttgaaacgtttctatgctttattccagtttcagaactcaaact

SEQ ID NO: 98965 - protein, 443 aa, Arabidopsis thaliana; identical to SEQ ID NO: 25547
  peptide (1)..(443): Ceres Seq. ID no. 13601865

SEQ ID NO: 98966 - protein, 441 aa, Arabidopsis thaliana; identical to SEQ ID NO: 25548
  peptide (1)..(441): Ceres Seq. ID no. 13601866

SEQ ID NO: 98967 - protein, 334 aa, Arabidopsis thaliana; identical to SEQ ID NO: 25549
  peptide (1)..(334): Ceres Seq. ID no. 13601867

SEQ ID NO: 98968 - DNA, 786 bp, Arabidopsis thaliana
  misc_feature (1)..(786): Ceres Seq. ID no. 13601868
  misc_feature (1)..(786): Ortholog of  Ceres SEQ ID NO 14309641 as cited in SEQ ID NO 0
acaagtttgtcggatcaatccattttaactccgatccatgactacgactaggcggaaaaatacacattggtgtcatacttgtagacgaggaatccatcttcaaggagaaggcagaagagaaggagcttgcatttactgtggtaacacctttcttgaaaggctatatgagaatgttgaactaagcccttttgatttattcggattagcctacgaagaagctcgtaaccgtcgcaacaacagaagatcggttataggagaacaactaagttttgaagagttgtttaaccggctcccagcactacaagaccgtcgtggtcctcctccagcatcactagccgcgattaactcattgcaaaagatcaaaatcaggcagaagcatctcggtttagatccctattgtccggtttgccaagaccagtttgaaatcggatcagatgcaagaaaaatgccgtgtaaacatatctaccattctgaatgtatactcccgtggttagtccagcgtaatacttgccccgtctgccgcaaagaacttccacaagaccgaaataatagccggaaaaatccattgtggcatctgtggccgttcaggtcctctggtttggcctcaaaccataatggatcatcacctttccattgagatgctagcttttgaatcaatccatgtgcatgtacgtagtatatgatgatattttatttttccatgataaaatgttgcttttttcaatatattggcatgtacaaaagggttttgtagtcttattaatgtatgaaaaatattgtttatct

SEQ ID NO: 98969 - protein, 199 aa, Arabidopsis thaliana
  peptide (1)..(199): Ceres Seq. ID no. 13601869
MTTTRRKNTHWCHTCRRGIHLQGEGRREGACIYCGNTFLERLYENVELSPFDLFGLAYEEARNRRNNRRSVIGEQLSFEELFNRLPALQDRRGPPPASLAAINSLQKIKIRQKHLGLDPYCPVCQDQFEIGSDARKMPCKHIYHSECILPWLVQRNTCPVCRKELPQDRNNSRKNPLWHLWPFRSSGLASNHNGSSPFH

SEQ ID NO: 98970 - DNA, 999 bp, Arabidopsis thaliana
  misc_feature (1)..(999): Ceres Seq. ID no. 13601874
  misc_feature (1)..(999): Ortholog of  Ceres SEQ ID NO 12615296 as cited in SEQ ID NO 62724
  misc_feature (1)..(999): Ortholog of  Ceres SEQ ID NO 15225093 as cited in SEQ ID NO 65177
  misc_feature (1)..(999): Ortholog of  Ceres SEQ ID NO 15179532 as cited in SEQ ID NO 0
gaggagaaggacgatcgatctaaggagacgatgaagatcttccacgttccttgtctgcaagacaactactcttatctgataatcgatgagagcaccggagacgcggcggttgtggatccagttgatccggagaaggtgatcgcatcggctgagaagcaccaagctaagatcaagttcgtactcactacgcatcatcactgggatcatgccggtggaaacgagaagattaagcagttggttcctgatatcaaagtatatggaggttctctggataaggtgaagggttgcactgatgcggttgataatggtgacaagctgactttgggtcaggatattaacatattggctctccacactccttgtcacaccaagggtcacattagttattatgtgaacggaaaagaaggagaaaacccagccgtgttcaccggagatacactttttgttgctggatgtgggaagttttttgaagggacagctgagcagatgtatcagtcgttgtgtgtgactctggctgcattacctaaaccgacacaggtttactgcggccatgagtacaccgttaagaacttggaatttgctctaactgtggaaccaaacaacgggaagatacaacagaagttagcatgggcccgtcaacagcgccaagcagatcttcccacaatcccttcaacactggaggaagagctcgaaacaaatccatttatgcgtgttgataagccagagatacaggagaaactcggttgcaagtcgccaattgatacaatgagggaagttcggaacaagaaggatcagtggaggggatgatgataaatggagagcttcttgcctatgttttgtgtacttgtgttgaatgatcctgtaaaaggtgtatgaaccagtaatgttgatattctgtgtgaaactgtgaaccggtttggtaaaccgaaatcagaccgacctgtaagccgtactccctttttgaattttcagtttactatggataataatttcagtgtc

SEQ ID NO: 98971 - protein, 268 aa, Arabidopsis thaliana
  peptide (1)..(268): Ceres Seq. ID no. 13601875
EEKDDRSKETMKIFHVPCLQDNYSYLIIDESTGDAAVVDPVDPEKVIASAEKHQAKIKFVLTTHHHWDHAGGNEKIKQLVPDIKVYGGSLDKVKGCTDAVDNGDKLTLGQDINILALHTPCHTKGHISYYVNGKEGENPAVFTGDTLFVAGCGKFFEGTAEQMYQSLCVTLAALPKPTQVYCGHEYTVKNLEFALTVEPNNGKIQQKLAWARQQRQADLPTIPSTLEEELETNPFMRVDKPEIQEKLGCKSPIDTMREVRNKKDQWRG

SEQ ID NO: 98972 - protein, 258 aa, Arabidopsis thaliana; identical to SEQ ID NO: 29515
  peptide (1)..(258): Ceres Seq. ID no. 13601876

SEQ ID NO: 98973 - DNA, 1067 bp, Arabidopsis thaliana
  misc_feature (1)..(1067): Ceres Seq. ID no. 13601877
  misc_feature (1)..(1067): Ortholog of  Ceres SEQ ID NO 13594430 as cited in SEQ ID NO 60181
  misc_feature (1)..(1067): Ortholog of  Ceres SEQ ID NO 13589401 as cited in SEQ ID NO 0
aaagaaatgaagaaagttgactagaaacggagaatttccaaatgttgaatttgttggatgcatgtgaaagccaattctatttggttcctccttgataatccacccaatcgctgtcattctcccatcaatctagctgctttcacaaaccattgtactgagatcgtatctttaaggtaaatttcaaatcggagtcggcgagatcgaaataggaacctggaagtcggagaatttgtgtaaattcggttttttttttttaattctccgatggatagtttaagtgatatcgatggtgatttcgatggaagaaatgaaggaggatcgtcatcggattatcgattgttgggtcggcagattacggttcatcagttcatgggtggtggcaaagctgctgacttgctcttatggaggaggcgacatctttctttgggggttatcattatatcaactgtagcctggcttatattcgagttttccgggttgcctttcttatctgtttcttcggatgtcttactcatcgtgatcatgatatcattcgttcatgcccgggtttctgcttttaggaatagacagttgcattcgttgccagagcttgttctatcagaggaaatggtgaatagtgctgcagcttctttccgtataaaactcaatcacttgcttgtaatggctcatgatgtcacagttggcaacgattttcgactcttcttcaaggtggtgatttgtctgtggcttctctctgccattggtagctatatatctctctgcactcttctttacatcgggaccatcctatctgtaacaataccggctttgtacagtaaatatcaaagcaaagtagacaagtgttgcgggacgattcacaggcggttgtctcaccactacaaaatagtagacgaaaatgttataagcagactctcatggagcttatccaaggataaagattcatgagcttaactttggtgattctgagaatgcttttacttgtttttgtttagcttttcttgttattcaccatttgtagtataactaaacgccatatccagaatgaatataagatggtttctttgttc

SEQ ID NO: 98974 - protein, 226 aa, Arabidopsis thaliana; identical to SEQ ID NO: 41512
  peptide (1)..(226): Ceres Seq. ID no. 13601878

SEQ ID NO: 98975 - protein, 191 aa, Arabidopsis thaliana; identical to SEQ ID NO: 41513
  peptide (1)..(191): Ceres Seq. ID no. 13601879

SEQ ID NO: 98976 - protein, 140 aa, Arabidopsis thaliana; identical to SEQ ID NO: 41514
  peptide (1)..(140): Ceres Seq. ID no. 13601880

SEQ ID NO: 98977 - DNA, 930 bp, Arabidopsis thaliana
  misc_feature (1)..(930): Ceres Seq. ID no. 13601881
  misc_feature (1)..(930): Ortholog of  Ceres SEQ ID NO 13504265 as cited in SEQ ID NO 85
gcgaccactagaaggagaaacaaatcttcattccaacaatggcgattcgttgtgtagcgagtagaaaaaccctagccggcttgaaggagacatcatcgaggctattgaggatcagagggattcagacttttacgcttcctgatcttccttacgattatggcgcattggaaccggccattagtggagagatcatgcagattcatcaccagaagcatcaccaggcttatgttactaattacaataatgctcttgagcagcttgatcaagctgtgaacaagggagatgcttccactgttgttaagttgcagagcgccatcaaattcaacggcggaggtcatgtcaaccattcgattttctggaagaaccttgctccttccagtgaaggtggtggagagccaccaaaaggatctcttggtagtgccattgacgctcactttggctcccttgaaggtctggtgaaaaagatgagtgctgagggtgctgcagtgcaaggctcaggatgggtgtggctcggactagacaaagaactgaagaagctagttgttgacacaactgccaatcaggatccattagtgacaaaaggaggaagcttggtacctctggtgggtatagatgtttgggagcacgcctactacttgcagtacaaaaatgtgaggcctgagtatctgaagaatgtatggaaagtgatcaactggaaatatgcaagcgaggtttatgagaaggaaaacaactgaatcgtttacacgatgacataaggagatgaaccagttccagctcagcttttgttttaaggttgtctgaaacaaacttacagtgtctctttggtttttaagatttgctcaactcagctgtgtggtacgttgttttacaatgaaagttttcaagaataaaaatttgctattattgtcagaaagcgctattgtttattct

SEQ ID NO: 98978 - protein, 231 aa, Arabidopsis thaliana; identical to SEQ ID NO: 29575
  peptide (1)..(231): Ceres Seq. ID no. 13601882

SEQ ID NO: 98979 - protein, 180 aa, Arabidopsis thaliana; identical to SEQ ID NO: 29576
  peptide (1)..(180): Ceres Seq. ID no. 13601883

SEQ ID NO: 98980 - DNA, 1074 bp, Arabidopsis thaliana
  misc_feature (1)..(1074): Ceres Seq. ID no. 13601884
  misc_feature (1)..(1074): Ortholog of  Ceres SEQ ID NO 14312769 as cited in SEQ ID NO 55493
  misc_feature (1)..(1074): Ortholog of  Ceres SEQ ID NO 13639300 as cited in SEQ ID NO 56701
acagatatcaatgttgcatcaggtgaagaacgagagatagagaacgatgagtgtgattggaagcaagagctgtattttctctgtggctagatacacccgagaaaatgagaaatcttcttgcttcacttctatcaacaagaaatcttcgcttgatctgagatttcccagaaatctggcgggagtttcctgcaaattctctggagaaaatccaggaacaaatggggtttctcttagctccaagaacaaaatggaggattacaatacagctatgaagagattgatgagaagcccttatgaatatcatcatgatctaggtatgaactatacattgataagagatgaacttatagttgggtcacagccacagaaacctgaggacatagatcacttgaagcaggaacagaatgttgcttacatacttaacttgcagcaggataaggacattgagtattggggaatcgatttggattccattgttagaagatgtaaggagcttggaatccgtcacatgagaaggcctgctaaagattttgatccactttcgttgagaagccaacttccaaaagctgtttcttctttggaatgggcggtttcagaaggtaaaggaagagtctatgtgcattgctcagccggattgggaagagctccaggggtttccattgcttatatgtattggttctgtgacatgaatcttaacacggcttatgacactttggtatcaaagcgtccatgtgggcctaacaaaggagccatccgtggtgcaacatatgatctggctaagaatgatccctggaaagagccctttgagagtctccctgagaacgcattcgaggacattgcagattgggaaaggaagttgattcaagaacgtgttcgggccctccgtggaacctgaaaatcagtaattctgagaatatgtataatttcgaataaaatgtagacttctgtatattttaaagctacggattacaaaacctcttctgcgaattaatcgaccttgttgtcaggaactctgtggttcttcttgtctagttctacaaagatgaagtctatataatttatacatacacttag

SEQ ID NO: 98981 - protein, 282 aa, Arabidopsis thaliana
  peptide (1)..(282): Ceres Seq. ID no. 13601885
MSVIGSKSCIFSVARYTRENEKSSCFTSINKKSSLDLRFPRNLAGVSCKFSGENPGTNGVSLSSKNKMEDYNTAMKRLMRSPYEYHHDLGMNYTLIRDELIVGSQPQKPEDIDHLKQEQNVAYILNLQQDKDIEYWGIDLDSIVRRCKELGIRHMRRPAKDFDPLSLRSQLPKAVSSLEWAVSEGKGRVYVHCSAGLGRAPGVSIAYMYWFCDMNLNTAYDTLVSKRPCGPNKGAIRGATYDLAKNDPWKEPFESLPENAFEDIADWERKLIQERVRALRGT

SEQ ID NO: 98982 - protein, 215 aa, Arabidopsis thaliana; identical to SEQ ID NO: 26565
  peptide (1)..(215): Ceres Seq. ID no. 13601886

SEQ ID NO: 98983 - protein, 208 aa, Arabidopsis thaliana; identical to SEQ ID NO: 26566
  peptide (1)..(208): Ceres Seq. ID no. 13601887

SEQ ID NO: 98984 - DNA, 981 bp, Arabidopsis thaliana
  misc_feature (1)..(981): Ceres Seq. ID no. 13601888
  misc_feature (1)..(981): Ortholog of  Ceres SEQ ID NO 15170807 as cited in SEQ ID NO 52723
  misc_feature (1)..(981): Ortholog of  Ceres SEQ ID NO 12611846 as cited in SEQ ID NO 59904
  misc_feature (1)..(981): Ortholog of  Ceres SEQ ID NO 14303535 as cited in SEQ ID NO 68728
  misc_feature (1)..(981): Ortholog of  Ceres SEQ ID NO 12635196 as cited in SEQ ID NO 0
  misc_feature (1)..(981): Ortholog of  Ceres SEQ ID NO 15179463 as cited in SEQ ID NO 0
aagcccaaatgttgcacaaggcttctcccgctctctctctcttgagctccggctacaccggcggtggaaatctgtttcctccgtcgagaaattcgtcgaatcttctgttttctccgagtggatccaggttttctgttcaggcggcgaaaggaacgaacacgaagtcgttaaccggagttgtattcgaaccttttgaggaggtgaagaaagaaatggagctcgttcccactaccccttttgtttctctcgctcgccacaagttctccgacgattctgaatctgccatcaacgatcagatcaacgtggagtacaacgtctcgtatgtctaccatgccctgtatgcctactttgacagagacaatgtcggcttgaaaggtttcgccaagttttttaacgattcgagtcttgaagaacgaggtcatgctgagatgtttatggagtatcagaacaagcgtggtgggagagtgaagctgcagtctattttgatgcccgtctctgagtttgatcacgaggagaagggagatgcattgcatgcgatggagcttgcattgtctttggagaaacttacaaatgaaaagcttctgaagttacaaagtgttggtgtgaagaacaatgatgttcagctggttgattttgtagaatctgagtttctaggcgagcaggtcgaagctatcaagaaaatctcagagtacgttgcacagctaagaagaataggaaagggtcatggagtgtggcattttgatcaaatgcttctcaatgatgaggtttaaggaaggagagttcagcttctgagtttgatgacaatcttccttgtgctatatggcaccgttctatctctataacgacgtctctaagtttggtcggagaaaagtgttcttgctcgttctttcttttctttgtttttggttaaccgaatgcttgtgagtgtgtacttaataatgtaactcgtagtctgataataaatgcaagtcccactgtttc

SEQ ID NO: 98985 - protein, 255 aa, Arabidopsis thaliana
  peptide (1)..(255): Ceres Seq. ID no. 13601889
AQMLHKASPALSLLSSGYTGGGNLFPPSRNSSNLLFSPSGSRFSVQAAKGTNTKSLTGVVFEPFEEVKKEMELVPTTPFVSLARHKFSDDSESAINDQINVEYNVSYVYHALYAYFDRDNVGLKGFAKFFNDSSLEERGHAEMFMEYQNKRGGRVKLQSILMPVSEFDHEEKGDALHAMELALSLEKLTNEKLLKLQSVGVKNNDVQLVDFVESEFLGEQVEAIKKISEYVAQLRRIGKGHGVWHFDQMLLNDEV

SEQ ID NO: 98986 - protein, 253 aa, Arabidopsis thaliana
  peptide (1)..(253): Ceres Seq. ID no. 13601890
MLHKASPALSLLSSGYTGGGNLFPPSRNSSNLLFSPSGSRFSVQAAKGTNTKSLTGVVFEPFEEVKKEMELVPTTPFVSLARHKFSDDSESAINDQINVEYNVSYVYHALYAYFDRDNVGLKGFAKFFNDSSLEERGHAEMFMEYQNKRGGRVKLQSILMPVSEFDHEEKGDALHAMELALSLEKLTNEKLLKLQSVGVKNNDVQLVDFVESEFLGEQVEAIKKISEYVAQLRRIGKGHGVWHFDQMLLNDEV

SEQ ID NO: 98987 - protein, 185 aa, Arabidopsis thaliana
  peptide (1)..(185): Ceres Seq. ID no. 13601891
MELVPTTPFVSLARHKFSDDSESAINDQINVEYNVSYVYHALYAYFDRDNVGLKGFAKFFNDSSLEERGHAEMFMEYQNKRGGRVKLQSILMPVSEFDHEEKGDALHAMELALSLEKLTNEKLLKLQSVGVKNNDVQLVDFVESEFLGEQVEAIKKISEYVAQLRRIGKGHGVWHFDQMLLNDEV

SEQ ID NO: 98988 - DNA, 1106 bp, Arabidopsis thaliana
  misc_feature (1)..(1106): Ceres Seq. ID no. 13601892
  misc_feature (1)..(1106): Ortholog of  Ceres SEQ ID NO 14314312 as cited in SEQ ID NO 57283
aaaaatccgatccaacagaaattcttatcctaagcctctttctccaccgcgcacgttagcctcctctctttcccactccgagatggagacgacgccggagactcagtcgaagactcaccgtctaccggcgggaagagaggattggtggagcgaagacgctacggcgacattgatcgaagcttggggagatcgttacgtcaatctcaaccggggaaatctccggcaaaacgattggaaagaagtcgccgacgccgtcaattcaagccacgggaatggccggccaaagaccgatgtacagtgcaaaaaccggatcgatacgttgaagaagaagtacaaaactgaaaaggcgaaacctttatcgaattggtgcttctttgatagactcgatttcttaatcggtccggttatgaagaaatcgtccggtgctgttgttaaatcggcgttgatgaaccctaatttgaatcctactggatctaaatcaactggtagctctctcgatgacgatgatgatgatgatgatgacgacgaagaagatgatgatgatgcgggtgattggggatttgtggtgaggaagcatcgtaaagttgaagatgtagattcgagtgaaggatcagcctttagggagctagcgagatcgattctgaagttaggggaagcgtttgagagaatcgaggggaagaagcaacagatgatgattgaattggagaaacagagaatggaagttgcaaaggagcttgagttacaacgaatgaatatgttgatggagatgcaattggagcttgagaaatctaaacttgggaaacgaagagctgcttcaggtaagaagttgtaggattgtagattgtggaggagttactgatgtgaagcaaggagcaatggttggatctaaagctcatacgatttggagaagatgttattattattgatctttaggttttcttaagttatagcgcgatgctttttttcttcttcttctttttcattctcttttttagcattgtagagttacattggtagtagcaatgcgaattaccaaaagaactctcatagtatctgacatatcaagatgtacttttgtgaagtatcaatgtatgatggtttgtgta

SEQ ID NO: 98989 - protein, 276 aa, Arabidopsis thaliana
  peptide (1)..(276): Ceres Seq. ID no. 13601893
KIRSNRNSYPKPLSPPRTLASSLSHSEMETTPETQSKTHRLPAGREDWWSEDATATLIEAWGDRYVNLNRGNLRQNDWKEVADAVNSSHGNGRPKTDVQCKNRIDTLKKKYKTEKAKPLSNWCFFDRLDFLIGPVMKKSSGAVVKSALMNPNLNPTGSKSTGSSLDDDDDDDDDDEEDDDDAGDWGFVVRKHRKVEDVDSSEGSAFRELARSILKLGEAFERIEGKKQQMMIELEKQRMEVAKELELQRMNMLMEMQLELEKSKLGKRRAASGKKL

SEQ ID NO: 98990 - protein, 249 aa, Arabidopsis thaliana; identical to SEQ ID NO: 42107
  peptide (1)..(249): Ceres Seq. ID no. 13601894

SEQ ID NO: 98991 - protein, 141 aa, Arabidopsis thaliana; identical to SEQ ID NO: 42108
  peptide (1)..(141): Ceres Seq. ID no. 13601895

SEQ ID NO: 98992 - DNA, 1005 bp, Arabidopsis thaliana
  misc_feature (1)..(1005): Ceres Seq. ID no. 13601919
  misc_feature (1)..(1005): Ortholog of  Ceres SEQ ID NO 13574576 as cited in SEQ ID NO 47
  misc_feature (1)..(1005): Ortholog of  Ceres SEQ ID NO 13638673 as cited in SEQ ID NO 51830
  misc_feature (1)..(1005): Ortholog of  Ceres SEQ ID NO 13638785 as cited in SEQ ID NO 51967
gtgattgacagatagataagagtgtttggtagctcagactcagagagtcacaaagtgtgtgtagcagcaatggcgtctgttgcttcttcaactactctcatctcttctccctcttctagggtttttccagcaaagtcttcactttcctctccatctgtttctttccttcgaaccctttcttctccttccgcatctgcttctctccgctccggatttgctcgacgctcttccctcagctccacttctcgtcggagctttgctgtcaaagcccaggccgatgatcttccactggttggaaacaaggcgcctgattttgaggcagaggctgtgtttgatcaagagttcatcaaggttaagctctctgattacattggaaagaagtatgtgattctctttttctacccattggactttactttcgtctgcccaacagagattactgccttcagtgaccggcattcagaatttgagaagttgaacaccgaagtattaggtgtttctgtcgatagtgtgttctctcaccttgcatgggtccaaacagacaggaaatctggagggcttggtgatctgaactatccccttatttcagatgtcactaaatcaatctcaaagtcgttcggagtgctcatccatgatcagggaatagcactgagaggacttttcataatcgacaaggaaggagtgatccaacattccaccatcaacaatcttggtattggccgaagcgttgatgagacaatgagaaccctccaggcattacagtacatccaggaaaacccggatgaagtctgcccagcaggatggaagccgggtgagaagtcaatgaaacccgacccaaaactcagcaaagagtacttctcagctatttagaaactctactatgatagcaaaaaggtacaatctttgttatatgtgagcagagttttttttcttgtacgctaaaacaatcctttgtttgattctcactttgtccccaaaattataataaaaaactttttccgttaa

SEQ ID NO: 98993 - protein, 266 aa, Arabidopsis thaliana; identical to SEQ ID NO: 21484
  peptide (1)..(266): Ceres Seq. ID no. 13601920

SEQ ID NO: 98994 - DNA, 910 bp, Arabidopsis thaliana
  misc_feature (1)..(910): Ceres Seq. ID no. 13601921
  misc_feature (1)..(910): Ortholog of  Ceres SEQ ID NO 14303374 as cited in SEQ ID NO 54088
  misc_feature (1)..(910): Ortholog of  Ceres SEQ ID NO 13639250 as cited in SEQ ID NO 56555
  misc_feature (1)..(910): Ortholog of  Ceres SEQ ID NO 15177034 as cited in SEQ ID NO 60024
  misc_feature (1)..(910): Ortholog of  Ceres SEQ ID NO 13598257 as cited in SEQ ID NO 63008
  misc_feature (1)..(910): Ortholog of  Ceres SEQ ID NO 13597309 as cited in SEQ ID NO 63851
  misc_feature (1)..(910): Ortholog of  Ceres SEQ ID NO 12599167 as cited in SEQ ID NO 64443
ctaaaacaaaaaatctcttaacaacttctccaccttctccccaccaccaccactcaccgtcggagaaagaaaaaaaacaaccaccatgaaagactgtgaaaaccacggccactctcgccggaaactaataaggcgaatattttggtcaataatcttcgtcctcttcatcatcttcctaacaatcctcctcatttgggcaattctccaaccatcaaagccacgcttcatcctccaagacgccaccgtctacgccttcaacgtctccggcaatccaccgaacctcctcacctccaacttccaaatcactctctcttcccggaaccctaacaacaaaatcggcatttactacgaccggcttgacgtctacgctacttaccggagccaacaaatcactttcccaacatcaatccctcccacgtatcagggacacaaagatgtcgacatctggtcgccgtttgtttacggaacctccgttcccatcgctccttttaacggcgttagtcttgacaccgataaagataacggtgtcgttttgttgatcattcgtgctgatggtagagtgaggtggaaggttgggacttttatcaccgggaagtatcatcttcatgtgaagtgtccagcatatataaacttcggtaacaaagctaacggagttatcgtcggagacaacgccgttaagtatacgtttaccactagttgtagtgttagtgtgtgaaacggcgacgaagaaaaataaggtaactaaacgtcttcgttaagtaatctgtcttagtgatgtgaattgtacattttgcttatacgaatagcaaatattacagattcgtgatgttgtaacgaattttaagaatttcaatatgtatactttttttttattatagttgaattctaaattctattataagttgtgatg

SEQ ID NO: 98995 - protein, 209 aa, Arabidopsis thaliana; identical to SEQ ID NO: 27986
  peptide (1)..(209): Ceres Seq. ID no. 13601922

SEQ ID NO: 98996 - DNA, 2150 bp, Arabidopsis thaliana
  misc_feature (1)..(2150): Ceres Seq. ID no. 13601923
  misc_feature (1)..(2150): Ortholog of  Ceres SEQ ID NO 14312825 as cited in SEQ ID NO 55638
agacttaacatttcatatagagaaacttgaaacaacaatctgagcaaagagcgttttatcttgttgattttggaatctccattacgatggaaggtgcggctgatcaaactacgaaagcgttatctgaattagccatggattcttctaccaccttgaatgctgctgagtctagcgctggtgatggagctggacctcggagtaaaaatgctttgaagaaggaacagaaaatgaagcagaaagaggaagagaagagacgaaaggacgaagagaaagctgaaaaggctaaacaagcacctaaagcaagctcccagaaggcagtggcagcagatgatgaagagatggatgcaacgcaatactatgagaacagattgaaatatcttgcggctgagaaggctaaaggggagaatccatatcctcacaagttcgctgtgtcaatgtcgattcctaaatacattgagacgtatggtagtttgaacaatggagatcatgttgaaaacgctgaggagtctttagctgggcggataatgagcaagcgatcttcctcttccaagctcttcttctatgatctacacggtgatgatttcaaggtccaagtcatggctgatgcaagtaagtcaggattggatgaagctgagttcttaaagctccattcgaatgctaagcgtggtgatattgttggagtcattgggtttccaggaaaaactaagaggggagaattgagtatctttccccgatcatttattcttctgtcccattgcctccacatgatgccgagaaaggctgataatgttaatgcaaagaaacctgaaatctgggttccaggtcaaacgagaaatcctgaagcatatgttctgaaagaccaggaatcaagatatcgtcagcgtcatcttgatatgattttgaacgtggaggttcgtcagatattcaggactagagctaaaatcatctcctatgtccgcagattcctcgacaacaaaaatttcttggaggtcgagacacctatgatgaacatgattgctggtggagcagctgctagaccttttgtgacacatcacaatgatctagatatgaggctgtacatgcgaatcgcacctgaactctatctcaagcaacttattgttggtggcttggaacgtgtttacgagataggaaagcaattcagaaacgagggtatagacctgacccacaatccggagttcaccacttgcgagttctatatggcttttgcagactacaatgacctgatggaaatgactgaggttatgttgagtggcatggttaaggaattaacaggtggttataaaatcaagtataatgctaatgggtatgacaaggatccaattgaaatcgactttactccaccattcaggaggattgagatgataggagagttagagaaggttgctaagctcaatataccaaaagacttggctagcgaagaagctaacaagtatctgattgatgcatgtgcgaggtttgatgtcaaatgccctcctcctcagacaacagctcgtctgttagataaacttgttggagaatttctggaaccgacatgtgtgaacccaactttcatcatcaaccagcccgagatcatgagtcctttggctaaatggcacagatcgaagagtggattgacagagagattcgagctgttcatcaacaaacatgaactctgcaatgcctacacggagctaaacgatcctgtggtacagcgccagcgttttgctgatcagctcaaggatcgacagtctggagacgatgaagcgatggctttagatgaaacattttgtaatgctttagaatatgggttggctcctacaggtggctggggattaggaatagacagactctctatgcttttgaccgactcactgaacatcaaggaggttcttttcttcccggcaatgaggccaccacaggaggagtcagcagccgctcaagctcctttaacagaagagaagaaataaggagtctacacaagttttctgactaagcttagtcaattcgctattatgcactctgttctcaagttacttgtaattgcagaccatatttttcaaaaaaaaaataccaattaattattatcaaaaacctttgtaagacttttttgcaattagtagtgatttcacttatattgaagggcctttttt

SEQ ID NO: 98997 - protein, 626 aa, Arabidopsis thaliana; identical to SEQ ID NO: 40160
  peptide (1)..(626): Ceres Seq. ID no. 13601924

SEQ ID NO: 98998 - protein, 610 aa, Arabidopsis thaliana; identical to SEQ ID NO: 40161
  peptide (1)..(610): Ceres Seq. ID no. 13601925

SEQ ID NO: 98999 - protein, 579 aa, Arabidopsis thaliana; identical to SEQ ID NO: 40162
  peptide (1)..(579): Ceres Seq. ID no. 13601926

SEQ ID NO: 99000 - DNA, 813 bp, Arabidopsis thaliana
  misc_feature (1)..(813): Ceres Seq. ID no. 13601927
  misc_feature (1)..(813): Ortholog of  Ceres SEQ ID NO 12619999 as cited in SEQ ID NO 66123
  misc_feature (1)..(813): Ortholog of  Ceres SEQ ID NO 13656436 as cited in SEQ ID NO 69154
attatagagaaaaagagctttttcccggaaagttgttctcatcttggaaaatcaaatctcggaaacgcagtcttcagctaaatcatgagcaacgagtacgattatctgttcaagcttttgttgatcggtgactcctctgttggaaaatcgtgtcttcttctccgattcgctgatgatgcttacattgacagctacataagcaccattggtgttgacttcaaaattaggacgattgagcaggatgggaagacgattaagctgcaaatttgggatactgctggacaggagcgtttcaggaccatcactagcagctattacagaggagctcatggaatcattattgtttatgactgtactgagatggaaagcttcaacaatgtgaagcagtggttgagtgagatcgatagatatgccaatgagagtgtttgcaagcttttaatcggtaacaagaatgatatggttgaaagcaaagttgtttccaccgaaactggaagggccttagcagatgagcttggaattccctttcttgagaccagtgccaaggattctattaacgttgaacaggcattcttaactattgctggcgagataaaaaagaaaatgggaagccaaacgaatgcaaacaagacatctggtcctggaactgtccaaatgaaaggtcagccaatccaacagaacaatggcggttgctgcggtcagtagtttaaaaaatgttttaatcaaaactatctgagactctttttttacttcctttttaactaagtgttgtgaaaaccaatggctgtttaaaacaactaagaaatgtaatattcc

SEQ ID NO: 99001 - protein, 205 aa, Arabidopsis thaliana; identical to SEQ ID NO: 36924
  peptide (1)..(205): Ceres Seq. ID no. 13601928

SEQ ID NO: 99002 - protein, 113 aa, Arabidopsis thaliana; identical to SEQ ID NO: 36925
  peptide (1)..(113): Ceres Seq. ID no. 13601929

SEQ ID NO: 99003 - DNA, 1111 bp, Arabidopsis thaliana
  misc_feature (1)..(1111): Ceres Seq. ID no. 13601936
  misc_feature (1)..(1111): Ortholog of  Ceres SEQ ID NO 12598859 as cited in SEQ ID NO 62872
  misc_feature (1)..(1111): Ortholog of  Ceres SEQ ID NO 12617350 as cited in SEQ ID NO 63777
  misc_feature (1)..(1111): Ortholog of  Ceres SEQ ID NO 13598749 as cited in SEQ ID NO 64341
  misc_feature (1)..(1111): Ortholog of  Ceres SEQ ID NO 15179157 as cited in SEQ ID NO 0
atcataaacccaccgagacgatgtctctcatcatcgtcttcttcttcttctcactcttgctcacatccaatggacagttcttcgacgagagcaagaactatgaaggctcctccgatctcgttgaccttcaataccacttgggtccggtcatatcctcgccggtgacgagtctctacatcatttggtacggccgatggaacccaactcaccaatctataatccgagactttctctactctgtctctgcaccggcaccggctcagtacccgtcagtatccaactggtggaagacagtgaggctatacagagaccagacaggttccaacatcaccgacactcttgtcttatccggagagttccacgactcaacgtactctcatggatctcatctcactcgcttctctgttcagtctgtgatcagaactgccttgacttccaagttaccactaaacgctgtaaacggcttgtacttagtcttgacctcggatgatgtagagatgcaagagttctgcagagcgatttgcgggtttcattacttcactttcccaagcgttgtgggtgcaaccgtaccgtatgcttgggtgggcaacagtgagagacagtgtccagaaatgtgtgcgtacccatttgcacagcctaagccatttccggggagcgggtttgtagccagagagaagatgaaaccgccaaatggagaggtaggaatcgatgggatgatcagtgtgatagctcatgagctggcagaagtgtcgagtaacccgatgttaaacggatggtatggaggagaggacgcgacagcaccgacagagatagcggatttatgtttgggagtgtatgggtcaggaggaggaggaggctatatgggaagtgtgtataaggataggtggaggaatgtgtataatgtgaagggcgttaaaggaagaaagtatctaattcaatgggtttgggatcttaataggaacagatgctttggaccaaacgctatgaattagagactatcatgtttgttacctcttttcaccaaagccttgagcttgaagcttggggaaacctgtatatggtttatcttttccttgcctagtcgattctatgcatttgattgtttaagact

SEQ ID NO: 99004 - protein, 329 aa, Arabidopsis thaliana; identical to SEQ ID NO: 24227
  peptide (1)..(329): Ceres Seq. ID no. 13601937

SEQ ID NO: 99005 - protein, 323 aa, Arabidopsis thaliana; identical to SEQ ID NO: 24228
  peptide (1)..(323): Ceres Seq. ID no. 13601938

SEQ ID NO: 99006 - protein, 164 aa, Arabidopsis thaliana; identical to SEQ ID NO: 24229
  peptide (1)..(164): Ceres Seq. ID no. 13601939

SEQ ID NO: 99007 - DNA, 1475 bp, Arabidopsis thaliana
  misc_feature (1)..(1475): Ceres Seq. ID no. 13601940
  misc_feature (1)..(1475): Ortholog of  Ceres SEQ ID NO 14310740 as cited in SEQ ID NO 53755
  misc_feature (1)..(1475): Ortholog of  Ceres SEQ ID NO 13596202 as cited in SEQ ID NO 68492
aagcaacctcatttataaacccctcgatttcttgcgttgttttcgaatttttattctctttcttttttttcttctcctctcgattcgaaaatttcacatctccggaattttcatttctggagaatattgtttcacatccctacaatggcgtctgagaatctgaatgacaagatctctgtttttaagaaactcaaagccaaatcagataataagatttgttttgattgcaatgcgaagaacccaacatgggcttccgttacttacgggatctttctctgcatcgattgctcagctgttcatcggagtcttggcgtccacattagcttcgtcaggtcaaccaatttagattcatggagctcagagcaattgaaaatgatgatatatggaggaaacaacagggcacaagtctttttcaaacagtacggatggagcgatggaggtaaaaccgaggctaagtatacctcaagagctgctgatttgtataaacagatacttgctaaagaagttgctaaaagcaaggctgaggaagaattggatttgcctccatctcctcctgattcaacacaagtgcctaatggactctccagcatcaaaaccagtgaagctcttaaagagagtaatactctaaagcagcaagaaaagcctgatgttgttcccgtctcaccaagaatttctcgcagcgttaagaaacctcttggtgctaagaagacaggcaaaactggcggacttggcgcccggaagctaactactaagtcgagtgggactctttatgatcaaaagccagaggaatctgttattatacaagcgacatcaccagtttcagctaaatcagccaggtcatcgttttcctctcgttttgattatgcggacaatgttcaaaacagggaagattacatgagccctcaagtcgttagtcatgtagctccaccaaaatcatcaggcttctttgaggaagagttggagatgaacggaggcaggtttcagaagaaaccaatcacaagttcctcaaaactgcaaattcaagaaacagacgaagcacggaagaaattcacaaacgccaaatcaatatcctctgctcagtactttggaaatgacaacaactctgctgatcttgaggccaaaagttcattgaagaagttttctggttcatcagcaatctctagtgctgatctgtttggagacggtgatggagatttccctcttgatctcactgcgggtgatcttctcaaccgcctatctctccaggcacaacaagacatatcatcattgaagaacatggcagaggagacaaagaagaagcttggctctgttgcttccagcttatgggtttgaaatgttcataattttctctaaagtccatcaaaacttttttattttattttttcttactctaatttccatttacaaaagcagttatcctattcttttactagggaaactctgttttgtttaattgaaagttaccaatattttgt

SEQ ID NO: 99008 - protein, 395 aa, Arabidopsis thaliana; identical to SEQ ID NO: 43409
  peptide (1)..(395): Ceres Seq. ID no. 13601941

SEQ ID NO: 99009 - protein, 319 aa, Arabidopsis thaliana; identical to SEQ ID NO: 43410
  peptide (1)..(319): Ceres Seq. ID no. 13601942

SEQ ID NO: 99010 - protein, 318 aa, Arabidopsis thaliana; identical to SEQ ID NO: 43411
  peptide (1)..(318): Ceres Seq. ID no. 13601943

SEQ ID NO: 99011 - DNA, 875 bp, Arabidopsis thaliana
  misc_feature (1)..(875): Ceres Seq. ID no. 13601958
  misc_feature (1)..(875): Ortholog of  Ceres SEQ ID NO 13585222 as cited in SEQ ID NO 68696
gggagtgagattgaaatttctggcggctctttcaaaggaaaattgtagattgtattcaaatacgttgaggaagaaagaaggtgacaaagaggaagacgaagaagaaagttgtagaaagtaatggtgttgtgggagttagctctaggaacagcttacttcttggggattaggcggacttaccggctcgcattgaagacccagcgtcggcttgttagccctaagcatccaaggattcgagattttatgcatcggaggacttatcaaatctttgatatggcacttagggtccacaagaacatacaacagagagacatggttattggtcggaatcttggaaactggattctccgggggcttgaccggatgaagccatcggctcaggttctactaccaaagaatacagagccaagcatagacaaggcgaaaagagtattacaatcaacccgtcttaaaccacatgttaacacgcagactcctcagaaccgtgaggttgataggaacttgttcatgtccttgaggaactttcggtccaaataccccattgcttcgatgatgatgatcaaacctccaagatccacgggaactactactcagtacaggccttacagtgttggtgaatccagtctgattaaaccaatttatgctagaggcgggttcaacagcgtcatcaggaaggacattttgcagtggatggtgcagaagagataaagccgccaaaattcatcaaaggcccttctgtttcttagattacaacatactcagaaggaaacacttgtctcaaccgtatcactttgtatgagtttttaataaccggtggattgataggaaaatctcctggacaactaaaaattgtgactagtattacttacttgact

SEQ ID NO: 99012 - protein, 195 aa, Arabidopsis thaliana
  peptide (1)..(195): Ceres Seq. ID no. 13601959
MVLWELALGTAYFLGIRRTYRLALKTQRRLVSPKHPRIRDFMHRRTYQIFDMALRVHKNIQQRDMVIGRNLGNWILRGLDRMKPSAQVLLPKNTEPSIDKAKRVLQSTRLKPHVNTQTPQNREVDRNLFMSLRNFRSKYPIASMMMIKPPRSTGTTTQYRPYSVGESSLIKPIYARGGFNSVIRKDILQWMVQKR

SEQ ID NO: 99013 - protein, 154 aa, Arabidopsis thaliana
  peptide (1)..(154): Ceres Seq. ID no. 13601960
MHRRTYQIFDMALRVHKNIQQRDMVIGRNLGNWILRGLDRMKPSAQVLLPKNTEPSIDKAKRVLQSTRLKPHVNTQTPQNREVDRNLFMSLRNFRSKYPIASMMMIKPPRSTGTTTQYRPYSVGESSLIKPIYARGGFNSVIRKDILQWMVQKR

SEQ ID NO: 99014 - protein, 144 aa, Arabidopsis thaliana
  peptide (1)..(144): Ceres Seq. ID no. 13601961
MALRVHKNIQQRDMVIGRNLGNWILRGLDRMKPSAQVLLPKNTEPSIDKAKRVLQSTRLKPHVNTQTPQNREVDRNLFMSLRNFRSKYPIASMMMIKPPRSTGTTTQYRPYSVGESSLIKPIYARGGFNSVIRKDILQWMVQKR

SEQ ID NO: 99015 - DNA, 1295 bp, Arabidopsis thaliana
  misc_feature (1)..(1295): Ceres Seq. ID no. 13601962
  misc_feature (1)..(1295): Ortholog of  Ceres SEQ ID NO 14308080 as cited in SEQ ID NO 55218
  misc_feature (1)..(1295): Ortholog of  Ceres SEQ ID NO 14309287 as cited in SEQ ID NO 0
gagagaaagagtgctcagagtgagcgagagcatagcggtggagtgtcgccactggtaactccgacgatttttctcgtttgcgtaagccgaaagatcactctttttttggtgtcgactctgtttctgccgtatgattcttttggaaccctagtcacaggtttttgattttgcatggtttattgtagcgagttagttttttccgcatatgggtcttgattcttctttcgttaactcttctgggtttgccgattttcaatcaaacaatcttgaaagatcaaatcttttcctctacgagctgcaacgcgaaggtgtgatctttccactgaaactagctatcaagatgaattcatttcctgcacaaaaccttatgctatctgctacaaacgcaaacaaggactcaggcttgcgtacgtctaatgctcattggttacattcatgtatcgccgttccaaagaccacaggcattgatctttctcaggaacctcctgctgaaggtgtgatggtgcctcaatctcatttgtttcctcctcctattagagattccagaaacgatactgaaactgtgaaacagaagtccgtaaatcagtctccttcgaaagctttgaagccaaaaccgcaaaggaagaaacgctctgtatccaacaagtcaaagaaaacacctagcataccagaaacaaaacgtgagaaaaagaatctggacatcaacattgacatctcaagctttgatacttctggggttcctcctcctgtatgttcatgtacaggcgtttcaagggtttgctacaaatggggcatgggcggttggcaatcctcatgttgtaccatcagcatatcgacatacccactacccatgagcacaacaagacctggagctcgtcttgcaggaagaaaaatgagcaatggtgcttatgttaagctccttgcgaggcttgcggacgaaggctatgacctctctcaccctcttgatctcaagaaccattgggccagacacggtactaacaagtttgtgaccatcaagtagtcgtttcattagttgggtttgatttagatattagcttttgtggcttctttttaagtccttttcacagtcttagccttttggtatatatttgggagtactgtatttgctatagtagnggtatcctttacttgtttcccctgaagtagagtatatttcctgcaaaaatcccaacagtcgtggaaacacattatggcatgaacttgggtaacttcggtcatgcaacacattgctttggaattcacaaataaatttcaataagaaatgaatattagcg

SEQ ID NO: 99016 - protein, 271 aa, Arabidopsis thaliana
  peptide (1)..(271): Ceres Seq. ID no. 13601963
MGLDSSFVNSSGFADFQSNNLERSNLFLYELQREGVIFPLKLAIKMNSFPAQNLMLSATNANKDSGLRTSNAHWLHSCIAVPKTTGIDLSQEPPAEGVMVPQSHLFPPPIRDSRNDTETVKQKSVNQSPSKALKPKPQRKKRSVSNKSKKTPSIPETKREKKNLDINIDISSFDTSGVPPPVCSCTGVSRVCYKWGMGGWQSSCCTISISTYPLPMSTTRPGARLAGRKMSNGAYVKLLARLADEGYDLSHPLDLKNHWARHGTNKFVTIK

SEQ ID NO: 99017 - protein, 226 aa, Arabidopsis thaliana; identical to SEQ ID NO: 72076
  peptide (1)..(226): Ceres Seq. ID no. 13601964

SEQ ID NO: 99018 - protein, 217 aa, Arabidopsis thaliana; identical to SEQ ID NO: 72077
  peptide (1)..(217): Ceres Seq. ID no. 13601965

SEQ ID NO: 99019 - DNA, 620 bp, Arabidopsis thaliana
  misc_feature (1)..(620): Ceres Seq. ID no. 13601973
  misc_feature (1)..(620): Ortholog of  Ceres SEQ ID NO 15174240 as cited in SEQ ID NO 61866
attccccatcgcacagacccccctaagaatccgagagagaagaagagataatgcagatcttcgtcaaaaccctcaccggcaaaactataaccctagaagttgagagcagcgacaccatcgacaatgttaaagccaaaatccaggacaaagagggcataccacctgatcaacagaggctgatttttgctggtaagcaattggaagatggccggaccttagctgattacaacatccagaaagagtctactcttcatcttgtcctcaggctcagaggtggaaccatgatcaaggtgaagacactcactggaaaagaaatcgagattgatatcgaaccaaccgacactattgatcggatcaaagaacgtgttgaagagaaagaaggcatccctcctgttcaacaaaggctcatatatgccggaaaacagcttgctgatgacaaaacggccaaagattatgcgatagagggaggctctgttcttcatttggttcttgctcttaggggtggtcttctctgatcttaataaataagcttttcaacaaacatcttttccctcactattgtcctccttatgtggaattcatgacacaccaaaattgctatgggaaattggaatattatg

SEQ ID NO: 99020 - protein, 154 aa, Arabidopsis thaliana
  peptide (1)..(154): Ceres Seq. ID no. 13601974
MQIFVKTLTGKTITLEVESSDTIDNVKAKIQDKEGIPPDQQRLIFAGKQLEDGRTLADYNIQKESTLHLVLRLRGGTMIKVKTLTGKEIEIDIEPTDTIDRIKERVEEKEGIPPVQQRLIYAGKQLADDKTAKDYAIEGGSVLHLVLALRGGLL

SEQ ID NO: 99021 - protein, 77 aa, Arabidopsis thaliana
  peptide (1)..(77): Ceres Seq. ID no. 13601975
MIKVKTLTGKEIEIDIEPTDTIDRIKERVEEKEGIPPVQQRLIYAGKQLADDKTAKDYAIEGGSVLHLVLALRGGLL

SEQ ID NO: 99022 - DNA, 1967 bp, Arabidopsis thaliana
  misc_feature (1)..(1967): Ceres Seq. ID no. 13601976
  misc_feature (1)..(1967): Ortholog of  Ceres SEQ ID NO 14309715 as cited in SEQ ID NO 55353
  misc_feature (1)..(1967): Ortholog of  Ceres SEQ ID NO 13595521 as cited in SEQ ID NO 59840
atccagttgactccaaatagactagaaagagaaagaaagagagagagagagagagagagaaccagagattatcgaacacgaagcagaagacgattcgtggaagagacttggagagaatatttctcaatgtctcctctcccaatcttccatcgtcttcctcacgccacgttctcttcctttctcctctcactgtctcaagctggaagttctaaaacatcagtggcattcctcaatgccttcaaatcagaagatatcattgctcgaattggactatggtggcagcttataagggctgttgtagttgtacctgtcttcaagttcctggtgcttctatgtttggtcatgtctgtcatgttcttcgttgaggttatgtacatgggaatcgttgttttgtatgtcaagctgttcaagagaaagccagagaaattttacaaatgggaagccatggaggatgatgttgagtgtggcagtgcaagctaccctatggttcttgtgcagatacctatgtacaatgaaaaagaggtttgtgagcaatctattgcagctgcttgcaaaatctcatggccatcgaatcgtataataattcaagtgcttgatgattccacggatccagccagtaaggagttggtgaaaaaggagtgtgacagatggtctaaagaaggtgtcaacataacgtttgagataagggacaacaggaacggatacaaagctggtgcgttgagagaaggaatgaggcatagctatgtgaagcagtgtgattatgttgctatctttgatgctgatttccagcctgatcctgacttcctccaccgcactgttccattcttaattcacaatcccaagttagcacttgtacaaggccggtgggagtttgtgaacgcgggtcaatgcatgatgacgagattacaggagatgtctctaagttaccactttacaatagagcagcaagttggatcttcaacatttgccttctttgggttcaacggaactgctggcgtctggagaatctcagcattgaatgagtccgggggatggaatgaccagacaacagtagaagacatggatttagctgtacgagctacactgagaggctggaagtttctatatatcgatgatctcaaggtaaaaagtgagttaccttgttccttcaaagctctgcgtagccagcagcatcgatggacttgcggccctgccaatcttttaaggaaaatggctggacaaataataagaagcgagaatgtatctctatggaagaagtggtatatgttgtacagcttcttcttcatgcgcaagatcgtggctcacatcctcacattctgcttctactgtgttatcttgccagcaactgtattgttcccagaagtcacagttccgaaatgggctgcattttatctcccttctttgatcactctcttaatcgcaattggtagactaagatcaatccaccttttggctttctgggttctatttgagaatgcaatgtccctgctaagagcaaaggctctggtcatgggcttgttcgaaacaggaagagtacaagaatgggttgtgacggagaagttaggtgatactctcaagacgaagctgattccacaagttcctaacgtcagattcagagagagggtgcatttgctggagctattggttggagcgtacctgttattctgcggaatctacgacatcgtctatgggaagaacacactctatgtgtaccttctgtttcagtcagtggccttcttcgttgttggttttggatttgtaggaaaatatgttcctgcttcctcttacttagcataggatagatcatagagtctcaatatgtttcagaaggttttttgtttgatgtcatattgagaacaatgcctatatactactctccatttgtattaacacttgagtatctgtaaccaacgaagctcagatgtgatcgatattatttttttaacagtataaaaccacttaacact

SEQ ID NO: 99023 - protein, 598 aa, Arabidopsis thaliana
  peptide (1)..(598): Ceres Seq. ID no. 13601977
IQLTPNRLERERKRERERERTRDYRTRSRRRFVEETWREYFSMSPLPIFHRLPHATFSSFLLSLSQAGSSKTSVAFLNAFKSEDIIARIGLWWQLIRAVVVVPVFKFLVLLCLVMSVMFFVEVMYMGIVVLYVKLFKRKPEKFYKWEAMEDDVECGSASYPMVLVQIPMYNEKEVCEQSIAAACKISWPSNRIIIQVLDDSTDPASKELVKKECDRWSKEGVNITFEIRDNRNGYKAGALREGMRHSYVKQCDYVAIFDADFQPDPDFLHRTVPFLIHNPKLALVQGRWEFVNAGQCMMTRLQEMSLSYHFTIEQQVGSSTFAFFGFNGTAGVWRISALNESGGWNDQTTVEDMDLAVRATLRGWKFLYIDDLKVKSELPCSFKALRSQQHRWTCGPANLLRKMAGQIIRSENVSLWKKWYMLYSFFFMRKIVAHILTFCFYCVILPATVLFPEVTVPKWAAFYLPSLITLLIAIGRLRSIHLLAFWVLFENAMSLLRAKALVMGLFETGRVQEWVVTEKLGDTLKTKLIPQVPNVRFRERVHLLELLVGAYLLFCGIYDIVYGKNTLYVYLLFQSVAFFVVGFGFVGKYVPASSYLA

SEQ ID NO: 99024 - protein, 556 aa, Arabidopsis thaliana; identical to SEQ ID NO: 40206
  peptide (1)..(556): Ceres Seq. ID no. 13601978

SEQ ID NO: 99025 - protein, 484 aa, Arabidopsis thaliana; identical to SEQ ID NO: 40207
  peptide (1)..(484): Ceres Seq. ID no. 13601979

SEQ ID NO: 99026 - DNA, 1324 bp, Arabidopsis thaliana
  misc_feature (1)..(1324): Ceres Seq. ID no. 13601987
  misc_feature (1)..(1324): Ortholog of  Ceres SEQ ID NO 15179641 as cited in SEQ ID NO 56414
  misc_feature (1)..(1324): Ortholog of  Ceres SEQ ID NO 14316049 as cited in SEQ ID NO 67036
  misc_feature (1)..(1324): Ortholog of  Ceres SEQ ID NO 14302220 as cited in SEQ ID NO 69121
actcacctatctcactctaaaatctctctctgccaatctcatcttcaacctctctctaactctcgttttcgattctacaatggctgacaagaagattaggatcggaatcaacggattcggaagaattggtcgtttggttgctagagttgttctccagagggacgatgttgagctcgtcgctgtcaacgaccccttcatcactactgagtacatgacctacatgttcaagtacgacagtgttcacggtcaatggaaacacaatgaactcaagatcaaggatgagaagacccttctcttcggtgagaagccagtcactgttttcggcatcaggaaccctgaggatatcccatgggccgaggctggagctgactacgttgttgagtctactggtgtcttcactgacaaagacaaggctgcagctcacttgaagggtggtgccaagaaggttgttatctctgcccccagcaaagacgctccaatgtttgttgttggtgtcaacgagcacgaatacaagtccgaccttgacattgtctccaacgctagctgcaccactaactgccttgctccccttgccaaggttatcaatgacagatttggaattgttgagggtcttatgactacagtccactcaatcactgctactcagaagactgttgatgggccttcaatgaaggactggagaggtggaagagctgcttcattcaacattattcccagcagcactggagctgccaaggctgtcggaaaggtgcttccagctcttaacggaaagttgactggaatgtctttccgtgtcccaaccgttgatgtctcagttgttgaccttactgtcagactcgagaaagctgctacctacgatgaaatcaaaaaggctatcaaggaggaatccgaaggcaaactcaagggaatccttggatacaccgaggatgatgttgtctcaactgacttcgttggcgacaacaggtcgagcatttttgacgccaaggctggaattgcattgagcgacaagtttgtgaaattggtgtcatggtacgacaacgaatggggttacagttcccgtgtggtcgacttgatcgtccacatgtcaaaggcctaagctaagaagcagatctcgaatgatagggagtggaaagtcatctgttcatccccttttatggtctgaatttgtcgttttcgaataaaatttctttgaacttggaactttttttttttttggttttcttaattctcattcatgtgaggtgatgggagtttgtagaccgatgttttactggaagccctttgtttttggcttttgatatattgagttaacgttatggttttc

SEQ ID NO: 99027 - protein, 364 aa, Arabidopsis thaliana
  peptide (1)..(364): Ceres Seq. ID no. 13601988
LTYLTLKSLSANLIFNLSLTLVFDSTMADKKIRIGINGFGRIGRLVARVVLQRDDVELVAVNDPFITTEYMTYMFKYDSVHGQWKHNELKIKDEKTLLFGEKPVTVFGIRNPEDIPWAEAGADYVVESTGVFTDKDKAAAHLKGGAKKVVISAPSKDAPMFVVGVNEHEYKSDLDIVSNASCTTNCLAPLAKVINDRFGIVEGLMTTVHSITATQKTVDGPSMKDWRGGRAASFNIIPSSTGAAKAVGKVLPALNGKLTGMSFRVPTVDVSVVDLTVRLEKAATYDEIKKAIKEESEGKLKGILGYTEDDVVSTDFVGDNRSSIFDAKAGIALSDKFVKLVSWYDNEWGYSSRVVDLIVHMSKA

SEQ ID NO: 99028 - protein, 338 aa, Arabidopsis thaliana; identical to SEQ ID NO: 23957
  peptide (1)..(338): Ceres Seq. ID no. 13601989

SEQ ID NO: 99029 - protein, 294 aa, Arabidopsis thaliana; identical to SEQ ID NO: 23958
  peptide (1)..(294): Ceres Seq. ID no. 13601990

SEQ ID NO: 99030 - DNA, 1515 bp, Arabidopsis thaliana
  misc_feature (1)..(1515): Ceres Seq. ID no. 13602011
  misc_feature (1)..(1515): Ortholog of  Ceres SEQ ID NO 14314264 as cited in SEQ ID NO 57374
acacactctgcaacacctctcactcaaatttcattcaccatgttctctctcaaatccttaatctcctcacctttcacacaatccaccactcatggattattcaccaacccgattacccgacccgttaatccattaccacgtaccgtttccttcaccgttaccgcttccatgatacccaaaagatcctcagctaacatgattcccaaaaaccctccggcgaggcaacagctctaccaaccgttccgaccaccgtcatctcccattccaacccaattccgttcactcgactccgccggtaaaatcgaaatcctcgccggtcgaatggctctctggttcgaatacgcacctcttatctcttctctttacaccgatggtttcactcctccaaccatcgaagaactcaccggaatctcaagcatcgaacagaaccgtttaatcgtcggtgcgcaagttcgtgactcaattcttcaatctatccatgaaccggagctcatttctgcgttcgacaccggtggtgcagagcttctatacgaaattcgtctccttagcaccacgcagcgtgttgcagccgccacattcatcattgatcgtaatattgattcgaaaggagcacaggatttggcacgagccatcaaggattatcctaaccgtcgtggagacgttggatggttggattttgattacaacttaccaggagattgtctttcattcttgtattacaggcagagcagagagaataagaatccatcggatcagagaacctcgatgcttctacaagcattgggggttgcagaatcagaaaaggctaagaacaggttgaacacagagctatacggggacaaggaagcagagaaggagaaggagaagaagaagaaggaagaggaagtcaaagctattcggattccagtggtgaggcttaagtttggagaagtagcagaagcgacctcggtggtagttttaccggtttgtaaagcagaggaaggggaaaagaagattcttgaagctccaatggagatcatagccggaggggattttaaggtggttgaggcggagaaaggatggaagagatgggtagtgcttccgtcgtggaacccagtggcagccattgggaaaggcggtgtggcggtttctttcagggatgatagaaaagtgctgccttgggatggaaaggaggagcctttactggtagtggccgatagggtgaggaatgttgtggaggctgatgacgggtattatctcgtggtggctgagaacggacttaagctagagaaaggatcagatttgaaggcgagagaggtgaaggagagtttagggatggttgttttggtggtgaggccgccaagagaagatgatgatgattggcagacaagtcatcagaactgggactgaattaatagaatcaatactcatatgctgtaactgattacggagtcatcatggtcatgtaaaaattttggataaaggtggtaactttttgttctaagatacaatcagaaacagagcaatatttttctc

SEQ ID NO: 99031 - protein, 462 aa, Arabidopsis thaliana; identical to SEQ ID NO: 42935
  peptide (1)..(462): Ceres Seq. ID no. 13602012

SEQ ID NO: 99032 - protein, 449 aa, Arabidopsis thaliana; identical to SEQ ID NO: 42936
  peptide (1)..(449): Ceres Seq. ID no. 13602013

SEQ ID NO: 99033 - protein, 406 aa, Arabidopsis thaliana; identical to SEQ ID NO: 42937
  peptide (1)..(406): Ceres Seq. ID no. 13602014

SEQ ID NO: 99034 - DNA, 1486 bp, Arabidopsis thaliana
  misc_feature (1)..(1486): Ceres Seq. ID no. 13602015
  misc_feature (1)..(1486): Ortholog of  Ceres SEQ ID NO 13596013 as cited in SEQ ID NO 61990
atgacgataattgttttaattttgggccagagagaaagggtcgcaaaaccaccgccgtatatccacggccgtcttatcaccggcaacaaccgtaggtttttgttttccgtcgcgatggaggtggataagaaggacgagagagaggctgaatcttcggagcaagtggtgaatccatgggaagtgtccgccaaagacggcgggaagatcgattacgacaagcttattgacaaatttggatgtcaaaggcttgacgagtcactgattgatcgtgttcagagactgacttctcgtcaaccacacgtgttcctccgccgtagtgtcttcttcgcccaccgggatttcaatgagattttggacgcttatgagagaggagacaagttctatctctacactggaagaggaccttcatcagaagcattgcatttggggcatttgattcctttcatgtttaccaaatacttgcaagaagctttcaaggttccccttgttatacagctcacggatgatgaaaaaagtatatggaagaacttatcggtggaggaaagtcaaagacttgccagagaaaatgcgaaagatattattgcttgtggattcgatgtaacaaagaccttcattttctcggacttcgactatgttggcggtgctttctataaaaatatggtgaaggttggcaagtgcgttacacttaataaggctatgggaatctttggcttttccggtgaagatcctatcgcgaaactcagtttccctcctgtgcaggcagttccatcttttcctagctcattcccacatttgttccctggcaaggacaatctccgctgcttgattccttgtgctattgaccaggatccttattttagaatgactcgtgatgtcgcaccccggttaggctatagcaagcccgccctgattgagtcaacattttttcctgcgttgcagggagagaatggaaaaatgtctgctagtgatccaaattctgctatctatgtgactgattccgcaaaggacattaaaaacaagataaacagatatgcgtttagtggtgggcaagactccattgagaagcaccgagaacttggagcaaatctcgaggttgacatacccgtcaagtatctgagtttcttcctcgaagacgattctgaactagaacacattaaaaaggaatatggagaaggaagaatgctaacaggagaagtaaagaagagacttacggaagtgttgacagaaattgtggagagacaccgcagggctcgagctgctgttactgatgagatggttgatgcgttcatggcggtgagacctctcccaagcatgttcgaatagaaaaagtcagaaaccctttttggctcctcagcaacttcacatcactccgtttgatttggattcagacatctttgggtgtctattgatagatttgatccttgaaattgaaccatacttgttagttacaattttcatatttacatttatttatgaatcacattct

SEQ ID NO: 99035 - protein, 440 aa, Arabidopsis thaliana
  peptide (1)..(440): Ceres Seq. ID no. 13602016
MTIIVLILGQRERVAKPPPYIHGRLITGNNRRFLFSVAMEVDKKDEREAESSEQVVNPWEVSAKDGGKIDYDKLIDKFGCQRLDESLIDRVQRLTSRQPHVFLRRSVFFAHRDFNEILDAYERGDKFYLYTGRGPSSEALHLGHLIPFMFTKYLQEAFKVPLVIQLTDDEKSIWKNLSVEESQRLARENAKDIIACGFDVTKTFIFSDFDYVGGAFYKNMVKVGKCVTLNKAMGIFGFSGEDPIAKLSFPPVQAVPSFPSSFPHLFPGKDNLRCLIPCAIDQDPYFRMTRDVAPRLGYSKPALIESTFFPALQGENGKMSASDPNSAIYVTDSAKDIKNKINRYAFSGGQDSIEKHRELGANLEVDIPVKYLSFFLEDDSELEHIKKEYGEGRMLTGEVKKRLTEVLTEIVERHRRARAAVTDEMVDAFMAVRPLPSMFE

SEQ ID NO: 99036 - protein, 402 aa, Arabidopsis thaliana; identical to SEQ ID NO: 41624
  peptide (1)..(402): Ceres Seq. ID no. 13602017

SEQ ID NO: 99037 - protein, 292 aa, Arabidopsis thaliana; identical to SEQ ID NO: 41625
  peptide (1)..(292): Ceres Seq. ID no. 13602018

SEQ ID NO: 99038 - DNA, 1217 bp, Arabidopsis thaliana
  misc_feature (1)..(1217): Ceres Seq. ID no. 13602019
  misc_feature (1)..(1217): Ortholog of  Ceres SEQ ID NO 15176423 as cited in SEQ ID NO 53228
agacaagtttgttctggataaaaagacaattcatttctattttaattgtctgcaaaattctcacgggccatcggagagaggagacagaggtggtgctgcacaagaatccttcctcctatatcctacaagactttggaatgggaagagaagttgttgaggtgcttatggaccgaaacgccgacgtttcaagcgctagagttcatgttgctcctaagatagctgcagaggagactgatgaggaatttgaagtcaaagaatgcacagaggagaagtctctttctgagaatgcaccaaatgttggatctgctgagagagttggagctcagaaatcacctaaaacccgtaatggaaatgctaaagtttcaaagcagcaggatgctcctcttctcgcggtgaggaagccattgcaacccgagaacaagaagcatattgatgacgaagataattgctccattgcttcttccgttgcaacttccatgaggatgggtaagtctggattgacttatggaagtgctccaacgtttaggagtgctcaacgtgctgagaaacgcaaggagtattaccaaaagctcgaggagaaaaaccaagcgcttgaagctgagaggaacgagcttgaacagaggcaaaaggatgaacaagaagcagccttgaagcaacttagaaagaatctcaagttcaaggctaaacccgtccccaacttctactacgaggcacctcctgcgaaacctgagctcaagaagcttcctttgacacgtcccaagtcgccaaaactgatcctttctcggagaaaaagcttcagcgacgcagtcagctcgtcttcccgtgaagagattctgaagacagtctctaaccggaaccgacacagcactggaacagttcagaacaaagacgatgatcacaggaacaagaacaccaatgctgcgcacgacagccctcgtgtcagatcaggcaaaggtaaatccggattgaaaccagtgaacgagtcctcagaagaagcttgaaatttcaaaagatgatgctttgttggtctaacttgatcttgccggagaaaatgtaaaatcaaagactctttgtttttcggttatttccggtatacgtttggttcactatgtaactgtcttttttcgattttaagttttaacatgaaaaactttatgttgattgttgaacaactcctcctaatgttgaaatttgtaaatctgaatgctgttggattt

SEQ ID NO: 99039 - protein, 332 aa, Arabidopsis thaliana
  peptide (1)..(332): Ceres Seq. ID no. 13602020
TSLFWIKRQFISILIVCKILTGHRREETEVVLHKNPSSYILQDFGMGREVVEVLMDRNADVSSARVHVAPKIAAEETDEEFEVKECTEEKSLSENAPNVGSAERVGAQKSPKTRNGNAKVSKQQDAPLLAVRKPLQPENKKHIDDEDNCSIASSVATSMRMGKSGLTYGSAPTFRSAQRAEKRKEYYQKLEEKNQALEAERNELEQRQKDEQEAALKQLRKNLKFKAKPVPNFYYEAPPAKPELKKLPLTRPKSPKLILSRRKSFSDAVSSSSREEILKTVSNRNRHSTGTVQNKDDDHRNKNTNAAHDSPRVRSGKGKSGLKPVNESSEEA

SEQ ID NO: 99040 - protein, 287 aa, Arabidopsis thaliana
  peptide (1)..(287): Ceres Seq. ID no. 13602021
MGREVVEVLMDRNADVSSARVHVAPKIAAEETDEEFEVKECTEEKSLSENAPNVGSAERVGAQKSPKTRNGNAKVSKQQDAPLLAVRKPLQPENKKHIDDEDNCSIASSVATSMRMGKSGLTYGSAPTFRSAQRAEKRKEYYQKLEEKNQALEAERNELEQRQKDEQEAALKQLRKNLKFKAKPVPNFYYEAPPAKPELKKLPLTRPKSPKLILSRRKSFSDAVSSSSREEILKTVSNRNRHSTGTVQNKDDDHRNKNTNAAHDSPRVRSGKGKSGLKPVNESSEEA

SEQ ID NO: 99041 - protein, 278 aa, Arabidopsis thaliana
  peptide (1)..(278): Ceres Seq. ID no. 13602022
MDRNADVSSARVHVAPKIAAEETDEEFEVKECTEEKSLSENAPNVGSAERVGAQKSPKTRNGNAKVSKQQDAPLLAVRKPLQPENKKHIDDEDNCSIASSVATSMRMGKSGLTYGSAPTFRSAQRAEKRKEYYQKLEEKNQALEAERNELEQRQKDEQEAALKQLRKNLKFKAKPVPNFYYEAPPAKPELKKLPLTRPKSPKLILSRRKSFSDAVSSSSREEILKTVSNRNRHSTGTVQNKDDDHRNKNTNAAHDSPRVRSGKGKSGLKPVNESSEEA

SEQ ID NO: 99042 - DNA, 885 bp, Arabidopsis thaliana
  misc_feature (1)..(885): Ceres Seq. ID no. 13602023
  misc_feature (1)..(885): Ortholog of  Ceres SEQ ID NO 13591265 as cited in SEQ ID NO 61046
  misc_feature (1)..(885): Ortholog of  Ceres SEQ ID NO 15224932 as cited in SEQ ID NO 62225
atgactttgaccagtgaccttccgttcaaagaatatcgacggttcttagacacatttttcaccggagtctcaccctcacagatagatgcattagaccaccaagaaaacaaagacttatcgatcatgaagatcagacttagcataaccatcatacttttatcatacacagtggctacggtggccggacaacaatgcggtcgtcaaggcggtggtcgaacttgtcccggtaacatctgctgcagtcagtacggttactgtggtaccaccgcggactactgttctccgaccaacaactgtcagagcaattgttggggaagtgggcctagcggaccaggggagagcgcgtcgaacgtacgcgccacctaccatttctataatccggcgcagaataattgggatttgagagccgtgagtgcttattgctccacgtgggatgctgataagccgtacgcatggcggagcaagtatggctggaccgccttctgcgggccggcaggacctcgtggtcaagcttcttgcggcaagtgtttaagggtgaagaacacaagaacaaatgctgcagtaactgtgagaatagtggaccaatgcagcaacggaggcttggatttggatgtagcaatgttcaatcaaatagacaccgatggttttggctatcaacaaggccatctcattgttgactaccaatttgtcgactgtggcaatgagctcattgggcagcctgattccagaaacatgcttgtttcggccattgatcgcgtttgatattatgtaatgattttgaggtcaatatcgatcggtctacataaaaataataaagaccgctatatatgtattgtcgagggatatatgtttcgtatcaataaggaaattttaaatattattatc

SEQ ID NO: 99043 - protein, 253 aa, Arabidopsis thaliana
  peptide (1)..(253): Ceres Seq. ID no. 13602024
MTLTSDLPFKEYRRFLDTFFTGVSPSQIDALDHQENKDLSIMKIRLSITIILLSYTVATVAGQQCGRQGGGRTCPGNICCSQYGYCGTTADYCSPTNNCQSNCWGSGPSGPGESASNVRATYHFYNPAQNNWDLRAVSAYCSTWDADKPYAWRSKYGWTAFCGPAGPRGQASCGKCLRVKNTRTNAAVTVRIVDQCSNGGLDLDVAMFNQIDTDGFGYQQGHLIVDYQFVDCGNELIGQPDSRNMLVSAIDRV

SEQ ID NO: 99044 - protein, 212 aa, Arabidopsis thaliana; identical to SEQ ID NO: 28152
  peptide (1)..(212): Ceres Seq. ID no. 13602025

SEQ ID NO: 99045 - DNA, 1105 bp, Arabidopsis thaliana
  misc_feature (1)..(1105): Ceres Seq. ID no. 13602030
  misc_feature (1)..(1105): Ortholog of  Ceres SEQ ID NO 13596902 as cited in SEQ ID NO 62521
aaagctctgaaaagatggccggagctgtttctgccgtcgatcaaccgttgaaaatcatcaccggagctgatgactttggagcgagcctcaaggacgcgatggtaacacacctccgctctctcggcatagacgtggaggataccggagtgtcctcttactactctgctggatctgaagtcggtcgccgcgtctccgcttcatcgtcttccgaagttcgcggcttagtctgctgcggcaccggcgtcggagttgcgatgttcgccaacaagttcccgggcgtctacgcagccacttgtctctccgtcgaagacgccgtcaacgctcgatcaataagcaattgcaatgtcctcgcattctccggcatcaaaacatccccggaaaccgccttggaaatcttcgacgcttggatcaaaactcctttcaaatctccttgtcctgcgtccggatccgaaccatggagctcagttatctcttccttcctcgacaattctctctccgagatgtctcagattggaaagtcaaccgccggcgattcaacaaccaagaagatcgatgaaacaaccgcgtcttgcgtaatttgctgcttggcgaagaacagagagttcactccagtggacatcatgccgggaggctcgatgaagatcgttagagagacgccgacgtcggcgattgtaagattcaaagcgggaagtgtggaaccggcgcatcaccacacattcggccatgaccttgtagtcataaagggaaagaaaagtgtgtggaatctgagcaagaaggagagagctgatctcgttgacggcgattacctattcactcccgccggtgatgttcaccgagtcaaatatcacgaagacactgagttcttcatcacttgggatggccattgggacatattccttgacgaagacctcgaaactgcaaagaaagccatcgaagaagaagcttgaaggtgtaaactttgtgtagtactctcttcttttgaatgttgtaagttctgagagtaaactttcttaaattgatgtactttgtaagaatctttgatttcaaaagatggtgtaatattacaaatactttctcttatgaacactatataaagggtttctac

SEQ ID NO: 99046 - protein, 314 aa, Arabidopsis thaliana; identical to SEQ ID NO: 40986
  peptide (1)..(314): Ceres Seq. ID no. 13602031

SEQ ID NO: 99047 - protein, 310 aa, Arabidopsis thaliana; identical to SEQ ID NO: 40987
  peptide (1)..(310): Ceres Seq. ID no. 13602032

SEQ ID NO: 99048 - protein, 282 aa, Arabidopsis thaliana; identical to SEQ ID NO: 40988
  peptide (1)..(282): Ceres Seq. ID no. 13602033

SEQ ID NO: 99049 - DNA, 1220 bp, Arabidopsis thaliana
  misc_feature (1)..(1220): Ceres Seq. ID no. 13602061
  misc_feature (1)..(1220): Ortholog of  Ceres SEQ ID NO 14310369 as cited in SEQ ID NO 54765
  misc_feature (1)..(1220): Ortholog of  Ceres SEQ ID NO 13638746 as cited in SEQ ID NO 59296
  misc_feature (1)..(1220): Ortholog of  Ceres SEQ ID NO 13596474 as cited in SEQ ID NO 62169
  misc_feature (1)..(1220): Ortholog of  Ceres SEQ ID NO 13598714 as cited in SEQ ID NO 62656
  misc_feature (1)..(1220): Ortholog of  Ceres SEQ ID NO 13596969 as cited in SEQ ID NO 63375
  misc_feature (1)..(1220): Ortholog of  Ceres SEQ ID NO 14302434 as cited in SEQ ID NO 63410
  misc_feature (1)..(1220): Ortholog of  Ceres SEQ ID NO 13597519 as cited in SEQ ID NO 64759
  misc_feature (1)..(1220): Ortholog of  Ceres SEQ ID NO 13587054 as cited in SEQ ID NO 0
aacgactcataactcatagctatatcttgtcttaaaaagaagaagcaaagagaattagtggagtacgataagcagagaagtatgttaaaggtggtgttgttgatgatgataatgatgttggcgtcacagtccgaggctcagctgaaccgtgacttttacaaggaaagctgtccatcattgttccttgtcgtgagacgagtcgtgaaacgggccgtggccagagagcctcgcatgggtgcttctctccttcgtttgttcttccatgattgttttgtcaatgggtgtgacggatccttactgttggatgacacaccgtcttttttgggagagaaaacctcaggacccagcaataactctgtgagggggttcgaagtgatcgacaaaatcaagtttaaggttgagaaaatgtgcccgggcatcgtctcatgcgcagacattctagccatcactgctcgggactccgttctcctcctaggtggaccggggtggagcgtgaaacttggaagaagagactctacgacggcgaacttcgcggccgcgaactccggagtcatccctcctccgatcactacccttagcaacctcataaaccgtttcaaagcacaaggtttgtccacacgtgacatggtcgccctctctggtgctcacaccattggacgagcccaatgtgttacattcagaaaccgaatctacaacgcaagcaatatcgacacctctttcgccatctctaaacggaggaactgtcctgccaccagtggctccggagacaacaagaaagccaatcttgacgtccgctctcccgataggttcgaccacggcttctacaagcaacttctgagcaaaaaaggtttgcttacgtcagaccaagtcctctttaataatggtcctaccgactcgctcgtcatagcttacagccacaatctcaatgccttctaccgcgactttgcaagggcaatgattaagatgggagacatcagccccctcaccggatccaatggtcagatccgccaaaactgtcggaggcccaactgaatgattctcttttatattatcccaagcccattgagctcaataatcacctcttcgtcaactgttttttcatgtgcattccccttcttcgtcaactgttaaaatacatcttcattatataaaaaacaataaacacgtaaaagtttgtgactatgcagttttccattataaattactgtctatattctctt

SEQ ID NO: 99050 - protein, 316 aa, Arabidopsis thaliana
  peptide (1)..(316): Ceres Seq. ID no. 13602062
MLKVVLLMMIMMLASQSEAQLNRDFYKESCPSLFLVVRRVVKRAVAREPRMGASLLRLFFHDCFVNGCDGSLLLDDTPSFLGEKTSGPSNNSVRGFEVIDKIKFKVEKMCPGIVSCADILAITARDSVLLLGGPGWSVKLGRRDSTTANFAAANSGVIPPPITTLSNLINRFKAQGLSTRDMVALSGAHTIGRAQCVTFRNRIYNASNIDTSFAISKRRNCPATSGSGDNKKANLDVRSPDRFDHGFYKQLLSKKGLLTSDQVLFNNGPTDSLVIAYSHNLNAFYRDFARAMIKMGDISPLTGSNGQIRQNCRRPN

SEQ ID NO: 99051 - protein, 309 aa, Arabidopsis thaliana
  peptide (1)..(309): Ceres Seq. ID no. 13602063
MMIMMLASQSEAQLNRDFYKESCPSLFLVVRRVVKRAVAREPRMGASLLRLFFHDCFVNGCDGSLLLDDTPSFLGEKTSGPSNNSVRGFEVIDKIKFKVEKMCPGIVSCADILAITARDSVLLLGGPGWSVKLGRRDSTTANFAAANSGVIPPPITTLSNLINRFKAQGLSTRDMVALSGAHTIGRAQCVTFRNRIYNASNIDTSFAISKRRNCPATSGSGDNKKANLDVRSPDRFDHGFYKQLLSKKGLLTSDQVLFNNGPTDSLVIAYSHNLNAFYRDFARAMIKMGDISPLTGSNGQIRQNCRRPN

SEQ ID NO: 99052 - protein, 308 aa, Arabidopsis thaliana
  peptide (1)..(308): Ceres Seq. ID no. 13602064
MIMMLASQSEAQLNRDFYKESCPSLFLVVRRVVKRAVAREPRMGASLLRLFFHDCFVNGCDGSLLLDDTPSFLGEKTSGPSNNSVRGFEVIDKIKFKVEKMCPGIVSCADILAITARDSVLLLGGPGWSVKLGRRDSTTANFAAANSGVIPPPITTLSNLINRFKAQGLSTRDMVALSGAHTIGRAQCVTFRNRIYNASNIDTSFAISKRRNCPATSGSGDNKKANLDVRSPDRFDHGFYKQLLSKKGLLTSDQVLFNNGPTDSLVIAYSHNLNAFYRDFARAMIKMGDISPLTGSNGQIRQNCRRPN

SEQ ID NO: 99053 - DNA, 956 bp, Arabidopsis thaliana
  misc_feature (1)..(956): Ceres Seq. ID no. 13602069
  misc_feature (1)..(956): Ortholog of  Ceres SEQ ID NO 14306138 as cited in SEQ ID NO 57513
atgattggtggtttcttcgccgatgtaaaattcaacagatcgagagagaaaaaactctctctccctcctccgttcaccgtcgcgactcggctctacagtacattttgttgagcaatctcgtatttagaggattccaatgtctggcgcagaggataataaatcttcccatgctcagctttcgtcccaaatttttcttgatcttgtggattcggtgatagctgatgtagcatctgagtgtcatcgggtagcacgactaggacttgatcgtgatttggatatagtagaagaagagttgagattgtcagtggaagcgcgtgcgaagatcgctgatcctagcaacaacctcgaaaccaacaccaaatatgttgttgatatatttgggcagactcaccctcctgtagctagtgaagtgttcaattgcatgaactgtgggcgacaaattgttgcaggaaggtttgctcctcatctcgaaaaatgcatgggaaagggaagaaaggctcgtgccaagacaaccagaagcacaacggctgcacagaaccggaatgcacgacgcagccccaatccacgatattctccttatccaaattctgctagtgagaaccagttagcaagtggatcacctggtgttgcaggtgaagactgctcaaatttcacagttcgagagaacgtgaaaggagactgaagtacaactgatgagaggcttatactgattactgaacgacaatgtggctagtaactgactcgaccagactggtataaatcgaattgctaggtttatattcagttcacaaaaaaagagagaaaagcggcgcaaaaggaaaagtagcggaggttcataatgtagctatttctacagcttactaatggggtatcaatatattagtacatgcaccatcatgttataattacaaaaaactctgtagagtcctcaatcaaacagttcccactgttgtgtt

SEQ ID NO: 99054 - protein, 181 aa, Arabidopsis thaliana; identical to SEQ ID NO: 38473
  peptide (1)..(181): Ceres Seq. ID no. 13602070

SEQ ID NO: 99055 - DNA, 1019 bp, Arabidopsis thaliana
  misc_feature (1)..(1019): Ceres Seq. ID no. 13602082
  misc_feature (1)..(1019): Ortholog of  Ceres SEQ ID NO 15180793 as cited in SEQ ID NO 0
aaatcacttgctagtactcttcacactctctacaatgttgtctatgctctggttccttctatctcttctctctcttcttctacttccttgtctccgaccttgctttcctgctaaaggatctctgaaaaacaaaaagaagattgacaagggaacttatgtggtcggagaggaggagacacctaaagagcttcagagagagctgatgccgagacacgtggcagtgataatggacggaaaccggagatgggctaaacagaccggattgttgacgtcacaaggctacgaggctggagctaaacggcttctcgagttcgctgacctctgcttcaaactagggataaatactgtctcagcttttgctttctccactgagaattggggaagacacaagattgaagtcaaatgcttgatgtatttgttccaacgttacctcaagtcaaagatccaatttttccagagcaaggaaatccgagtttctgttatcgggaatcttgcgaagatccctgagtctctcctccgaacagttcacgagttagaggaagctacaaagagttacaagaagaagcatctcatcttggccatagattacagcgggagattcgacatcttgggtgcttgcaagaacattgtgaagaaatcagaacaaggtttgatccgagaggaagacgtggacgagacgttgttcgagagagagcttcagactcggtgtaccgagttcccaagtcctgatctcttgattaggactagtggggaacagaggattagtaacttcttcttgtggcagctcgcttataccgagtttttcttttcgcctgtactttggcctgatttcgataagcagaagtttatagaggccctggtttcgtatcagcgcagggatagacgatttggctcccggctttgatccacatttgatcctatggtctgtcatgtttcctctgttttgttctgtttctctctgtgtctttatgttcatctgacttttgcagaaataattatactgtctagtctctcgtaga

SEQ ID NO: 99056 - protein, 300 aa, Arabidopsis thaliana; identical to SEQ ID NO: 28639
  peptide (1)..(300): Ceres Seq. ID no. 13602083

SEQ ID NO: 99057 - protein, 289 aa, Arabidopsis thaliana; identical to SEQ ID NO: 28640
  peptide (1)..(289): Ceres Seq. ID no. 13602084

SEQ ID NO: 99058 - protein, 286 aa, Arabidopsis thaliana; identical to SEQ ID NO: 28641
  peptide (1)..(286): Ceres Seq. ID no. 13602085

SEQ ID NO: 99059 - DNA, 1243 bp, Arabidopsis thaliana
  misc_feature (1)..(1243): Ceres Seq. ID no. 13602090
  misc_feature (1)..(1243): Ortholog of  Ceres SEQ ID NO 14302776 as cited in SEQ ID NO 66919
actcctaaaaactataatcattgagaaacccattttaagattacatcaatcatcatcgctgttagagagaaactggagcaacttctcaaattttagcctttttttgtttttgcattttgcctaatcggtgcttctccagatttcgcttatcttgttcctatagcataacaatggcggatttcaaaccaaggatcgagatttcgttccttgaaaccttcatttgcagcgctttcgctgcttgttttgctgagttatgtactataccgttggacacagccaaagttagacttcagcttcaaagaaagattcccactggagatggtgagaatttgcccaagtatagaggatcaattggtactctagctaccatagctagagaagaaggtatttcaggtctttggaaaggtgttattgcaggacttcatcgccaatgtatctatggtggcttaaggattgggttatatgagcctgtgaagacacttttggttggaagtgactttattggcgatattcctttatatcaaaagattcttgcagctttgttaactggagctatagctattattgtagctaatccaactgatcttgttaaagttcggcttcaatcagaaggaaagttaccggctggggttcctaggcgttatgcaggagctgtagacgcttatttcaccattgtgaagctggaaggagttagtgcgctatggactggacttggtcccaatattgcccggaatgctattgtaaatgctgcagagttagctagttatgatcaaataaaggagacaattatgaaaattccgttcttcagagacagtgttttaactcatctactagctggtttagctgcaggcttcttcgctgtctgcatcggttctccaattgatgtggtgaaatctagaatgatgggagactctacttaccgaaacacagtcgattgcttcatcaaaacgatgaagaccgaggggattatggcattctacaaaggatttctcccgaattttacacggctaggaacctggaatgccattatgttcctcacattagaacaagtgaaaaaagtgtttctaagagaagtcttgtacgattgattctcagatccctagtcgaaaaccataccttattacataatcccttctataaaactttgaattgttagaattaaaacatatatactttctatgttatgtgagctttgttatttagattagtatagaaacattttatccaaaaaaaaattctttgc

SEQ ID NO: 99060 - protein, 305 aa, Arabidopsis thaliana; identical to SEQ ID NO: 37846
  peptide (1)..(305): Ceres Seq. ID no. 13602091

SEQ ID NO: 99061 - DNA, 870 bp, Arabidopsis thaliana
  misc_feature (1)..(870): Ceres Seq. ID no. 13602092
  misc_feature (1)..(870): Ortholog of  Ceres SEQ ID NO 15174145 as cited in SEQ ID NO 0
aaataccaagcaaccaatttcttgcaattttcctctcctcccaaccaaaacacaagagccaagaacaaagaaaccatggatcatgatcacatgcatggaatgcctcgaccatcatcatcatcatcatcatcaccatcatccatgatgaacaatggatccatgaacgaaggaggaggacatcaccacatgaagatgatgatgcacatgaccttcttttggggcaagaacacggaggttctcttctccggttggcccggaacaagctccggcatgtatgctctttgtcttatctttgtcttctttctcgccgtcctcaccgaatggcttgctcattcctctctcctccgtggctccaccggagattcggctaatcgtgccgccgggttaatccaaaccgccgtgtataccctccgtatcggcctcgcctatctagtcatgctcgccgtcatgtcgtttaacgccggtgtgtttctcgtcgctctggccggtcatgccgttggtttcatgttgttcggaagccaaactttccggaatacctccgatgaccggaaaactaactatgttcctccctcaggttgtgcttgttgatgataatatcaatgctttatatatatgtatggattgatccatgcttgtgattcaaattaaagatctagggtttgtagttttcttggttattttatggattgttcttgaggttcatgtgtgtgtgaatgtgaggaggaggaatatttgatattttctatcgtttgcttaattttttttgcttttgttttattctgctggctaatggtgaaagctgagtatacaatttactacttttgggctccaatttgttttttttttctctcagaatttcatatataattt

SEQ ID NO: 99062 - protein, 195 aa, Arabidopsis thaliana; identical to SEQ ID NO: 25018
  peptide (1)..(195): Ceres Seq. ID no. 13602093

SEQ ID NO: 99063 - protein, 170 aa, Arabidopsis thaliana; identical to SEQ ID NO: 25019
  peptide (1)..(170): Ceres Seq. ID no. 13602094

SEQ ID NO: 99064 - protein, 165 aa, Arabidopsis thaliana; identical to SEQ ID NO: 25020
  peptide (1)..(165): Ceres Seq. ID no. 13602095

SEQ ID NO: 99065 - DNA, 574 bp, Arabidopsis thaliana
  misc_feature (1)..(574): Ceres Seq. ID no. 13602096
  misc_feature (1)..(574): Ortholog of  Ceres SEQ ID NO 15174145 as cited in SEQ ID NO 0
aaaatcttcacattgcacgtaaaaaatatctttatacaatgaacggcatgagtggatcttctccggcggctccggctccttcaccatcatcgttcttccaacatcgccaccgtcacggtggtatgatgcatatgactttcttttggggaaaaaccacggaggttctattcgacggatggccagggaccagtctgaaaatgtattgggtctgtctcgccgtcatttttgttatttccgctttctccgagtgtctatcgcggtgcggtttcatgaaatccggtccggctagcttgggaggcgggctattacagactgcggtttacaccgtgagggctgctttgtcttatttggtcatgctggctgtgatgtcgttcaatggaggagtcttcgtggctgcgatggctggttttggattagggtttatgatttttggaagtagggcttttagggccactagcagtaacagtcacaccgaggttcaatcacattgttgatttttgtcttagatcgtttttattttccttgtttcccgttgaaataatgattaggaaaataaaaaaattcacgtttttgg

SEQ ID NO: 99066 - protein, 163 aa, Arabidopsis thaliana
  peptide (1)..(163): Ceres Seq. ID no. 13602097
NLHIARKKYLYTMNGMSGSSPAAPAPSPSSFFQHRHRHGGMMHMTFFWGKTTEVLFDGWPGTSLKMYWVCLAVIFVISAFSECLSRCGFMKSGPASLGGGLLQTAVYTVRAALSYLVMLAVMSFNGGVFVAAMAGFGLGFMIFGSRAFRATSSNSHTEVQSHC

SEQ ID NO: 99067 - protein, 151 aa, Arabidopsis thaliana
  peptide (1)..(151): Ceres Seq. ID no. 13602098
MNGMSGSSPAAPAPSPSSFFQHRHRHGGMMHMTFFWGKTTEVLFDGWPGTSLKMYWVCLAVIFVISAFSECLSRCGFMKSGPASLGGGLLQTAVYTVRAALSYLVMLAVMSFNGGVFVAAMAGFGLGFMIFGSRAFRATSSNSHTEVQSHC

SEQ ID NO: 99068 - protein, 148 aa, Arabidopsis thaliana
  peptide (1)..(148): Ceres Seq. ID no. 13602099
MSGSSPAAPAPSPSSFFQHRHRHGGMMHMTFFWGKTTEVLFDGWPGTSLKMYWVCLAVIFVISAFSECLSRCGFMKSGPASLGGGLLQTAVYTVRAALSYLVMLAVMSFNGGVFVAAMAGFGLGFMIFGSRAFRATSSNSHTEVQSHC

SEQ ID NO: 99069 - DNA, 1432 bp, Arabidopsis thaliana
  misc_feature (1)..(1432): Ceres Seq. ID no. 13602108
  misc_feature (1)..(1432): Ortholog of  Ceres SEQ ID NO 13596392 as cited in SEQ ID NO 62136
  misc_feature (1)..(1432): Ortholog of  Ceres SEQ ID NO 13654360 as cited in SEQ ID NO 67980
  misc_feature (1)..(1432): Ortholog of  Ceres SEQ ID NO 13596394 as cited in SEQ ID NO 68561
tagggaaaaactttttagggaaaaactttttaggtccaaagatcgagagagaagagaagattttgaattttttttgttttataaagtttcgtcttaagcgatcgattttttgtgcgaaagattgaaactttttggtaagataattgtgttgtgtggttggatcgtggaggtgggtcttctttcgaatggcgcaacaagggcagggaagcatggaccctgccgctctcgatgatatcattcgtcgtttgttggattacagaaaccctaagcctggtaccaaacaggctatgctcaacgagtctgagatccgtcagctttgcatcgtctctagagagatttttcttcaacagcctaaccttcttgagctcgaagctcctatcaagatctgcggtgatattcatggacaatactcagatctattgaggctgtttgagtatggaggcttcccacctacagctaactatttattcttaggagattacgtagacaggggcaagcagagtttggagactatttgtcttctgcttgcttacaaaatcaaataccctgagaacttttttcttctaagaggaaaccacgaatgtgcttctattaacagaatctatggattctatgatgaatgtaaacgtcgattcagtgtgagactctggaaagtgtttacagattcttttaactgtctccctgttgctgctgttatagacgataagatattatgtatgcacggtggcctttctcccgatttgaccaacgtggaacagattaagaacattaagcgacctactgatgttcctgactctggtttgctctgtgatctgctttggtctgatccaagcaaagatgtcaaaggttgggggatgaatgaccgtggagtctcttacacgtttggccctgacaaagtcgcggagtttctaataaagaatgatatggatctcatctgccgtgcccaccaggttgtagaggatggatatgagtttttcgccgatagacagcttgttacgatattttctgctcccaactactgtggtgaatttgacaatgctggtgctatgatgagtgttgatgaaagtttaatgtgctctttccaaattcttaagcctgctgatcgaaagccccggttcttatgaagtaaagagttgaaacctcgcgggaaagaagaggaaaaaggcgatacgaaagcgggagagacatttgaagctccctgagactttgtccggaggccttgcaaaggcaaaaaaacataatttacatgttatattatcttatttgaactcttgccatttcttttctcaaaacactttatgttcttatgatcttctcctctgactctatatagacagtaaaaaaagtctgcaaattttcattctttttcaacaaccaatttcctcagtgtacatactaaattgttctgtatccatacacacatatacttggg

SEQ ID NO: 99070 - protein, 312 aa, Arabidopsis thaliana; identical to SEQ ID NO: 27497
  peptide (1)..(312): Ceres Seq. ID no. 13602109

SEQ ID NO: 99071 - protein, 304 aa, Arabidopsis thaliana; identical to SEQ ID NO: 27498
  peptide (1)..(304): Ceres Seq. ID no. 13602110

SEQ ID NO: 99072 - protein, 278 aa, Arabidopsis thaliana; identical to SEQ ID NO: 27499
  peptide (1)..(278): Ceres Seq. ID no. 13602111

SEQ ID NO: 99073 - DNA, 820 bp, Arabidopsis thaliana
  misc_feature (1)..(820): Ceres Seq. ID no. 13602112
  misc_feature (1)..(820): Ortholog of  Ceres SEQ ID NO 12585335 as cited in SEQ ID NO 62940
aaaacataatttgctctcaataagacattaacaaagtcccagaggcagagagagagaatcagagagagagaagtcgagatgtttttccacatagtattggagcggaacatgcagttgcatcctcgtttctttggtcgtaacctaaaagaaaacctcgtatctaagctcatgaaagatgtcgaaggcacttgcagtggccgacatggatttgtagtggcgataactggaatagatacaataggaaagggtttgatcagagatgggactggttttgtcacctttccagttaaataccaatgcgtcgttttcagacctttcaaaggcgagattttggaagctgttgtcactttggtcaataagatgggattcttcgctgaagctggccctgttcagatttttgtgtctaagcatttgattccagatgatatggagtttcaagctggagacatgcctaactataccacatcagatggatcagttaagatccagaaggagtgtgaagtgagactaaagattattggaacaagagttgatgccactgcgattttttgtgtgggtaccatcaaagacgattttttgggagtcataaacgaccctgcagcggcataaaaagtttcaagcagatttcaattttggtcttctttctttcacagagaatgctgtcttgtgataaagttgtattatagttgaagttttggatctatttaatccgaaagattggaaccacgcttgttggatttaacttatatgcaagtttagtgaacttcgtatttgatcaaaactgttgtcattttgagaacaatatagtaccgagtagtgg

SEQ ID NO: 99074 - protein, 176 aa, Arabidopsis thaliana; identical to SEQ ID NO: 37236
  peptide (1)..(176): Ceres Seq. ID no. 13602113

SEQ ID NO: 99075 - protein, 166 aa, Arabidopsis thaliana; identical to SEQ ID NO: 37237
  peptide (1)..(166): Ceres Seq. ID no. 13602114

SEQ ID NO: 99076 - protein, 146 aa, Arabidopsis thaliana; identical to SEQ ID NO: 37238
  peptide (1)..(146): Ceres Seq. ID no. 13602115

SEQ ID NO: 99077 - DNA, 1340 bp, Arabidopsis thaliana
  misc_feature (1)..(1340): Ceres Seq. ID no. 13602116
  misc_feature (1)..(1340): Ortholog of  Ceres SEQ ID NO 15226004 as cited in SEQ ID NO 56808
gctgtgaaagagatcgttcttctctctgtttcacataaaaggaaaacataagaaaagaaaaaaaaaaatctttctctttcacaatcttaatttctgctcaccatcaaggcaagtttccttcttttgatcctcaacaatttccattgctactaaaaatatcttctttccaaaacaattcacgcatttacgtttttctcaatctttacatatatggtaaccaactcttattccattcctctgtaactcacacaaattcctgtccaaaaattagttttttcttttcatgtgatgtgagaatttgggttacgagaaagatgaagactattagtggattaggtattgggttaagtttaatgtttgggtttcttctattagcacttgttggagaagtctactatcttctaagatgtaagaagcacaagaagagagtcataagccaagagagtgaagaagagaaagaagaagaacaacaacaaaacggatacgctaaagaactaatccagctcttctgcttcaaaaaacctcaatctctgcagcaaaacaatggaggaagagaaggtgaagtctcaatgaatgaagatgggaatccagatttagaacttgggttgatgaaacacttgaatggaggagatctagggtttgaagcagagcttatgaagcttcataaccagaggtttctattcacaatcatggaagagacaaaagcagatttggaatctgaagatgggggtaaatcaagattaggttcaagatcaagaagaagaagcttgagtgatgttcctaatgactgtaatacccctggattcactccattggcttctcctaaaaagtcatcatctcctctggagtcttatccacaccatggattcaatcctctgtttgagtcagacggtgagcttgagtttaacaagtttttcaggtcctcttcttcacctccaccgaagtttaagttcatgagagatgctgaagagaagctaaggaagagattgattgaagaagccaaaagaagagaactctcgattgtaacagaaggttcgtttctcaagtttatgaatcctgcgatgaacagagagaagaaacagagtattcaagaatgtgatgaaacggtgtcgttttctccttcttcttcctcatcaggtacaacaattacaaatcttagaacgttagtggttgtttagtattagcatctctgtggctttactcttttaatttttatttttggttgaatttttgtttccaaaaatttcaattatattgtgtgaaaattctatctttcctttctctcattcttgttatttaggaatgatttcttctgtacgtatcaatctgaaattttttgc

SEQ ID NO: 99078 - protein, 287 aa, Arabidopsis thaliana; identical to SEQ ID NO: 42567
  peptide (1)..(287): Ceres Seq. ID no. 13602117

SEQ ID NO: 99079 - protein, 274 aa, Arabidopsis thaliana; identical to SEQ ID NO: 42568
  peptide (1)..(274): Ceres Seq. ID no. 13602118

SEQ ID NO: 99080 - protein, 202 aa, Arabidopsis thaliana; identical to SEQ ID NO: 42569
  peptide (1)..(202): Ceres Seq. ID no. 13602119

SEQ ID NO: 99081 - DNA, 1724 bp, Arabidopsis thaliana
  misc_feature (1)..(1724): Ceres Seq. ID no. 13602132
  misc_feature (1)..(1724): Ortholog of  Ceres SEQ ID NO 15170666 as cited in SEQ ID NO 63386
tttttagtctccctccgcgtagaagcttctccgagacttgtctctgctttgattgaagaagacgcttgatcgaaaattcccttagatttcgtaaatagggttttacagaaggtgagattacacagagatcggatttgcgaaaaaaaaaaatgggaagtccaaagaagaacgagaacaaaggcttcttcgccgccatgacttctggcttctccatgttcggtaccgccgtgtcgagatccgttaacggcgtgcaaggtaatgaaggagttgaggtcataaatccagaaggtggcaaggaagatgctgaagaggaagctcagaaaggaaggtggaaggacgaggaacgagatagttactggaagatgatgcagaaatatataggttcggatattacgtcaatggtgactcttcctgttgttatatttgagcctatgactatgctccagaagatggctgagataatggagtattctcatttgttggatcaagcagatgaatgcgaagatccatacttgcgtttagtatatgcttcatcatgggctatatctgtttactatgccttccaacgaacttggaagcctttcaatcctattcttggggagacatatgagatggtcaaccatggtgggatttcttttatttctgagcaggttagccatcatccaccaatgagtgctggtcatgccgagaacgagcacttcatttacgacatcacatcaaagttgaaaactaaacttttgggtaactctgttgatgtttaccctgtgggaagaacgcgtgtaaccctcaagaaagatggtgtggttctggatttggtgccgcctctcactaagattcacaatctaatatttggacgaacctgggttgactcacctggggaaatggtcatgacaaatttaaccactggagacaaagttgtgctttatttccagccatgtggctggttcggttctggccgctatgaagttgatggctacgtttacagcgcagctgaagaaccgaaaatcatgatgacaggaaaatggaatgagaaaatgagctaccaaccttgtgatgccgaaggggaaccccttccaggaacagagctgaaagaggtgtggcatttggctgatgtccccaaaaacgacaactttcagtacactcactttgctcacaagataaacagcttcgacacagcgcctgctaagctcttggcttcagactcacgtatccgtcctgatagatattcccttgagcagggtgacctttctaaagctggttccgagaaacacagccttgaggagagacaaagggccgaaaagaggaccagagagacaaagggacaaaagttcactccaagatggttcgatctaacggatgagatcacacctactccatggggagatattgaagtataccaatacaacgggaagtacaatgaacaccgagacacggcagagagctcaagtagtgcctccaacgaaacggacctcaaatcgatcgagtttaatccttggcaatatggtaatatctcaaccgaatgaagtaactcttatagtttaatttgttatctctatatacgaatgctgtgattcatgttcacttgaaagtgagtcccatgttgtttttaactttgtttcagactgaaaaatctgattatgtagtttgagtgataaaacataagttttgtgtttctgtctcattgtatctttgttccatttcgatcaatagtaattatgtttgtt

SEQ ID NO: 99082 - protein, 457 aa, Arabidopsis thaliana; identical to SEQ ID NO: 21784
  peptide (1)..(457): Ceres Seq. ID no. 13602133

SEQ ID NO: 99083 - protein, 442 aa, Arabidopsis thaliana; identical to SEQ ID NO: 21785
  peptide (1)..(442): Ceres Seq. ID no. 13602134

SEQ ID NO: 99084 - protein, 436 aa, Arabidopsis thaliana; identical to SEQ ID NO: 21786
  peptide (1)..(436): Ceres Seq. ID no. 13602135

SEQ ID NO: 99085 - DNA, 2234 bp, Arabidopsis thaliana
  misc_feature (1)..(2234): Ceres Seq. ID no. 13602136
  misc_feature (1)..(2234): Ortholog of  Ceres SEQ ID NO 13659394 as cited in SEQ ID NO 67049
atccactttttgtggctgcttactgttttcctcgaaagttccatttttttcttttgctctgcaaacgaaaaagaaccataaatttttctcatatttaaagctctctctttctctcacaactgtgttcacatgaactttctcaccgctttcttctcttcattgaacaaaaaaaaaagctcttaacttttttttcttctttaggtaaaatttgacaaaagctctcaactttcaaactctgtttcttcatcatcatcatcatcaccatggacgccctgcttcaagtttcagttgatgggtttagatttgagaacggatctggatcttgctgcaaacccagaaacaatctcgaatctgggaacaatctcttccctgatttccacgagtctcagaatcagtcttcaccaaacgattcacctccaacggtgtgtttggataactctcctgttctgaagtacatcaatgatatgttgatggacgaagaagacttcgtaggtatatctcgtgacgatttagctttacaagccgctgagagatccttctacgagataattcaacagcaatctccagaatctgatcagaacactagctcctcctccgatcaaaactccggtgaccaagatttctgttttcccagcacaacaacagattcatcagcgttggtttcgagcggagaatcacagagaaagtaccgtcatcggaatgatgaagaagatgatcttgagaacaatcggagaaacaaacaaccagcgatatttgtctcggagatggaagagttagcagtgaagttagaacatgtgttgttggtatgcaaaacgaaccaagaagaagaagaagaaagaacagtaataacgaaacagagtactccaaacagagcaggaagagcaaaaggttcatcgaacaaatcaaagacgcacaaaactaataccgttgatctacgaagtctcttgacgcaatgtgctcaagctgtagcgagctttgaccagagaagagctacagataaactcaaggagataagagcacactcttctagcaatggagatggaacacaaagactagctttttactttgcagaggcgcttgaggcacgtatcactggaaacatctcaccgcctgtttctaatccgtttccttcaagcacgacatcgatggtggacattttgaaagcgtacaagctgtttgttcatacttgtcccatctatgtaactgattacttcgctgcgaacaaatcgatttacgaacttgctatgaaagcaactaagcttcacatagttgattttggagttctctacggctttcaatggccttgtttgttacgagctctgtctaaacgaccgggcggaccaccaatgcttcgggtgactggaatcgagctgccacaagcgggttttcgtccttcagaccgcgttgaagagactggtcgaagactgaaaaggttctgcgatcagtttaatgttccttttgagttcaacttcatagccaaaaaatgggaaaccatcactcttgatgaacttatgatcaatccaggagagacaacggtcgtcaactgcattcatcggttacaatacactcctgatgaaactgtgtcattagactctccaagagacacggttctgaagctattcagagatatcaatcctgacctctttgtgtttgcagagattaacggaatgtacaactctcctttcttcatgacgaggttccgagaagcgctttttcattactcttcactctttgacatgtttgacaccacaatacacgcagaggatgagtacaaaaacaggtcactgttggagagagagttacttgtgagagacgcgatgagcgtgatttcctgcgagggtgcagagcggtttgcgaggcctgaaacctacaagcaatggcgagttaggattttgagagccgggtttaagccagcaactattagcaaacagatcatgaaggaggctaaggaaattgtgaggaaacgttaccatagagattttgtgatcgatagcgataacaattggatgcttcaaggatggaaaggaagagtcatctatgctttttcttgctggaaacctgctgagaagttcacaaacaataatttaaacatctgaaaaatgttacttctcaattacatcatttttgtttcccaatggttttgtagaatatgtttgatcccgtgagtggatgcaactcttttttcctgcaagtacatattgtattcaaatccttgtggaaatgataaattgttt

SEQ ID NO: 99086 - protein, 610 aa, Arabidopsis thaliana; identical to SEQ ID NO: 37968
  peptide (1)..(610): Ceres Seq. ID no. 13602137

SEQ ID NO: 99087 - protein, 543 aa, Arabidopsis thaliana; identical to SEQ ID NO: 37969
  peptide (1)..(543): Ceres Seq. ID no. 13602138

SEQ ID NO: 99088 - protein, 541 aa, Arabidopsis thaliana; identical to SEQ ID NO: 37970
  peptide (1)..(541): Ceres Seq. ID no. 13602139

SEQ ID NO: 99089 - DNA, 1453 bp, Arabidopsis thaliana
  misc_feature (1)..(1453): Ceres Seq. ID no. 13602144
  misc_feature (1)..(1453): Ortholog of  Ceres SEQ ID NO 14311667 as cited in SEQ ID NO 58070
atctgttttccagtttcgatttcgaatcaaatatgaagctgaaagagtttttctgaatctttgtctttgtatccgttatctgaattctattcgccatggaagctgtgcttctctgctcgaagcttgttcctagagcggcgtcgttggaagggaaccaaaagttttcgttcaggcatttgaacaaacaccttaagtgcaattcccttcgtgctgattccagagacactccgttgctccgaggttttgaagcgataaagagtccgtctatctggagttgtgcgccgttcccagtgagaaaaggttcatgggttccacccagatgctcgatttctagctcgactgtttccgattccgataaccctttccttagccaatttcgaaccttctcttttgggtcaatggtgaagaaagttcgtgagttgaaagtgaagcccatggatgttgtgaagttaactcttttgctatcgattttgactgtggctgcaaaaaagactttgactttggtcttggacccattcttctggatgtattttagctggacatggttgttctggccttggtttatcgctgtgggtcttgcgggttatggaatttactgtttccgtaagcattggcttggcgaagccaatgcctttgagcagcttggtattgtaacttcagtcttcacatggctaacacttgtgcctcctgcttatttcaatggttatcttgaaggctggccttatgtgttcttcttggcgtatcattacttctttttcttcaatgttagcgtgagaaaacgcctctatggagatttctatgctcgcactcatgatcccaaatgggatgtgaacacgcctctgtggtctcggattttgtttggtgttggcatcatggttggacattggcttgcagcttttgaagggcctgagcttcaccgattaccagggggttgggccaatgtagggatatggattttgattgtgattacaatgcttatgcattatgattcaacgctatatcttgctagatattctgaaaaggttgttgttccaacggctgttgtgcaatttggtccttatagatgggtcaggcatccgatatatgcttctacgatgcttcttttcgctgcatactgcactgctctgcgtgcgcctttgagtctgttgtttcttttagcggtttgtttggtttactacaacaagaaggcaaagatggaagaagaattgatggtggagagtttcggacaaagctattcggattatgctgataaggttaggcacaagttcattccttttgtttactagtagtggtatagaggaacctgtgttgtgtctaattttctggtatctatcagccaaagatgtatgaatgaagatgagttctcatttttattggaatgttaggcttgtgaaaaggatatgcttttatgctattcatggttctcttaaattctatttcaagttatttttcc

SEQ ID NO: 99090 - protein, 396 aa, Arabidopsis thaliana; identical to SEQ ID NO: 24664
  peptide (1)..(396): Ceres Seq. ID no. 13602145

SEQ ID NO: 99091 - protein, 295 aa, Arabidopsis thaliana; identical to SEQ ID NO: 24665
  peptide (1)..(295): Ceres Seq. ID no. 13602146

SEQ ID NO: 99092 - protein, 283 aa, Arabidopsis thaliana; identical to SEQ ID NO: 24666
  peptide (1)..(283): Ceres Seq. ID no. 13602147

SEQ ID NO: 99093 - DNA, 1633 bp, Arabidopsis thaliana
  misc_feature (1)..(1633): Ceres Seq. ID no. 13602150
  misc_feature (1)..(1633): Ortholog of  Ceres SEQ ID NO 14303866 as cited in SEQ ID NO 53689
  misc_feature (1)..(1633): Ortholog of  Ceres SEQ ID NO 14315958 as cited in SEQ ID NO 59979
  misc_feature (1)..(1633): Ortholog of  Ceres SEQ ID NO 13597037 as cited in SEQ ID NO 69005
atggatcccacaaacagcagacacggcgcttcttttgaattttctactcggcgttttacactttccacgtttggtcaaaacgctccttctctatacgtaacgaccgtttataactccgctatcatctacccagtcaaacactcaccacgtgtctatttaccgtctaatccgacaccgttaattccgctcctaagaatcgccttaaaaaccacgttttcattttctcatcttcaaacctctctgtcattactctggtcagcgattcttctttcttcttcttctcagatcctttcaccgagtaagaagattttaaagatgccgtcaacgccgacgacgccgactacaacaacgccgatcacggcttcgtattggtgttacagctgtacgcgtttcgtcagcgtttgggctgatcaaggcacaacaaccgtcggtagcgtcgcttgccctcactgcgacggcggttttatcgaacagattaacgattcttcctccgccgctaccgaattaacgattccggcttctactgaagtaagatcgatcaataacaaccgtagatccgtgattagacgccggagatccggtcgtcgtccgtcctttaatccggtcatcgtacttcaaggaggcgccggcgagagagaagagggagaagaaggagatgcggctagagatcgacgcgcttttgagttttattacgatgacggatccggatcgggtcttagaccgcttccggattctgtatctgagatcttgatgggatctggattcgagcggttacttgaacagctaagccaaatcgaagcgtcggctactggaattggtagatctggaaaccctccggcgtctaaatcggcgattgagtctttacctagagtcgaaatctcggattgccacataggctcggaggctaattgcgctgtttgcacggagattttcgagacggagacggaggcgcgtgagatgccgtgtaaacaccttttccacgacgattgcatcgtaccgtggctatcgattcgaaactcttgtcccgtgtgcagattcgagctaccttcagagcctaatcgacggagcaacaacaacgaggaggataacgccgtggggatgacgatttggagacttcccggtggtggattcgccgtagggaggtttaacgcagcaatgagagacggagagagagttttgccagtggtgttaacagaaatggatggtggtgggattggtaatagccaggatggtcctagacggatctcatgggttaggtcacacggtacactcgaatcggatagtaacggtactggctcaggttccggctccggtggaagattgaggaggatggttcgtggaatggtgtcgttaatgaggagagtgagaccaaaccgtagctcttcttcttcatcagctgcgatatcaacttcttctgataatctggatttgaacattgaagtagaatctagggttttggataggtcaaattcagtgatgagaagatacttcagaagaaacagaagtaacagggattcttcgtcttcagttcttcattgattcagaaatatatatatattattttttggtttgttcattcaacaatgtaaatataagattcagaagaaaaagattggtgcttcgttttctatta

SEQ ID NO: 99094 - protein, 512 aa, Arabidopsis thaliana
  peptide (1)..(512): Ceres Seq. ID no. 13602151
MDPTNSRHGASFEFSTRRFTLSTFGQNAPSLYVTTVYNSAIIYPVKHSPRVYLPSNPTPLIPLLRIALKTTFSFSHLQTSLSLLWSAILLSSSSQILSPSKKILKMPSTPTTPTTTTPITASYWCYSCTRFVSVWADQGTTTVGSVACPHCDGGFIEQINDSSSAATELTIPASTEVRSINNNRRSVIRRRRSGRRPSFNPVIVLQGGAGEREEGEEGDAARDRRAFEFYYDDGSGSGLRPLPDSVSEILMGSGFERLLEQLSQIEASATGIGRSGNPPASKSAIESLPRVEISDCHIGSEANCAVCTEIFETETEAREMPCKHLFHDDCIVPWLSIRNSCPVCRFELPSEPNRRSNNNEEDNAVGMTIWRLPGGGFAVGRFNAAMRDGERVLPVVLTEMDGGGIGNSQDGPRRISWVRSHGTLESDSNGTGSGSGSGGRLRRMVRGMVSLMRRVRPNRSSSSSSAAISTSSDNLDLNIEVESRVLDRSNSVMRRYFRRNRSNRDSSSSVLH

SEQ ID NO: 99095 - protein, 407 aa, Arabidopsis thaliana; identical to SEQ ID NO: 35169
  peptide (1)..(407): Ceres Seq. ID no. 13602152

SEQ ID NO: 99096 - protein, 262 aa, Arabidopsis thaliana; identical to SEQ ID NO: 35170
  peptide (1)..(262): Ceres Seq. ID no. 13602153

SEQ ID NO: 99097 - DNA, 965 bp, Arabidopsis thaliana
  misc_feature (1)..(965): Ceres Seq. ID no. 13602166
  misc_feature (1)..(965): Ortholog of  Ceres SEQ ID NO 12619999 as cited in SEQ ID NO 66123
  misc_feature (1)..(965): Ortholog of  Ceres SEQ ID NO 13656436 as cited in SEQ ID NO 69154
gttttttctctgctcatttactataaccaacaaggtctcttctcttctcttctcctctctgcatcattttgatccgattcgatggctgctccacctgctagagctagagccgattatgattatctcattaagcttcttctcatcggtgatagcggtgttggtaaaagttgtttgcttctaaggttctctgatggctctttcaccactagcttcatcactaccattggtattgattttaagataagaactattgagcttgatggcaaacgtatcaagcttcagatttgggacactgctggtcaagaacgttttcgaaccatcaccactgcttattaccgcggggcaatggggattttactggtgtatgatgtcacagacgagtcatccttcaacaacattagaaactggattcgtaatattgaacagcacgcttcagataatgtcaacaaaatcttggtaggaaacaaagctgatatggacgagagcaagagggctgtgccaaaatcaaagggtcaagcacttgctgacgaatatggaatcaagttctttgaaacaagtgccaaaactaatctgaatgtggaagaagttttcttctccatagcaaaggacataaagcagagactcgctgatactgactctagagcagagcctgcaacgatcaagatcagccaaacagaccaggctgctggagccggacaggccacacagaagtctgcatgctgtggaagttaatcagtcccaaaaggctccaaagttgaagtgaagtgaaaaacagatttatcttggggtgcttttgtatttttttttcttttgattatttgttcttatttgacttcttctagtttgttcatgagggtaatagaatcttttaagaaatttttccttctcagacagattcgatgtcacagaagctgaatctgtgactgaattgttaatcttttacgcataactcttcaagtctcttc

SEQ ID NO: 99098 - protein, 216 aa, Arabidopsis thaliana
  peptide (1)..(216): Ceres Seq. ID no. 13602167
MAAPPARARADYDYLIKLLLIGDSGVGKSCLLLRFSDGSFTTSFITTIGIDFKIRTIELDGKRIKLQIWDTAGQERFRTITTAYYRGAMGILLVYDVTDESSFNNIRNWIRNIEQHASDNVNKILVGNKADMDESKRAVPKSKGQALADEYGIKFFETSAKTNLNVEEVFFSIAKDIKQRLADTDSRAEPATIKISQTDQAAGAGQATQKSACCGS

SEQ ID NO: 99099 - protein, 128 aa, Arabidopsis thaliana
  peptide (1)..(128): Ceres Seq. ID no. 13602168
MGILLVYDVTDESSFNNIRNWIRNIEQHASDNVNKILVGNKADMDESKRAVPKSKGQALADEYGIKFFETSAKTNLNVEEVFFSIAKDIKQRLADTDSRAEPATIKISQTDQAAGAGQATQKSACCGS

SEQ ID NO: 99100 - DNA, 910 bp, Arabidopsis thaliana
  misc_feature (1)..(910): Ceres Seq. ID no. 13602182
  misc_feature (1)..(910): Ortholog of  Ceres SEQ ID NO 15225111 as cited in SEQ ID NO 58444
  misc_feature (1)..(910): Ortholog of  Ceres SEQ ID NO 13661001 as cited in SEQ ID NO 67531
  misc_feature (1)..(910): Ortholog of  Ceres SEQ ID NO 15178920 as cited in SEQ ID NO 0
atcaactctctctctcactttcacaactctccctttctatttctctctctagaaaaatatcatcatctatcaattatatagagtacttatttagattcatttcataaaaatggagaaaagagaaagtagtggtgggtctggatcaggagatgcagaggtgagaaaagggccatggacgatggaagaagatttgattctcatcaattatatcgccaatcatggtgaaggtgtttggaactctctcgccaaatctgcaggactaaaacgcaccgggaaaagttgccggctccggtggctgaactacctccgacctgatgtgcgacggggaaatatcacaccagaagaacagctcaccatcatggaacttcatgcaaaatggggaaataggtggtcaaaaattgcaaagcatttaccaggaagaaccgacaatgagataaagaatttttggaggactaagatccagaaatacatcatcaagagcggagaaacgacgaccgttggatcacaaagctccgagtttataaaccatcatgcgacaacgagccatgtcatgaatgatactcaagaaaccatggatatgtattctccaacgacgtcgtatcaacatgccagcaatattaatcagcagcttaattatggtaattatgtgcctgaatccggttcgatcatgatgccattatctgttgatcaatccgaacaaaactattggagcgtcgatgatctttggcccatgaatatatataatggtaattaataaataagttcgttaaaacttatatatatttacggtccaaagagggttctatataaacagagtactgtatgggattgcctcattgtttagaggtaggtacttaatataaggttggagatcttagatgtattaataaataactcgtatttactagat

SEQ ID NO: 99101 - protein, 214 aa, Arabidopsis thaliana
  peptide (1)..(214): Ceres Seq. ID no. 13602183
MEKRESSGGSGSGDAEVRKGPWTMEEDLILINYIANHGEGVWNSLAKSAGLKRTGKSCRLRWLNYLRPDVRRGNITPEEQLTIMELHAKWGNRWSKIAKHLPGRTDNEIKNFWRTKIQKYIIKSGETTTVGSQSSEFINHHATTSHVMNDTQETMDMYSPTTSYQHASNINQQLNYGNYVPESGSIMMPLSVDQSEQNYWSVDDLWPMNIYNGN

SEQ ID NO: 99102 - protein, 191 aa, Arabidopsis thaliana
  peptide (1)..(191): Ceres Seq. ID no. 13602184
MEEDLILINYIANHGEGVWNSLAKSAGLKRTGKSCRLRWLNYLRPDVRRGNITPEEQLTIMELHAKWGNRWSKIAKHLPGRTDNEIKNFWRTKIQKYIIKSGETTTVGSQSSEFINHHATTSHVMNDTQETMDMYSPTTSYQHASNINQQLNYGNYVPESGSIMMPLSVDQSEQNYWSVDDLWPMNIYNGN

SEQ ID NO: 99103 - protein, 131 aa, Arabidopsis thaliana
  peptide (1)..(131): Ceres Seq. ID no. 13602185
MELHAKWGNRWSKIAKHLPGRTDNEIKNFWRTKIQKYIIKSGETTTVGSQSSEFINHHATTSHVMNDTQETMDMYSPTTSYQHASNINQQLNYGNYVPESGSIMMPLSVDQSEQNYWSVDDLWPMNIYNGN

SEQ ID NO: 99104 - DNA, 2026 bp, Arabidopsis thaliana
  misc_feature (1)..(2026): Ceres Seq. ID no. 13602192
  misc_feature (1)..(2026): Ortholog of  Ceres SEQ ID NO 13597798 as cited in SEQ ID NO 64311
atgattattacaaacgctcatgtggtggctaatcacatattggtgctagtcataaagcgtggctcaccaaagaagtacaaagcagaagttaaagctattgggcgtgaatgtgatttggctattttggtgatcgaaagcaaagagttttgggaagatatgaatcctttggagcttggagacatgccctttttgcaagaatcagtaaatgttattggctatccaacaggtggtgagaatatctccgttacaaaaggtgttgtgtctagaatagaatcaatggattatgctcacggtgccattaatctaccggcaatacaaacagatgcagcaatgaaccctggcaatagtggtggtccggtttgcataggaaacaaagttgttggtgtagcatttcaaacccttggacattctaataacatagggtgcttaatcccagctccagtggttaaacattttataaccggtgttgaaaaaaccggtcaatacgttggcttctgctcgctaaatctatcataccaacatatggatgcacaaactcgtagtcattttaagatgaattctgagatgacagggatccttatatacaatattaatcaacattcggatgctctcaatattcttaaaaaatatgacgttattctttcaatcgatggcgttgctatagaaaatgatggtacagttattataccaaacagagaaaggacaaggttggatgatttggtttctttgaagcaattaggtgaaacaatcttacttaaaattttaagagagggaaaaatgcatgagttcaatattactctgaggccagtgcaacggctagttccagcaggtcaaattgacaacaacccaagttattacatattcgctggttttgtctttgtgcctctccgtaaacaacattttaaaggttccaacggtgaacaaattgtagtgatttctgaggtattagctgatgtgatcaatgtagaatactacatgtacaagcatttgaaggtgaacagcgtcaacaaagtgaaggtggagaatctaaagcatttgtgtgaactcatagagaaatgttgcaccaaggatttgaggctagaattaggagatggtcgagtaataatcttggattatcagtttgcgaaaagttccacttctttgattttggaacgtcatagagtaccatgggccatgtccaaagatctcatgactgatcaatcgaccacttgttcgaagagagtctatgcttccttaagcttaagtgaatcggtgacgatgatgaaggagaaggcgaaagaagggaagagtctgtttgggtctccgacgttcgttgatcttggaaacggacggctcagatgcgtcgagactggtcacgaggttttagcgggagacgtagaatcatacgctcgtaacaaacggtgtcgtttaggactcatcaatcacgctttgtctctaggaaagcctcctctcaacatgttctcgcaatgcccactttctcgcatcgaaaatggtttaaagttctcgaaacttgtgtgcaagctaactggagatactgtgaacaagaacgaggaacatatctggaaacacgtgaatgggaaaagatttcttcacaaattagagcaagtggaaagaggagctggatcaagcggaaggactgaggaaacacaagtaaacaatccaagacacaataaggaagattctggttctgaggaatccgacttttggatgcctaagtcaagttctgattcagagttagatgaagagactgatgaagaaaactgtaaaggttctcattgtgatgacaaagaatctgaagagctctcagaaagaacaaagagaatgtcactagagattggaccaagtagctttgcttctaggaagaaaaagagtaagaatgatgagttgtcttaagatgttgtggacaaaaaaagaaagagcacaattttgtttgtaagaaagagctcttttgaaaattatgtgagagctaaatttcaaaaccgaatcatccataatcattaatcacaagttcaagccaaatttaaag

SEQ ID NO: 99105 - protein, 630 aa, Arabidopsis thaliana
  peptide (1)..(630): Ceres Seq. ID no. 13602193
MIITNAHVVANHILVLVIKRGSPKKYKAEVKAIGRECDLAILVIESKEFWEDMNPLELGDMPFLQESVNVIGYPTGGENISVTKGVVSRIESMDYAHGAINLPAIQTDAAMNPGNSGGPVCIGNKVVGVAFQTLGHSNNIGCLIPAPVVKHFITGVEKTGQYVGFCSLNLSYQHMDAQTRSHFKMNSEMTGILIYNINQHSDALNILKKYDVILSIDGVAIENDGTVIIPNRERTRLDDLVSLKQLGETILLKILREGKMHEFNITLRPVQRLVPAGQIDNNPSYYIFAGFVFVPLRKQHFKGSNGEQIVVISEVLADVINVEYYMYKHLKVNSVNKVKVENLKHLCELIEKCCTKDLRLELGDGRVIILDYQFAKSSTSLILERHRVPWAMSKDLMTDQSTTCSKRVYASLSLSESVTMMKEKAKEGKSLFGSPTFVDLGNGRLRCVETGHEVLAGDVESYARNKRCRLGLINHALSLGKPPLNMFSQCPLSRIENGLKFSKLVCKLTGDTVNKNEEHIWKHVNGKRFLHKLEQVERGAGSSGRTEETQVNNPRHNKEDSGSEESDFWMPKSSSDSELDEETDEENCKGSHCDDKESEELSERTKRMSLEIGPSSFASRKKKSKNDELS

SEQ ID NO: 99106 - protein, 578 aa, Arabidopsis thaliana
  peptide (1)..(578): Ceres Seq. ID no. 13602194
MNPLELGDMPFLQESVNVIGYPTGGENISVTKGVVSRIESMDYAHGAINLPAIQTDAAMNPGNSGGPVCIGNKVVGVAFQTLGHSNNIGCLIPAPVVKHFITGVEKTGQYVGFCSLNLSYQHMDAQTRSHFKMNSEMTGILIYNINQHSDALNILKKYDVILSIDGVAIENDGTVIIPNRERTRLDDLVSLKQLGETILLKILREGKMHEFNITLRPVQRLVPAGQIDNNPSYYIFAGFVFVPLRKQHFKGSNGEQIVVISEVLADVINVEYYMYKHLKVNSVNKVKVENLKHLCELIEKCCTKDLRLELGDGRVIILDYQFAKSSTSLILERHRVPWAMSKDLMTDQSTTCSKRVYASLSLSESVTMMKEKAKEGKSLFGSPTFVDLGNGRLRCVETGHEVLAGDVESYARNKRCRLGLINHALSLGKPPLNMFSQCPLSRIENGLKFSKLVCKLTGDTVNKNEEHIWKHVNGKRFLHKLEQVERGAGSSGRTEETQVNNPRHNKEDSGSEESDFWMPKSSSDSELDEETDEENCKGSHCDDKESEELSERTKRMSLEIGPSSFASRKKKSKNDELS

SEQ ID NO: 99107 - protein, 570 aa, Arabidopsis thaliana
  peptide (1)..(570): Ceres Seq. ID no. 13602195
MPFLQESVNVIGYPTGGENISVTKGVVSRIESMDYAHGAINLPAIQTDAAMNPGNSGGPVCIGNKVVGVAFQTLGHSNNIGCLIPAPVVKHFITGVEKTGQYVGFCSLNLSYQHMDAQTRSHFKMNSEMTGILIYNINQHSDALNILKKYDVILSIDGVAIENDGTVIIPNRERTRLDDLVSLKQLGETILLKILREGKMHEFNITLRPVQRLVPAGQIDNNPSYYIFAGFVFVPLRKQHFKGSNGEQIVVISEVLADVINVEYYMYKHLKVNSVNKVKVENLKHLCELIEKCCTKDLRLELGDGRVIILDYQFAKSSTSLILERHRVPWAMSKDLMTDQSTTCSKRVYASLSLSESVTMMKEKAKEGKSLFGSPTFVDLGNGRLRCVETGHEVLAGDVESYARNKRCRLGLINHALSLGKPPLNMFSQCPLSRIENGLKFSKLVCKLTGDTVNKNEEHIWKHVNGKRFLHKLEQVERGAGSSGRTEETQVNNPRHNKEDSGSEESDFWMPKSSSDSELDEETDEENCKGSHCDDKESEELSERTKRMSLEIGPSSFASRKKKSKNDELS

SEQ ID NO: 99108 - DNA, 1128 bp, Arabidopsis thaliana
  misc_feature (1)..(1128): Ceres Seq. ID no. 13602196
  misc_feature (1)..(1128): Ortholog of  Ceres SEQ ID NO 15179499 as cited in SEQ ID NO 0
aaagttgcttgctttcttcttcttctccgattcgagcttccttcctctcagcaaaaccttcaagtaaagagtggtgaatcggaaaatgtcgcagtcttccgtcgatataccgccaaaaggtgggtttagcttcgatctgtgcaaaaggaatgatatgctgacacagaagggtcttaaagcgccgtcgtttctcaagactggaacgactatcgttggattgatatttaaggatggtgtaatacttggggctgatacacgggcaactgaagggcctattgtggctgataagaactgtgagaagattcactacatggcaccaaacatttactgttgtggtgcaggaaccgctgctgacactgaagcagtaactgatatggtcagctcacagctgcggttgcatagataccagactggccgagattctcgagtcgttactgcattgacccttctcaaaaaacatcttttcagctaccaaggccatgtctcagctgctcttgtgcttggtggagttgatattaccgggcctcatcttcacacgatatacccacacggttctactgacactctaccatttgctacaatgggttctggttcccttgctgccatgtcagtgtttgaagcaaagtataaagaaggtctaactagagatgaaggaatcaagttggttgctgaagccatatgctctggtatattcaacgaccttggtagtggtagcaatgtggatatctgtgtgatcactaaggggcacaaggaatacttgaggaattacatggaaccaaacccaagaacctatgttagcagcaaaggctattcattcaccaagaaaaccgaggttctactcaccaaaattacaccattattggagcgagtcgaaattgtagaagtggctggtgaagctatggaggaatgaatctcgtgtgagagacagatactaagagtgaaaccattgttctacctcacatgacagtcatgtttacattttctactttgttcaatatgaacgactaaaatcgaatcgtagttgcctccatttcgtctttaaatttggcttgaacttgtgattaatgattatggatgattcggttttgaaatttagctctcacataattttcaaaagagctctttctt

SEQ ID NO: 99109 - protein, 274 aa, Arabidopsis thaliana; identical to SEQ ID NO: 24362
  peptide (1)..(274): Ceres Seq. ID no. 13602197

SEQ ID NO: 99110 - protein, 251 aa, Arabidopsis thaliana; identical to SEQ ID NO: 24363
  peptide (1)..(251): Ceres Seq. ID no. 13602198

SEQ ID NO: 99111 - protein, 199 aa, Arabidopsis thaliana; identical to SEQ ID NO: 24364
  peptide (1)..(199): Ceres Seq. ID no. 13602199

SEQ ID NO: 99112 - DNA, 2010 bp, Arabidopsis thaliana
  misc_feature (1)..(2010): Ceres Seq. ID no. 13602208
  misc_feature (1)..(2010): Ortholog of  Ceres SEQ ID NO 14303201 as cited in SEQ ID NO 67304
ataagaatctctgctttaccttttcttttcaaagggtttcattttgattctagggttgttctaaatgcgacattttgactgatgggtctttgttgaatttgaagagagcaaaagagaaagagattgttctaatggagcctccaacgggaatcttggcttctctgtggcaatttatactcttcattccttatttcactggtttactgcttctcggtgtcattaaaggtatcgttttatgcccgcttatatgccttactgtggctattggaaactctgcaatcatcttaggccttttaccagtacacgcgatttggactctatattcgatagcgagtgctaaacagttaggaccaatcctgaagatctttctgtgtttatgcgttcctcttggtgtcattctctggcttgtggttagtatcttaggaagtgttcttggaggagctatttatggatttctttctccaatatttgctactttcgatgctgttggtgaagggaagtctaatccgtttttccattgcttttatgatggaacttggagcactgttcaaggcagtttcaccgttgtttgtgattttaaagatgtttgctttcactcctacttttcttttatggatgatcttcgaacatctactgcgaaccgtcactattatgaaataaggttacttcaaattccaggtgctgtgattgttgcggttctcggaattcttgttgatttcccagtgatttcactcttagcattgtgtaaaagcccgtacatgttgttcaaagggtggcaccgtttgtttcatgatctcattggacgtgaaggtcctttcttggaaacaatgtgtgtcccaatcgctggccttgtgatcttactctggcctttagctgttgttggagcagttttaggatccgtggtctctagtgtcttccttggtgcttatggcggtgtagtctcatatcaggagtcatcgttcttcttcggtctctgctatgttgttgcttctgtttctatttacgatgagtatagcaacgatgttcttgatatgcctgaaggttcttgctttcccaggccaatatatcgaagaaacgaagagggcgctagtacggcattttctggtggtctttcaagaccgaactccttcaagacaactccatcaagaggaggatcaaacaaaggcccaatgattgacctgaaaccgcttgatcttttggaggctctatttgtggaatgtaggcggcacggagagattatggtaacgaaagggattataaattcaaaagacattgaagaagctaaatctagcaaaggcagtcaagtgatcagctttggcttacctgcttattctcttcttcacgagcttttacgctctatcaaatctaactccaccggtttattactcggtgacggtgtaacggagataactaccagaaaccgcccaaaagatgcgttttttgattggtttctgaatccgtttttgatccttaaagaccagatcgaagctgcaaacctatccgaggaagaagaagagtatcttggtaaattggtattactctttggagattcagagagacttaaaagctccattgttgaatctgaatctcctcctctaactgaactcagaaaagccgaacttgatgcctttgctcgcaggcttcaaggattaaccaaatcagtatcaagatatccaacattcagaagacattttgtggaactagtcaagaaactatcaaatgatctagacaataaacataaccgttttgaaggcggttcgagatcagttccacgtcccgggaaaacggtgtctcggattttcagccaaaaatcgttcaagaaaaagacaagtagcaatgggtcagatcaagattcaccaaacagagggttaagagacattgatattgtgtaagtaaatgttatgcgaccagaattagaccgaaacttcgtctgcttttagctctgtaatgataaatttatacagattccaagtgaatatgaaactgtttcatttatctaacaaatgtttt

SEQ ID NO: 99113 - protein, 586 aa, Arabidopsis thaliana
  peptide (1)..(586): Ceres Seq. ID no. 13602209
MEPPTGILASLWQFILFIPYFTGLLLLGVIKGIVLCPLICLTVAIGNSAIILGLLPVHAIWTLYSIASAKQLGPILKIFLCLCVPLGVILWLVVSILGSVLGGAIYGFLSPIFATFDAVGEGKSNPFFHCFYDGTWSTVQGSFTVVCDFKDVCFHSYFSFMDDLRTSTANRHYYEIRLLQIPGAVIVAVLGILVDFPVISLLALCKSPYMLFKGWHRLFHDLIGREGPFLETMCVPIAGLVILLWPLAVVGAVLGSVVSSVFLGAYGGVVSYQESSFFFGLCYVVASVSIYDEYSNDVLDMPEGSCFPRPIYRRNEEGASTAFSGGLSRPNSFKTTPSRGGSNKGPMIDLKPLDLLEALFVECRRHGEIMVTKGIINSKDIEEAKSSKGSQVISFGLPAYSLLHELLRSIKSNSTGLLLGDGVTEITTRNRPKDAFFDWFLNPFLILKDQIEAANLSEEEEEYLGKLVLLFGDSERLKSSIVESESPPLTELRKAELDAFARRLQGLTKSVSRYPTFRRHFVELVKKLSNDLDNKHNRFEGGSRSVPRPGKTVSRIFSQKSFKKKTSSNGSDQDSPNRGLRDIDIV

SEQ ID NO: 99114 - protein, 426 aa, Arabidopsis thaliana; identical to SEQ ID NO: 75248
  peptide (1)..(426): Ceres Seq. ID no. 13602210

SEQ ID NO: 99115 - protein, 377 aa, Arabidopsis thaliana; identical to SEQ ID NO: 75249
  peptide (1)..(377): Ceres Seq. ID no. 13602211

SEQ ID NO: 99116 - DNA, 1132 bp, Arabidopsis thaliana
  misc_feature (1)..(1132): Ceres Seq. ID no. 13602214
  misc_feature (1)..(1132): Ortholog of  Ceres SEQ ID NO 13638643 as cited in SEQ ID NO 52149
atttttaatagactattaaaaaaacaatttcatttcatttgctctcttctccgagaaaatggcgtttggtttgatcggaagagttgttggaaccaaatcatcacgattatccacggcggcgcgattgattccggcgcgatggacatcaacaggatcagaagcacaatcgaaagcttcaaccggcggcggaggagcgagtctgaagacgtttcagatctatcgatggaatccagataatcctggaaagccagagcttcaagattacaaaatcgatctcaaggattgtggtccaatggttctagatgctttgattaagattaagaacgagatggatccatcgctcactttccgtcgctcttgccgtgaaggtatttgtggttcgtgtgctatgaacattgatggatgtaatggtcttgcttgtttaacgaagattgaatctggatctaaagagacgacgattacgccgttgccgcatatgtttgtgattaaggatttggttgtggatatgacgaatttttataatcagtataagagtattgagccgtggttgaagaggaagaatccagcatctgttcctgggaaagagattttacagagtaagaaagatagagctaagcttgatggaatgtatgaatgtattctctgtgcttgttgtagcacgtcttgccctagctattggtggaaccctgagtcttatcttggtccagctgctttgcttcatgccaacaggtggataagtgatagccgagatgagtacactaaggaaagacttgaagccattgacgatgagttcaaactgtatcgatgccacacaattctgaactgtgctcgtgcctgtccaaagggattgaacccagggaaacagatcacacacatcaagcagcttcagaaatctggttgaacaacaaatgaatcaggcagtacctaatggatttttgattctaataatctgcaagaaactccaattttggattcattcttgtattgctgtcacaactatcagaattagattattttgtggtatatcttgatgaattttttttgcctacaacaagcaataaaactctgctttttttatcatccactcattcagctttgccttaatacaaacatttggatttcgagttttgct

SEQ ID NO: 99117 - protein, 280 aa, Arabidopsis thaliana
  peptide (1)..(280): Ceres Seq. ID no. 13602215
MAFGLIGRVVGTKSSRLSTAARLIPARWTSTGSEAQSKASTGGGGASLKTFQIYRWNPDNPGKPELQDYKIDLKDCGPMVLDALIKIKNEMDPSLTFRRSCREGICGSCAMNIDGCNGLACLTKIESGSKETTITPLPHMFVIKDLVVDMTNFYNQYKSIEPWLKRKNPASVPGKEILQSKKDRAKLDGMYECILCACCSTSCPSYWWNPESYLGPAALLHANRWISDSRDEYTKERLEAIDDEFKLYRCHTILNCARACPKGLNPGKQITHIKQLQKSG

SEQ ID NO: 99118 - protein, 202 aa, Arabidopsis thaliana; identical to SEQ ID NO: 23324
  peptide (1)..(202): Ceres Seq. ID no. 13602216

SEQ ID NO: 99119 - protein, 190 aa, Arabidopsis thaliana
  peptide (1)..(190): Ceres Seq. ID no. 13602217
MDPSLTFRRSCREGICGSCAMNIDGCNGLACLTKIESGSKETTITPLPHMFVIKDLVVDMTNFYNQYKSIEPWLKRKNPASVPGKEILQSKKDRAKLDGMYECILCACCSTSCPSYWWNPESYLGPAALLHANRWISDSRDEYTKERLEAIDDEFKLYRCHTILNCARACPKGLNPGKQITHIKQLQKSG

SEQ ID NO: 99120 - DNA, 2547 bp, Arabidopsis thaliana
  misc_feature (1)..(2547): Ceres Seq. ID no. 13602236
  misc_feature (1)..(2547): Ortholog of  Ceres SEQ ID NO 14310620 as cited in SEQ ID NO 53662
atttaaccgattcttgaaaacatgggacgtctccggagacggcaagagataatagatcatgaagaagaggaatcaaacgacgacgtttcatcaagaagaggaaaactcagtttagccgagacgtttcggtggcttgattcatcagagcatcggagaattgaaaccgatggtcataatgattataaatacatcattcatcccaaaaacaggtggtacaaggcatgggaaatgtttatattggtgtgggcaatatactcctcattgttcactcccatggagtttggtttcttccgcggtctgcctgagagactctttgtacttgacattgttggtcagatcgcgttcttggtcgatattgttcttcagttctttgttgcctatcgcgatactcagacctaccggactgtctacaaaccaacacgtattgctttccggtacttgaagtcgcattttctcatggatttcatcggttgcttcccttgggatcttatttataaggcatcagggaaacatgagttggtgaggtacttgttgtggataaggctatttcgggttcgcaaagtggttgagtttttccaaaggcttgagaaagacacaagaatcaactatctattcactagaatcttaaagctcttgttcgttgaagtttattgtactcacactgctgcttgtatcttctattacttggccaccactcttcctccagaaaacgaaggttacacttggatcggtagcttgaagctaggagactatagctacgagaatttccgagaaatcgatctctggaaacgttatactaccgctctatacttcgccattgtcactatggcaactgtcggttatggagacattcacgcggtgaatctgagggaaatgatattcgtgatgatatatgtttcgtttgatatggttctcggtgcttaccttattggtaacatcactgccttgattgtgaaaggttcaaacacagagaggttcagagataaaatgaatgatctcataagtttcatgaaccgcaaaaaactcgggagagaccttcgtagccagataactggtcatgttagattgcagtacgacagtcactacaccgacactgtcatgcttcaggacatcccagcatcaatccgcgccaagattgcgcaattattgtatctgccttacatcaaaaaagttcctctcttcaaaggctgctccacagagtttattaatcaaatagttataaggctccatgaagagtattttcttccaggagaagtaataacagagcaaggaaacgtcgtggatcatttgtatttcgtctgtgaaggcttactggaggctcttgttacaaaaacagatggatcagaagagagtgtgacgttacttgggcctcacacttcttttggagacatctccatcatttgcaacatttctcaacctttcactgttagggtttgtgagctatgccatcttttacgactcgataaacagtctttctcaaacatcctcgagatttattttcacgacggacgcacaatcttgaacaatattatggaggagaaggaatcaaatgataggataaagaagctagaatctgacatagtgattcacattgggaaacaagaagcagaacttgcattgaaagtaaacagtgcagctttccaaggagatttttaccagcttaagagcttaatccgatctggagccgatcctaacaaaaccgattacgatggaagatcaccgcttcatcttgcagcatgtagaggctatgaagacattacattattccttattcaggaaggtgttgatgtcaatctaaaagataagttcggacacacaccattgtttgaggctgtgaaagcaggacaagaaggagtgattggtttgcttgtcaaagaaggagcctcctttaatttagaagattcaggaaacttcctttgcacgacagttgctaaaggcgactctgattttctcaagagattgctttcaagcggtatgaacccaaacagtgaagattatgatcacagaacgccgcttcatgtcgcggcttctgaagggttattcttgatggctaaaatgttggttgaagctggagcaagcgttatttctaaagaccgatgggggaattctccgcttgatgaagcccgattgtgcggaaacaagaaactgattaagttactcgaagatgtgaaaaatgctcagtcgtctatctacccgtcaagcttgcgtgaattacaagaggagagaattgagagacggaaatgcacggtgtttccattccacccgcaagaggcgaaagaagagcgtagtagaaagcacggagttgtggtttggatcccaagcaatctcgagaaactcatagtaaccgctgcgaaagagctagggctatcggatggagcctcatttgtactattatcagaagaccaaggtcgtatcacagacattgatatgattagtgatggacacaaattgtatatgatcagtgatactactgatcaaacataatgatggactcttcgatttttccgatgattcatttgaggtttttatattctagagcattttgac

SEQ ID NO: 99121 - protein, 820 aa, Arabidopsis thaliana
  peptide (1)..(820): Ceres Seq. ID no. 13602237
MGRLRRRQEIIDHEEEESNDDVSSRRGKLSLAETFRWLDSSEHRRIETDGHNDYKYIIHPKNRWYKAWEMFILVWAIYSSLFTPMEFGFFRGLPERLFVLDIVGQIAFLVDIVLQFFVAYRDTQTYRTVYKPTRIAFRYLKSHFLMDFIGCFPWDLIYKASGKHELVRYLLWIRLFRVRKVVEFFQRLEKDTRINYLFTRILKLLFVEVYCTHTAACIFYYLATTLPPENEGYTWIGSLKLGDYSYENFREIDLWKRYTTALYFAIVTMATVGYGDIHAVNLREMIFVMIYVSFDMVLGAYLIGNITALIVKGSNTERFRDKMNDLISFMNRKKLGRDLRSQITGHVRLQYDSHYTDTVMLQDIPASIRAKIAQLLYLPYIKKVPLFKGCSTEFINQIVIRLHEEYFLPGEVITEQGNVVDHLYFVCEGLLEALVTKTDGSEESVTLLGPHTSFGDISIICNISQPFTVRVCELCHLLRLDKQSFSNILEIYFHDGRTILNNIMEEKESNDRIKKLESDIVIHIGKQEAELALKVNSAAFQGDFYQLKSLIRSGADPNKTDYDGRSPLHLAACRGYEDITLFLIQEGVDVNLKDKFGHTPLFEAVKAGQEGVIGLLVKEGASFNLEDSGNFLCTTVAKGDSDFLKRLLSSGMNPNSEDYDHRTPLHVAASEGLFLMAKMLVEAGASVISKDRWGNSPLDEARLCGNKKLIKLLEDVKNAQSSIYPSSLRELQEERIERRKCTVFPFHPQEAKEERSRKHGVVVWIPSNLEKLIVTAAKELGLSDGASFVLLSEDQGRITDIDMISDGHKLYMISDTTDQT

SEQ ID NO: 99122 - protein, 751 aa, Arabidopsis thaliana
  peptide (1)..(751): Ceres Seq. ID no. 13602238
MFILVWAIYSSLFTPMEFGFFRGLPERLFVLDIVGQIAFLVDIVLQFFVAYRDTQTYRTVYKPTRIAFRYLKSHFLMDFIGCFPWDLIYKASGKHELVRYLLWIRLFRVRKVVEFFQRLEKDTRINYLFTRILKLLFVEVYCTHTAACIFYYLATTLPPENEGYTWIGSLKLGDYSYENFREIDLWKRYTTALYFAIVTMATVGYGDIHAVNLREMIFVMIYVSFDMVLGAYLIGNITALIVKGSNTERFRDKMNDLISFMNRKKLGRDLRSQITGHVRLQYDSHYTDTVMLQDIPASIRAKIAQLLYLPYIKKVPLFKGCSTEFINQIVIRLHEEYFLPGEVITEQGNVVDHLYFVCEGLLEALVTKTDGSEESVTLLGPHTSFGDISIICNISQPFTVRVCELCHLLRLDKQSFSNILEIYFHDGRTILNNIMEEKESNDRIKKLESDIVIHIGKQEAELALKVNSAAFQGDFYQLKSLIRSGADPNKTDYDGRSPLHLAACRGYEDITLFLIQEGVDVNLKDKFGHTPLFEAVKAGQEGVIGLLVKEGASFNLEDSGNFLCTTVAKGDSDFLKRLLSSGMNPNSEDYDHRTPLHVAASEGLFLMAKMLVEAGASVISKDRWGNSPLDEARLCGNKKLIKLLEDVKNAQSSIYPSSLRELQEERIERRKCTVFPFHPQEAKEERSRKHGVVVWIPSNLEKLIVTAAKELGLSDGASFVLLSEDQGRITDIDMISDGHKLYMISDTTDQT

SEQ ID NO: 99123 - protein, 736 aa, Arabidopsis thaliana
  peptide (1)..(736): Ceres Seq. ID no. 13602239
MEFGFFRGLPERLFVLDIVGQIAFLVDIVLQFFVAYRDTQTYRTVYKPTRIAFRYLKSHFLMDFIGCFPWDLIYKASGKHELVRYLLWIRLFRVRKVVEFFQRLEKDTRINYLFTRILKLLFVEVYCTHTAACIFYYLATTLPPENEGYTWIGSLKLGDYSYENFREIDLWKRYTTALYFAIVTMATVGYGDIHAVNLREMIFVMIYVSFDMVLGAYLIGNITALIVKGSNTERFRDKMNDLISFMNRKKLGRDLRSQITGHVRLQYDSHYTDTVMLQDIPASIRAKIAQLLYLPYIKKVPLFKGCSTEFINQIVIRLHEEYFLPGEVITEQGNVVDHLYFVCEGLLEALVTKTDGSEESVTLLGPHTSFGDISIICNISQPFTVRVCELCHLLRLDKQSFSNILEIYFHDGRTILNNIMEEKESNDRIKKLESDIVIHIGKQEAELALKVNSAAFQGDFYQLKSLIRSGADPNKTDYDGRSPLHLAACRGYEDITLFLIQEGVDVNLKDKFGHTPLFEAVKAGQEGVIGLLVKEGASFNLEDSGNFLCTTVAKGDSDFLKRLLSSGMNPNSEDYDHRTPLHVAASEGLFLMAKMLVEAGASVISKDRWGNSPLDEARLCGNKKLIKLLEDVKNAQSSIYPSSLRELQEERIERRKCTVFPFHPQEAKEERSRKHGVVVWIPSNLEKLIVTAAKELGLSDGASFVLLSEDQGRITDIDMISDGHKLYMISDTTDQT

SEQ ID NO: 99124 - DNA, 918 bp, Arabidopsis thaliana
  misc_feature (1)..(918): Ceres Seq. ID no. 13602255
  misc_feature (1)..(918): Ortholog of  Ceres SEQ ID NO 13597213 as cited in SEQ ID NO 64578
aacattcatttggaggaggagacctgaatctttgcaatctcgcaacagaaacggcgatgggaagatcagctctgattcacttgcttcgctcccaatcccgacgtctctcttcctccaccttcacttcaggatatcatcaccggtcaatagcaggatcatggtcatcatcagtgaacccgaaggtcagattccaggttccatcccttagccagagaagctgggcatcatttggagcaaagactagagaggacgatgatgagcacaagatcagcatcggaccccaagagaagaaagaagagaaggatggaggtgtggtttactatggaccaatctcatcaaccataaagaaagtgaaactcctctcactctccacttgctgtctatcagtctctcttggcccggtcatcactttcatgacttccccgggactgaatgtgatcatgaaaggtgctgttgcctctactgtgatcttccttagcgcatccacaaccgctgctctccactggtttgttagtccctacgtgcacaagctgaggtggcagcctggttcagacacttttgaggtcgagatgatgacttggctcggcacatttagcgcaaagacactgaaattctcagacatacgttatccagacacgcaaagaccgtatgtgagcttcaaggctgatgggaatttctactttgtggatgcagatcattgccctaacaaggcattgttggctaggctcactcctccaaaggatgctcatgactctgctttcaagaacttgtaatccaaattcgtttcttttgttatactctttttttgggtgtggatttttgttgggtttgtaagctctttaagatacttggatacctcctccccttctcatcactaatacccaaaaaaatgcaaataagaaaagaccggtttgatcc

SEQ ID NO: 99125 - protein, 256 aa, Arabidopsis thaliana; identical to SEQ ID NO: 35330
  peptide (1)..(256): Ceres Seq. ID no. 13602256

SEQ ID NO: 99126 - protein, 238 aa, Arabidopsis thaliana; identical to SEQ ID NO: 35331
  peptide (1)..(238): Ceres Seq. ID no. 13602257

SEQ ID NO: 99127 - DNA, 889 bp, Arabidopsis thaliana
  misc_feature (1)..(889): Ceres Seq. ID no. 13602258
  misc_feature (1)..(889): Ortholog of  Ceres SEQ ID NO 15173847 as cited in SEQ ID NO 61751
gtttcacgaacaaagaggcctgagtataaaaaaacaaatcggacgcttcgagtttttcttgaggaagaatccacacacacacagaagaagaatctcatcacgaattttagctatgggttggatctggattgacgattcatccgcctctaaagccggtgctgatctcaccgataaaccgctcggagattctgccgccgccgccgaaaattgctccacgaccacggtggtaagatctcagtgcaagacggaggaggtcgagcctggaaagttcgtcaggaaatgcgacaaaacagaagaaatcctccgccactgttttgggaagccctctgaagtcgttcaatccaacacagagcacacagaagaggatgtgacagaccagatggtgggaagatccgctcttccgaatcagtttgaggataaaaacccgctaaacttcccgggactccgcagagatgtagacgccatcgaacgccatttcttgagcggaatgaagagtttctttgatgcggctgaagagatgacaagcagcttatttgatatcatgggagaccatcacccaagcaccaggagaggagggatacccattgaaaaccatcccaaggtagaggagcaccgcaatgacgaaactgcccctacacgaccacactcctctggcgagattgatctctcgggcttggccaaggacgtttgagaaaggtcgtctgcttcttcttcttcttctttttttttttcacaaaggtcgtcttgttctagcttttggcatatataatcttaaaaatgtaatgtgactttctaagaagcgtggggattgtagtctaatgttagcggcttgcacgtttttccgagtgggtgctactactatctatcaatatcatcatactactatatt

SEQ ID NO: 99128 - protein, 229 aa, Arabidopsis thaliana; identical to SEQ ID NO: 37303
  peptide (1)..(229): Ceres Seq. ID no. 13602259

SEQ ID NO: 99129 - protein, 192 aa, Arabidopsis thaliana; identical to SEQ ID NO: 37304
  peptide (1)..(192): Ceres Seq. ID no. 13602260

SEQ ID NO: 99130 - DNA, 1224 bp, Arabidopsis thaliana
  misc_feature (1)..(1224): Ceres Seq. ID no. 13602265
  misc_feature (1)..(1224): Ortholog of  Ceres SEQ ID NO 15177842 as cited in SEQ ID NO 51547
  misc_feature (1)..(1224): Ortholog of  Ceres SEQ ID NO 13594859 as cited in SEQ ID NO 51974
  misc_feature (1)..(1224): Ortholog of  Ceres SEQ ID NO 13597887 as cited in SEQ ID NO 64295
gtattccaattttagaacttacgcgtcttcataatcttcctctttttttctttgtctttgatattcaaagtttttgtttattttttctttgcttaacccggagagacaccctctccataaatttagttttgatccctctgggttccttgaagaaaaaaacaccaattccattcatattcttcttcatacgttcaataattcttacgaggacgagatcttcctaacgtctttgatcttcttcattaggagataagtctaaactggtcgaagatgttgggagatttcatcatcagactccttgtattgatattagggtacacatacccagcattcgaatgctttaaaacggtggagaagaacaaagttgatatcgaggaactcagattttggtgccaatactggatacttttggcgctaatttcatcattcgagagggttggcgatttttttatctcatggttaccgttatacggagagatgaaagtagtcttcttcgtatatctctggtaccctaaaacaaagggaacgagacatgtgtatgaaacattgttgaagccatacatggctcaacacgagacagagattgacagaaagatcatggagttgcgagctcgagcttgggactttttcatcttttacttcaacaacttcgcccaggccggtcaatccaccttgatccagggttttcagtacgtactcgcccaatcggtccggttctctgccgctgcagctaaccaaccgccaacggagaggaacgtgaacatgaacgcgcagtcaccggtggagatggacaatgatcctccatcaccgcgcgctccaagaccgctgaacaaatcactatctgcgttgcgatcgctagagaagcaaacaagcagagggaggaagtggccgccaccaacaccaccaccaacaccaggccgagactccgccggaacatttaacggtgatgatggagtcaacattcctgatacaattccgggatcacccctcactgatgctcgagctaagctgcgacgttctaactccagaactcagccagcggcatagtaacgcaaacgtacatatacgtgactcgacaaagaaacccttttcgtttgtttaaagatatatagggaaagaaaagtgaatgaaagttttgaattgaaacaaaacagatttttttttttttttcatgttttctgtaaattgaagcagtaagtattaatacagcgagaatatttgtgt

SEQ ID NO: 99131 - protein, 258 aa, Arabidopsis thaliana
  peptide (1)..(258): Ceres Seq. ID no. 13602266
MLGDFIIRLLVLILGYTYPAFECFKTVEKNKVDIEELRFWCQYWILLALISSFERVGDFFISWLPLYGEMKVVFFVYLWYPKTKGTRHVYETLLKPYMAQHETEIDRKIMELRARAWDFFIFYFNNFAQAGQSTLIQGFQYVLAQSVRFSAAAANQPPTERNVNMNAQSPVEMDNDPPSPRAPRPLNKSLSALRSLEKQTSRGRKWPPPTPPPTPGRDSAGTFNGDDGVNIPDTIPGSPLTDARAKLRRSNSRTQPAA

SEQ ID NO: 99132 - protein, 189 aa, Arabidopsis thaliana
  peptide (1)..(189): Ceres Seq. ID no. 13602267
MKVVFFVYLWYPKTKGTRHVYETLLKPYMAQHETEIDRKIMELRARAWDFFIFYFNNFAQAGQSTLIQGFQYVLAQSVRFSAAAANQPPTERNVNMNAQSPVEMDNDPPSPRAPRPLNKSLSALRSLEKQTSRGRKWPPPTPPPTPGRDSAGTFNGDDGVNIPDTIPGSPLTDARAKLRRSNSRTQPAA

SEQ ID NO: 99133 - protein, 161 aa, Arabidopsis thaliana
  peptide (1)..(161): Ceres Seq. ID no. 13602268
MAQHETEIDRKIMELRARAWDFFIFYFNNFAQAGQSTLIQGFQYVLAQSVRFSAAAANQPPTERNVNMNAQSPVEMDNDPPSPRAPRPLNKSLSALRSLEKQTSRGRKWPPPTPPPTPGRDSAGTFNGDDGVNIPDTIPGSPLTDARAKLRRSNSRTQPAA

SEQ ID NO: 99134 - DNA, 761 bp, Arabidopsis thaliana
  misc_feature (1)..(761): Ceres Seq. ID no. 13602269
  misc_feature (1)..(761): Ortholog of  Ceres SEQ ID NO 15169037 as cited in SEQ ID NO 58715
  misc_feature (1)..(761): Ortholog of  Ceres SEQ ID NO 15224680 as cited in SEQ ID NO 59829
agtgtagcgtcgcatcatacactccttcggttcccgacgaatcgctgcttttttctctctctctctccgtcgctgaaaaatgtcggcaagacctgaaggaagtccgccggaggttacgctcgagacctccatgggtcctttcaccgtcgagatgtattacaaacactccccgagaacttgccggaacttccttgagctatcccggagaggttactatgacaacgttctgtttcacagaatcgtcaaggatttcattgtgcaaggtggggatcctacaggaactggaagaggtggtgaatccatttatggttcgaagtttgaggatgagataaacaaagagttgaagcacacaggagccggaattttatcaatggcgaacgctggtcctaatacaaatgggagtcaatttttcatcaccttagccccacaaccgtccttggatggaaaacacacaatatttggtagagtgtgccgaggcatggaggtgatcaagaggctcggtagtgtccaaaccgataacaccgacaggccgatccatgaagtgaagattctaaggaccaaagtgatcgattgattggggcagaggagtttttgtcaaggagaagaagaagcatttagtaaaccgtttatgacatgaagaactataactctgtgtactgatcccttgatactattgtagactggtttttgtctaagtcttgactctactttgatggaaaaaaatgattgaaatacgttaaatcactctctatttctttttg

SEQ ID NO: 99135 - protein, 164 aa, Arabidopsis thaliana; identical to SEQ ID NO: 41836
  peptide (1)..(164): Ceres Seq. ID no. 13602270

SEQ ID NO: 99136 - protein, 147 aa, Arabidopsis thaliana; identical to SEQ ID NO: 41837
  peptide (1)..(147): Ceres Seq. ID no. 13602271

SEQ ID NO: 99137 - protein, 140 aa, Arabidopsis thaliana; identical to SEQ ID NO: 41838
  peptide (1)..(140): Ceres Seq. ID no. 13602272

SEQ ID NO: 99138 - DNA, 2079 bp, Arabidopsis thaliana
  misc_feature (1)..(2079): Ceres Seq. ID no. 13602273
  misc_feature (1)..(2079): Ortholog of  Ceres SEQ ID NO 14313636 as cited in SEQ ID NO 64205
atcacattctctccttattcaacttaaatactacacggccaaaaacatttaacaaacgccactcagatcctgagtctttggatcaatggctatttcaaatgttatttctgtcttattattattgcttgtactaatcaatttaagcaatcaaaatatcaaaggaattgatgcatttcatcagatttacgaagaattgcaatctgaatcagtcgagtcagtgaatcatcttcacagacctagttttcactttcaacctccaaagcattggattaacgatccaaatggtccagtatactacaaaggtctctaccatctcttctaccaatataacaccaaaggtgcggtttggggtaatattatatgggcccattcggtttctaaagacttggttaactgggaggctcttgaaccggctcttagtccttcaaaatggttcgacatcggaggtacatggtccggttcaataacaatcgtaccgggaaaaggaccgattatcctctataccggtgttaaccagaacgaaactcagttgcaaaactatgcaatcccagaggacccatcagacccatacctaaggaaatggattaaaccggacgataacccgattgcaatcccagactatacaatgaacggttcagcattccgtgacccgacaaccgcttggttctccaaagacgggcattggagaaccgtggtagggtcaaaaagaaagcgtagaggaattgcttacatctacagaagccgagatttcaagcattgggtcaaagctaagcacccggttcactctaaacagtcaaccggtatgtgggaatgtcctgatttcttcccggtttccttaaccgatttccgaaacggtttggacttggattacgtcggtccaaacaccaagcatgtgttgaaggttagcttggacattacccggtacgagtattacacgcttggtaaatacgatcttaagaaggaccggtacataccggacggtaatactcccgatggttgggagggtttaagattcgattacggtaatttctacgcttccaagacattctttgactacaaaaagaacagaagaatcttatggggttgggctaatgaatctgacaccgttgaagatgatattttgaagggttgggctggtcttcaggtgattccaagaacggtgctccttgattcaagcaagaagcaacttgtgttttggcctgttgaagagatagagtcattaagaggtaactacgtccgaatgaacaatcatgacatcaagatgggtcaacgcatagaagtcaaaggaatcactcctgctcaagccgatgtggaagtaacgttctatgttggaagtctagagaaagctgagatattcgatccgagtttcacgtggaaaccattggaattgtgtaacattaaaggctcgaatgtgagaggcggtgtaggaccttttggtctgatcacattagcgactcctgatttggaagagtacactcctgtcttctttagagtcttcaacgacactaaaactcataagcctaaagttctcatgtgctccgatgctagaccgtcgtcgttaaagcaagacacgggtttactcgcaaaagataggatgtataaaccatcgtttgctggttttgtggatgttgatatggctgatggaaggatctctctaaggagtttgattgatcattcagtagtagagagctttggagcattaggtaaaacggtgataacatcaagagtgtatccagtgaaagcagtaaaagagaatgcacatttgtatgtctttaacaatggaacacaaactgtgaccatagagagtctcaatgcttggaatatggatcgtcctctgcaaatgaatgatggagctctttaatttagctcttctctctatagtttagctataccgtcttctctctttctcactttttcttatattttcatcttcagtatagtaactgagagatactgtgaaattaggaagaaaaatgtgggagtttctgtgtttacgaacaatttggttgtgatgtccatactttatgtatcgactgttgtatctttctgtctttagtctctcaataaaaataagtttag

SEQ ID NO: 99139 - protein, 591 aa, Arabidopsis thaliana
  peptide (1)..(591): Ceres Seq. ID no. 13602274
MAISNVISVLLLLLVLINLSNQNIKGIDAFHQIYEELQSESVESVNHLHRPSFHFQPPKHWINDPNGPVYYKGLYHLFYQYNTKGAVWGNIIWAHSVSKDLVNWEALEPALSPSKWFDIGGTWSGSITIVPGKGPIILYTGVNQNETQLQNYAIPEDPSDPYLRKWIKPDDNPIAIPDYTMNGSAFRDPTTAWFSKDGHWRTVVGSKRKRRGIAYIYRSRDFKHWVKAKHPVHSKQSTGMWECPDFFPVSLTDFRNGLDLDYVGPNTKHVLKVSLDITRYEYYTLGKYDLKKDRYIPDGNTPDGWEGLRFDYGNFYASKTFFDYKKNRRILWGWANESDTVEDDILKGWAGLQVIPRTVLLDSSKKQLVFWPVEEIESLRGNYVRMNNHDIKMGQRIEVKGITPAQADVEVTFYVGSLEKAEIFDPSFTWKPLELCNIKGSNVRGGVGPFGLITLATPDLEEYTPVFFRVFNDTKTHKPKVLMCSDARPSSLKQDTGLLAKDRMYKPSFAGFVDVDMADGRISLRSLIDHSVVESFGALGKTVITSRVYPVKAVKENAHLYVFNNGTQTVTIESLNAWNMDRPLQMNDGAL

SEQ ID NO: 99140 - protein, 411 aa, Arabidopsis thaliana; identical to SEQ ID NO: 41018
  peptide (1)..(411): Ceres Seq. ID no. 13602275

SEQ ID NO: 99141 - protein, 352 aa, Arabidopsis thaliana; identical to SEQ ID NO: 41019
  peptide (1)..(352): Ceres Seq. ID no. 13602276

SEQ ID NO: 99142 - DNA, 1122 bp, Arabidopsis thaliana
  misc_feature (1)..(1122): Ceres Seq. ID no. 13602281
  misc_feature (1)..(1122): Ortholog of  Ceres SEQ ID NO 13655193 as cited in SEQ ID NO 62745
gcttactgattacagtttcagttccaaagatgagaactttgagctcccaattatactccaatggtggtctcacttggttccagaagaagaatcagagctctctgttcatcaagcatctcagagtctctaaaccatcgagggttcagctcatatctgctgttcaattccgtccgtgcatcgatattcataagggaaaagtgaaacagatagttggatccacacttcgtgacttgaaagaggatggttcagttctcgttacgaattttgaatcggataagtctgcggaagagtatgcaaagatgtacaaagaagatgggcttacgggtggtcatgtgataatgcttggagcagaccctttaagccaagctgcagctattggagcattacatgcttatcctggcggtttgcaagttggaggtggaatcaattctgagaattgcatgagttatattgaggagggagcaagccatgtcattgtcacttcgtatgtatttaacaatggaaagattgatcttgaaagactcaaagatattgtgagcattgttgggaaacaaagactgatattggaccttagctgcagaaagaaggatggaagatacgcaattgttactgatagatggcagaagttcagcgacgtcatccttgacgagaaatcattggagtttcttggaggattttcagatgagtttctggtgcatggcgtagacgttgaaggaaagaagctagggatcgatgaagagcttgtagcattgcttggcaactactctccgattccagtaacttatgcgggaggtgtgacggtaatggatgatgtagagaggatcaaggacgcaggaaagggacgtgtagatgtaacagtgggaagtgccttagacattttcgggggaaatcttccatacaaagacgtcgtcgcttggcatcacaagcagcactcactccattgatatcgccattttcacctttgctcatcttttttatttgcattaccccaaaccttaagcttcaatatttgcaacattaatcttcagctttaaacttttgtgcttctttctaaactcttcaagaatttgtcaattttgaatattttttcgattaatcaagtttatggtttggtttgactac

SEQ ID NO: 99143 - protein, 313 aa, Arabidopsis thaliana; identical to SEQ ID NO: 26446
  peptide (1)..(313): Ceres Seq. ID no. 13602282

SEQ ID NO: 99144 - protein, 304 aa, Arabidopsis thaliana; identical to SEQ ID NO: 26447
  peptide (1)..(304): Ceres Seq. ID no. 13602283

SEQ ID NO: 99145 - protein, 214 aa, Arabidopsis thaliana; identical to SEQ ID NO: 26448
  peptide (1)..(214): Ceres Seq. ID no. 13602284

SEQ ID NO: 99146 - DNA, 1359 bp, Arabidopsis thaliana
  misc_feature (1)..(1359): Ceres Seq. ID no. 13602285
  misc_feature (1)..(1359): Ortholog of  Ceres SEQ ID NO 14308615 as cited in SEQ ID NO 58538
  misc_feature (1)..(1359): Ortholog of  Ceres SEQ ID NO 13585342 as cited in SEQ ID NO 63601
  misc_feature (1)..(1359): Ortholog of  Ceres SEQ ID NO 15177459 as cited in SEQ ID NO 0
aaacctctctcttctctcacttcccagctacttctctctctcgcgctctctctttcttttttggcaatggctactggatcaacaaccgattccgccaggtctccttcctcaggtgttctccaaaagctgttattactattctctgtctgtatagctacttcaacttataaagcaatccagcctcctccatcaaagctatgtggctctcctgatggtccatccatcacaggaccaaggattaagctaagagacggaaggcagttagcttacaaagagcatggagttcctagagatgaagctactcataaaatcatcgttgtccatggatctgatagttgcagacatgataatgctttcgcagctctactatcaccggatattaaggaaggactaggtgtgtatatggtttcatttgatagacctggttatgcagagagtgatcctgacccaaaccgtactcctaaaagcttggctttggacattgaagagcttgctgatcagttgagtctaggatcgaagttctatgtcatcggttactcgatgggaggacaagctacttgggcatgccttaaatacattcctcacaggttggctggagtaacgcttgttgctccagtggtgaactattggtggaagaactttccatcagagatctcaaccgaagcttttaaccaacaagggagaaatgaccaatgggcggttcgtgttgcacactatgctccttggcttactcattggtggaactcccagagctggttccctggatcaagtgttgtggctcgcaatctcggtatgttgtccaaagcagacaaagagatcatgtttaagctcggtgctgcaaggagccaacatgaggcacaaataaggcaacaaggaacacacgagacattgcaccgtgacatgattgttggatttggaacttgggagttcgatccaatggagctcgagaatctgttcccgaacaatgaaggatcagtgcacttgtggcagggagatgatgatgtgcttgtccctgtgactctgcaacgttacattgcgaagaagctgccatggatccattaccatgagattcctggagcagggcatttgttcccgtttgctccaggtatggttaataacattgttaaaacgctcttaaccaatgatggagtgaagaagtaaacgatgtcttctctctcaaaaagttggctagttttggttttgtaacatgcattgctatgatattttgaaccgggatcagagagattcatgagaatctcaagtttctcttggttgctgatatatattgtgggtgattagtaaagagttctggtacctatgtaaaacattctcagcattcatctcaaaaagctgtttctg

SEQ ID NO: 99147 - protein, 386 aa, Arabidopsis thaliana
  peptide (1)..(386): Ceres Seq. ID no. 13602286
KPLSSLTSQLLLSLALSLSFLAMATGSTTDSARSPSSGVLQKLLLLFSVCIATSTYKAIQPPPSKLCGSPDGPSITGPRIKLRDGRQLAYKEHGVPRDEATHKIIVVHGSDSCRHDNAFAALLSPDIKEGLGVYMVSFDRPGYAESDPDPNRTPKSLALDIEELADQLSLGSKFYVIGYSMGGQATWACLKYIPHRLAGVTLVAPVVNYWWKNFPSEISTEAFNQQGRNDQWAVRVAHYAPWLTHWWNSQSWFPGSSVVARNLGMLSKADKEIMFKLGAARSQHEAQIRQQGTHETLHRDMIVGFGTWEFDPMELENLFPNNEGSVHLWQGDDDVLVPVTLQRYIAKKLPWIHYHEIPGAGHLFPFAPGMVNNIVKTLLTNDGVKK

SEQ ID NO: 99148 - protein, 364 aa, Arabidopsis thaliana
  peptide (1)..(364): Ceres Seq. ID no. 13602287
MATGSTTDSARSPSSGVLQKLLLLFSVCIATSTYKAIQPPPSKLCGSPDGPSITGPRIKLRDGRQLAYKEHGVPRDEATHKIIVVHGSDSCRHDNAFAALLSPDIKEGLGVYMVSFDRPGYAESDPDPNRTPKSLALDIEELADQLSLGSKFYVIGYSMGGQATWACLKYIPHRLAGVTLVAPVVNYWWKNFPSEISTEAFNQQGRNDQWAVRVAHYAPWLTHWWNSQSWFPGSSVVARNLGMLSKADKEIMFKLGAARSQHEAQIRQQGTHETLHRDMIVGFGTWEFDPMELENLFPNNEGSVHLWQGDDDVLVPVTLQRYIAKKLPWIHYHEIPGAGHLFPFAPGMVNNIVKTLLTNDGVKK

SEQ ID NO: 99149 - protein, 252 aa, Arabidopsis thaliana
  peptide (1)..(252): Ceres Seq. ID no. 13602288
MVSFDRPGYAESDPDPNRTPKSLALDIEELADQLSLGSKFYVIGYSMGGQATWACLKYIPHRLAGVTLVAPVVNYWWKNFPSEISTEAFNQQGRNDQWAVRVAHYAPWLTHWWNSQSWFPGSSVVARNLGMLSKADKEIMFKLGAARSQHEAQIRQQGTHETLHRDMIVGFGTWEFDPMELENLFPNNEGSVHLWQGDDDVLVPVTLQRYIAKKLPWIHYHEIPGAGHLFPFAPGMVNNIVKTLLTNDGVKK

SEQ ID NO: 99150 - DNA, 1328 bp, Arabidopsis thaliana
  misc_feature (1)..(1328): Ceres Seq. ID no. 13602292
  misc_feature (1)..(1328): Ortholog of  Ceres SEQ ID NO 12611971 as cited in SEQ ID NO 53205
  misc_feature (1)..(1328): Ortholog of  Ceres SEQ ID NO 12615976 as cited in SEQ ID NO 62440
aaaggattccgaaaaaagcttagacctttttgatctgatacgtatctataaatctggaaaggagctgagagtttcaaggggttttaatttcgctgagaaaacgtttaattatctttgtcgagatggattgtggtatggagaattgtaatggtgggatctcaaacggtgacgttttgggtaagcatgagaagctcattatcgatacagacccaggaattgatgatagcatggcgatattgatggcgtttcaaacaccggagctggagatattaggattaactactgtgtttggtaatgtttctacacaagatgctactcgcaacgctttactcttgtgtgagattgctggcttccctgatgttcccgttgcagaaggaagttccgaacctttaaagggtggaattccgcgtgttgctgattttgtgcatggtaaaaacggactaggagatgtctctcttcctcctccgagtagaaagaaatctgagaaaagtgcagctgagtttctagatgagaaggtcgaagaatatccgggtgaagtcaccattctcgccctcggacctctaaccaacctggcattagccatcaaacgcgatagttcatttgcgagcaaggtgaagaaaattgttattcttggtggagctttcttttctttgggaaatgtcaatcctgcagctgaggctaatatatatggtgacccggaagcagctgatgttgttttcacatctggagcggatatcactgttgtcggtataaacatcacaacccaacttaaactatcagatgatgacctcttggagcttggtaactgcaaggggaaacactctaaattgataagcgatatgtgcaaattttatagagattggcacgtcaaatctgatggtgtttacggagtgtacctccatgacccagtcagctttgtggctgtagtacggcctgatttattcacatataagaaaggcgttgttcgggtggagactcaagggatatgtgttggccacacgctcatggatcaaggcctcaagagatggaacggaagcaatccgtgggtgggatattcaccgatatcagttgcttggacggttgacgtagaaggagttttggaatatgtcaaagcaaagctgatgaagccataaaagatgagtttcagagcacgttagagtgtgaatattcatttaaaatggcatcatcacattcatctcttctggttctaaccggaatcttatattcatctctgtatttgatctgtataaatgctatattcgattaaaagaaaagactaatgaatgaaaactatcttcgttttctcttatcgatctttgtttctttcc

SEQ ID NO: 99151 - protein, 336 aa, Arabidopsis thaliana; identical to SEQ ID NO: 26357
  peptide (1)..(336): Ceres Seq. ID no. 13602293

SEQ ID NO: 99152 - protein, 332 aa, Arabidopsis thaliana; identical to SEQ ID NO: 26358
  peptide (1)..(332): Ceres Seq. ID no. 13602294

SEQ ID NO: 99153 - protein, 301 aa, Arabidopsis thaliana; identical to SEQ ID NO: 26359
  peptide (1)..(301): Ceres Seq. ID no. 13602295

SEQ ID NO: 99154 - DNA, 2763 bp, Arabidopsis thaliana
  misc_feature (1)..(2763): Ceres Seq. ID no. 13602300
  misc_feature (1)..(2763): Ortholog of  Ceres SEQ ID NO 13598926 as cited in SEQ ID NO 0
actctctcttcccaaagttctctgtaaaactctctctccgtcttcaatggtttacacgatttcaggcgtacgttttcctcatcttccatcgattaagaagaagaattcgtctcttcacagtttcaatgaagatctcaggagaagcaacgctgtctcattctctctgaggaaggactctcgttcttctgggaaggtttttgctcggaagccatcgtatgattctgattcgtcttccttagctaccactgcatctgagaagctccgtggccatcagagtgatagctcttcatctgcctctgatcaagtacaatctcgggatactgtctctgacgatactcaggtgctcggcaatgtagacgttcagaaaactgaagaagcccaggaaacagagacactagatcaaacttctgcactctcaacatctggaagcataagttataaagaagattttgcaaagatgtcacactctgtcgaccaagaagttgggcagaggaagattccacctcctggagatgggaagagaatatatgacattgatcctatgttgaacagtcatcgtaatcatcttgattaccgatatgggcagtacagaaaactgcgtgaagaaattgacaagaatgaaggtggtttggaggcattttctcgtggttatgaaatatttggcttcactcgaagcgccactggtatcacttaccgggaatgggcaccgggagctaaggcagcatcactgatcggagattttaataactggaatgcgaaatctgatgttatggctcggaacgactttggtgtgtgggaaatatttctgccaaataatgctgatggctcaccagcaattccccatggctcccgtgtgaagatccgcatggataccccatctggtattaaagactccattccagcttggatcaagtattctgtccagccacctggcgagatcccatataatggagtatattatgaccctcctgaggaggataaatatgcgttcaaacatcctcgtccaaagaaacccacatcgctgcgtatatatgaatcacatgttggaatgagtagtacggaaccaaagataaatacatatgccaactttagagatgatgtacttccccgtataaaaaagctaggctataatgctgtgcagataatggccattcaagagcatgcctactatgccagctttgggtatcatgtgacaaattttttcgcacctagcagccgctttggaacacctgatgaccttaaatctttgatagacaaagctcatgagctaggtctggttgttctgatggatattgtgcacagccatgcatcaaaaaacacactggatggcctggacatgtttgatggtactgatggtcaatatttccactctggatcgcgtggttatcattggatgtgggattctcgtcttttcaattacggaagctgggaagtgcttaggtatcttctttccaacgcgagatggtggctggaagaatacaagtttgatgggttcagatttgatggtgtgacttccatgatgtacactcatcatggactgcaggtcgaatttactgggaattacaatgagtactttggatattctactgatgttgacgctgtggtctatctaatgctggtgaacgatttgattcatgggctataccctgaggctattgttgtcggcgaagatgttagcgggatgccagctttttgcgttcctgtcgaagacggtggtgtgggttttgactaccgtctacacatggcagtggcagataaatggattgagcttcttaagaagagagacgaggactggcaggttggtgatataactttcacgcttaccaacaggaggtggggagaaaaatgtgtcgtctatgcagagagtcatgatcaagcccttgttggagacaaaacgatagctttctggctaatggataaggacatgtatgatttcatggccgttgatagacaggccactccgcgtgtagaccgtgggattgctttacacaaaatgatccgtctcattacgatgggattgggtggagaaggatacctcaatttcatgggaaacgaatttggacacccagaatggatcgacttcccaaggaccgaccagcaccttcctgatggcagagtcatcgctgggaataatggtagttatgataaatgccgacgtaggtttgatctgggagatgcagaatatcttagataccatggactacaagagtttgatcgagcaatgcaaaatctagaggagacgtatggtttcatgacttcagagcaccagtacatatcccgcaaggatgaaggagacagagtcattgtattcgagagaggtaacttgctcttcgtcttcaacttccactggaccaacagttactctgactaccgtatcggttgctctgttcccggaaagtacaaaatcgttttggactctgataactctttatttggaggcttcaaccggctagatgactccgcggagtttttcacctctgatggaaggcacgacgataggccttgctccttcatggtgtatgcaccgtgcagaaccgctgtagtttacgctgcagtagatgatgatgatgatgatgaacgttcttctcttgtccccataggcctgttacccgaagatgtttaggagcaaagacagttgtccgagtttacctactgtaagcttctttgtactacaaaaatttactcgttgatcttcttctcctttagttttcgcttgcagcatcattataacttaaaaatgaaataaaaagtcgttgcacttct

SEQ ID NO: 99155 - protein, 873 aa, Arabidopsis thaliana; identical to SEQ ID NO: 27072
  peptide (1)..(873): Ceres Seq. ID no. 13602301

SEQ ID NO: 99156 - protein, 858 aa, Arabidopsis thaliana; identical to SEQ ID NO: 27073
  peptide (1)..(858): Ceres Seq. ID no. 13602302

SEQ ID NO: 99157 - protein, 721 aa, Arabidopsis thaliana; identical to SEQ ID NO: 27074
  peptide (1)..(721): Ceres Seq. ID no. 13602303

SEQ ID NO: 99158 - DNA, 1544 bp, Arabidopsis thaliana
  misc_feature (1)..(1544): Ceres Seq. ID no. 13602304
  misc_feature (1)..(1544): Ortholog of  Ceres SEQ ID NO 15177285 as cited in SEQ ID NO 52481
  misc_feature (1)..(1544): Ortholog of  Ceres SEQ ID NO 13594068 as cited in SEQ ID NO 58624
aatgaaagaaactgttcaacaacttctgatttctaaaatcttttaaaaatctctccgccacttctagttggacttgatttctcaccatagtctgtcccgttgttaccgaccatctattatatagggaaagtctcttagctacagagacacaataaccatttggagaggtcatgaactctaagaatcgcataaacaatgtcggggaaggtgttgatatcgaaatccctgacactgctcatcagattagcagcgattcatggtttcaggcagcgttcgttctgacaacaagtataaacagcgcatacgtgttgggatattcaggaacagtcatggttcctttaggatggattggtggtgtggttggtcttattcttgctactgcaatctcactctatgcaaacactctcgtagccaagcttcatgagtttggtggcaaaagacacattcgctatagagaccttgcgggattcatttacggtagaaaggcttattgtcttacatgggtgttgcaatatgtcaatcttttcatgattaattgtggtttcatcatactagctggttccgccttaaaggctgtttatgtgctttttagggatgatcatgccatgaagttacctcattttatagctattgcgggtctgatttgtgcggtttttgctattggaattcctcatttgtcggctcttgggatatggcttgcggtttcgactatcctcagcctcatctatatcgttgtggcaatcgtgctatcggttaaagatggagttaaagcaccttcaagagattacgagatacaaggatcaccactaagcaaactttttaccatcactggagcagccgctacactagttttcgtattcaacacagggatgcttccagaaattcaggcaacagtaaagcaaccagtagtaaaaaacatgatgaaggctctatactttcaattcacggtgggtgttttaccgatgtttgcggttgtattcatcgggtattgggcttacggatcctcgacctcgccctatctactaaacaacgttaatggtccactttgggttaaagcccttgctaacatctccgctatccttcaatccgttatctcgttgcacatttttgcaagtccaacatatgagtacatggacaccaagtttgggatcaaaggaaacccattggcattaaagaacttgttgtttaggatcatggcaagaggcgggtacatagcagttagtacgcttctctcagcactcttgccgttccttggggacttcatgagcctcactggtgcagtgagcacattcccccttacattcattctagccaaccacatgtactataaggctaagaacaataagctcaatactttgcaaaagctatgccattggctcaacgttgtcttcttcagtttgatgtctgttgctgccgccattgcagctcttaggctcatcgcccttgactccaaaaacttccacgtttttgcagatttgtaattcataatatatactcatcgtatttattcttagttggatttcttatcaataaaattaattttc

SEQ ID NO: 99159 - protein, 436 aa, Arabidopsis thaliana; identical to SEQ ID NO: 34897
  peptide (1)..(436): Ceres Seq. ID no. 13602305

SEQ ID NO: 99160 - protein, 383 aa, Arabidopsis thaliana; identical to SEQ ID NO: 34898
  peptide (1)..(383): Ceres Seq. ID no. 13602306

SEQ ID NO: 99161 - protein, 317 aa, Arabidopsis thaliana; identical to SEQ ID NO: 34899
  peptide (1)..(317): Ceres Seq. ID no. 13602307

SEQ ID NO: 99162 - DNA, 1042 bp, Arabidopsis thaliana
  misc_feature (1)..(1042): Ceres Seq. ID no. 13602312
  misc_feature (1)..(1042): Ortholog of  Ceres SEQ ID NO 15174082 as cited in SEQ ID NO 61896
  misc_feature (1)..(1042): Ortholog of  Ceres SEQ ID NO 13655598 as cited in SEQ ID NO 64077
  misc_feature (1)..(1042): Ortholog of  Ceres SEQ ID NO 15179351 as cited in SEQ ID NO 0
  misc_feature (1)..(1042): Ortholog of  Ceres SEQ ID NO 15180408 as cited in SEQ ID NO 0
aaaatcatcaaatccatctcccactcttctagcatcttgaagcttaaatctcagccgtccgatcatgccgatcagaaacatcgccattggccgtccagatgaagccacccgtcccgatgccttaaaggcggcgttggctgagttcatttcaactttgatctttgtcgtcgccggttcaggctctggcatggctttcaacaagctcactgaaaacggagccaccactccttctggtctcgtagctgctgcagtggctcatgcctttggactcttcgtcgctgtctcagttggtgccaacatctctggtggacacgttaaccctgccgtcactttcggtgctttcattggtggtaacatcactctcctccgtggtatcctctactggattgctcagcttctcggctccgtcgtcgcttgcctcatccttaaattcgccaccggtggcttggctgtgccggcttttggtctctctgctggagtaggagtgttgaacgctttcgttttcgagatcgtgatgacattcgggcttgtttacaccgtctacgctacagccattgaccccaaaaacgggagtcttggaacaattgctcccatcgcaatcggtttcattgttggagccaacatcttagctggaggagctttctctggagcctccatgaatcccgccgtggctttcggaccagcggtggtgagctggacatggaccaaccactgggtctactgggccggacctctcgtcggcggtggaatcgctggactcatctacgaagttttcttcatcaacaccacacacgagcagctcccaaccacagactactgaattaatctctctttttctctcttgtgtaattttattcgactttgaatttgaattttaatgtctttttaatttccgtttgtgtaatttcgaatcatcaaggggtttatgatcgttcgatcttttagatgaatccttgtccgttggtttcaagagtggccattgcaatttcgactatataatgtgaattatgtatcaatctcatcttaagttttcaagtgttgc

SEQ ID NO: 99163 - protein, 251 aa, Arabidopsis thaliana
  peptide (1)..(251): Ceres Seq. ID no. 13602313
MPIRNIAIGRPDEATRPDALKAALAEFISTLIFVVAGSGSGMAFNKLTENGATTPSGLVAAAVAHAFGLFVAVSVGANISGGHVNPAVTFGAFIGGNITLLRGILYWIAQLLGSVVACLILKFATGGLAVPAFGLSAGVGVLNAFVFEIVMTFGLVYTVYATAIDPKNGSLGTIAPIAIGFIVGANILAGGAFSGASMNPAVAFGPAVVSWTWTNHWVYWAGPLVGGGIAGLIYEVFFINTTHEQLPTTDY

SEQ ID NO: 99164 - protein, 210 aa, Arabidopsis thaliana
  peptide (1)..(210): Ceres Seq. ID no. 13602314
MAFNKLTENGATTPSGLVAAAVAHAFGLFVAVSVGANISGGHVNPAVTFGAFIGGNITLLRGILYWIAQLLGSVVACLILKFATGGLAVPAFGLSAGVGVLNAFVFEIVMTFGLVYTVYATAIDPKNGSLGTIAPIAIGFIVGANILAGGAFSGASMNPAVAFGPAVVSWTWTNHWVYWAGPLVGGGIAGLIYEVFFINTTHEQLPTTDY

SEQ ID NO: 99165 - DNA, 1666 bp, Arabidopsis thaliana
  misc_feature (1)..(1666): Ceres Seq. ID no. 13602319
  misc_feature (1)..(1666): Ortholog of  Ceres SEQ ID NO 14314559 as cited in SEQ ID NO 52317
  misc_feature (1)..(1666): Ortholog of  Ceres SEQ ID NO 15174571 as cited in SEQ ID NO 53570
  misc_feature (1)..(1666): Ortholog of  Ceres SEQ ID NO 14314367 as cited in SEQ ID NO 57446
aagagcgggcaaaacaaacagagagcgagtcacgcgccgagttttcctcacttgttctcaataaatctctctctctttcttctctatcgctttcatttttctcctccagatctcgattccaatctctctccctctctacttccttcaacagaaatggaaacgttcctatttacctctgaatccgtcaatgaaggacacccagacaagctttgtgaccagatttctgatgcgatccttgatgcttgcttagagcaagatcctgaaagcaaagtggcgtgtgagacatgcaccaagaccaacatggtgatggtgtttggtgagatcactaccgctgcgaaagttgactatgagaagattgttagatccacttgcagggagattggttttatctctgctgatgttggtcttgacgctgacaaatgcaatgttttggttaacattgagcaacagagccctgacattgctcagggtgttcatggtcatttgaccaagaagcctgaagatattggtgctggtgatcagggacatatgtttgggtatgctactgatgagactcctgagctcatgccgttgactcatgtcctagccaccaagcttggtgctaagcttactgaagtgaggaagaacaagacttgcccatggttgaggcctgatggtaagacacaagtcacagtggagtacaagaacgatggtggagctatgattccgattagagtccacactgttcttatctcaactcaacatgacgaaactgtcaccaatgatgagattgctgctgacttgaaggagcatgtgatcaagcctgttatccctgctaagtaccttgacgataacaccatctttcacttgaacccatctggtcgttttgtcatcggagggcctcatggtgatgctggacttacagggaggaagatcatcattgacacttatggtggttggggtgctcatggtggaggtgccttctcaggaaaggacccaaccaaggttgacagaagcggtgcctatatcgtgaggcaggctgcaaagagcgtggtagcagcaggactcgcacgccgttgtatcgtgcaggtatcatacgccattggtgtccctgagccgctctcagtgtttgttgacacctacaagaccgggaccatcccagacaaggatatccttgtgttgatcaaggaagcatttgacttcaggccgggaatgatggccattaaccttgaccttaagaggggaggtaacttcaggttccagaaaaccgctgcgtatggccatttcgggcgtgatgaccctgacttcacttgggaggttgtcaagccgctcaagccaaaggcctagacagaaacaaagctggcaattgcaagaactgagttgagtcactccccaactactgggaacttatcattataccattattattgcaaatgactgaataaagaaagcttctgcattgtcaccattcacatttgttttcgcgaacacaggccagcggttcatatatctggtaatcgaagattgcaaatgaaagatttgagttttatgttttgaatttttgcctcttttttatttttctttttcttttccctcttaatctcttgtattgtaattttgattgtgtaaccaagaaatccatcctcgtgatgtttttttttttataagaaaatatcatgcaagttag

SEQ ID NO: 99166 - protein, 441 aa, Arabidopsis thaliana; identical to SEQ ID NO: 29210
  peptide (1)..(441): Ceres Seq. ID no. 13602320

SEQ ID NO: 99167 - protein, 390 aa, Arabidopsis thaliana; identical to SEQ ID NO: 29211
  peptide (1)..(390): Ceres Seq. ID no. 13602321

SEQ ID NO: 99168 - protein, 341 aa, Arabidopsis thaliana; identical to SEQ ID NO: 29212
  peptide (1)..(341): Ceres Seq. ID no. 13602322

SEQ ID NO: 99169 - DNA, 4276 bp, Arabidopsis thaliana
  misc_feature (1)..(4276): Ceres Seq. ID no. 13602335
  misc_feature (1)..(4276): Ortholog of  Ceres SEQ ID NO 15179695 as cited in SEQ ID NO 193
gtcccaacaatctgatcagaaaaaagtagacgaagaagaagaaattaagtcacttgaacaatggcgttggtccgaaatgcaaggccttgagcttctccctcataacaccaacaacaactcacgaagctccagagaaactcaccggaaatggataatgacggtggtgctcctcctcctccgccgacactagtggtggaagagcctaagaaagcagagattcgtggagttgcttttaaagagctattcagattcgccgacggattagattatgtattgatgggaattggctctgttggtgcttttgtccatggctgctctttacctctgtttcttcgattcttcgccgatcttgttaattcctttggttctaattctaataacgttgaaaagatgatggaagaagttctcaagtatgcgctttactttttagtggttggtgctgcaatctgggcttcctcttgggcagagatttcgtgttggatgtggagtggagagagacaaacaacgaagatgaggattaagtatttagaagcagctttgaatcaagacattcagttctttgatacagaagttcgaacttcagatgttgtcttcgccattaacaccgacgctgttatggttcaagacgccattagtgagaaacttggtaatttcatccattacatggcgacttttgtttctggattcatcgtgggtttcactgcggtgtggcaactagctttagtgactctcgcggtggttccgttgattgctgtgatcggaggaattcacaccactactctctctaaactatctaataagagtcaagagtctctttcacaagctggtaatatcgtcgaacagacagtggtacaaatcagggtagtgatggctttcgttggagaatcaagagcttcacaagcttattcatcagctttgaagattgctcagaagcttggttacaaaacaggtttagctaaaggaatgggacttggtgctacatacttcgttgtcttttgttgttacgctctcttgctttggtacggtggttatctagttcgccaccatttgaccaacggtggtctcgctattgccacaatgttcgccgttatgattggtggattggcattgggacaatcagcaccgagcatggctgcatttgccaaagcaaaggttgctgctgcaaagatctttagaatcattgatcacaaaccaacgatagagcgtaacagcgagtccggtgtggagttagactcagtcacgggtcttgtcgagcttaaaaatgtggacttttcgtatccgtcaaggccagatgttaagattcttaacaacttctgcctctctgttcctgctgggaagaccattgctttggttgggagcagtggttcaggaaaaagcacagtcgtttcgcttatagagcggttttacgacccgaactcaggacaagttttactagatgggcaagacctgaagacgctgaaactgagatggttaaggcaacagatagggctagtgagtcaagaacctgcattattcgccacttctatcaaggagaatatactcttaggccgtcctgacgcagatcaagtcgagatagaggaggctgctcgagtcgcaaatgctcattcctttatcatcaaactacctgatggcttcgacacacaggttggggagagaggattgcagctgtctggtgggcagaagcaaagaatagcgatagcaagagcgatgttgaagaacccggcgatacttctattagatgaggcgacgagtgcattggattctgaatcagagaagcttgtacaagaggctttggatcgtttcatgattggaaggactactctcatcattgctcatcgcctttctaccattcgaaaagctgaccttgttgctgtgctacagcaaggaagtgtctctgagattggaacgcatgatgagcttttttccaagggagaaaatggagtctatgctaagctaattaaaatgcaagaagcagctcacgaaaccgccatgagcaatgcaagaaagagtagcgcaagaccgtcgagtgctagaaactcggttagctcgccaataatgactcggaattcgtcgtatggaagatcaccttattcacggagactatccgatttctcaacttctgattttagcctctccattgacgcttcgtcctacccaaactatagaaacgagaagctggccttcaaggatcaagccaattcattctggcgactagctaaaatgaactctccagagtggaaatacgctttgctcggttcagtaggctctgtcatttgtggctcccttagtgcattcttcgcatatgtcctcagtgcagtcttaagcgtctactacaacccggaccacgaatacatgatcaaacagattgataagtactgttatctcttaatcggtctctcttccgcagcacttgtcttcaacacgctccagcattctttctgggacattgtgggtgagaatctgaccaagagagtccgtgagaagatgctgagcgctgtactcaagaatgagatggcttggtttgatcaagaggagaacgaaagtgcaagaatcgcagcaagattagctcttgatgctaataatgtgagatctgcgataggagatagaatatcggttattgtgcagaacacagcactgatgcttgttgcttgcactgccgggtttgttctacaatggagactcgcacttgtccttgtcgcagtcttccccgtagttgttgctgcaactgtcttacagaaaatgttcatgactggtttctcgggagacctggaagcggcacatgccaagggaacgcagcttgctggtgaagccatagctaatgtcaggacagttgctgcatttaactcggaggcaaagattgtccgtctctacactgcaaacctcgaaccaccattgaaacgatgcttctggaaaggacagatcgctggaagtggttatggtgtagctcagttctgtctttatgcatcttatgctctcgggctatggtacgcatcatggcttgtgaaacacggcatctctgacttctccaaaaccataagagtcttcatggttctgatggtctcagccaatggtgcagcagagacactcacactggctcctgatttcatcaaaggtggtcaagctatgcggtctgttttcgaacttcttgaccggaaaaccgagattgaacctgatgatcctgataccaccccggtcccagaccggttacgtggtgaagtcgagctcaaacatatcgatttctcttacccttcaaggccagacatccagattttccgtgaccttagccttcgtgctagagctggcaaaaccctagctcttgtgggtccaagcgggtgcggaaaaagctcagttatctccctcatccagagattctacgaaccttcctcaggccgagtcatgatcgacgggaaagacataaggaaatacaacctgaaagccataaggaaacacatagccatagtccctcaagagccgtgcttgttcggaactaccatttacgaaaacattgcatatggacatgaatgtgcgaccgaagcagagatcatacaagccgcgactctagccagtgcgcacaaattcatatccgcgctaccagaaggttacaaaacgtatgttggcgagagaggcgttcagctctcgggaggacagaaacagaggatcgcgatcgcacgtgccctcgtgaggaaagcagagatcatgctgcttgacgaggctacaagcgctcttgatgcagagtccgagagatcagtccaagaagcattagaccaggcttgctctggtagaacatcaatagtcgtggctcataggctatctacaatcaggaacgcacacgtgatcgctgtcatcgatgatggaaaagtggctgaacaaggatcgcattcgcatcttctcaagaaccatcctgatggaatctacgcgcgaatgatacagttgcaaagatttacgcatacacaagtgattggtatgacgtcaggttcaagttctagggttaaggaagatgatgcttagtacttactactttggtcatatagaagaaaaaagaaggagagtaaaaaacaacaaacaccagaagatgtttctgataaaaaactctacgaactcatcattttctctttttttctttctgttttgattttggggttacttatttttggaactacgtttcagatttgatggtatagtattattattgtgtattatcataattaatctaatttttcacctctgtaatatccatttatatgccatatcaatctatgagcctctgcctttctag

SEQ ID NO: 99170 - protein, 1286 aa, Arabidopsis thaliana
  peptide (1)..(1286): Ceres Seq. ID no. 13602336
MDNDGGAPPPPPTLVVEEPKKAEIRGVAFKELFRFADGLDYVLMGIGSVGAFVHGCSLPLFLRFFADLVNSFGSNSNNVEKMMEEVLKYALYFLVVGAAIWASSWAEISCWMWSGERQTTKMRIKYLEAALNQDIQFFDTEVRTSDVVFAINTDAVMVQDAISEKLGNFIHYMATFVSGFIVGFTAVWQLALVTLAVVPLIAVIGGIHTTTLSKLSNKSQESLSQAGNIVEQTVVQIRVVMAFVGESRASQAYSSALKIAQKLGYKTGLAKGMGLGATYFVVFCCYALLLWYGGYLVRHHLTNGGLAIATMFAVMIGGLALGQSAPSMAAFAKAKVAAAKIFRIIDHKPTIERNSESGVELDSVTGLVELKNVDFSYPSRPDVKILNNFCLSVPAGKTIALVGSSGSGKSTVVSLIERFYDPNSGQVLLDGQDLKTLKLRWLRQQIGLVSQEPALFATSIKENILLGRPDADQVEIEEAARVANAHSFIIKLPDGFDTQVGERGLQLSGGQKQRIAIARAMLKNPAILLLDEATSALDSESEKLVQEALDRFMIGRTTLIIAHRLSTIRKADLVAVLQQGSVSEIGTHDELFSKGENGVYAKLIKMQEAAHETAMSNARKSSARPSSARNSVSSPIMTRNSSYGRSPYSRRLSDFSTSDFSLSIDASSYPNYRNEKLAFKDQANSFWRLAKMNSPEWKYALLGSVGSVICGSLSAFFAYVLSAVLSVYYNPDHEYMIKQIDKYCYLLIGLSSAALVFNTLQHSFWDIVGENLTKRVREKMLSAVLKNEMAWFDQEENESARIAARLALDANNVRSAIGDRISVIVQNTALMLVACTAGFVLQWRLALVLVAVFPVVVAATVLQKMFMTGFSGDLEAAHAKGTQLAGEAIANVRTVAAFNSEAKIVRLYTANLEPPLKRCFWKGQIAGSGYGVAQFCLYASYALGLWYASWLVKHGISDFSKTIRVFMVLMVSANGAAETLTLAPDFIKGGQAMRSVFELLDRKTEIEPDDPDTTPVPDRLRGEVELKHIDFSYPSRPDIQIFRDLSLRARAGKTLALVGPSGCGKSSVISLIQRFYEPSSGRVMIDGKDIRKYNLKAIRKHIAIVPQEPCLFGTTIYENIAYGHECATEAEIIQAATLASAHKFISALPEGYKTYVGERGVQLSGGQKQRIAIARALVRKAEIMLLDEATSALDAESERSVQEALDQACSGRTSIVVAHRLSTIRNAHVIAVIDDGKVAEQGSHSHLLKNHPDGIYARMIQLQRFTHTQVIGMTSGSSSRVKEDDA

SEQ ID NO: 99171 - protein, 1243 aa, Arabidopsis thaliana
  peptide (1)..(1243): Ceres Seq. ID no. 13602337
MGIGSVGAFVHGCSLPLFLRFFADLVNSFGSNSNNVEKMMEEVLKYALYFLVVGAAIWASSWAEISCWMWSGERQTTKMRIKYLEAALNQDIQFFDTEVRTSDVVFAINTDAVMVQDAISEKLGNFIHYMATFVSGFIVGFTAVWQLALVTLAVVPLIAVIGGIHTTTLSKLSNKSQESLSQAGNIVEQTVVQIRVVMAFVGESRASQAYSSALKIAQKLGYKTGLAKGMGLGATYFVVFCCYALLLWYGGYLVRHHLTNGGLAIATMFAVMIGGLALGQSAPSMAAFAKAKVAAAKIFRIIDHKPTIERNSESGVELDSVTGLVELKNVDFSYPSRPDVKILNNFCLSVPAGKTIALVGSSGSGKSTVVSLIERFYDPNSGQVLLDGQDLKTLKLRWLRQQIGLVSQEPALFATSIKENILLGRPDADQVEIEEAARVANAHSFIIKLPDGFDTQVGERGLQLSGGQKQRIAIARAMLKNPAILLLDEATSALDSESEKLVQEALDRFMIGRTTLIIAHRLSTIRKADLVAVLQQGSVSEIGTHDELFSKGENGVYAKLIKMQEAAHETAMSNARKSSARPSSARNSVSSPIMTRNSSYGRSPYSRRLSDFSTSDFSLSIDASSYPNYRNEKLAFKDQANSFWRLAKMNSPEWKYALLGSVGSVICGSLSAFFAYVLSAVLSVYYNPDHEYMIKQIDKYCYLLIGLSSAALVFNTLQHSFWDIVGENLTKRVREKMLSAVLKNEMAWFDQEENESARIAARLALDANNVRSAIGDRISVIVQNTALMLVACTAGFVLQWRLALVLVAVFPVVVAATVLQKMFMTGFSGDLEAAHAKGTQLAGEAIANVRTVAAFNSEAKIVRLYTANLEPPLKRCFWKGQIAGSGYGVAQFCLYASYALGLWYASWLVKHGISDFSKTIRVFMVLMVSANGAAETLTLAPDFIKGGQAMRSVFELLDRKTEIEPDDPDTTPVPDRLRGEVELKHIDFSYPSRPDIQIFRDLSLRARAGKTLALVGPSGCGKSSVISLIQRFYEPSSGRVMIDGKDIRKYNLKAIRKHIAIVPQEPCLFGTTIYENIAYGHECATEAEIIQAATLASAHKFISALPEGYKTYVGERGVQLSGGQKQRIAIARALVRKAEIMLLDEATSALDAESERSVQEALDQACSGRTSIVVAHRLSTIRNAHVIAVIDDGKVAEQGSHSHLLKNHPDGIYARMIQLQRFTHTQVIGMTSGSSSRVKEDDA

SEQ ID NO: 99172 - protein, 1205 aa, Arabidopsis thaliana
  peptide (1)..(1205): Ceres Seq. ID no. 13602338
MMEEVLKYALYFLVVGAAIWASSWAEISCWMWSGERQTTKMRIKYLEAALNQDIQFFDTEVRTSDVVFAINTDAVMVQDAISEKLGNFIHYMATFVSGFIVGFTAVWQLALVTLAVVPLIAVIGGIHTTTLSKLSNKSQESLSQAGNIVEQTVVQIRVVMAFVGESRASQAYSSALKIAQKLGYKTGLAKGMGLGATYFVVFCCYALLLWYGGYLVRHHLTNGGLAIATMFAVMIGGLALGQSAPSMAAFAKAKVAAAKIFRIIDHKPTIERNSESGVELDSVTGLVELKNVDFSYPSRPDVKILNNFCLSVPAGKTIALVGSSGSGKSTVVSLIERFYDPNSGQVLLDGQDLKTLKLRWLRQQIGLVSQEPALFATSIKENILLGRPDADQVEIEEAARVANAHSFIIKLPDGFDTQVGERGLQLSGGQKQRIAIARAMLKNPAILLLDEATSALDSESEKLVQEALDRFMIGRTTLIIAHRLSTIRKADLVAVLQQGSVSEIGTHDELFSKGENGVYAKLIKMQEAAHETAMSNARKSSARPSSARNSVSSPIMTRNSSYGRSPYSRRLSDFSTSDFSLSIDASSYPNYRNEKLAFKDQANSFWRLAKMNSPEWKYALLGSVGSVICGSLSAFFAYVLSAVLSVYYNPDHEYMIKQIDKYCYLLIGLSSAALVFNTLQHSFWDIVGENLTKRVREKMLSAVLKNEMAWFDQEENESARIAARLALDANNVRSAIGDRISVIVQNTALMLVACTAGFVLQWRLALVLVAVFPVVVAATVLQKMFMTGFSGDLEAAHAKGTQLAGEAIANVRTVAAFNSEAKIVRLYTANLEPPLKRCFWKGQIAGSGYGVAQFCLYASYALGLWYASWLVKHGISDFSKTIRVFMVLMVSANGAAETLTLAPDFIKGGQAMRSVFELLDRKTEIEPDDPDTTPVPDRLRGEVELKHIDFSYPSRPDIQIFRDLSLRARAGKTLALVGPSGCGKSSVISLIQRFYEPSSGRVMIDGKDIRKYNLKAIRKHIAIVPQEPCLFGTTIYENIAYGHECATEAEIIQAATLASAHKFISALPEGYKTYVGERGVQLSGGQKQRIAIARALVRKAEIMLLDEATSALDAESERSVQEALDQACSGRTSIVVAHRLSTIRNAHVIAVIDDGKVAEQGSHSHLLKNHPDGIYARMIQLQRFTHTQVIGMTSGSSSRVKEDDA

SEQ ID NO: 99173 - DNA, 1340 bp, Arabidopsis thaliana
  misc_feature (1)..(1340): Ceres Seq. ID no. 13602339
  misc_feature (1)..(1340): Ortholog of  Ceres SEQ ID NO 14310483 as cited in SEQ ID NO 58376
  misc_feature (1)..(1340): Ortholog of  Ceres SEQ ID NO 13654451 as cited in SEQ ID NO 67881
gttcaaacaattcttcgtcctattaaatacaaaaaataaaaatccttaaaaatatatccttatcttcaaccaagaatgggagaggtccaagaaggtcccaaagttgaacaagagaagaagccggctgccaccgtagtcccagttgagactactgacggcaagccaaagagcggcggaggagattccgcggcagcagcagcaccaccggtcgccgcggttgtctctgcctttgtttacaaagtggatatgcactgtgaaggctgcgctaagaagataaagcgaatggttaagcactttgatggagtgaaagatgtgacggcagatactggtggaaataagcttttggtggtcggaaagattgatccagtgaaactccaggagaagttggaggagaaaaccaagagaaaggtggttctcgcgaatccaccgccaaaggtagagggacctgttgctgccgccgttggagagaagaaagccgatggtggagataaggaggcggctcctcctgctcctgctccggcagctccaaaagagagcgtggtgcctttaaagatcagactacattgcgaaggatgtattcagaaaatcaagaaaataatattgaaaatcaaaggagtcgaaacagtggctattgacggagctaaagacgtggtgacggttaaaggaacgatagacgttaaagaacttgtgcctctactcactaagaagctcaaaagaaccgtcgagcctcttgttcccgccaaaaaagatgacggagccgccgagaataagaagacggaagctgccgctcctgacgcaaagaaagaggctccgtccgccggagttaacgaagcaaagaaggaaggaagtgacggtggagagaagaaaaaagaggttggagacggcggagagaagaagaaagaaggtggtgacggcggagagaaaaagaaagaagccggagacggaggagagaagaagaaagatggcggaggtgtgccggccccggtggcgatggtgaataagatggattattatgggtactcagcttatccaacggctcctatgcattggcaagaaggacacgtgtacggtcagagttattcgatgacaggtcagaattatccagtgggaggtcagagttatccaggttcaggatacaactacgcaagtgagagttacgtgccgtacgcgcagccaaacgtgaacgctcctggaatgttcagcgacgagaatcccaatggttgctctgttatgtaataatggggttaaactgtaaatataagaaactataagggtttaaaacataattgtgggaacacaaaacttatgttaaaattttgaaagtctactttgagccagcg

SEQ ID NO: 99174 - protein, 386 aa, Arabidopsis thaliana
  peptide (1)..(386): Ceres Seq. ID no. 13602340
MGEVQEGPKVEQEKKPAATVVPVETTDGKPKSGGGDSAAAAAPPVAAVVSAFVYKVDMHCEGCAKKIKRMVKHFDGVKDVTADTGGNKLLVVGKIDPVKLQEKLEEKTKRKVVLANPPPKVEGPVAAAVGEKKADGGDKEAAPPAPAPAAPKESVVPLKIRLHCEGCIQKIKKIILKIKGVETVAIDGAKDVVTVKGTIDVKELVPLLTKKLKRTVEPLVPAKKDDGAAENKKTEAAAPDAKKEAPSAGVNEAKKEGSDGGEKKKEVGDGGEKKKEGGDGGEKKKEAGDGGEKKKDGGGVPAPVAMVNKMDYYGYSAYPTAPMHWQEGHVYGQSYSMTGQNYPVGGQSYPGSGYNYASESYVPYAQPNVNAPGMFSDENPNGCSVM

SEQ ID NO: 99175 - protein, 329 aa, Arabidopsis thaliana
  peptide (1)..(329): Ceres Seq. ID no. 13602341
MHCEGCAKKIKRMVKHFDGVKDVTADTGGNKLLVVGKIDPVKLQEKLEEKTKRKVVLANPPPKVEGPVAAAVGEKKADGGDKEAAPPAPAPAAPKESVVPLKIRLHCEGCIQKIKKIILKIKGVETVAIDGAKDVVTVKGTIDVKELVPLLTKKLKRTVEPLVPAKKDDGAAENKKTEAAAPDAKKEAPSAGVNEAKKEGSDGGEKKKEVGDGGEKKKEGGDGGEKKKEAGDGGEKKKDGGGVPAPVAMVNKMDYYGYSAYPTAPMHWQEGHVYGQSYSMTGQNYPVGGQSYPGSGYNYASESYVPYAQPNVNAPGMFSDENPNGCSVM

SEQ ID NO: 99176 - protein, 317 aa, Arabidopsis thaliana
  peptide (1)..(317): Ceres Seq. ID no. 13602342
MVKHFDGVKDVTADTGGNKLLVVGKIDPVKLQEKLEEKTKRKVVLANPPPKVEGPVAAAVGEKKADGGDKEAAPPAPAPAAPKESVVPLKIRLHCEGCIQKIKKIILKIKGVETVAIDGAKDVVTVKGTIDVKELVPLLTKKLKRTVEPLVPAKKDDGAAENKKTEAAAPDAKKEAPSAGVNEAKKEGSDGGEKKKEVGDGGEKKKEGGDGGEKKKEAGDGGEKKKDGGGVPAPVAMVNKMDYYGYSAYPTAPMHWQEGHVYGQSYSMTGQNYPVGGQSYPGSGYNYASESYVPYAQPNVNAPGMFSDENPNGCSVM

SEQ ID NO: 99177 - DNA, 4432 bp, Arabidopsis thaliana
  misc_feature (1)..(4432): Ceres Seq. ID no. 13602347
  misc_feature (1)..(4432): Ortholog of  Ceres SEQ ID NO 14304848 as cited in SEQ ID NO 54575
  misc_feature (1)..(4432): Ortholog of  Ceres SEQ ID NO 12617447 as cited in SEQ ID NO 65185
atgagagttagggttgatgtttgttggacacaacacatcttcttgttctttgtttttggcttgagttttatgtcatttgcactatctctggatggagatgattacagcaaaacagggaacccaaaagctcttgtttcggttacaaaccttatctatactcgacttcagaatctaaagactgttttaaaggctgacgttgatcgagatttaggttattgcatcaagaatttgaagggcgattggaatgaagcatttaattttgataaaaatctggacttcttaagcaattgtgtcaagaaaaatgatggtgacctcacacttagactatgttcagctgcggagataaagttctactttagtagttttgttagaagagatgaagcaacaacggttcatgtaaagcctaacatcaactgcaatttagctaaatgggtttccggatgtgagcctggatggagttgcaatgcagatgatgaaaaaagatttgatctcaacaatggaaaaattcttccatctagaactcgtaaatgtcaaccttgttgtgagggtttcttttgtccacaaggtcttgcttgcatgataccgtgtccgttaggcgcatattgcccgcttgccaagcttaataaaacaacaggattttgtgagccatataactaccaaattcctccgggaaagttgaatcatacatgtggttctgcagatagttgggttgatgctgagagtagtggtgatatgttttgttcaccaggttcatattgcccaacaacgattcgaaaagtcacttgtagtagtggacattactgcagacaaggttctacgtcacagaaaccatgttttaagctcgcaacatgcaatccgaataccgcaaaccaaaatattcatgcctatggagcgatcttaattgcatcactaagtcttctcatgatcatggtttataactgttctgatcaagttctcgccactcgagaaaaaagacaagcaaagtcgagagaagctgcagcgagacatgcaaaagaaacaacacaagctcgagaaaggtggaaaaccgcaaaaggtgttgccaagaaccaaaagatgggattgtctgcacaactatctcaaacattttctcgcatgaaatctgctagaaaggatgccacaccagttaaagcatcgggaaagtcaaaagacaagaaaaaagaaccgagtaatttaaccaagatgatgaaatcaatggaggagaacccgagtaacaacgaaggattcaatgtaggaaccggtagtaaacctgggaagaagccacaagctccaaagggtaaacaactacatacccaaagccagatttttaagtatgcatatggtcagattgagaaggagaaagctatggaacaaaacaacaagaacttgacattctcgggagttatttcaatggctactgacactgagatgaggactagacctgttatagaagtcgcgtttaaggatctaactcttacattgaagggtaaacataagcatatattgagatctgtcaccggaaagatcatgccaggtcgtgtttctgcggtcatgggtccatcaggagctggaaaaactacatttctttctgccttggcaggaaaagcaactggatgtacgaggacgggtctaatccttataaatggtagaaatgactctataaactcgtataagaagatcactggatttgtgccacaagatgatgttgtgcatggcaatcttaccgtcgaagagaaccttcgatttagcgcaagatgcagattaagtgcttatatgtcaaaagcagacaaagttttgatcattgaaagagtgattgaaagcttaggattacaacatgtaagagactcgttggttggtacgatagaaaaaagaggaatctctggaggacaaagaaaacgtgtgaacgttggtgttgaaatggtcatggaaccttctctattgatattagatgaacccactacaggtttagatagtgcatcttcacaattacttcttagagcacttcgacgtgaagcacttgaaggtgttaacatttgtatggtcgtccatcaacccagttatacaatgtacaaaatgttcgatgacatgataatactagcaaaaggtggtcttaccgtgtaccatggatcagtcaaaaaaatagaagaatattttgctgatatcggaatcacggttcccgatcgtgtcaatcctcctgatcattatatagatattcttgaaggcattgtgaaaccagatggtgatataactatagaacaacttcctgtgagatggatgctgcacaatggttaccctgtgcctcacgatatgttgaaattttgtgatggacttccttcctcgtcaactggatcagctcaagaggattccactcataattcttttagtaatgatctatggcaagatgtgaaaactaatgtggagattacaaaagatcagttacaacacaattactcgaattctcatgacaattctaatcgagtaactcctaccgtaggtcgacaatatagatattttgttggaagggttggaaaacaacggcttagagaagcaagactacaagcgttagatttcctaatattattagttgcgggagcttgtttaggaactcttgcgaaggtgaacgacgagacaatcgatacacttggctacacatacaccataatagctgtctctcttttgtgtaagatctcggcattgagatcattctctgtagataaattacaatattggagagaaagtgccgctggaattagcagtttggcacattttatggctaaagacacaatggaccatttaaacacaattatgaaacctttagtgtacttgtccatgttctacttcttcaacaacccgagatctagtttcgaagacaactacattgtactagtatgcttggtctactgtgtaacaggcatggcttacatttttgccatattgtacagtcctagcgccgcacaattgttgtcggtgttagtccccgttgttatgactcttatcgctaatcaagataaagaaagcatggtccttaagtatctcggaagcttttgctaccccaaatggactctcgaagcctttgtcctttccaatgctcaaaggtactctggagtgtgggtggtgactagatgcagttcattgtctcaaaacggatatgatcttagtgattggatattgtgtctcattgttctcgttctcatgggactaatatgccgattcatagcttatttctgcatgggaagcggcgtaactaaaaaacacgacacgatgatgaattcggcgtttcgaaacgttcacatcactgcgtctcgtttgataaaccctaagcccttttcttcttcgattctccattttcttcctctctgttccggcgacgcttctcctcgccgttccaatcctctccggcatagaaactcggtgtctccttcatcttcctttcccttctgttcgacttcttccttttcttctttctacattcctatggcgggaggagatggtcaggtgtctcattcgcttgagaagcagttcgagagtttccgtgttcaattggaagaatctgcagctttgagagagcagattcgtgctgtggttatggagattgagtctgctactaggcttattcaagctaatcttcttctcgttcatcaatcgcgtcctattcctgaggttatcgagaaagctaaggaaaaaatcgttgatttgaagcagtattatggtcggcttgctgaaattcttgaggagtgtcctggacaatactataggtaccatggagactggagaagtgaaacacaggcagtggtctcccagcttgcttttatgcactggctagaaactggaactcttctcgtgcataccgaagctgaagaaaaacttgggttgaacagtttggagtttggattggagacagaagattatctcactggaatttgtttcatgtcaaacgatttgcctaggtacgtggttaatcgagtgacagcaggagactatgactgcccaagaaaggtgatgaatttcctgacagatcttcatgcagcctttcgcatgctcaatctcaggaacgatttcctgcgcaagaaattcgacagtatgaagtacgacctaagaagagtggaagaagtttactatgatgtcaagatccgaggtttgatttccggcggagatcctcctggcgtccaagcagtccaaggccaatcctaaatgtcctcggctctttttaagtttttatgtataactttgtttagctagcatgaaaacgtcaaggagtgttcttctctaaaccaaaaacggcaaggaaaatagagagactgtagtttttaggtgtagtttgcaattactgaaaacggcaagtattccttttgtgggccttgaaagcccacattttagtcacaactttactgttatccgaagtcagcagcttaatagtataacagtagatgttcat

SEQ ID NO: 99178 - protein, 1395 aa, Arabidopsis thaliana
  peptide (1)..(1395): Ceres Seq. ID no. 13602348
MRVRVDVCWTQHIFLFFVFGLSFMSFALSLDGDDYSKTGNPKALVSVTNLIYTRLQNLKTVLKADVDRDLGYCIKNLKGDWNEAFNFDKNLDFLSNCVKKNDGDLTLRLCSAAEIKFYFSSFVRRDEATTVHVKPNINCNLAKWVSGCEPGWSCNADDEKRFDLNNGKILPSRTRKCQPCCEGFFCPQGLACMIPCPLGAYCPLAKLNKTTGFCEPYNYQIPPGKLNHTCGSADSWVDAESSGDMFCSPGSYCPTTIRKVTCSSGHYCRQGSTSQKPCFKLATCNPNTANQNIHAYGAILIASLSLLMIMVYNCSDQVLATREKRQAKSREAAARHAKETTQARERWKTAKGVAKNQKMGLSAQLSQTFSRMKSARKDATPVKASGKSKDKKKEPSNLTKMMKSMEENPSNNEGFNVGTGSKPGKKPQAPKGKQLHTQSQIFKYAYGQIEKEKAMEQNNKNLTFSGVISMATDTEMRTRPVIEVAFKDLTLTLKGKHKHILRSVTGKIMPGRVSAVMGPSGAGKTTFLSALAGKATGCTRTGLILINGRNDSINSYKKITGFVPQDDVVHGNLTVEENLRFSARCRLSAYMSKADKVLIIERVIESLGLQHVRDSLVGTIEKRGISGGQRKRVNVGVEMVMEPSLLILDEPTTGLDSASSQLLLRALRREALEGVNICMVVHQPSYTMYKMFDDMIILAKGGLTVYHGSVKKIEEYFADIGITVPDRVNPPDHYIDILEGIVKPDGDITIEQLPVRWMLHNGYPVPHDMLKFCDGLPSSSTGSAQEDSTHNSFSNDLWQDVKTNVEITKDQLQHNYSNSHDNSNRVTPTVGRQYRYFVGRVGKQRLREARLQALDFLILLVAGACLGTLAKVNDETIDTLGYTYTIIAVSLLCKISALRSFSVDKLQYWRESAAGISSLAHFMAKDTMDHLNTIMKPLVYLSMFYFFNNPRSSFEDNYIVLVCLVYCVTGMAYIFAILYSPSAAQLLSVLVPVVMTLIANQDKESMVLKYLGSFCYPKWTLEAFVLSNAQRYSGVWVVTRCSSLSQNGYDLSDWILCLIVLVLMGLICRFIAYFCMGSGVTKKHDTMMNSAFRNVHITASRLINPKPFSSSILHFLPLCSGDASPRRSNPLRHRNSVSPSSSFPFCSTSSFSSFYIPMAGGDGQVSHSLEKQFESFRVQLEESAALREQIRAVVMEIESATRLIQANLLLVHQSRPIPEVIEKAKEKIVDLKQYYGRLAEILEECPGQYYRYHGDWRSETQAVVSQLAFMHWLETGTLLVHTEAEEKLGLNSLEFGLETEDYLTGICFMSNDLPRYVVNRVTAGDYDCPRKVMNFLTDLHAAFRMLNLRNDFLRKKFDSMKYDLRRVEEVYYDVKIRGLISGGDPPGVQAVQGQS

SEQ ID NO: 99179 - protein, 1372 aa, Arabidopsis thaliana
  peptide (1)..(1372): Ceres Seq. ID no. 13602349
MSFALSLDGDDYSKTGNPKALVSVTNLIYTRLQNLKTVLKADVDRDLGYCIKNLKGDWNEAFNFDKNLDFLSNCVKKNDGDLTLRLCSAAEIKFYFSSFVRRDEATTVHVKPNINCNLAKWVSGCEPGWSCNADDEKRFDLNNGKILPSRTRKCQPCCEGFFCPQGLACMIPCPLGAYCPLAKLNKTTGFCEPYNYQIPPGKLNHTCGSADSWVDAESSGDMFCSPGSYCPTTIRKVTCSSGHYCRQGSTSQKPCFKLATCNPNTANQNIHAYGAILIASLSLLMIMVYNCSDQVLATREKRQAKSREAAARHAKETTQARERWKTAKGVAKNQKMGLSAQLSQTFSRMKSARKDATPVKASGKSKDKKKEPSNLTKMMKSMEENPSNNEGFNVGTGSKPGKKPQAPKGKQLHTQSQIFKYAYGQIEKEKAMEQNNKNLTFSGVISMATDTEMRTRPVIEVAFKDLTLTLKGKHKHILRSVTGKIMPGRVSAVMGPSGAGKTTFLSALAGKATGCTRTGLILINGRNDSINSYKKITGFVPQDDVVHGNLTVEENLRFSARCRLSAYMSKADKVLIIERVIESLGLQHVRDSLVGTIEKRGISGGQRKRVNVGVEMVMEPSLLILDEPTTGLDSASSQLLLRALRREALEGVNICMVVHQPSYTMYKMFDDMIILAKGGLTVYHGSVKKIEEYFADIGITVPDRVNPPDHYIDILEGIVKPDGDITIEQLPVRWMLHNGYPVPHDMLKFCDGLPSSSTGSAQEDSTHNSFSNDLWQDVKTNVEITKDQLQHNYSNSHDNSNRVTPTVGRQYRYFVGRVGKQRLREARLQALDFLILLVAGACLGTLAKVNDETIDTLGYTYTIIAVSLLCKISALRSFSVDKLQYWRESAAGISSLAHFMAKDTMDHLNTIMKPLVYLSMFYFFNNPRSSFEDNYIVLVCLVYCVTGMAYIFAILYSPSAAQLLSVLVPVVMTLIANQDKESMVLKYLGSFCYPKWTLEAFVLSNAQRYSGVWVVTRCSSLSQNGYDLSDWILCLIVLVLMGLICRFIAYFCMGSGVTKKHDTMMNSAFRNVHITASRLINPKPFSSSILHFLPLCSGDASPRRSNPLRHRNSVSPSSSFPFCSTSSFSSFYIPMAGGDGQVSHSLEKQFESFRVQLEESAALREQIRAVVMEIESATRLIQANLLLVHQSRPIPEVIEKAKEKIVDLKQYYGRLAEILEECPGQYYRYHGDWRSETQAVVSQLAFMHWLETGTLLVHTEAEEKLGLNSLEFGLETEDYLTGICFMSNDLPRYVVNRVTAGDYDCPRKVMNFLTDLHAAFRMLNLRNDFLRKKFDSMKYDLRRVEEVYYDVKIRGLISGGDPPGVQAVQGQS

SEQ ID NO: 99180 - protein, 1203 aa, Arabidopsis thaliana
  peptide (1)..(1203): Ceres Seq. ID no. 13602350
MIPCPLGAYCPLAKLNKTTGFCEPYNYQIPPGKLNHTCGSADSWVDAESSGDMFCSPGSYCPTTIRKVTCSSGHYCRQGSTSQKPCFKLATCNPNTANQNIHAYGAILIASLSLLMIMVYNCSDQVLATREKRQAKSREAAARHAKETTQARERWKTAKGVAKNQKMGLSAQLSQTFSRMKSARKDATPVKASGKSKDKKKEPSNLTKMMKSMEENPSNNEGFNVGTGSKPGKKPQAPKGKQLHTQSQIFKYAYGQIEKEKAMEQNNKNLTFSGVISMATDTEMRTRPVIEVAFKDLTLTLKGKHKHILRSVTGKIMPGRVSAVMGPSGAGKTTFLSALAGKATGCTRTGLILINGRNDSINSYKKITGFVPQDDVVHGNLTVEENLRFSARCRLSAYMSKADKVLIIERVIESLGLQHVRDSLVGTIEKRGISGGQRKRVNVGVEMVMEPSLLILDEPTTGLDSASSQLLLRALRREALEGVNICMVVHQPSYTMYKMFDDMIILAKGGLTVYHGSVKKIEEYFADIGITVPDRVNPPDHYIDILEGIVKPDGDITIEQLPVRWMLHNGYPVPHDMLKFCDGLPSSSTGSAQEDSTHNSFSNDLWQDVKTNVEITKDQLQHNYSNSHDNSNRVTPTVGRQYRYFVGRVGKQRLREARLQALDFLILLVAGACLGTLAKVNDETIDTLGYTYTIIAVSLLCKISALRSFSVDKLQYWRESAAGISSLAHFMAKDTMDHLNTIMKPLVYLSMFYFFNNPRSSFEDNYIVLVCLVYCVTGMAYIFAILYSPSAAQLLSVLVPVVMTLIANQDKESMVLKYLGSFCYPKWTLEAFVLSNAQRYSGVWVVTRCSSLSQNGYDLSDWILCLIVLVLMGLICRFIAYFCMGSGVTKKHDTMMNSAFRNVHITASRLINPKPFSSSILHFLPLCSGDASPRRSNPLRHRNSVSPSSSFPFCSTSSFSSFYIPMAGGDGQVSHSLEKQFESFRVQLEESAALREQIRAVVMEIESATRLIQANLLLVHQSRPIPEVIEKAKEKIVDLKQYYGRLAEILEECPGQYYRYHGDWRSETQAVVSQLAFMHWLETGTLLVHTEAEEKLGLNSLEFGLETEDYLTGICFMSNDLPRYVVNRVTAGDYDCPRKVMNFLTDLHAAFRMLNLRNDFLRKKFDSMKYDLRRVEEVYYDVKIRGLISGGDPPGVQAVQGQS

SEQ ID NO: 99181 - DNA, 1768 bp, Arabidopsis thaliana
  misc_feature (1)..(1768): Ceres Seq. ID no. 13602351
  misc_feature (1)..(1768): Ortholog of  Ceres SEQ ID NO 12327642 as cited in SEQ ID NO 20497
acaaaatagaattgatctctcttcttcattctctctcttctcgatctacccaaagtagcgggagcgaatagtaaaacaatgaccgatcaccaccaccaccaccataaccaccacgcgcggctgagccgcctccgtacaacaacacagctcctccgtcaaacaacatcttctttctcttcccaccctctcactttcatcttcctcactttcctcctcttctctttccattctctcgtcgatcattgctctctcctcttaacatctttcgtcgacagtgacccttctcttcgctctctcctctctcgactccctcttaactctcgctcccataccccgacgcgcttcaatcatcaccgacgtgctccgtttcttcagctcacgcgccttggtaccctcgacgacgacttcttctccacagacgaacacgatcctcatcgccgatcgcttcaaggctcttcctttcgttcacccatcaacgccaccactgtattcctctccggatttgagagcatttctggcttctctcgtcctatcatcgataacggacttctccttcctcagatcattcgctccggtgtcgttttgcggcagcttgagaaggaagaccatggcggcgatgaagacgagacggaattggatgaatctgagctcgatcgtgaaagtgagaagaaagataaagactttgagagttttgtggatctgaagatgatttttaaaggattggagctaggacgtagtgacgcagcggctctgttcttcttggtgagctttttatcagctgcgtatggatgggtgattctagggtttacaactgtttactcattggtgttggcgattatgtttgttactgtaatcaacgatttgcttggtaggtttccttcgtttcttggggttgtttggagaggttcaagattggggtttaagagagttacaggatttgttttaatgagatgggcagtgagagatgctttgacacagcttcttggtttatggtacttcggagaggttgaagatcagtactcgtttttcaggctctttgtgaggttaaagctgatgcctttcactgttatgccgccatggattagaggttttgagaaggagatatctggtttcttgttcgcttggtttctacttgatacacttgttggtttgatattagctgttgatgcgtttgttgctattgtggattcgagaaggagaggaagggagatagtgaaggaaggtttatatttgatatctcttttgttgcatcaggctgtgcagctgaagtgtcttgaagcgattctttgtgggtctttcttcagatgggttctgattcgaatggtagggaaaagctttgcttctgtgatccaatctgcgttggaagtttacttcatggcggcttggttagtgttctacttagcagctaagtgtaaagatgcacacgcagatggtaggaggtttgggagaagagaaatggagagcttgatcgatgggctgagatgataatgaattgtggatctgtaggatgagctttttgtttccaaaggagcaaaccttggcttcgatgcttaatgccagtggcgacatctctgtgctactagttgtcatgacttaggttcctttggttttagaattacagttgattgataagaattgctagcaattcgatgtatgtacgcacctaggattacttgggagctgtgaaagagggagaatgatacaactactgtgtataatcatttgcaagattttcctttgtatatatcttgctgcagtttttgatatc

SEQ ID NO: 99182 - protein, 468 aa, Arabidopsis thaliana
  peptide (1)..(468): Ceres Seq. ID no. 13602352
MTDHHHHHHNHHARLSRLRTTTQLLRQTTSSFSSHPLTFIFLTFLLFSFHSLVDHCSLLLTSFVDSDPSLRSLLSRLPLNSRSHTPTRFNHHRRAPFLQLTRLGTLDDDFFSTDEHDPHRRSLQGSSFRSPINATTVFLSGFESISGFSRPIIDNGLLLPQIIRSGVVLRQLEKEDHGGDEDETELDESELDRESEKKDKDFESFVDLKMIFKGLELGRSDAAALFFLVSFLSAAYGWVILGFTTVYSLVLAIMFVTVINDLLGRFPSFLGVVWRGSRLGFKRVTGFVLMRWAVRDALTQLLGLWYFGEVEDQYSFFRLFVRLKLMPFTVMPPWIRGFEKEISGFLFAWFLLDTLVGLILAVDAFVAIVDSRRRGREIVKEGLYLISLLLHQAVQLKCLEAILCGSFFRWVLIRMVGKSFASVIQSALEVYFMAAWLVFYLAAKCKDAHADGRRFGRREMESLIDGLR

SEQ ID NO: 99183 - protein, 259 aa, Arabidopsis thaliana
  peptide (1)..(259): Ceres Seq. ID no. 13602353
MIFKGLELGRSDAAALFFLVSFLSAAYGWVILGFTTVYSLVLAIMFVTVINDLLGRFPSFLGVVWRGSRLGFKRVTGFVLMRWAVRDALTQLLGLWYFGEVEDQYSFFRLFVRLKLMPFTVMPPWIRGFEKEISGFLFAWFLLDTLVGLILAVDAFVAIVDSRRRGREIVKEGLYLISLLLHQAVQLKCLEAILCGSFFRWVLIRMVGKSFASVIQSALEVYFMAAWLVFYLAAKCKDAHADGRRFGRREMESLIDGLR

SEQ ID NO: 99184 - DNA, 1236 bp, Arabidopsis thaliana
  misc_feature (1)..(1236): Ceres Seq. ID no. 13602358
  misc_feature (1)..(1236): Ortholog of  Ceres SEQ ID NO 14308401 as cited in SEQ ID NO 55082
gcgacagagattttctccgaccaatccatgtcggaaaacatggtgaatctaccggattctttgtacgaggactacagtaaactcaagttgacttcaccctccaacgcttcttcatcctcctcagctcctccgcccaggctcagcgtcgtagctcatccaacggtagagatgattatccagtgggtctgtgatattcataaaccgaagtcatacatgtctgattttgcgctgcataatctcgcctatcataggaacgactttgagttcttgccgagtctgttatgggaatctaaaaatactgtgtacatcatgttgcaggaggtttttgaagcctacagacacctcgcaggacacatctcacttcgattgttccctcatccgttgaatccacttcgagtgtacaatgtttttcttttgttccagagcatggcttgtcacccagacacaagccgtcagtttcttagggctaagatgccaaattatttctatcctctgatggacactggtctcattgataaaagtgacgaatgcatgaggcttgctgcgttgggtgtcattgctcatatgttgaaggcgtctgaagatggagctgttaatcgttacctaatggaaagtggtgttgttggtttctgcgttaaacccattgagtttggctctacagaaacaaaaaaagttgctttatacatactcgacaagattatgtcgacggatcaggggctttattactgctgcgtcttggctgatcggttttacgttatcgatgagctccttaagaaggtgctcttctatctttctaacatggtcagacctccttcatccttgttcagccttgttactggttgctacgtcaagctctcccagaactccagggctcgtaacggaataaggcgatacacgcctttcttgctgtttgacggcaccttttccagattatatgctgaggatccagtggctgctaacaatcgaattcagctgcttcagaatctggacaactaaagcaatgaagtactcgagacactgttttcaatgaggcaatgaaaacagaacagcccccacngagtacgggtttagtacgcctacgcgtaaacgctaagtaataatttactaaagacataaaaactctangaaaagtcttatgttgttgttnggtttaatatctttgggatgactctcgttactctttcaacattgttttctctcttttggaatacatttcaatgcactttgccattttcc

SEQ ID NO: 99185 - protein, 331 aa, Arabidopsis thaliana
  peptide (1)..(331): Ceres Seq. ID no. 13602359
ATEIFSDQSMSENMVNLPDSLYEDYSKLKLTSPSNASSSSSAPPPRLSVVAHPTVEMIIQWVCDIHKPKSYMSDFALHNLAYHRNDFEFLPSLLWESKNTVYIMLQEVFEAYRHLAGHISLRLFPHPLNPLRVYNVFLLFQSMACHPDTSRQFLRAKMPNYFYPLMDTGLIDKSDECMRLAALGVIAHMLKASEDGAVNRYLMESGVVGFCVKPIEFGSTETKKVALYILDKIMSTDQGLYYCCVLADRFYVIDELLKKVLFYLSNMVRPPSSLFSLVTGCYVKLSQNSRARNGIRRYTPFLLFDGTFSRLYAEDPVAANNRIQLLQNLDN

SEQ ID NO: 99186 - protein, 322 aa, Arabidopsis thaliana
  peptide (1)..(322): Ceres Seq. ID no. 13602360
MSENMVNLPDSLYEDYSKLKLTSPSNASSSSSAPPPRLSVVAHPTVEMIIQWVCDIHKPKSYMSDFALHNLAYHRNDFEFLPSLLWESKNTVYIMLQEVFEAYRHLAGHISLRLFPHPLNPLRVYNVFLLFQSMACHPDTSRQFLRAKMPNYFYPLMDTGLIDKSDECMRLAALGVIAHMLKASEDGAVNRYLMESGVVGFCVKPIEFGSTETKKVALYILDKIMSTDQGLYYCCVLADRFYVIDELLKKVLFYLSNMVRPPSSLFSLVTGCYVKLSQNSRARNGIRRYTPFLLFDGTFSRLYAEDPVAANNRIQLLQNLDN

SEQ ID NO: 99187 - protein, 318 aa, Arabidopsis thaliana
  peptide (1)..(318): Ceres Seq. ID no. 13602361
MVNLPDSLYEDYSKLKLTSPSNASSSSSAPPPRLSVVAHPTVEMIIQWVCDIHKPKSYMSDFALHNLAYHRNDFEFLPSLLWESKNTVYIMLQEVFEAYRHLAGHISLRLFPHPLNPLRVYNVFLLFQSMACHPDTSRQFLRAKMPNYFYPLMDTGLIDKSDECMRLAALGVIAHMLKASEDGAVNRYLMESGVVGFCVKPIEFGSTETKKVALYILDKIMSTDQGLYYCCVLADRFYVIDELLKKVLFYLSNMVRPPSSLFSLVTGCYVKLSQNSRARNGIRRYTPFLLFDGTFSRLYAEDPVAANNRIQLLQNLDN

SEQ ID NO: 99188 - DNA, 708 bp, Arabidopsis thaliana
  misc_feature (1)..(708): Ceres Seq. ID no. 13602365
  misc_feature (1)..(708): Ortholog of  Ceres SEQ ID NO 13595763 as cited in SEQ ID NO 57864
gttctaaaattaaaacaaatctaaatgttagtatcgtttctgtaatatttattatatcctcttcttcttttttactgattcatcaaatcggggatcggataagcctgactgcttcagggtttaagggttactctcactcacacttccgctggtttcacaagattggatagaagcagccatggcaagtctgataatgactacaccattcccaggttctgtcactgcatgtaagaagacaaataacctgtctgttcagagagcctttaaggtgacttgtatgcagacagagaaaccattagaggagctatacaatgttaaagtggaacggaaagtttcacagaaacggttggaggaactcggggtttcgagatggtcagtttggaagacagggaaatgcaaattgccatgggattggcaggtggatcagttggtttacattgaacaaggagaggttcgagtagttcccgaaggaagcaagaggtatatgcagtttttagctggagatcttgttcggtatccgaaatggttggaagctgatcttttctttaacgctccttatattgagcggtattgtttcaaggcctatggtgatgattgatccaacttagacttttgagtttttagtagagccaagaaactttacacttgttgtgtgttgttgtagcctgatggatctttttgtgataatataagaaaacaagttctctc

SEQ ID NO: 99189 - protein, 139 aa, Arabidopsis thaliana
  peptide (1)..(139): Ceres Seq. ID no. 13602366
MASLIMTTPFPGSVTACKKTNNLSVQRAFKVTCMQTEKPLEELYNVKVERKVSQKRLEELGVSRWSVWKTGKCKLPWDWQVDQLVYIEQGEVRVVPEGSKRYMQFLAGDLVRYPKWLEADLFFNAPYIERYCFKAYGDD

SEQ ID NO: 99190 - protein, 134 aa, Arabidopsis thaliana
  peptide (1)..(134): Ceres Seq. ID no. 13602367
MTTPFPGSVTACKKTNNLSVQRAFKVTCMQTEKPLEELYNVKVERKVSQKRLEELGVSRWSVWKTGKCKLPWDWQVDQLVYIEQGEVRVVPEGSKRYMQFLAGDLVRYPKWLEADLFFNAPYIERYCFKAYGDD

SEQ ID NO: 99191 - protein, 106 aa, Arabidopsis thaliana; identical to SEQ ID NO: 20994
  peptide (1)..(106): Ceres Seq. ID no. 13602368

SEQ ID NO: 99192 - DNA, 798 bp, Arabidopsis thaliana
  misc_feature (1)..(798): Ceres Seq. ID no. 13602383
  misc_feature (1)..(798): Ortholog of  Ceres SEQ ID NO 12610267 as cited in SEQ ID NO 51993
  misc_feature (1)..(798): Ortholog of  Ceres SEQ ID NO 13495070 as cited in SEQ ID NO 53216
  misc_feature (1)..(798): Ortholog of  Ceres SEQ ID NO 13661333 as cited in SEQ ID NO 61620
  misc_feature (1)..(798): Ortholog of  Ceres SEQ ID NO 13596812 as cited in SEQ ID NO 62283
  misc_feature (1)..(798): Ortholog of  Ceres SEQ ID NO 13623021 as cited in SEQ ID NO 0
acagaaaaaagctctccacgcctaaaaaaaaagaaaaaagagacagaagaagaaaaagataaagaagaatcaaactttgtaaccctttagcagcaatggcgatggctttcaagatggcgacgacggggatgcgtgtgacggatgagtgtacgagttcattcatggacatgaaatggaagaaagttcatagatacatcgttttcaagatcgaagagaagtcacgtaaagtcaccgtcgataaagtcggcggcgccggtgaaagctaccacgatctcgaagattctttaccggtggatgattgtcgctacgctgtctttgatttcgactttgtcaccgtcgataactgccgcaagagcaagatcttcttcattgcatggtcaccggaggcatcaaagataagggcaaagatattgtacgcaacgtcgaaagatgggctgaggagagtgttggaagggattcactatgaacttcaagctactgatccgacggagatgggtttcgatattatccaagaccgtgccaaatagattgatcacttaagagaatatgatttgactcactttgtcaataattaacattaattaggtcatcggttaatgtttaattattgctggttagtgcttactcttttttgagtttattatccttgatcagtcttaccggcactatcctttaattatgacgtttgtgttttgattgtgttgttaaaatatttttttgtcggttaagcaaacataaaaagctacgaatttgtcctacgagtaacggatattatacatttatgagagattttatttt

SEQ ID NO: 99193 - protein, 143 aa, Arabidopsis thaliana; identical to SEQ ID NO: 36262
  peptide (1)..(143): Ceres Seq. ID no. 13602384

SEQ ID NO: 99194 - protein, 141 aa, Arabidopsis thaliana; identical to SEQ ID NO: 36263
  peptide (1)..(141): Ceres Seq. ID no. 13602385

SEQ ID NO: 99195 - protein, 137 aa, Arabidopsis thaliana; identical to SEQ ID NO: 36264
  peptide (1)..(137): Ceres Seq. ID no. 13602386

SEQ ID NO: 99196 - DNA, 780 bp, Arabidopsis thaliana
  misc_feature (1)..(780): Ceres Seq. ID no. 13602387
  misc_feature (1)..(780): Ortholog of  Ceres SEQ ID NO 13583898 as cited in SEQ ID NO 63147
aacttcggtttagaaaaaaaaaaggagacgtcgtcgtcttctagcttctgattaagtctgataaattatgcccctaaatctgtaattctccaaggattcggattcgatcgatgaaagcttctcaaattttggcggctgcagcggcgagggttggaccggcgttaaggaagcaagtattaaccttaacggacgaagctgcttctagggttcatcatctcttgcaacagcgtcaaaaaccttttctccgattaggcgttaaggctcgtggctgcaacggcttgtcgtacactctcaattacgccgatgagaaaggtaaatttgacgagttggtagaagagaaaggtgtgaggatccttgttgaaccaaaggccttaatgcatgtgattggaacaaagatggattttgtagatgataaactcagatcagagtttgtgtttatcaatcctaactcacaaggacaatgcgggtgtggtgaatcgtttatgacaacatctacctctagtgctaagcagagtgctagttaacacacagtgatgcgtttacatttgtgattacactcatatattatactgttactggaattggcgttaatgagaaacaaatactttttaataagaattgagttttatgtttgtgcgctactttcaggcattagattggtcactttattgcatatacacattagaagctcatgttgttgcttagagatatttctgaagctatgtatttagtggaacggataatcttgagattaattaatgtattccttatccccaaagt

SEQ ID NO: 99197 - protein, 137 aa, Arabidopsis thaliana
  peptide (1)..(137): Ceres Seq. ID no. 13602388
MKASQILAAAAARVGPALRKQVLTLTDEAASRVHHLLQQRQKPFLRLGVKARGCNGLSYTLNYADEKGKFDELVEEKGVRILVEPKALMHVIGTKMDFVDDKLRSEFVFINPNSQGQCGCGESFMTTSTSSAKQSAS

SEQ ID NO: 99198 - DNA, 807 bp, Arabidopsis thaliana
  misc_feature (1)..(807): Ceres Seq. ID no. 13602389
  misc_feature (1)..(807): Ortholog of  Ceres SEQ ID NO 13598227 as cited in SEQ ID NO 61591
  misc_feature (1)..(807): Ortholog of  Ceres SEQ ID NO 12584790 as cited in SEQ ID NO 62648
agcattcctgtttgcaagagaatcacaaatctttgcttacggttcacgctttaaaaacacaactctcattctccttctcttcacaaaccactcatattttttttcacatacttctttgtagtgctactttccattatatcaaacactcagcaacctgatggcaacgagacggatattgaaagaattgaaggagttgcaaagagaccctcctgtatcatgcagtgcaggtccaacaggagaagatatgttccactggcaagctactataatgggtccgaatgaaagtccttactccggaggtgttttccttgtcaatattcatttccctcctgattatccttttaaacctcccaaggttgtattcagaaccaaagtgtttcacccaaacatcaacagtaatggaaacatatgtttggacattctcaaagaccaatggagccctgcccttaccatttctaaggtgcttctctctatatgctctcttctaacagatccaaaccctgacgaccctctggtgccagagatagctcacatatacaaaactgacaagaccaaatatgaagccatggctcgaagctggacccagaagtatgccttgttttaaagctcacaattcctctttttttcctttttattttggtttggtcttatttgtaataaaaaaagaagaagaagaaattgttataattttaatacaaacatatataatatataaagtagagttttcaaagttgttaactcatatgattgatgagatatcgacatgtattaaatctaattttgttaatatataaaaaatcttctaac

SEQ ID NO: 99199 - protein, 148 aa, Arabidopsis thaliana; identical to SEQ ID NO: 20896
  peptide (1)..(148): Ceres Seq. ID no. 13602390

SEQ ID NO: 99200 - protein, 119 aa, Arabidopsis thaliana; identical to SEQ ID NO: 20897
  peptide (1)..(119): Ceres Seq. ID no. 13602391

SEQ ID NO: 99201 - protein, 111 aa, Arabidopsis thaliana; identical to SEQ ID NO: 20898
  peptide (1)..(111): Ceres Seq. ID no. 13602392

SEQ ID NO: 99202 - DNA, 1333 bp, Arabidopsis thaliana
  misc_feature (1)..(1333): Ceres Seq. ID no. 13602401
  misc_feature (1)..(1333): Ortholog of  Ceres SEQ ID NO 14303843 as cited in SEQ ID NO 53775
  misc_feature (1)..(1333): Ortholog of  Ceres SEQ ID NO 15179800 as cited in SEQ ID NO 58215
  misc_feature (1)..(1333): Ortholog of  Ceres SEQ ID NO 13654549 as cited in SEQ ID NO 68530
gattgagagcaaagtctcactctcttccttaagctctgagaaacctccgataagcttatcggacaaaaagagaagtagacgccgccatggataggcttttgcaacctccttcttctcactcaattgctccctccaaattccaatcaagaccatctcccttattactccaccgtctccactcaacgaatcttagtacttttccctcctctcgccgtctcgagtcacgccgaatcagctccatttcctgcttcttccgtcagaatccatcgccggatacatctccaggattgaatcagagtagtaatttcttgattgcttcttctcaaaccgatgcgtcgaaacctaatccaggatttatccaacggatcgtgagcagttttgagcaacgcaagaccatatcggcaggaatggttatattagtctctgctatagctgcgcttttgcttaatcccattcttgtgccgcctgctttcgctagctttcaaacggctactaattctggtggagctgctgtggttggtggaaaactcctcaggactgaagtattgacaagtgcttggactggtttctttgctggttgcttacacacgttatctggacctgatcaccttgctgctttggctccactttcgattggacggacgagaatggagagtgctgcggttggagctctttggggatgtggtcatgacgctggtcagctcatctttggtttattgtttctgcttctaaaagataggctccacattgaagttataagaacttggggtacaagagttgttggtttgactctccttgtgattggtgctatgggaatcaaagaagcttctgagatgccggaaccatgtgttgttactttggagaatggggaaacagatgagaaaagcttaaagaagaaaaagatagggtttgcgacatttgcgactgggattgttcatggcctgcaaccggatgctctgatgatggtattgcctgcattggctcttccttctcggatagccggtgcttcgtttctcatcatgttcttgattgggacggtgattgcgatgggaagctacacagtttttattgggtcgtgtagcgaagcgttgaaagagaaagttcctaggatcactgagaaactaacgtgggcatcttctcttgtggccattggacttggattggcaattattgtcagccagttctttggattcagcctgtattgaagaaaacatcgtcaagtctttgtagctctctctgtaggataagattttttgcatgtaccaacaaaatttgtatctttgcttcagaatctttttcttcaatcaaatacaagtttgagtttggctccccc

SEQ ID NO: 99203 - protein, 372 aa, Arabidopsis thaliana
  peptide (1)..(372): Ceres Seq. ID no. 13602402
MDRLLQPPSSHSIAPSKFQSRPSPLLLHRLHSTNLSTFPSSRRLESRRISSISCFFRQNPSPDTSPGLNQSSNFLIASSQTDASKPNPGFIQRIVSSFEQRKTISAGMVILVSAIAALLLNPILVPPAFASFQTATNSGGAAVVGGKLLRTEVLTSAWTGFFAGCLHTLSGPDHLAALAPLSIGRTRMESAAVGALWGCGHDAGQLIFGLLFLLLKDRLHIEVIRTWGTRVVGLTLLVIGAMGIKEASEMPEPCVVTLENGETDEKSLKKKKIGFATFATGIVHGLQPDALMMVLPALALPSRIAGASFLIMFLIGTVIAMGSYTVFIGSCSEALKEKVPRITEKLTWASSLVAIGLGLAIIVSQFFGFSLY

SEQ ID NO: 99204 - protein, 265 aa, Arabidopsis thaliana; identical to SEQ ID NO: 35535
  peptide (1)..(265): Ceres Seq. ID no. 13602403

SEQ ID NO: 99205 - DNA, 1156 bp, Arabidopsis thaliana
  misc_feature (1)..(1156): Ceres Seq. ID no. 13602404
  misc_feature (1)..(1156): Ortholog of  Ceres SEQ ID NO 15168549 as cited in SEQ ID NO 56976
  misc_feature (1)..(1156): Ortholog of  Ceres SEQ ID NO 14314335 as cited in SEQ ID NO 57305
ataactagagagagaaactaatctttttagtgagagagaaatcttagagctgagctaagaaaaatgtcaaaagaagtgagtgaagaaggaagacatggcaaagactacgtggatccacctccagctccacttctagacatggctgagcttaagctctggtctttttacagagctatcatcgcagagttcatcgccactctcctcttcctctatgtaaccgtagctacagtcattggccacaagaaccaaaccggtccttgtggcggtgttggtttactcggcattgcgtgggcctttggtggcatgatctttgtcctcgtctattgcaccgccggtatctccggaggtcacattaacccagctgtgacatttggtctgttcttggctcgtaaagtgtcgctccctagagcagttgcttacatggtggctcagtgtcttggagccatttgtggagttggactcgttaaggcctttatgatgactccatataaacgtctcggaggcggagctaacaccgtagctgatggttatagcaccggaactgctcttggtgctgagattattggcacatttgtcttggtttacactgtcttctccgccactgaccccaaaagaagtgcccgtgactctcacgtcccggttttggctccgttacctatagggtttgctgtgttcatggtgcatttggctactatccccataactggaactgggattaatccagccagaagctttggtgctgctgttatctacaacaatgagaaagcttgggacgaccattggatcttttgggttggaccattcgtgggagcattagcagcagcagcataccatcaatatatcttgagagctgcagcaatcaaagctttggcttcattccgcagcaacccaaccaattgatgattcatgagacttcttagaacaatttgagatctttttttttgtgtgcttaatgagagatatttgtgtgttttaatttgatgtaatcggatttattcattttcatagtttaatttggtttaattcatctttgtccgttgctttctttcatgtagggcatcttatgattcacttttatactttagtacgaattaaaacatttgttacaagtttatatgaacccacatgcatgttcgtataaaacattccttggtgt

SEQ ID NO: 99206 - protein, 278 aa, Arabidopsis thaliana
  peptide (1)..(278): Ceres Seq. ID no. 13602405
MSKEVSEEGRHGKDYVDPPPAPLLDMAELKLWSFYRAIIAEFIATLLFLYVTVATVIGHKNQTGPCGGVGLLGIAWAFGGMIFVLVYCTAGISGGHINPAVTFGLFLARKVSLPRAVAYMVAQCLGAICGVGLVKAFMMTPYKRLGGGANTVADGYSTGTALGAEIIGTFVLVYTVFSATDPKRSARDSHVPVLAPLPIGFAVFMVHLATIPITGTGINPARSFGAAVIYNNEKAWDDHWIFWVGPFVGALAAAAYHQYILRAAAIKALASFRSNPTN

SEQ ID NO: 99207 - protein, 253 aa, Arabidopsis thaliana
  peptide (1)..(253): Ceres Seq. ID no. 13602406
MAELKLWSFYRAIIAEFIATLLFLYVTVATVIGHKNQTGPCGGVGLLGIAWAFGGMIFVLVYCTAGISGGHINPAVTFGLFLARKVSLPRAVAYMVAQCLGAICGVGLVKAFMMTPYKRLGGGANTVADGYSTGTALGAEIIGTFVLVYTVFSATDPKRSARDSHVPVLAPLPIGFAVFMVHLATIPITGTGINPARSFGAAVIYNNEKAWDDHWIFWVGPFVGALAAAAYHQYILRAAAIKALASFRSNPTN

SEQ ID NO: 99208 - protein, 198 aa, Arabidopsis thaliana; identical to SEQ ID NO: 23386
  peptide (1)..(198): Ceres Seq. ID no. 13602407

SEQ ID NO: 99209 - DNA, 1334 bp, Arabidopsis thaliana
  misc_feature (1)..(1334): Ceres Seq. ID no. 13602415
  misc_feature (1)..(1334): Ortholog of  Ceres SEQ ID NO 13596189 as cited in SEQ ID NO 68452
attaggttaggtggtcacgtttgttcatctctctcttatatatttgtttaaaggcttcgtctttgttcatttgcttttgttgatctcattacttgttcatcaatggcaagtctttgtttccaatctccttccaaacccatttcctatttccaacccaaatccaatccatcgccaccgttattcgccaaagtctccgtctttcgatgcagagcttccgtacaaaccctcgtcgccgttgagccggagccagttttcgtctccgtcaagacttttgcgccagccaccgtcgctaatttgggaccagggtttgatttcttaggatgtgccgtcgatggtctcggagaccatgtgactctccgtgtagatccctctgtacgagccggtgaggtctcaatctcggagatcaccggaaccacaacaaaactcagcacgaaccctctccggaactgcgccggaatcgctgctattgctacgatgaagatgttagggatcagatcggttggtttatcattagatttgcataaaggtcttcctttaggtagcggtttaggttctagtgcagctagtgccgccgcagctgctgtggcggttaatgagatctttggccggaaattagggagtgatcaattggtattagccggtttagaatcggaagcgaaagtctccggttatcacgctgataatatcgcaccagcgatcatgggtggattcgttttgattagaaactacgaaccacttgatttgaaaccattgaggttcccatctgataaagatctcttctttgttctagtaagccctgactttgaagctccaactaagaaaatgagagctgcattgcctacagagattccaatggttcatcatgtttggaacagtagccaagcagctgctttagtcgctgctgtgttagaaggtgacgcagtgatgcttgggaaggcattgtcgtcggataagattgtggagccgactagagcgccgttgattccgggaatggaagctgtgaagaaggcggctttagaagctggagcatttggatgtactattagcggagctggaccaacagcggttgcggtgattgattcggaggagaagggtcaagtcattggagagaagatggtggaagcgttttggaaagttggtcatttgaaatctgttgcttctgtgaagaagcttgataatgttggtgctaggcttgtcaacagcgtctccagatgatctttgtgtgctgtttgattatgttaagattggaactgtttgattatgttaagattggaaccaatcttgctctgtactgtaatttctagatgataataaagttctttgttttctacacc

SEQ ID NO: 99210 - protein, 370 aa, Arabidopsis thaliana; identical to SEQ ID NO: 26642
  peptide (1)..(370): Ceres Seq. ID no. 13602416

SEQ ID NO: 99211 - protein, 246 aa, Arabidopsis thaliana; identical to SEQ ID NO: 26643
  peptide (1)..(246): Ceres Seq. ID no. 13602417

SEQ ID NO: 99212 - protein, 244 aa, Arabidopsis thaliana; identical to SEQ ID NO: 26644
  peptide (1)..(244): Ceres Seq. ID no. 13602418

SEQ ID NO: 99213 - DNA, 1189 bp, Arabidopsis thaliana
  misc_feature (1)..(1189): Ceres Seq. ID no. 13602419
  misc_feature (1)..(1189): Ortholog of  Ceres SEQ ID NO 12612470 as cited in SEQ ID NO 55136
  misc_feature (1)..(1189): Ortholog of  Ceres SEQ ID NO 12612425 as cited in SEQ ID NO 56789
  misc_feature (1)..(1189): Ortholog of  Ceres SEQ ID NO 13503512 as cited in SEQ ID NO 65121
acccgacccggatctattagacactcgttcttcgtcgttatcaattcggagatgattccgtttcctctgttaccaacgccgattgaaaccaactacagagcttgcaccattccttatagattcccttccgataatctcaagaaagccactcctactgaaatctcctggatcaacgtcttcgccaattccattccttctttcaagaaacgtgcagagagcgataccagtgttccagatgctcctgctagagctaaaatttttgaacaaagatatgcgggatttcttgaaggctggaagaaagatccagagagtaatggtgggccaccagatggtgttattctcggccgagttcgtgagcatttactcagagagttaggatttagggacatattcaagaaagtcaaggatgaggagaatgcaaaggctatatcactatttcctgaagttgtcagtctgagtgatgctattgaagatgacggagaacggttagagaatttggtgagagggatatttgctggaaacatctttgatcttggttctgcacagcttgctgaggttttctcaagggatggcatatctttcttggctacctctcaaaacttggttccacgaccatgggtcatcgatgacttgaacaagttccaagccaaatgggtcaagaagccttggaagaaggcagtgatttttgttgataattctggtgcagacataattttgggtattttgcctttcgcaagagagttgctccgtcgaggaattcaggtggtgctagctgctaacgagctgccagctatcaacgatgtaacatatactgagcttacagatatcgtgtcgcagttaaaggatggaaatggccaattgataggcgttgatacttcaaagcttctgattgcaaattcagggaacgatttagcggttattgatctctcaagagtatcgcacgagcttgcttacctttcatctgatgcagacttagtcatcctagaaggcatgggtcgcgggatcgagacaaacctttatgctcagttcaagtgtgattctctcaagatcggaatggtgaagcacgttgaagtagcacagtttctcggaggacgactttacgactgtgtctttaaattcaatgaagttcagagttaattacatttcaatgatattgtactgaatcatccattcgatatatcattttatc

SEQ ID NO: 99214 - protein, 378 aa, Arabidopsis thaliana
  peptide (1)..(378): Ceres Seq. ID no. 13602420
TRPGSIRHSFFVVINSEMIPFPLLPTPIETNYRACTIPYRFPSDNLKKATPTEISWINVFANSIPSFKKRAESDTSVPDAPARAKIFEQRYAGFLEGWKKDPESNGGPPDGVILGRVREHLLRELGFRDIFKKVKDEENAKAISLFPEVVSLSDAIEDDGERLENLVRGIFAGNIFDLGSAQLAEVFSRDGISFLATSQNLVPRPWVIDDLNKFQAKWVKKPWKKAVIFVDNSGADIILGILPFARELLRRGIQVVLAANELPAINDVTYTELTDIVSQLKDGNGQLIGVDTSKLLIANSGNDLAVIDLSRVSHELAYLSSDADLVILEGMGRGIETNLYAQFKCDSLKIGMVKHVEVAQFLGGRLYDCVFKFNEVQS

SEQ ID NO: 99215 - protein, 361 aa, Arabidopsis thaliana
  peptide (1)..(361): Ceres Seq. ID no. 13602421
MIPFPLLPTPIETNYRACTIPYRFPSDNLKKATPTEISWINVFANSIPSFKKRAESDTSVPDAPARAKIFEQRYAGFLEGWKKDPESNGGPPDGVILGRVREHLLRELGFRDIFKKVKDEENAKAISLFPEVVSLSDAIEDDGERLENLVRGIFAGNIFDLGSAQLAEVFSRDGISFLATSQNLVPRPWVIDDLNKFQAKWVKKPWKKAVIFVDNSGADIILGILPFARELLRRGIQVVLAANELPAINDVTYTELTDIVSQLKDGNGQLIGVDTSKLLIANSGNDLAVIDLSRVSHELAYLSSDADLVILEGMGRGIETNLYAQFKCDSLKIGMVKHVEVAQFLGGRLYDCVFKFNEVQS

SEQ ID NO: 99216 - DNA, 1332 bp, Arabidopsis thaliana
  misc_feature (1)..(1332): Ceres Seq. ID no. 13602422
  misc_feature (1)..(1332): Ortholog of  Ceres SEQ ID NO 12612470 as cited in SEQ ID NO 55136
  misc_feature (1)..(1332): Ortholog of  Ceres SEQ ID NO 12612425 as cited in SEQ ID NO 56789
  misc_feature (1)..(1332): Ortholog of  Ceres SEQ ID NO 13503512 as cited in SEQ ID NO 65121
ctgaagatcatcacaagcaaagaaaatggagagcgattcagagatggttccgtttcctcaactaccgatgccaatagaaaacaactacagagcttgcacaattccttacagatttccttctgatgatcccaagaaagccactccaaatgaaatctcgtggatcaacgtcttcgccaattccattccttctttcaagaaacgtgcagagagcgatatcactgttccagatgctcctgctagagctgaaaaatttgcagaaagatatgctgggattcttgaagacttgaagaaagatccagagagtcatggcggaccaccagatggcattcttctatgccgacttcgtgagcaagtactcagagagttaggatttagggacatattcaagaaagttaaggatgaggagaatgcaaaggctatatcactatttcctcaagttgtcagtctgagtgatgctattgaagatgacggaaaacggttagagaatttggtgagagggatatttgctggaaacatctttgatcttggttctgcacagcttgctgaagttttctcaagggatggtatgtctttcttggctagctgtcaaaacttggttccacgaccatgggtcattgatgacttggaaaacttccaagccaaatggatcaataagtcttggaagaaggcagtgatttttgttgataattctggtgcagacataattttgggtattttgccgtttgcaagagagttgctccgtcgaggagctcaggtggtgctggctgctaatgagctgccatctatcaatgacataacatgtaccgagcttacagaaatcttgtcacagttgaaggatgaaaatggccaattgctaggtgttgatacttcgaagcttctgattgcaaattcggggaatgacttaccagttatcgatctctcaagagtatcacaggagcttgcttacctttcatctgatgccgacttagtcatcgtagaaggcatgggtcgtggaattgagacaaacctttatgctcagttcaagtgtgattctctcaagattggaatggtgaagcatcttgaagtagcagagtttctcggaggacggctctatgactgtgtcttcaaattcaatgaagttcagagctaattagtatttcagtactctccagtctcacttctctcttactgtcatttttaattcaaaacatagggtacaaaaagtaatatttttccatcttgatatggtaaatcaatttgaaacaaaaatatttattcgtttgtgatggactgatggataaaatggaaaccataactaaaccaactatatacactctaataaagggacttgtt

SEQ ID NO: 99217 - protein, 367 aa, Arabidopsis thaliana; identical to SEQ ID NO: 26365
  peptide (1)..(367): Ceres Seq. ID no. 13602423

SEQ ID NO: 99218 - protein, 361 aa, Arabidopsis thaliana; identical to SEQ ID NO: 26366
  peptide (1)..(361): Ceres Seq. ID no. 13602424

SEQ ID NO: 99219 - protein, 353 aa, Arabidopsis thaliana
  peptide (1)..(353): Ceres Seq. ID no. 13602425
MPIENNYRACTIPYRFPSDDPKKATPNEISWINVFANSIPSFKKRAESDITVPDAPARAEKFAERYAGILEDLKKDPESHGGPPDGILLCRLREQVLRELGFRDIFKKVKDEENAKAISLFPQVVSLSDAIEDDGKRLENLVRGIFAGNIFDLGSAQLAEVFSRDGMSFLASCQNLVPRPWVIDDLENFQAKWINKSWKKAVIFVDNSGADIILGILPFARELLRRGAQVVLAANELPSINDITCTELTEILSQLKDENGQLLGVDTSKLLIANSGNDLPVIDLSRVSQELAYLSSDADLVIVEGMGRGIETNLYAQFKCDSLKIGMVKHLEVAEFLGGRLYDCVFKFNEVQS

SEQ ID NO: 99220 - DNA, 1847 bp, Arabidopsis thaliana
  misc_feature (1)..(1847): Ceres Seq. ID no. 13602430
  misc_feature (1)..(1847): Ortholog of  Ceres SEQ ID NO 15171040 as cited in SEQ ID NO 55332
ctcttgatcttttagtgttcttgctttgtcgcttcaacgcttaaggtaacactgcttcttctttgatattcgcgattcatcgaacgatttcatcattatagacaaacatcctatcgatcggtttggatttgtgtgagtctgcataatcatggcgaggaagatgcttgttgatggtgagattgataaggtggcggctgatgaagccaacgcgacgcactatgattttgatttgtttgtcatcggtgccgggagtggcggtgttcgtgctgctaggttttcggctaatcatggcgctaaggttggtatttgtgagcttccatttcaccctattagctctgaggagattggaggcgttggtggaacctgtgttatccgtggttgtgttcctaaaaagattctcgtctatggagctacttacggtggtgaacttgaggatgctaaaaattatgggtgggaaataaatgagaaagtcgacttcacatggaagaagcttttgcaaaagaagactgatgagatactaagactgaataatatctacaagcggttattggcaaatgctgcggtgaaattgtatgaaggtgaaggaagagtagttggtcccaacgaagtggaggtgagacaaatagatggcacaaaaataagttataccgcaaagcacatattgattgccactggcagtcgggcgcaaaagcctaatattcctggacatgagctggctattacatctgatgaagctttgagcttggaagaatttcccaagcgtgctatagtgcttggaggagggtatattgctgtggagtttgcatcaatatggcgtggaatgggtgctactgtagatttattcttcaggaaggaacttccgctaaggggttttgatgacgaaatgagggcactagttgctagaaatcttgaaggaaggggcgttaatctgcatccacaaacaagtttgactcagttgacaaaaacagaccaggggatcaaagtcatatcgtcccatggggaggaattcgtggcagatgtcgtcctatttgctactggcagaagtcctaataccaaaagattgaatttagaagctgttggtgttgaacttgatcaggctggagctgtgaaggttgacgagtattcacgaactaatatacctagcatatgggctgtaggagatgccacaaaccgaattaaccttacacctgttgcgttaatggaggccacctgttttgcgaacactgcttttggtggaaagcctactaaagcagaatacagcaatgtcgcctgtgctgtattttgcataccaccactagctgtagtgggtctcagcgaagaagaagcagtagaacaagcaaccggtgatattctggtcttcacctcaggctttaatccaatgaagaacaccatttctggacgccaggaaaagacattgatgaagctaatagttgatgagaagagtgataaggttattggagcatccatgtgcggtcctgatgcagctgagatcatgcaggggattgcaattgcgctcaagtgtggagcaaccaaagcacaatttgatagcacggttgggatacatccatcttctgcagaggaatttgtgacaatgcgcagtgtgaccagacgcattgcccacaaacccaaacctaagacaaatctatgaaccgcaaaatataaagagctatatagcatgaaaactcggtacacttaatttgatcaaagagtcagacaacgatgagtttaatcatactcgtgtcccaataaaggatttgtaatttttgtttgtttgtatgatgcttctcttcttacttacttgagaaaacatcaaggtttcttctcttattgcttagtggaactttatt

SEQ ID NO: 99221 - protein, 499 aa, Arabidopsis thaliana; identical to SEQ ID NO: 24219
  peptide (1)..(499): Ceres Seq. ID no. 13602431

SEQ ID NO: 99222 - protein, 495 aa, Arabidopsis thaliana; identical to SEQ ID NO: 24220
  peptide (1)..(495): Ceres Seq. ID no. 13602432

SEQ ID NO: 99223 - protein, 275 aa, Arabidopsis thaliana; identical to SEQ ID NO: 24221
  peptide (1)..(275): Ceres Seq. ID no. 13602433

SEQ ID NO: 99224 - DNA, 1430 bp, Arabidopsis thaliana
  misc_feature (1)..(1430): Ceres Seq. ID no. 13602438
  misc_feature (1)..(1430): Ortholog of  Ceres SEQ ID NO 13655244 as cited in SEQ ID NO 62716
taaaaagtttgaactttccgtcgaatcaaatgggaagcggaagatatctagacgaccctttaacatttactagaaacccaccttcctcgtcgtctccaatcaccgaatctagctttctcgcagaatcgatctctcgctctggtagcttcgagagtgggagcttacgaggaggcgatggtgattgctttagcgacgtcgatttcgcacttgataaactcgctgggactgtacagttctacgagaggcatgtcttcttgtgctacaaaaaaccatccgtttggcctgcgaggatcgaagcttctgagtttgatcggttaccgaggcttctctcctccgttatatcggcgaggaagagtagtatgaagaaagagactttactcacaatatgtgagggacatgatggttcagagacatcaaatggggatgttctgatatttccagatatgatcagatacagaaggttgactcattttgatgtggacacatttgttgaggaggtgcttgtgaagggtgttgagtggttgcctggaaatcctgaatctcttagtagttcatatgtctttgtatgttgtcatggatctcgagaccggcgatgtggggtttgtggaccttctctagttagtcgattcagagaagaaattgactcgtgtggtcttcgaggtgaagtttcagtcagcccttgttctcacattggtggtcacaaatacactggagatgttatcatctatggattaaatatcaaccagagagtcacaggacactggtatggatgtgtgactctagaggatgttcctcttttgttggagcaacacattaacaaaggcgaaattgtagaccggctttggaggggtgaaatgggtctgccagaagaagatcagaagaaaactcaagaacaaaggttacaattaaacagcgaaaagatcagcaacagagaggtgactcaagaatcagttaataatagtatctgttgccagtctcgagctgtcccagagctgaacggtagtggttgccaacaaaatgggaactcctcttactgtctggaggagattcacacagagaaaaatacctcggagagagtaacctctgtaaaaaatgcatctcttcggataggaagcagcgagaatggatcttctggtggattcaaggtttgtgcggtgatgtcaatgtggttggagacttgggagagagaagatacatatgctgctttagctgttgcttgtgctgctgcatctgtggctattgcttataactgctataaacaattgaaatgaagctatgtgttttatatttagcttctatgcaatggtaattatctcagtctttagattagttgtttcctcttcgtctgtacagagttagaagagggttttaactcttaagtaagaactgcttgttgataacatatgattattatatatccatttgtaagt

SEQ ID NO: 99225 - protein, 422 aa, Arabidopsis thaliana
  peptide (1)..(422): Ceres Seq. ID no. 13602439
KSLNFPSNQMGSGRYLDDPLTFTRNPPSSSSPITESSFLAESISRSGSFESGSLRGGDGDCFSDVDFALDKLAGTVQFYERHVFLCYKKPSVWPARIEASEFDRLPRLLSSVISARKSSMKKETLLTICEGHDGSETSNGDVLIFPDMIRYRRLTHFDVDTFVEEVLVKGVEWLPGNPESLSSSYVFVCCHGSRDRRCGVCGPSLVSRFREEIDSCGLRGEVSVSPCSHIGGHKYTGDVIIYGLNINQRVTGHWYGCVTLEDVPLLLEQHINKGEIVDRLWRGEMGLPEEDQKKTQEQRLQLNSEKISNREVTQESVNNSICCQSRAVPELNGSGCQQNGNSSYCLEEIHTEKNTSERVTSVKNASLRIGSSENGSSGGFKVCAVMSMWLETWEREDTYAALAVACAAASVAIAYNCYKQLK

SEQ ID NO: 99226 - protein, 413 aa, Arabidopsis thaliana
  peptide (1)..(413): Ceres Seq. ID no. 13602440
MGSGRYLDDPLTFTRNPPSSSSPITESSFLAESISRSGSFESGSLRGGDGDCFSDVDFALDKLAGTVQFYERHVFLCYKKPSVWPARIEASEFDRLPRLLSSVISARKSSMKKETLLTICEGHDGSETSNGDVLIFPDMIRYRRLTHFDVDTFVEEVLVKGVEWLPGNPESLSSSYVFVCCHGSRDRRCGVCGPSLVSRFREEIDSCGLRGEVSVSPCSHIGGHKYTGDVIIYGLNINQRVTGHWYGCVTLEDVPLLLEQHINKGEIVDRLWRGEMGLPEEDQKKTQEQRLQLNSEKISNREVTQESVNNSICCQSRAVPELNGSGCQQNGNSSYCLEEIHTEKNTSERVTSVKNASLRIGSSENGSSGGFKVCAVMSMWLETWEREDTYAALAVACAAASVAIAYNCYKQLK

SEQ ID NO: 99227 - protein, 303 aa, Arabidopsis thaliana
  peptide (1)..(303): Ceres Seq. ID no. 13602441
MKKETLLTICEGHDGSETSNGDVLIFPDMIRYRRLTHFDVDTFVEEVLVKGVEWLPGNPESLSSSYVFVCCHGSRDRRCGVCGPSLVSRFREEIDSCGLRGEVSVSPCSHIGGHKYTGDVIIYGLNINQRVTGHWYGCVTLEDVPLLLEQHINKGEIVDRLWRGEMGLPEEDQKKTQEQRLQLNSEKISNREVTQESVNNSICCQSRAVPELNGSGCQQNGNSSYCLEEIHTEKNTSERVTSVKNASLRIGSSENGSSGGFKVCAVMSMWLETWEREDTYAALAVACAAASVAIAYNCYKQLK

SEQ ID NO: 99228 - DNA, 1098 bp, Arabidopsis thaliana
  misc_feature (1)..(1098): Ceres Seq. ID no. 13602446
  misc_feature (1)..(1098): Ortholog of  Ceres SEQ ID NO 15169809 as cited in SEQ ID NO 52839
  misc_feature (1)..(1098): Ortholog of  Ceres SEQ ID NO 15224302 as cited in SEQ ID NO 53942
acaacaaatcgtctccgtcttcctcgctcagcttcaacaaccagagccgacttgagattgagaatcaacgtaatcgatactctcgcaaagtctcatcctttctcagcaaaaaacactaggaaatggttgaaaggcatggagagttttgatttgctgcttaagatatatcatgtcgcagtgcgttgacggtatcaagcatttatgcacctctgttttagggtgttttgatcttgatttgtataaacaatctggtggccttggagatcctgaattgcttgcaagagacactgtttttagtgtgagtgaaatagaagctctttatgagctttttaagaaaatcagcagtgccgtgattgatgatgggctaataaacaaggaagagtttcagttggctttgtttaagacaaataaaaaagagagtttgtttgcagatcgggttttcgatttgtttgatacaaagcacaatggaatactggggtttgaggaatttgctcgtgctctctccgtctttcacccaaatgcgcctatagatgacaaaattcacttttcatttcagctatatgatcttaaacagcaagggtttatcgaacggcaagaggtgaaacaaatggttgtcgctacgcttgctgaatctggaatgaatttgaaggatactgtcattgaggatataatcgacaagacgtttgaggaagcagacacaaaacacgatggaaagatcgataaggaagagtggagaagccttgttcttagacatcccagccttctgaagaacatgactcttcaatatctcaaggatatcacgactacgtttccaagctttgtgttccattctcaggttgaagatacctgaaaaagcaaaagcaaaagcaagcagcggcaagacatcattgtattgttgaaggttgttctttcgttatggttctttatttgttacatttctaaatctctgaactcattttattttttattgagctttttttgtgaagcaaaattcttctttttagtttggtttttgtcctttttgatttcgctcggtctatctgtagatacaacttttgcatcttgatgttatggtaatgtaaagtttttcagtttatt

SEQ ID NO: 99229 - protein, 226 aa, Arabidopsis thaliana; identical to SEQ ID NO: 23899
  peptide (1)..(226): Ceres Seq. ID no. 13602447

SEQ ID NO: 99230 - DNA, 874 bp, Arabidopsis thaliana
  misc_feature (1)..(874): Ceres Seq. ID no. 13602448
  misc_feature (1)..(874): Ortholog of  Ceres SEQ ID NO 15173118 as cited in SEQ ID NO 62952
  misc_feature (1)..(874): Ortholog of  Ceres SEQ ID NO 15180067 as cited in SEQ ID NO 0
acgattagaatatgagtagtgcaacgcaaaataacactgccgtttaagacgacggtcccttgacagaatcttcatcaacgctcgatttgacgtctgccgatttccttagctccgacgtaaaccactgatcgtcggtattcagctatattttgatttctcagctccaaaaattcccaacgaaatggagaaaatggccaaaggatggtttccgatgagcggcactagtagcagcggagatcagcagcagcaaccgctgcaaacaggaggaacgtctctgctagctgattggaattcttacgcagcatcgagagattttgaagaagacaccggaactttaggcttcgatatcgaatccgccgttagatctgccaacgacactgtttccggcacctttaatgttgtttcgaaaggagttagagataacctgcagtctgcaacaagtagtatgccttcaggaaaagctttgatgtatttcggtttacttctagcaagtggtgtattcttcatcttcattgccttcaccatgtttcttccagtcatggtgcttatgccacagaagtttgcaatttgttttacccttggatgtggatttatcatcggatctttcttcgctcttcgtggcccgcaaaatcaactcgctcacatgtcatcggcagagaggcttccactaactttaggtttcattgccaccatggttggcaccatatatgtctcgatggtgctccatagctacattctctctgtgattttctctgcattacaggttattgcactggcgtactactgtatatcatatttccctggtggatcatcgggaatgaagttcctcagttctactcttacctcctctgtcttccgaatgtttgggagatga

SEQ ID NO: 99231 - protein, 230 aa, Arabidopsis thaliana
  peptide (1)..(230): Ceres Seq. ID no. 13602449
MEKMAKGWFPMSGTSSSGDQQQQPLQTGGTSLLADWNSYAASRDFEEDTGTLGFDIESAVRSANDTVSGTFNVVSKGVRDNLQSATSSMPSGKALMYFGLLLASGVFFIFIAFTMFLPVMVLMPQKFAICFTLGCGFIIGSFFALRGPQNQLAHMSSAERLPLTLGFIATMVGTIYVSMVLHSYILSVIFSALQVIALAYYCISYFPGGSSGMKFLSSTLTSSVFRMFGR

SEQ ID NO: 99232 - protein, 227 aa, Arabidopsis thaliana
  peptide (1)..(227): Ceres Seq. ID no. 13602450
MAKGWFPMSGTSSSGDQQQQPLQTGGTSLLADWNSYAASRDFEEDTGTLGFDIESAVRSANDTVSGTFNVVSKGVRDNLQSATSSMPSGKALMYFGLLLASGVFFIFIAFTMFLPVMVLMPQKFAICFTLGCGFIIGSFFALRGPQNQLAHMSSAERLPLTLGFIATMVGTIYVSMVLHSYILSVIFSALQVIALAYYCISYFPGGSSGMKFLSSTLTSSVFRMFGR

SEQ ID NO: 99233 - protein, 220 aa, Arabidopsis thaliana
  peptide (1)..(220): Ceres Seq. ID no. 13602451
MSGTSSSGDQQQQPLQTGGTSLLADWNSYAASRDFEEDTGTLGFDIESAVRSANDTVSGTFNVVSKGVRDNLQSATSSMPSGKALMYFGLLLASGVFFIFIAFTMFLPVMVLMPQKFAICFTLGCGFIIGSFFALRGPQNQLAHMSSAERLPLTLGFIATMVGTIYVSMVLHSYILSVIFSALQVIALAYYCISYFPGGSSGMKFLSSTLTSSVFRMFGR

SEQ ID NO: 99234 - DNA, 1597 bp, Arabidopsis thaliana
  misc_feature (1)..(1597): Ceres Seq. ID no. 13602459
  misc_feature (1)..(1597): Ortholog of  Ceres SEQ ID NO 13587235 as cited in SEQ ID NO 0
aaatcgcgtcaattctcaacccagttttcagatttggtttttggaagctaacttattgttggaggtggagagatatggctgactttggtttgttctgtttcccttgtttaatggaagttgtttcatcatcatcatcatctctgtgattgtaattgatctcacaccatgtctgattacaatggtgatgatcttgaagatgaatatatggctgatgagtatgacatggatgatctcgaggatgatatgaatgccgcgtttgatggaagagatatcgatgcttctgattccgaagtcgaagatttcgatcaattgaacaaggctgcagatacttctgctgctcaagcacggaatgggaaggatattcagggtataccgtgggatagtcttactcttactagaaaagattacagaaaaactaggctagaacaatataaaaactatgaaaatatacccaattctggtgatgaatctgccaagaaatgcatgaatactgagaaaggcagctctttctatgagttcagaaggaattctagatccgtgagatcaacgattctccattttcagttgaggaatttggtctgggctacctcaaaacacgatgtttatttattgtccaactactccatcagccactggtcttctttgacaggttgtaggagtgaaattcttaacgttaaaggtcatgtggctccgtctgagaaacatcccgagagtttgttggaaggatttacagagactcaagttagcactcttgcagtaaaagaaaggctactagttgctggtggattccaaggagaactcatttgcaagcatctcgatagacctggtgtgagcttctgctcacgcacaacttacaccgaaaacgctatcaccaatgcagtagatatatatagaaactccagcggcgcactgcatttcatggcctcaaataatgactgtggagtcagagactttgacatggagagatataagcttgtccaactcttccgttatctatggcccgtcaatcatagttccctaagtcctgatggaaaactagtagcagtcgttggagatgacccagatggtctactggtagacacaagtaacggacagacgatcgggacgctaaaaggtcacttagattattcatttgcatcagcttggcatccaaacggtgtaacatttgccacaggaaaccaagacaagacctgtcgtatttgggacacaaggaaactctcggaatcagtcgctgtcctaaaaggtaaccttggagccgtacggtccattaggttcacatctgacggacggtacgttgccatggccgagccagcagatttcgttcatatctatgacacaaaatcaggatacaaaaaggagcaagagattgatttctttggagagatttctgggatatcgtttagcccagatactgaatctctcttcatcggtgtttgggacaggacttatggaagtctcttggagtatggtcgaaccagagactacacttatctcgattcattactttgatggaaatttaagctaagcctaaagaaaaaaaacttacgtaaaaataatttgttatacgccgtcttggttaggtttcataatcatatcg

SEQ ID NO: 99235 - protein, 447 aa, Arabidopsis thaliana
  peptide (1)..(447): Ceres Seq. ID no. 13602460
MSDYNGDDLEDEYMADEYDMDDLEDDMNAAFDGRDIDASDSEVEDFDQLNKAADTSAAQARNGKDIQGIPWDSLTLTRKDYRKTRLEQYKNYENIPNSGDESAKKCMNTEKGSSFYEFRRNSRSVRSTILHFQLRNLVWATSKHDVYLLSNYSISHWSSLTGCRSEILNVKGHVAPSEKHPESLLEGFTETQVSTLAVKERLLVAGGFQGELICKHLDRPGVSFCSRTTYTENAITNAVDIYRNSSGALHFMASNNDCGVRDFDMERYKLVQLFRYLWPVNHSSLSPDGKLVAVVGDDPDGLLVDTSNGQTIGTLKGHLDYSFASAWHPNGVTFATGNQDKTCRIWDTRKLSESVAVLKGNLGAVRSIRFTSDGRYVAMAEPADFVHIYDTKSGYKKEQEIDFFGEISGISFSPDTESLFIGVWDRTYGSLLEYGRTRDYTYLDSLL

SEQ ID NO: 99236 - protein, 434 aa, Arabidopsis thaliana; identical to SEQ ID NO: 47913
  peptide (1)..(434): Ceres Seq. ID no. 13602461

SEQ ID NO: 99237 - protein, 428 aa, Arabidopsis thaliana
  peptide (1)..(428): Ceres Seq. ID no. 13602462
MDDLEDDMNAAFDGRDIDASDSEVEDFDQLNKAADTSAAQARNGKDIQGIPWDSLTLTRKDYRKTRLEQYKNYENIPNSGDESAKKCMNTEKGSSFYEFRRNSRSVRSTILHFQLRNLVWATSKHDVYLLSNYSISHWSSLTGCRSEILNVKGHVAPSEKHPESLLEGFTETQVSTLAVKERLLVAGGFQGELICKHLDRPGVSFCSRTTYTENAITNAVDIYRNSSGALHFMASNNDCGVRDFDMERYKLVQLFRYLWPVNHSSLSPDGKLVAVVGDDPDGLLVDTSNGQTIGTLKGHLDYSFASAWHPNGVTFATGNQDKTCRIWDTRKLSESVAVLKGNLGAVRSIRFTSDGRYVAMAEPADFVHIYDTKSGYKKEQEIDFFGEISGISFSPDTESLFIGVWDRTYGSLLEYGRTRDYTYLDSLL

SEQ ID NO: 99238 - DNA, 1214 bp, Arabidopsis thaliana
  misc_feature (1)..(1214): Ceres Seq. ID no. 13602463
  misc_feature (1)..(1214): Ortholog of  Ceres SEQ ID NO 13598417 as cited in SEQ ID NO 62576
gaattcatcaaaggagagagagatcgacaatggcaccttcgtcatcaagcggtttaaccttcaagctacatcctttggtaatcgtcaacatatcggatcactacactagggtcaaaactcagctcaatcctcctgcttcaatctgcgcaagcggccatggctcaaacaacggcgaagcaatgttccagcaaaaccctagggtttacggatgtgtgatcggtgtccagagaggtcgtactgttgagatattcaacagtttcgagcttttatatgatccttctactcaaacccttgatagatctttcctcgagaagaagcaagagctctataagaaggtgttccctgatttctatattctgggatggtactctacgggaagtgatgctgaggaatctgatatgcatatccataaagctttgatggatatcaatgaatctcctgtttatgtgcttttaaaccctgctatcaatcacacacagaaggatcttccagtgactatttatgaaagtgaattgcatgtcattgatggaatcccgcagctaattttcgctcatacaagctacacaatcgagacagttgaagctgaacggatatcagttgatcatgttgcacatcttaaaccatctgacggaggctcagcagcaacccagttggctgctcatcttactggtatacatagtgccatcaagatgcttaatagcagaatcagagtgctttaccaaaatcttgctgcaatgcagaaaggtgataaatcttgtgacaactcagttctgagacaagtatctagcctgctaagaagattgcctgccatggaatcagagagatttcaagataatttcttgatggagtacaacgacaaattactaataacttacctagcgatgattacaaattgttccagcaacatgaacgagatggtcgacaaattcaacaccgcatatgacagaaacactcgaagaggtggaagaactgcattcatgtaaaagatcctttccagcgattctagttctaaagatcttctcttggttcctgaaaccatttttaacattgcctctgtgagaatctataactcagacggcaagactttatcctcttcattgtttctatatctataagaacatctgcttatctatcaaagctcttgtttgatcttgaacaagtttctattgttagtaaaaagattttaaggtttgattctatcagtctctctagtt

SEQ ID NO: 99239 - protein, 326 aa, Arabidopsis thaliana
  peptide (1)..(326): Ceres Seq. ID no. 13602464
IHQRRERSTMAPSSSSGLTFKLHPLVIVNISDHYTRVKTQLNPPASICASGHGSNNGEAMFQQNPRVYGCVIGVQRGRTVEIFNSFELLYDPSTQTLDRSFLEKKQELYKKVFPDFYILGWYSTGSDAEESDMHIHKALMDINESPVYVLLNPAINHTQKDLPVTIYESELHVIDGIPQLIFAHTSYTIETVEAERISVDHVAHLKPSDGGSAATQLAAHLTGIHSAIKMLNSRIRVLYQNLAAMQKGDKSCDNSVLRQVSSLLRRLPAMESERFQDNFLMEYNDKLLITYLAMITNCSSNMNEMVDKFNTAYDRNTRRGGRTAFM

SEQ ID NO: 99240 - protein, 317 aa, Arabidopsis thaliana; identical to SEQ ID NO: 42732
  peptide (1)..(317): Ceres Seq. ID no. 13602465

SEQ ID NO: 99241 - protein, 267 aa, Arabidopsis thaliana; identical to SEQ ID NO: 42733
  peptide (1)..(267): Ceres Seq. ID no. 13602466

SEQ ID NO: 99242 - DNA, 1206 bp, Arabidopsis thaliana
  misc_feature (1)..(1206): Ceres Seq. ID no. 13602471
  misc_feature (1)..(1206): Ortholog of  Ceres SEQ ID NO 15172958 as cited in SEQ ID NO 51206
  misc_feature (1)..(1206): Ortholog of  Ceres SEQ ID NO 15171139 as cited in SEQ ID NO 60093
gcacgattaaagagcgtctcgaaaattaacttttataggtaggaggagatagaaatcgaatcttatcgccgcgttaatatgccaccggccggagaactccgacatcaatctccatcaaaggagaaactatcttccgttacccaatccgatgaagcagaagcagcgtcagcagcgatatctgcggcagctgcagatgcggaagctgccggattatggacacagatcaaggcggaagctcgccgtgatgctgaggcggagccagctttagctagctatctatattcgacgattctttctcattcgtctcttgaacgatctatctcgtttcatctaggaaacaagctttgttcctcaacgcttttatccacacttttatacgatctgttcttaaacactttttcctccgatccttctcttcgtaacgccaccgtcgcagatctacgcgctgctcgtgttcgtgatcctgcttgtatctcgttctctcattgtctcctcaattacaaaggcttcttagctattcaggcgcatcgtgtatcacacaagctatggacacaatcacggaagccattagcattagctctacactcaagaatctccgatgtattcgctgttgatatccatccagcagcgaagatcggaaaagggatacttctagaccacgcaaccggagttgtagtcggagaaacagcggtgattgggaacaatgtttcaatccttcaccatgtgacactaggtggaacaggtaaagcttgtggagatagacatccgaagatcggtgacggttgtttgattggagctggagcgactattcttggaaatgtgaagattggtgcaggtgctaaagtaggagctggttctgttgtgctgattgacgtgccttgtcgaggtactgcggttgggaatccggcgagacttgtcggagggaaagagaagccaacgattcatgatgaggaatgtcctggagaatcgatggatcatacttcattcatctcggaatggtcagattacatcatataaagttgttgttataattgtttctgtggttttgaaagtgaaaaactttctgaccattcgcttatagagaggtgctgaggtaagtgagctttgttgtatttgtaatttacaaaacatcttacgatgttcaatacaagaaatggccttaatttgatgttattattcaatcattagttatccaagagtttatac

SEQ ID NO: 99243 - protein, 312 aa, Arabidopsis thaliana; identical to SEQ ID NO: 41266
  peptide (1)..(312): Ceres Seq. ID no. 13602472

SEQ ID NO: 99244 - DNA, 959 bp, Arabidopsis thaliana
  misc_feature (1)..(959): Ceres Seq. ID no. 13602473
  misc_feature (1)..(959): Ortholog of  Ceres SEQ ID NO 13598313 as cited in SEQ ID NO 68293
atcattcatcaacatcatctctctttctctatctcgctgtccctccttctctttctcattcattgcaatgggcagaagatgctcacactgtggaaacgtaggacataactcaagaacatgttcttcttaccaaacaagagtagttaggctctttggtgttcatctagacaccacaagctcttctccgccgcctcctcctcctccctcgattttggccgctgcaataaagaaaagtttcagcatggattgcttgccggcatgttcctcctcttcctcttcctttgctggttatctctccgatggtctcgcccataaaacacctgaccgcaaaaaaggggttccatggacggcggaagagcaccggacgtttctaattggattagaaaagcttggaaaaggagattggagaggaatctctagaaacttcgtcgtcacaaaatccccgacacaagtggcaagtcatgctcaaaaatactttctccggcaaactaccactctccatcacaagagacgccgcaccagcctctttgatatggtttcggccggcaatgttgaagaaaatagtactactaagaggatatgtaatgatcatattgggtcgagctcaaaggttgtttggaaacaaggattactcaatcctcgtcttggatatccagatccgaaagtatcagtatccggctcgggtaactccggtggactcgatcttgagctgaagcttgcgtccattcaatctcctgaatcgaatattagacctattagcgttacgtgaatctatataacacgttatgatcagtttcattagaataattcaaatgtttacatatataatatcttatcgatcctatctaatttgattttgatttaacgttagttactttgataatttcgtcgatattgtttttttggttttttcattgtgagattttttgtcttggaagttggatccatacatatttctg

SEQ ID NO: 99245 - protein, 255 aa, Arabidopsis thaliana
  peptide (1)..(255): Ceres Seq. ID no. 13602474
SFINIISLSLSRCPSFSFSFIAMGRRCSHCGNVGHNSRTCSSYQTRVVRLFGVHLDTTSSSPPPPPPPSILAAAIKKSFSMDCLPACSSSSSSFAGYLSDGLAHKTPDRKKGVPWTAEEHRTFLIGLEKLGKGDWRGISRNFVVTKSPTQVASHAQKYFLRQTTTLHHKRRRTSLFDMVSAGNVEENSTTKRICNDHIGSSSKVVWKQGLLNPRLGYPDPKVSVSGSGNSGGLDLELKLASIQSPESNIRPISVT

SEQ ID NO: 99246 - protein, 233 aa, Arabidopsis thaliana
  peptide (1)..(233): Ceres Seq. ID no. 13602475
MGRRCSHCGNVGHNSRTCSSYQTRVVRLFGVHLDTTSSSPPPPPPPSILAAAIKKSFSMDCLPACSSSSSSFAGYLSDGLAHKTPDRKKGVPWTAEEHRTFLIGLEKLGKGDWRGISRNFVVTKSPTQVASHAQKYFLRQTTTLHHKRRRTSLFDMVSAGNVEENSTTKRICNDHIGSSSKVVWKQGLLNPRLGYPDPKVSVSGSGNSGGLDLELKLASIQSPESNIRPISVT

SEQ ID NO: 99247 - protein, 175 aa, Arabidopsis thaliana
  peptide (1)..(175): Ceres Seq. ID no. 13602476
MDCLPACSSSSSSFAGYLSDGLAHKTPDRKKGVPWTAEEHRTFLIGLEKLGKGDWRGISRNFVVTKSPTQVASHAQKYFLRQTTTLHHKRRRTSLFDMVSAGNVEENSTTKRICNDHIGSSSKVVWKQGLLNPRLGYPDPKVSVSGSGNSGGLDLELKLASIQSPESNIRPISVT

SEQ ID NO: 99248 - DNA, 2559 bp, Arabidopsis thaliana
  misc_feature (1)..(2559): Ceres Seq. ID no. 13602481
  misc_feature (1)..(2559): Ortholog of  Ceres SEQ ID NO 13600595 as cited in SEQ ID NO 629
  misc_feature (1)..(2559): Ortholog of  Ceres SEQ ID NO 13593379 as cited in SEQ ID NO 20573
tatatatataactccaaaacaatcatttaatccaaacccaacatatccttttaacagaatcttctttatctgaaaatatctaaagaaaatggtattgaactttagagataagtcctgcatttttctggcaattctttgttgtttatcattgagttgtatagtaaaagcatcagtctcttatgatcgtaaagctgtgatcatcaatggacaaagaagaatccttctctccggttccattcactatccacgaagcacccctgagatgtggcctggcctaatacagaaagccaaagaaggaggcttggatgttattgagacttatgttttttggaatggccatgaaccttctcctggacaatattattttggagacaggtatgatttggttaagttcatcaagttggtgcaccaagctggtctctatgttaatctcagaattggcccttatgtttgtgctgaatggaattttgggggatttccggtttggctcaaatttgttcccggtatggcttttaggacggataatgaacctttcaaggctgcaatgaagaaattcactgaaaagattgtatggatgatgaaagcagaaaagttgtttcaaactcaaggaggacccatcattcttgcacagattgagaatgaatatggaccagtggaatgggaaataggagcaccgggaaaggcttatacaaaatgggtagctcaaatggcattaggactctcaactggtgttccatggattatgtgcaagcaagaagatgctcctggtcctatcatagacacatgcaatggttattactgtgaagatttcaaaccgaactcaatcaacaagccaaagatgtggacagagaattggactggttggtacacagattttggaggtgcggtaccatacagaccagtcgaagatattgcatactccgttgcacgatttatccaaaaaggaggttccctcgtcaattactatatgtatcatggaggaacaaatttcgacagaacagccggtgagttcatggcttcaagctatgactatgacgctcctctcgatgaatacggcttaccaagagaaccaaagtatagtcacttgaaagcattgcataaagccatcaaacttagtgagccagctttgctttctgctgatgctaccgttacatcgcttggagctaagcaagaagcttatgtgttctggtctaaatcatcttgtgctgcgtttttatcgaacaaagatgagaactctgcagcgagagttctgttccgtggattcccatatgatttgcctccttggtcagtcagtattttacctgattgcaaaacagaggtttacaacactgcaaaggtcaatgcaccaagcgtacacaggaatatggttcctactggtactaaattctcttggggatcattcaacgaagcgactcctacagcgaatgaagctggtacgtttgcaagaaacgggcttgtggaacaaataagcatgacttgggacaaatctgactatttttggtatataacagacattacaatcggttccggtgagacatttttgaagactggtgattcacctcttcttacagttatgtcagctggacatgctcttcatgtgtttgtcaatggtcagctttcaggaactgcttatggaggacttgaccacccaaaactaacctttagccagaagatcaaactacatgcaggtgtcaacaagattgctcttctgagtgttgcagtgggtctcccgaacgttggtacacattttgaacagtggaataaaggagttcttggtccggtcacattgaagggagtaaactcaggaacatgggacatgtcgaaatggaaatggtcctataagattggtgtaaagggtgaggctttgagtcttcataccaacacagagagttccggtgtgagatggactcaaggatcatttgtggcgaagaagcaaccattaacctggtacaagtctacgtttgctacaccagcaggaaatgaaccattggctttagacatgaacacaatgggaaaaggtcaagtttggataaacggtagaaatattggacgtcattggcctgcatataaagctcaaggatcttgtggacgttgtaactacgctggaactttcgacgcaaagaaatgcttaagtaattgtggtgaagcttcacaaagatggtaccatgtacctcgttcatggcttaagtctcaaaaccttatagttgtgttcgaagagttaggtggtgatcctaacggaatctctttggttaaaagaacatgaaaagcttcttctgattccgagttttcaggacagaagcaagctgtttgattcgtttgtctatatctttctctggctttgctttgaagatagagacagagctggaattttttttcttttatggctttgtgcagtgattacaaaaattatacaacatgtatatgtataactgtatcctactactagtcatcatctatggctaaataaaattcacagaataaaggagtgtttctatttaccataacattttcgtttgttcaagcaaataactgtttcaatcatctcttgaagttggaacc

SEQ ID NO: 99249 - protein, 724 aa, Arabidopsis thaliana
  peptide (1)..(724): Ceres Seq. ID no. 13602482
MVLNFRDKSCIFLAILCCLSLSCIVKASVSYDRKAVIINGQRRILLSGSIHYPRSTPEMWPGLIQKAKEGGLDVIETYVFWNGHEPSPGQYYFGDRYDLVKFIKLVHQAGLYVNLRIGPYVCAEWNFGGFPVWLKFVPGMAFRTDNEPFKAAMKKFTEKIVWMMKAEKLFQTQGGPIILAQIENEYGPVEWEIGAPGKAYTKWVAQMALGLSTGVPWIMCKQEDAPGPIIDTCNGYYCEDFKPNSINKPKMWTENWTGWYTDFGGAVPYRPVEDIAYSVARFIQKGGSLVNYYMYHGGTNFDRTAGEFMASSYDYDAPLDEYGLPREPKYSHLKALHKAIKLSEPALLSADATVTSLGAKQEAYVFWSKSSCAAFLSNKDENSAARVLFRGFPYDLPPWSVSILPDCKTEVYNTAKVNAPSVHRNMVPTGTKFSWGSFNEATPTANEAGTFARNGLVEQISMTWDKSDYFWYITDITIGSGETFLKTGDSPLLTVMSAGHALHVFVNGQLSGTAYGGLDHPKLTFSQKIKLHAGVNKIALLSVAVGLPNVGTHFEQWNKGVLGPVTLKGVNSGTWDMSKWKWSYKIGVKGEALSLHTNTESSGVRWTQGSFVAKKQPLTWYKSTFATPAGNEPLALDMNTMGKGQVWINGRNIGRHWPAYKAQGSCGRCNYAGTFDAKKCLSNCGEASQRWYHVPRSWLKSQNLIVVFEELGGDPNGISLVKRT

SEQ ID NO: 99250 - protein, 666 aa, Arabidopsis thaliana
  peptide (1)..(666): Ceres Seq. ID no. 13602483
MWPGLIQKAKEGGLDVIETYVFWNGHEPSPGQYYFGDRYDLVKFIKLVHQAGLYVNLRIGPYVCAEWNFGGFPVWLKFVPGMAFRTDNEPFKAAMKKFTEKIVWMMKAEKLFQTQGGPIILAQIENEYGPVEWEIGAPGKAYTKWVAQMALGLSTGVPWIMCKQEDAPGPIIDTCNGYYCEDFKPNSINKPKMWTENWTGWYTDFGGAVPYRPVEDIAYSVARFIQKGGSLVNYYMYHGGTNFDRTAGEFMASSYDYDAPLDEYGLPREPKYSHLKALHKAIKLSEPALLSADATVTSLGAKQEAYVFWSKSSCAAFLSNKDENSAARVLFRGFPYDLPPWSVSILPDCKTEVYNTAKVNAPSVHRNMVPTGTKFSWGSFNEATPTANEAGTFARNGLVEQISMTWDKSDYFWYITDITIGSGETFLKTGDSPLLTVMSAGHALHVFVNGQLSGTAYGGLDHPKLTFSQKIKLHAGVNKIALLSVAVGLPNVGTHFEQWNKGVLGPVTLKGVNSGTWDMSKWKWSYKIGVKGEALSLHTNTESSGVRWTQGSFVAKKQPLTWYKSTFATPAGNEPLALDMNTMGKGQVWINGRNIGRHWPAYKAQGSCGRCNYAGTFDAKKCLSNCGEASQRWYHVPRSWLKSQNLIVVFEELGGDPNGISLVKRT

SEQ ID NO: 99251 - protein, 585 aa, Arabidopsis thaliana
  peptide (1)..(585): Ceres Seq. ID no. 13602484
MAFRTDNEPFKAAMKKFTEKIVWMMKAEKLFQTQGGPIILAQIENEYGPVEWEIGAPGKAYTKWVAQMALGLSTGVPWIMCKQEDAPGPIIDTCNGYYCEDFKPNSINKPKMWTENWTGWYTDFGGAVPYRPVEDIAYSVARFIQKGGSLVNYYMYHGGTNFDRTAGEFMASSYDYDAPLDEYGLPREPKYSHLKALHKAIKLSEPALLSADATVTSLGAKQEAYVFWSKSSCAAFLSNKDENSAARVLFRGFPYDLPPWSVSILPDCKTEVYNTAKVNAPSVHRNMVPTGTKFSWGSFNEATPTANEAGTFARNGLVEQISMTWDKSDYFWYITDITIGSGETFLKTGDSPLLTVMSAGHALHVFVNGQLSGTAYGGLDHPKLTFSQKIKLHAGVNKIALLSVAVGLPNVGTHFEQWNKGVLGPVTLKGVNSGTWDMSKWKWSYKIGVKGEALSLHTNTESSGVRWTQGSFVAKKQPLTWYKSTFATPAGNEPLALDMNTMGKGQVWINGRNIGRHWPAYKAQGSCGRCNYAGTFDAKKCLSNCGEASQRWYHVPRSWLKSQNLIVVFEELGGDPNGISLVKRT

SEQ ID NO: 99252 - DNA, 1006 bp, Arabidopsis thaliana
  misc_feature (1)..(1006): Ceres Seq. ID no. 13602513
  misc_feature (1)..(1006): Ortholog of  Ceres SEQ ID NO 13595263 as cited in SEQ ID NO 56712
  misc_feature (1)..(1006): Ortholog of  Ceres SEQ ID NO 13655622 as cited in SEQ ID NO 64213
aaattggggaagaaaatttacagtgttgaaattggttaaaccctgacactagcaccttcctcagtcgcatcaccaccatgtcagagcgcgaccgccgcgaacgagagagggataaggaccgtgaaccagaccgtgatagacgccgaggtagagacgaccgtgaccgtgaccgtgatcgagaccgggaaagagatagagagcgcgaccgtgaccgagggcttagaaacaaaaaatcccgatctcgtactccagaccaccacgctcgtgctcgccacgtgcgctctccggagaggtatcgctctcgttcccgctcgattgaccgtgaccgggaccgggaccgtcaacgacaccacaggcgcaggtctccttctccagatgctccgtcgcgaaaacggcctcgccagggttcagtagacgatgagaaagaaaggaatcgcaaaagagtagtgactgattccgttgacgagaatgcgtctactattactaagaagaaggataaacaaccaagtgatgctgctgataatggcggaggcgaagatgaagaaggaatggatgtgaatgagattgagatgatgaagatgttagggattcctactggatttgattccacaaaaggcaaaccagttgctggtgctgatgttagtggtattagagctgtaactaagcgtcagccaagacagtacatgaaccgtcgcggtggatttaaccgtcctctaccggccgagcgtaatcgctagtcttctcaaggtccctctaacgctgtcttgaacactagtcaaaaagatgagggctagagctgcatttcccagatagtagttactagttactccaattcttccccagactctgttctgatgtcttatagagaacaaacttgtactctctgaatttggttggaaacaactcgtgagttatttctttttcgagatttaaaaatgttaatgtttgtgtgtaatctcccggctctaactgtcagactatggttcatttgaaatcaggcttattc

SEQ ID NO: 99253 - protein, 219 aa, Arabidopsis thaliana; identical to SEQ ID NO: 21848
  peptide (1)..(219): Ceres Seq. ID no. 13602514

SEQ ID NO: 99254 - DNA, 1172 bp, Arabidopsis thaliana
  misc_feature (1)..(1172): Ceres Seq. ID no. 13602519
  misc_feature (1)..(1172): Ortholog of  Ceres SEQ ID NO 13583327 as cited in SEQ ID NO 62047
tttcctctgcttctcaacatctctaagctttcattgaacaaggaatatgaaatcttctccaagatcagaaggaagaaagttcattatcccttctttcttcttcatcatagctctttgtgtactagctttcatcaacgagatcagattcgatagcttattgagttttggaagatgtgctttgtcaaatgttcctatgaataatggttcatcagagactccattgttgtcttcttctcctgttgatgatgagattaggattcttattggaatccttacacttcctgatcagtattcacgtcgccattttctccggatgatctacgggacacaaaatgttccggacggtgttaaggttgatgtgaagtttgtgttctgtaatttgactaaagaagaccagaaagtgcttgttgctttggagattatgcgttatgatgacatcattatactcaactgcaatgagaatatgaacaaaggcaagacttacacatacttctcaagcttaccagacatattcaatgagaccgatgcacaaaaaccaccgtaccattacgtaatgaaagccgacgacgacacatacataagactagaaagtctcgttgcatctttgagaccactccctcgagaagatctttactacggctatgtaattccatgtccaagcatggacccatttgttcattacatgtcaggaatgggttacttagtgtcatgggatattgcggtttggctcaaagactcggaaattcccaagaaacatctagaaggtcctgaagacaaagtgtttggcgattggattcgagaaggaagacgaggaaaaaaccggtttaacgctaagtggtccatgtataatttccctgagccaccgactagatgcacacatgagctttggccagacactattgccgttcatttgttaaagaaccaagagaagtggatacgtacattgaactatttcaatgttactagcaatctcaagccttctaaactataccacataccgtagatagtctttttgtttgcttttaccggattcttatatttatactttacattgtttctcttgaaattggtaagaaatgttctttaataatcgattttttgggagggatttgtagtacactaattaaggattgttcaaacatgtttaatagtcaatctggtggggttttttc

SEQ ID NO: 99255 - protein, 318 aa, Arabidopsis thaliana
  peptide (1)..(318): Ceres Seq. ID no. 13602520
MKSSPRSEGRKFIIPSFFFIIALCVLAFINEIRFDSLLSFGRCALSNVPMNNGSSETPLLSSSPVDDEIRILIGILTLPDQYSRRHFLRMIYGTQNVPDGVKVDVKFVFCNLTKEDQKVLVALEIMRYDDIIILNCNENMNKGKTYTYFSSLPDIFNETDAQKPPYHYVMKADDDTYIRLESLVASLRPLPREDLYYGYVIPCPSMDPFVHYMSGMGYLVSWDIAVWLKDSEIPKKHLEGPEDKVFGDWIREGRRGKNRFNAKWSMYNFPEPPTRCTHELWPDTIAVHLLKNQEKWIRTLNYFNVTSNLKPSKLYHIP

SEQ ID NO: 99256 - protein, 269 aa, Arabidopsis thaliana; identical to SEQ ID NO: 41093
  peptide (1)..(269): Ceres Seq. ID no. 13602521

SEQ ID NO: 99257 - protein, 229 aa, Arabidopsis thaliana; identical to SEQ ID NO: 41094
  peptide (1)..(229): Ceres Seq. ID no. 13602522

SEQ ID NO: 99258 - DNA, 1382 bp, Arabidopsis thaliana
  misc_feature (1)..(1382): Ceres Seq. ID no. 13602523
  misc_feature (1)..(1382): Ortholog of  Ceres SEQ ID NO 12364737 as cited in SEQ ID NO 51089
  misc_feature (1)..(1382): Ortholog of  Ceres SEQ ID NO 14306553 as cited in SEQ ID NO 53121
  misc_feature (1)..(1382): Ortholog of  Ceres SEQ ID NO 13595567 as cited in SEQ ID NO 56760
  misc_feature (1)..(1382): Ortholog of  Ceres SEQ ID NO 13655302 as cited in SEQ ID NO 63307
  misc_feature (1)..(1382): Ortholog of  Ceres SEQ ID NO 13597380 as cited in SEQ ID NO 64054
  misc_feature (1)..(1382): Ortholog of  Ceres SEQ ID NO 12625474 as cited in SEQ ID NO 64169
  misc_feature (1)..(1382): Ortholog of  Ceres SEQ ID NO 13597502 as cited in SEQ ID NO 64681
gtccaaattagagaataagtaactcaagaaggagtgaaatcaacacaaaacacaatgatgatccttaggctggctctagccatcgtcatctccacctatgcaaccgcacaaccagcatcaacatcgtcgcttgtaacctatatattcggcgactcgctaaccgaagttggtaacaacaatttcttgcaatattcgctagcaagagcagactttccatattatggagttgatttctccggtggtaaagctaccggaagattcaccaacggtagaactatcggcgatatcatatctacgaagctcgggattctatcgccaccaccatatctatcgttatcacaaaacgacgatgcatttctcagtggtataaattacgcatctggaggagctggaattctcaatgaaactggcatttacttcatccaaaggctaactttcaatgatcaaataaattgtttcaagaaaactaaagaagttattagggcgaaaatcggagatggagctgcgaacaagcatgtaaatgatgccatgtacttcattggtttgggaagcaacgattatgtaaacaatttcttgcagccatttatggcagatgggcagcaatatacacatgacgagtttgtcgaactcttgacctcaaccctacacaatcagcttacgacaatatacaaattaggagcgaggaaggtaatatttcatgggttaggcccattgggctgtatcccatcacagagagtgaagtcaaagacacgcatgtgcctgaaccgtgtcaacgaatgggtattggaattcaattcaagaacgaagaagctattaatagatctcaacaaacgcctccccggagctaaattctctttcgcagacacttatcccgccgttctcgatctcatcaacaatcccactcactacggatttaagatagcaaacacgtcatgttgcaatgtggacacaagtgttggaggtctttgtcttcccaattccaagatgtgtaaaaaccgtcaagactttgtcttctgggacgcatttcatccgtccgattcggctaatcaaatcctagccgatcatcttttctcttctcttctttcttcctcttctccttctcctgctcctaaaccacgtcaatagtttagcatttacaaaaataaaaacagttaaccaatttttgttaaattggacctacttgctatatacatgtgtaactaattttatgttcttgatgtaaccatcaggacaaatatgtgtgttttgttacacaagtattatatattataagataattatggtttgtatgtatcatgaacacattgttatatatacacatatattcgtgtttagtgtttctagacatgtgttataaataaacatctacaccaattttggtc

SEQ ID NO: 99259 - protein, 356 aa, Arabidopsis thaliana
  peptide (1)..(356): Ceres Seq. ID no. 13602524
MMILRLALAIVISTYATAQPASTSSLVTYIFGDSLTEVGNNNFLQYSLARADFPYYGVDFSGGKATGRFTNGRTIGDIISTKLGILSPPPYLSLSQNDDAFLSGINYASGGAGILNETGIYFIQRLTFNDQINCFKKTKEVIRAKIGDGAANKHVNDAMYFIGLGSNDYVNNFLQPFMADGQQYTHDEFVELLTSTLHNQLTTIYKLGARKVIFHGLGPLGCIPSQRVKSKTRMCLNRVNEWVLEFNSRTKKLLIDLNKRLPGAKFSFADTYPAVLDLINNPTHYGFKIANTSCCNVDTSVGGLCLPNSKMCKNRQDFVFWDAFHPSDSANQILADHLFSSLLSSSSPSPAPKPRQ

SEQ ID NO: 99260 - protein, 355 aa, Arabidopsis thaliana
  peptide (1)..(355): Ceres Seq. ID no. 13602525
MILRLALAIVISTYATAQPASTSSLVTYIFGDSLTEVGNNNFLQYSLARADFPYYGVDFSGGKATGRFTNGRTIGDIISTKLGILSPPPYLSLSQNDDAFLSGINYASGGAGILNETGIYFIQRLTFNDQINCFKKTKEVIRAKIGDGAANKHVNDAMYFIGLGSNDYVNNFLQPFMADGQQYTHDEFVELLTSTLHNQLTTIYKLGARKVIFHGLGPLGCIPSQRVKSKTRMCLNRVNEWVLEFNSRTKKLLIDLNKRLPGAKFSFADTYPAVLDLINNPTHYGFKIANTSCCNVDTSVGGLCLPNSKMCKNRQDFVFWDAFHPSDSANQILADHLFSSLLSSSSPSPAPKPRQ

SEQ ID NO: 99261 - protein, 198 aa, Arabidopsis thaliana
  peptide (1)..(198): Ceres Seq. ID no. 13602526
MYFIGLGSNDYVNNFLQPFMADGQQYTHDEFVELLTSTLHNQLTTIYKLGARKVIFHGLGPLGCIPSQRVKSKTRMCLNRVNEWVLEFNSRTKKLLIDLNKRLPGAKFSFADTYPAVLDLINNPTHYGFKIANTSCCNVDTSVGGLCLPNSKMCKNRQDFVFWDAFHPSDSANQILADHLFSSLLSSSSPSPAPKPRQ

SEQ ID NO: 99262 - DNA, 760 bp, Arabidopsis thaliana
  misc_feature (1)..(760): Ceres Seq. ID no. 13602531
  misc_feature (1)..(760): Ortholog of  Ceres SEQ ID NO 14309614 as cited in SEQ ID NO 52633
aaagagagacgactctgaatccaaaaaaaaaaaaaactcattaagtaaagacaaaggaagagaagaaagacgatttctcgaagaagctatggcggatcaactcactgacgaacagatctccgaattcaaggaagcttttagcctcttcgacaaagatggcgatggttgcatcacaacaaaagagctgggaacagttatgcgttcactaggacaaaacccaacagaggctgagctccaagacatgatcaacgaggttgatgcagatggaaacggcactatcgacttccccgagttcctgaacctgatggctaagaagatgaaagacactgactccgaggaagagctaaaagaagccttcagggttttcgacaaagaccagaacggtttcatctccgctgctgagctacgccatgtgatgaccaatcttggtgagaagctaactgatgaagaagtggaagagatgatccgtgaggctgatgttgatggagatggtcagattaactatgaagagtttgtcaagattatgatggctaagtgatttgataaaggtgatgatgatgatgatgatgacctttttatgcttctaggagtttaaccaaaaacatttgcatgattggtggagatatgcttttaaacagacataatttgtttttcgttcttttgattttctggtttgtgacttttgtgtgtaatggaaaatcaagtaagttggattgaaaccgatgggttgggtttttactttttacccacattttgttgc

SEQ ID NO: 99263 - protein, 178 aa, Arabidopsis thaliana
  peptide (1)..(178): Ceres Seq. ID no. 13602532
KRDDSESKKKKNSLSKDKGREERRFLEEAMADQLTDEQISEFKEAFSLFDKDGDGCITTKELGTVMRSLGQNPTEAELQDMINEVDADGNGTIDFPEFLNLMAKKMKDTDSEEELKEAFRVFDKDQNGFISAAELRHVMTNLGEKLTDEEVEEMIREADVDGDGQINYEEFVKIMMAK

SEQ ID NO: 99264 - protein, 149 aa, Arabidopsis thaliana; identical to SEQ ID NO: 27678
  peptide (1)..(149): Ceres Seq. ID no. 13602533

SEQ ID NO: 99265 - protein, 113 aa, Arabidopsis thaliana; identical to SEQ ID NO: 27679
  peptide (1)..(113): Ceres Seq. ID no. 13602534

SEQ ID NO: 99266 - DNA, 1870 bp, Arabidopsis thaliana
  misc_feature (1)..(1870): Ceres Seq. ID no. 13602535
  misc_feature (1)..(1870): Ortholog of  Ceres SEQ ID NO 13654989 as cited in SEQ ID NO 63117
  misc_feature (1)..(1870): Ortholog of  Ceres SEQ ID NO 13657138 as cited in SEQ ID NO 65923
  misc_feature (1)..(1870): Ortholog of  Ceres SEQ ID NO 13584744 as cited in SEQ ID NO 69137
ataaactttataagaaaaataaatacatattctctttctcttccatcaagcaaagcttttcaaaaagaatcaaacttttcgaatctttttgcttctcgagatctgttcatagagagagagataaagaatgggtttttatgaaggagcctctgttcatccaagaactccagaaaacaaaaacacagtgaatattccgatactcacttcttcttcttcatcatcagatcttgacggagataacaatgacaacaacaacaatacaggaatcaaaacccttttgaaaagaatgatctttgatttgggtttcgcttgtttccttcctcctttaagctcaaccgaaaactccggcaacaacaatggaggaggaacaagcggcggcggaggaggaggaggaggaggaggagagaataacaaagcttggctattggcggaaacagcaccggagaatatgaatcctgatcctcattcagttcattcatcgtttagattcagtctttgttcacaaatcgagcttgagaaaatgaaaggtgaagaaccgtccttgtctgcttcgtcttcttgtcggaatttgtcggtttctggtggttccacgacggttttgatggttaatttggagaatggtgttaaggagactactgggaatgcgactgatgatttgcggtggactagagctaggtcgcttgagaagagtatttctccggtggctaatactttggttcggtttagctacggtgagattgtggcagctactcgtaatttctctaaagggagagtgttgggaagaggagcttgtagctatgtgtttagaggcaaaatcggaatgtggagaacggctttagcaatcaagagacttgataaggaagacaaagaatctcctaaatctttttgtagagagttgatgattgcaagctctcttcatagctccaacattgtacctcttcttggattctgtattgatcctgaagaagggttattcttggtttacaagtatgtctctggtggtagcctcgaacattatttacacgataagaagaagaagaaaggcgtaaaagccgcttttggtttgccttggtcagcaaggtacaaggtagcgttaggtatagcagatgccatagcttatttgcataatggaacagagcaatgtgttgttcacagagatatcaaaccctccaatattcttctttcctcaaagaaaataccaaagttgtgtgattttgggttagctacttggaccgctgcaccttcggttcctttcctctgcaagaccgtgaaaggcacattcggctatctggctcctgagtatttccagcatggtaagatatctgacaagaccgatgtttacgccttcggggttgtgttgcttgagctaataactggccggaaaccaatcgaagcaagaagagcatctggtcaagaaaatctggttgtttgggcgaaaccgttgttggatagagggatagaagctatagtggagctgcttgatccaaggctaaaatgcacaagaaaaaactcggttcaaatggagcggatgatccgtgctgcagcggcgtgtgtgatcaatgaggagtcccgaagacccggtatggaagagattgtctcaatcttgaaaggcgaagaaggtgtagagccagaaacacattcaagcaggaaaactacaaatatttcgggtatgattgactcttatacacaattgcaacaaaccaaatccgagatgaaatgtcatcttgatcttgcgatgctcggagtaaccgagtttgaagatgatgatcatgtgtacggccgataaaagattctaagaaatggatttaaaagtgtgtaaataggtatttatgaaaagtttgaaacagagttcttagtttctgaattagtg

SEQ ID NO: 99267 - protein, 552 aa, Arabidopsis thaliana; identical to SEQ ID NO: 39282
  peptide (1)..(552): Ceres Seq. ID no. 13602536

SEQ ID NO: 99268 - protein, 499 aa, Arabidopsis thaliana; identical to SEQ ID NO: 39283
  peptide (1)..(499): Ceres Seq. ID no. 13602537

SEQ ID NO: 99269 - protein, 445 aa, Arabidopsis thaliana; identical to SEQ ID NO: 39284
  peptide (1)..(445): Ceres Seq. ID no. 13602538

SEQ ID NO: 99270 - DNA, 1252 bp, Arabidopsis thaliana
  misc_feature (1)..(1252): Ceres Seq. ID no. 13602539
  misc_feature (1)..(1252): Ortholog of  Ceres SEQ ID NO 13596891 as cited in SEQ ID NO 62868
  misc_feature (1)..(1252): Ortholog of  Ceres SEQ ID NO 12617235 as cited in SEQ ID NO 63990
  misc_feature (1)..(1252): Ortholog of  Ceres SEQ ID NO 13655371 as cited in SEQ ID NO 68945
aggaaattatcatcttcgtccctaccaaatttttcagcagcgaaaatggcaaacatcagcgtagtgacgacagcgactaacaaccaggtgattctccgtaactacgtgagtggattccctaaagaatccgacctctacatcgccgcaaccaccgttgacttacgtgtacctcccggatccatggcggttctagtcaagaatctctacttatcttgcgatcctttcagccgcattcgcatggaaaaacccgacccttcgtcacctgcttccgtcgctcgcgcttactctatcggcaagccaatctctggatttggagtggctaaagcaatagattcatgtcatccaaattacaaaacaggagatttactttggggaagagttggatgggaagagtatagtgttattactccaactccttcttcacatttcaagattcatcacactgatgttccattatctttctacactggacttcttggtattccgggtctcactgcgtatgttgggttttacgagatatgttctccgaagaaaggagagactgtatttgtatcagctgcttctggtgcagtaggtcaacttgtaggacagtttgcgaagatggcgggatgctatgtcgttggaagtgccagtagtaaagagaaggttgatcttctcaagactaagttcgggtatgacgaagctttcaattacaaggaagagcatgatcttagtgctgccctaaagaggtgtttcccagaaggaatagacatatactttgagaatgtgggaggtaaaatgttagacgcagtgctcgaaaacatgagaacacatggccgaatcgctgcgtgtggaatgatctcacaatacaatctaaaggagccagaaggtgtacataacttagccagcattgtttacaaacggattcgggttcaaggttttgcagctgtagaattctttgataaatactccaagtttttggactttatacttccatatgtaagagaaggaaagataacatatgtcgaggatatagctcaaggacttgagaatggaccttctgctttgattggactcttccacggtaagaacgtcgggaaacaacttgttgcggttgctcgtgagtgatattgaattaataaatgtggttattatgacaaagctttgtttgtaggtcagaaataattggactattgttaattgtttactatatcgtaatagtccgctggtttaattatgttgtttgtgtgatattatatgcataaaggttctc

SEQ ID NO: 99271 - protein, 368 aa, Arabidopsis thaliana
  peptide (1)..(368): Ceres Seq. ID no. 13602540
RKLSSSSLPNFSAAKMANISVVTTATNNQVILRNYVSGFPKESDLYIAATTVDLRVPPGSMAVLVKNLYLSCDPFSRIRMEKPDPSSPASVARAYSIGKPISGFGVAKAIDSCHPNYKTGDLLWGRVGWEEYSVITPTPSSHFKIHHTDVPLSFYTGLLGIPGLTAYVGFYEICSPKKGETVFVSAASGAVGQLVGQFAKMAGCYVVGSASSKEKVDLLKTKFGYDEAFNYKEEHDLSAALKRCFPEGIDIYFENVGGKMLDAVLENMRTHGRIAACGMISQYNLKEPEGVHNLASIVYKRIRVQGFAAVEFFDKYSKFLDFILPYVREGKITYVEDIAQGLENGPSALIGLFHGKNVGKQLVAVARE

SEQ ID NO: 99272 - protein, 353 aa, Arabidopsis thaliana
  peptide (1)..(353): Ceres Seq. ID no. 13602541
MANISVVTTATNNQVILRNYVSGFPKESDLYIAATTVDLRVPPGSMAVLVKNLYLSCDPFSRIRMEKPDPSSPASVARAYSIGKPISGFGVAKAIDSCHPNYKTGDLLWGRVGWEEYSVITPTPSSHFKIHHTDVPLSFYTGLLGIPGLTAYVGFYEICSPKKGETVFVSAASGAVGQLVGQFAKMAGCYVVGSASSKEKVDLLKTKFGYDEAFNYKEEHDLSAALKRCFPEGIDIYFENVGGKMLDAVLENMRTHGRIAACGMISQYNLKEPEGVHNLASIVYKRIRVQGFAAVEFFDKYSKFLDFILPYVREGKITYVEDIAQGLENGPSALIGLFHGKNVGKQLVAVARE

SEQ ID NO: 99273 - protein, 308 aa, Arabidopsis thaliana
  peptide (1)..(308): Ceres Seq. ID no. 13602542
MAVLVKNLYLSCDPFSRIRMEKPDPSSPASVARAYSIGKPISGFGVAKAIDSCHPNYKTGDLLWGRVGWEEYSVITPTPSSHFKIHHTDVPLSFYTGLLGIPGLTAYVGFYEICSPKKGETVFVSAASGAVGQLVGQFAKMAGCYVVGSASSKEKVDLLKTKFGYDEAFNYKEEHDLSAALKRCFPEGIDIYFENVGGKMLDAVLENMRTHGRIAACGMISQYNLKEPEGVHNLASIVYKRIRVQGFAAVEFFDKYSKFLDFILPYVREGKITYVEDIAQGLENGPSALIGLFHGKNVGKQLVAVARE

SEQ ID NO: 99274 - DNA, 1302 bp, Arabidopsis thaliana
  misc_feature (1)..(1302): Ceres Seq. ID no. 13602547
  misc_feature (1)..(1302): Ortholog of  Ceres SEQ ID NO 13596090 as cited in SEQ ID NO 68377
  misc_feature (1)..(1302): Ortholog of  Ceres SEQ ID NO 14303557 as cited in SEQ ID NO 68595
gttcaatcattttctcctttccttcacctcaagatctcaaaaacacaaaaagagaaatcaatcaaaaccttagggttttctactaatttatctgtgtgatgttaagagaatcatcatcatcttcgtcgtcatgggaggagtaacttcatcaatcgctgcaaaattcgcttttttcccgccatcaccaccgtcttatggatttgtttccgacgttgaccgattatacataacagaagtacctcgccgtgatgatgtagatgtattgaagctaaagactcgtcgtggtaacgagattgtagctatttatattaaacatcctaaagctaatggtacgcttttgtattcacatggtaacgctgctgatttgggtcaaatgtttgagctttttatcgaacttagtaatcgtctccgacttaatctcatggggtatgattactctggttatggtcagtctactggaaaggcaagtgaatgtaatacctatgctgatatagatgcagcatatacttgcctcaaggaacattatggtgtaaaagatgatcaactgatattatatggtcagtctgttggtagtggaccaacgattgatttagcttcacgcacgcctaatttgcgaggagtggttttgcacagccctattctctctgggatgagagttttgtatccggttaaacgtacctattggtttgacatttacaagaatattgacaagatcggtgcagttacctgtcctgtcttagtaatccatgggactgcagatgaagtggttgattgttctcatggaaaacaactttgggaactttcaaaagaaaagtatgagcctttatgggtatctggaggaggacactgcaatctagaactctatccagagttcataaaacatctgaagaaatacgtaatttctatttccaagggaccaagaactggttcgaacaagactgcaacgacggatgcagccaaaaaacagagcaagcctgcagagaacgggcgtgctgatacgtttcaacttggctgttgccttccagaagtttctagaaacagtgtagacagtcagctggagaaatctaagaagactagtaaacccgagaagtctcgtatgagcattgataggtttagaaggaaaaaaggttcagtctggtgacatataaaggtccatcgacaaaacaggttatttgtaactcctgtttctgtaattcatatgtttctgcataaaattatgacgtgtggttttgtttttttctttctcaggtttgtgtatgtattttctaatagaaacagatcaaactcaaaagtcttgatttc

SEQ ID NO: 99275 - protein, 336 aa, Arabidopsis thaliana
  peptide (1)..(336): Ceres Seq. ID no. 13602548
MGGVTSSIAAKFAFFPPSPPSYGFVSDVDRLYITEVPRRDDVDVLKLKTRRGNEIVAIYIKHPKANGTLLYSHGNAADLGQMFELFIELSNRLRLNLMGYDYSGYGQSTGKASECNTYADIDAAYTCLKEHYGVKDDQLILYGQSVGSGPTIDLASRTPNLRGVVLHSPILSGMRVLYPVKRTYWFDIYKNIDKIGAVTCPVLVIHGTADEVVDCSHGKQLWELSKEKYEPLWVSGGGHCNLELYPEFIKHLKKYVISISKGPRTGSNKTATTDAAKKQSKPAENGRADTFQLGCCLPEVSRNSVDSQLEKSKKTSKPEKSRMSIDRFRRKKGSVW

SEQ ID NO: 99276 - protein, 255 aa, Arabidopsis thaliana
  peptide (1)..(255): Ceres Seq. ID no. 13602549
MFELFIELSNRLRLNLMGYDYSGYGQSTGKASECNTYADIDAAYTCLKEHYGVKDDQLILYGQSVGSGPTIDLASRTPNLRGVVLHSPILSGMRVLYPVKRTYWFDIYKNIDKIGAVTCPVLVIHGTADEVVDCSHGKQLWELSKEKYEPLWVSGGGHCNLELYPEFIKHLKKYVISISKGPRTGSNKTATTDAAKKQSKPAENGRADTFQLGCCLPEVSRNSVDSQLEKSKKTSKPEKSRMSIDRFRRKKGSVW

SEQ ID NO: 99277 - protein, 239 aa, Arabidopsis thaliana
  peptide (1)..(239): Ceres Seq. ID no. 13602550
MGYDYSGYGQSTGKASECNTYADIDAAYTCLKEHYGVKDDQLILYGQSVGSGPTIDLASRTPNLRGVVLHSPILSGMRVLYPVKRTYWFDIYKNIDKIGAVTCPVLVIHGTADEVVDCSHGKQLWELSKEKYEPLWVSGGGHCNLELYPEFIKHLKKYVISISKGPRTGSNKTATTDAAKKQSKPAENGRADTFQLGCCLPEVSRNSVDSQLEKSKKTSKPEKSRMSIDRFRRKKGSVW

SEQ ID NO: 99278 - DNA, 1552 bp, Arabidopsis thaliana
  misc_feature (1)..(1552): Ceres Seq. ID no. 13602571
  misc_feature (1)..(1552): Ortholog of  Ceres SEQ ID NO 13599900 as cited in SEQ ID NO 531
  misc_feature (1)..(1552): Ortholog of  Ceres SEQ ID NO 13596509 as cited in SEQ ID NO 62004
  misc_feature (1)..(1552): Ortholog of  Ceres SEQ ID NO 13659971 as cited in SEQ ID NO 67565
  misc_feature (1)..(1552): Ortholog of  Ceres SEQ ID NO 13500385 as cited in SEQ ID NO 67583
aattcgaacccttcaagattttcttctctctatctctctgtttctctctgtttctgagatgggtttgtttggaacgaagaagatcgggaagtatgagataggaagaacaatcggagaagggaatttcgcaaaagtgaaacttggttacgacacgaccaatggtacttacgtagctgtcaaaatcatagacaaggctttggttattcaaaagggtcttgagtctcaagtcaagagagagatacgaacgatgaagcttcttaaccatcccaacatcgtccaaatacacgaggtgattggaaccaagacaaagatctgtatagttatggaatacgtttcaggtggtcagctttcagacagacttggaagacagaaaatgaaagaatcagatgctagaaaacttttccaacaattgattgatgctgttgattattgtcataacagaggagtttatcatagagatcttaagccacaaaacttgttactagattcaaagggtaatctcaaagtttctgactttggattaagtgcagttcctaaatcgggggatatgctctctacagcttgtggctctccatgttatatagcaccagagttgattatgaacaaaggctactcaggagcagcagtagatgtatggtcttgtggagtgattctatttgaattgcttgctggttatccacctttcgatgatcatacacttccggttttgtataagaagatactcagagcagattacacgttcccacctggattcactggagagcagaagaggctaatctttaacattcttgacccaaatcctctaagtcgtataacactagctgagataatcatcaaagattcttggttcaagataggttatacaccagtttatcatcaactttcagactcaatcaaggacaatgtcgcggagataaatgcagcaaccgcgtcatcaaatttcataaatgcttttcagataatagcaatgtctagtgatctagatttgtcaggtctcttcgaagaaaatgatgataagagatataaaacaagaattgggtccaagaacacagcacaagaaacaatcaagaagattgaagctgcagcaacttatgttagtttatcagttgagagaataaagcacttcaaggttaagattcagccaaaggagataagatcaagatcttcttatgacttattatcagcagaggtgatagaggtgactccaacaaattgtgttatagaaatatcgaaatccgcaggcgagttaagactatacatggagttttgccagagcttatcaagcttacttaccgcggaagtaagctaagatagagagccatagattctcaagtaaaaatgttaaaacagaggaagcaaatgaagcatatttttgcagattgaagttgaagtgtaaagaagacaatgaagagaagaaatccaaagaatttagttatgtcttggatcttggtgatcccaaagggttcttattcaggatgtaaaatgatagattggtttctaatcaaactcgtttataaaatagatatataaaaagctgaacaagttctatttc

SEQ ID NO: 99279 - protein, 435 aa, Arabidopsis thaliana
  peptide (1)..(435): Ceres Seq. ID no. 13602572
IRTLQDFLLSISLFLSVSEMGLFGTKKIGKYEIGRTIGEGNFAKVKLGYDTTNGTYVAVKIIDKALVIQKGLESQVKREIRTMKLLNHPNIVQIHEVIGTKTKICIVMEYVSGGQLSDRLGRQKMKESDARKLFQQLIDAVDYCHNRGVYHRDLKPQNLLLDSKGNLKVSDFGLSAVPKSGDMLSTACGSPCYIAPELIMNKGYSGAAVDVWSCGVILFELLAGYPPFDDHTLPVLYKKILRADYTFPPGFTGEQKRLIFNILDPNPLSRITLAEIIIKDSWFKIGYTPVYHQLSDSIKDNVAEINAATASSNFINAFQIIAMSSDLDLSGLFEENDDKRYKTRIGSKNTAQETIKKIEAAATYVSLSVERIKHFKVKIQPKEIRSRSSYDLLSAEVIEVTPTNCVIEISKSAGELRLYMEFCQSLSSLLTAEVS

SEQ ID NO: 99280 - protein, 416 aa, Arabidopsis thaliana
  peptide (1)..(416): Ceres Seq. ID no. 13602573
MGLFGTKKIGKYEIGRTIGEGNFAKVKLGYDTTNGTYVAVKIIDKALVIQKGLESQVKREIRTMKLLNHPNIVQIHEVIGTKTKICIVMEYVSGGQLSDRLGRQKMKESDARKLFQQLIDAVDYCHNRGVYHRDLKPQNLLLDSKGNLKVSDFGLSAVPKSGDMLSTACGSPCYIAPELIMNKGYSGAAVDVWSCGVILFELLAGYPPFDDHTLPVLYKKILRADYTFPPGFTGEQKRLIFNILDPNPLSRITLAEIIIKDSWFKIGYTPVYHQLSDSIKDNVAEINAATASSNFINAFQIIAMSSDLDLSGLFEENDDKRYKTRIGSKNTAQETIKKIEAAATYVSLSVERIKHFKVKIQPKEIRSRSSYDLLSAEVIEVTPTNCVIEISKSAGELRLYMEFCQSLSSLLTAEVS

SEQ ID NO: 99281 - protein, 353 aa, Arabidopsis thaliana
  peptide (1)..(353): Ceres Seq. ID no. 13602574
MKLLNHPNIVQIHEVIGTKTKICIVMEYVSGGQLSDRLGRQKMKESDARKLFQQLIDAVDYCHNRGVYHRDLKPQNLLLDSKGNLKVSDFGLSAVPKSGDMLSTACGSPCYIAPELIMNKGYSGAAVDVWSCGVILFELLAGYPPFDDHTLPVLYKKILRADYTFPPGFTGEQKRLIFNILDPNPLSRITLAEIIIKDSWFKIGYTPVYHQLSDSIKDNVAEINAATASSNFINAFQIIAMSSDLDLSGLFEENDDKRYKTRIGSKNTAQETIKKIEAAATYVSLSVERIKHFKVKIQPKEIRSRSSYDLLSAEVIEVTPTNCVIEISKSAGELRLYMEFCQSLSSLLTAEVS

SEQ ID NO: 99282 - DNA, 1382 bp, Arabidopsis thaliana
  misc_feature (1)..(1382): Ceres Seq. ID no. 13602579
  misc_feature (1)..(1382): Ortholog of  Ceres SEQ ID NO 14303313 as cited in SEQ ID NO 64389
aagagttccaaaaaggtggctcctttttgtttctggagatgcgttattgtgacccttctttgaaatttagggttcattttctcagatttcgagttcgttgtgtttgaatctctattgggtttactttcttattcgatttgggggaaatggctgattggtatcagcttgcacagtctataatctttggtttgatcttcgcttaccttctcgctaagctaatctctatcctcctcgcttttaaagacgagaatctctcactcactcgtaaccacacgactcaatcggagtatgagaacttgcgaaaggtcgaaactttaactgggattagcggcgagactgattctcttatagctgagcaaggtagcttgagaggtgatgaagatgaatcagatgatgatgattgggaaggtgtcgaaagtacagaacttgatgaggcatttagtgctgctacggcttttgttgctgctgctgcatcggataggctttcgcagaaagtttctaatgagttgcaacttcagctttatggattgtataaaattgctactgaaggaccttgtactgctcctcaaccatcagctcttaaaatgactgctcgtgccaagtggcaagcatggcagaaattgggtgctatgcctcctgaggaagcgatggagaagtatatcgaccttgttactcagctttacccagcttgggttgaaggtggctcgaaacgaagaaatcggagtggtgaggctgcaggccccatgggaccggtttttagctcattggtgtacgaagaggaatctgacaatgagttgaagattgacgccatacacgcctttgctagagaaggagaagtcgagaatctattgaaatgcatagaaaatggcatacccgtaaatgcaagagatagtgaaggtcgaacaccactgcattgggctatagaccgtggccatcttaacgttgctgaagctctggttgataagaacgcagatgtgaatgctaaagacaatgaaggccaaacctctctacactatgctgttgtgtgcgaaagagaagcactcgccgagtttctggtgaagcagaaagctgatacaaccattaaagacgaagacggaaactcgcctcttgatctctgtgaatcagaatggtcttggatgcgagagaagaaggattccaattagtgttttttaagtctttaaaattgtgtgtcaaagctagatgcttgtgtttttcttacatttcctctgagcctctttgcttcctcttaagcttatgttttaacatacaacaacacaagttacatatgatatagtagctctagtttttattggttactatattgaacccagagagatcatcatcatcaatcatcataactcaataatagttttttttttgtt

SEQ ID NO: 99283 - protein, 338 aa, Arabidopsis thaliana; identical to SEQ ID NO: 23209
  peptide (1)..(338): Ceres Seq. ID no. 13602580

SEQ ID NO: 99284 - protein, 192 aa, Arabidopsis thaliana; identical to SEQ ID NO: 23210
  peptide (1)..(192): Ceres Seq. ID no. 13602581

SEQ ID NO: 99285 - protein, 177 aa, Arabidopsis thaliana; identical to SEQ ID NO: 23211
  peptide (1)..(177): Ceres Seq. ID no. 13602582

SEQ ID NO: 99286 - DNA, 1495 bp, Arabidopsis thaliana
  misc_feature (1)..(1495): Ceres Seq. ID no. 13602587
  misc_feature (1)..(1495): Ortholog of  Ceres SEQ ID NO 13595870 as cited in SEQ ID NO 62101
  misc_feature (1)..(1495): Ortholog of  Ceres SEQ ID NO 13590241 as cited in SEQ ID NO 63878
  misc_feature (1)..(1495): Ortholog of  Ceres SEQ ID NO 13657939 as cited in SEQ ID NO 66349
  misc_feature (1)..(1495): Ortholog of  Ceres SEQ ID NO 13660597 as cited in SEQ ID NO 67655
aatgccaccaactgttcttttcctgtaatttccagtttagagctttcttcttcctttccctatcctcaaccccaaacgaacgctcttcaagaattagggtttcgttttgaatcttctctgattcccaaatccaaagatatgaagagatcttcagggagaaaggattcaaatttcatagaacaattgatactttacgtcgctagtgctgcattgagtagcttggttctctacgttggtctccgtcaacttgacccgaaccgtgacgccgctaaaaagtctctcgagcacaaaagagaaatcgccaaacgtttgggtcgtcctcttattcaaaccaatcaatacgaggatgtgattgcgtgtgatgtaataaacccattacacatagatgttgaatttggttctattggaggattggagtcaattaagcaagctttgtatgagcttgtgattctaccattgaaaagacctgagctttttgcttatgggaagttactgggtcctcaaaagggtgttttgttgtatggtcctcctggaactgggaagactatgcttgctaaagcgattgcgagagagtctgaagctgtttttattaatgtaaaggtttctaatttgatgagcaagtggtttggtgatgcacagaagcttgtgtctgctgtgtttagcttggcgtataaactccaacctgctattatttttatcgatgaggtggatagctttcttggccagcgacggtcgactgataatgaagcaatgtcgaatatgaagaccgagtttatggctttatgggatggatttactacagaccagaatgcgagggtgatggttcttgctgcaactaacagaccatcagagctcgatgaagcgatattgaggcgttttcctcagtcatttgagatcgggatgcctgattgccaggagagagcgcaaatattgaaagttgttttgaaaggagagagtgttgaatcagatattaactatgatcgtatagctcgtttatgtgaggactataccggatcagatatttttgaactctgcaaaaaagcagcttacttcccaatccgagaaatcctagaggcagagaaagagggcaaacgagtttctgttcctagaccattgacacaactggacttggagaaggttcttgctacctcaaagaagacacaagttgctgcaagcgagtacactggtttaagctctcaatcttctgtctggggaagtccaagcaatgccgatgaggtccaagcagctataaacggcatctccaagctttttgtctcgcagcttagaaacattcagccagattctcaggattcatatcaacaacatccttcagaaggagattcggaatagaagcaaactcttcactagagcttcgtatagtccaaaaagagtacaacccaagaatatacactttttgtaaacctcatatttctctgaataagttggagcattgttgccgtaagatgtttttagaaaatttaattcatgtctcgtt

SEQ ID NO: 99287 - protein, 449 aa, Arabidopsis thaliana; identical to SEQ ID NO: 24378
  peptide (1)..(449): Ceres Seq. ID no. 13602588

SEQ ID NO: 99288 - protein, 403 aa, Arabidopsis thaliana; identical to SEQ ID NO: 24379
  peptide (1)..(403): Ceres Seq. ID no. 13602589

SEQ ID NO: 99289 - protein, 267 aa, Arabidopsis thaliana; identical to SEQ ID NO: 24380
  peptide (1)..(267): Ceres Seq. ID no. 13602590

SEQ ID NO: 99290 - DNA, 1371 bp, Arabidopsis thaliana
  misc_feature (1)..(1371): Ceres Seq. ID no. 13602599
  misc_feature (1)..(1371): Ortholog of  Ceres SEQ ID NO 13598513 as cited in SEQ ID NO 64102
ataaaatggcacaaagtatgaaagttgaaacctatcctcatatttagcatcactcctctaatattattttttcaaacaagaacaatggcaaaccatctccaagtccccttaaccaaaccggatcgagttaaagaagaacaagaggttgaagaagaggcaagattgctagcgagaaggctcgcgaatgcagccgcatcacctatggttctcaaagccgccttggagctcggcgtgatcgacaccatcaccacagtaggaggtggcgatttgtggctctcaccttctgaaatagcactaagactcccaaccaaaccatgcaacctggaagctccggctttgctagaccgtatgcttcgatttctcgtcagccattcggtcttaaaatgccgtactgtaatagaagagaacggtcaaaccggaaaagttgagagggtatatgcagctgaaccggtctgcaaatatctcttgaacaaaagtgacgacgtctcgggttcttttgcatcgctctttatgcttgacctcagcgacgtatttatcaagacatggacacatctcgaagatgtgatattagaaggaagagatgcatttagttctgcccatgggatgaaactattcgaatacatccaagccgatgagcgatttggtaaagtgtttaaccgggctatgttggaatcttccaccatggttacggagaaggttcttaaattttatgaaggattcaaagatgtgaagactttggtggatgtagggggaggacttggcaacacactaggtctcatcacttccaagtatcctcatcttattggtatcaatttcgatttagctccggtgttagccaatgctcattcttatcccggtgtgaaccatgtggctggtgatatgttcatcaagattccaaagggggatgccattttcatgaagtggatactacatgattggacggacgaacaatgcgtagcaattcttaaaaactgttggaaaagtctcgaagaaaatggaaaactgataatagtggaaatggttacaccggtggaagcaaagagcggagatatatgttctaacattgtgtttggtatggacatgacaatgttaacacaatgttcaggtggtaaagagagagatctctatgagtttgaaaatttagcatatgcatcgggtttttctcgttgtgcaatcgtatgcgctgtttatccattttccgtcatcgaaatctacaaatagattcattcaacatatgccattttacgatatttacacaacccgtttcttcttctatttgggatgtaatgtttgtgattatcatttgtgtgtggtcgatcttttgtaatattttcgtgtgatgttcttaccgttgtaatgatatatgtgtct

SEQ ID NO: 99291 - protein, 378 aa, Arabidopsis thaliana
  peptide (1)..(378): Ceres Seq. ID no. 13602600
MANHLQVPLTKPDRVKEEQEVEEEARLLARRLANAAASPMVLKAALELGVIDTITTVGGGDLWLSPSEIALRLPTKPCNLEAPALLDRMLRFLVSHSVLKCRTVIEENGQTGKVERVYAAEPVCKYLLNKSDDVSGSFASLFMLDLSDVFIKTWTHLEDVILEGRDAFSSAHGMKLFEYIQADERFGKVFNRAMLESSTMVTEKVLKFYEGFKDVKTLVDVGGGLGNTLGLITSKYPHLIGINFDLAPVLANAHSYPGVNHVAGDMFIKIPKGDAIFMKWILHDWTDEQCVAILKNCWKSLEENGKLIIVEMVTPVEAKSGDICSNIVFGMDMTMLTQCSGGKERDLYEFENLAYASGFSRCAIVCAVYPFSVIEIYK

SEQ ID NO: 99292 - protein, 339 aa, Arabidopsis thaliana
  peptide (1)..(339): Ceres Seq. ID no. 13602601
MVLKAALELGVIDTITTVGGGDLWLSPSEIALRLPTKPCNLEAPALLDRMLRFLVSHSVLKCRTVIEENGQTGKVERVYAAEPVCKYLLNKSDDVSGSFASLFMLDLSDVFIKTWTHLEDVILEGRDAFSSAHGMKLFEYIQADERFGKVFNRAMLESSTMVTEKVLKFYEGFKDVKTLVDVGGGLGNTLGLITSKYPHLIGINFDLAPVLANAHSYPGVNHVAGDMFIKIPKGDAIFMKWILHDWTDEQCVAILKNCWKSLEENGKLIIVEMVTPVEAKSGDICSNIVFGMDMTMLTQCSGGKERDLYEFENLAYASGFSRCAIVCAVYPFSVIEIYK

SEQ ID NO: 99293 - protein, 290 aa, Arabidopsis thaliana
  peptide (1)..(290): Ceres Seq. ID no. 13602602
MLRFLVSHSVLKCRTVIEENGQTGKVERVYAAEPVCKYLLNKSDDVSGSFASLFMLDLSDVFIKTWTHLEDVILEGRDAFSSAHGMKLFEYIQADERFGKVFNRAMLESSTMVTEKVLKFYEGFKDVKTLVDVGGGLGNTLGLITSKYPHLIGINFDLAPVLANAHSYPGVNHVAGDMFIKIPKGDAIFMKWILHDWTDEQCVAILKNCWKSLEENGKLIIVEMVTPVEAKSGDICSNIVFGMDMTMLTQCSGGKERDLYEFENLAYASGFSRCAIVCAVYPFSVIEIYK

SEQ ID NO: 99294 - DNA, 1540 bp, Arabidopsis thaliana
  misc_feature (1)..(1540): Ceres Seq. ID no. 13602619
  misc_feature (1)..(1540): Ortholog of  Ceres SEQ ID NO 13597446 as cited in SEQ ID NO 64098
  misc_feature (1)..(1540): Ortholog of  Ceres SEQ ID NO 15226246 as cited in SEQ ID NO 68314
atcctctgcaaagttatggctttgcttgagagtataatattagggctaatcacaggatggttagcttttgttattgggttggttattggatgggcatggaaaccaagatgggtttcttcttctaataatcgacaagtcaaattacaatgttctgctccaagatcttttgatttgtctttaccatcttcttctcctagttctgttgttacttctcctttgaagggttttggatcagctccttgcttaaaggctcttgtttgtgatacatggactatggctttaagacaacagagacaaacagtttctcctgattcttcttcttcttcatatgattcttctgaacaacatttggatttggtttcaagagtgaagaaaacaaaggagagattgcctaatactgtaacagagttagatttgagacatcttgtgcaattggttgagaggaaagatggtggtcaagcttggattcagatgatggatcgttttactcctggtatgagataccaagcttggttgagagaacctaagaatggtcctactgagtatagaagtagaactgtgtttgaagatgcaactcctgtgatgttaagagactttttctgggatgatgagtttagaccaacttgggatacaatgctttctaattccactactgttgaagagtgtcccagtactggaaccatgattgttagatggatacgcaagttcccgttcttctgcagtgatagagagtatgtaatcggtcgcaggatatggaattgtggaaactcttattactgtgttacaaagggagtatcggttccttctataccgcctaacaacaaacaaaaacgcgtggatttgttctactcaagctggtgcattcgaccagtggaatcaagaagagacgatggggtaacaagtgcctgcgaagtacttctattccaccacgaagacatgggaatacctagagaaatcgcaaagcttggagtgaaacgaggaatgtggggagcagtgaagaagatggaacccggtttacgtgcttaccaaacgcatagactctcagatggaggaaccaagctttctcggtctgctttcatggctcaaatcaacaccaagatcacacaagaccatctcatctccctcagcaacggtgcatcgcctgtcactgaaactcccgttacattaaaccaaggaaaccgagctgcgaatctgaagaaactgttgattatcggtggagctgttgcggttgtctgcagtttaagcggaggtgcttttgttcctcctgcgtttcttttaggttttgggaaaaggtttgttaatggtggaagaaaacgtcagctcgaaggaacaacaagaagtgagagtcagactacttcttcatagaatcttgagaccaagaatatagatcaacatataaatttagattcgttttaagtagattaagaataatccattccaaaattagtttatagaattggaataagctgtatgattattaatctttatacaaaggaaggaacattttttttacaagtaatgaataaaatctctttatcat

SEQ ID NO: 99295 - protein, 454 aa, Arabidopsis thaliana
  peptide (1)..(454): Ceres Seq. ID no. 13602620
ILCKVMALLESIILGLITGWLAFVIGLVIGWAWKPRWVSSSNNRQVKLQCSAPRSFDLSLPSSSPSSVVTSPLKGFGSAPCLKALVCDTWTMALRQQRQTVSPDSSSSSYDSSEQHLDLVSRVKKTKERLPNTVTELDLRHLVQLVERKDGGQAWIQMMDRFTPGMRYQAWLREPKNGPTEYRSRTVFEDATPVMLRDFFWDDEFRPTWDTMLSNSTTVEECPSTGTMIVRWIRKFPFFCSDREYVIGRRIWNCGNSYYCVTKGVSVPSIPPNNKQKRVDLFYSSWCIRPVESRRDDGVTSACEVLLFHHEDMGIPREIAKLGVKRGMWGAVKKMEPGLRAYQTHRLSDGGTKLSRSAFMAQINTKITQDHLISLSNGASPVTETPVTLNQGNRAANLKKLLIIGGAVAVVCSLSGGAFVPPAFLLGFGKRFVNGGRKRQLEGTTRSESQTTSS

SEQ ID NO: 99296 - protein, 449 aa, Arabidopsis thaliana
  peptide (1)..(449): Ceres Seq. ID no. 13602621
MALLESIILGLITGWLAFVIGLVIGWAWKPRWVSSSNNRQVKLQCSAPRSFDLSLPSSSPSSVVTSPLKGFGSAPCLKALVCDTWTMALRQQRQTVSPDSSSSSYDSSEQHLDLVSRVKKTKERLPNTVTELDLRHLVQLVERKDGGQAWIQMMDRFTPGMRYQAWLREPKNGPTEYRSRTVFEDATPVMLRDFFWDDEFRPTWDTMLSNSTTVEECPSTGTMIVRWIRKFPFFCSDREYVIGRRIWNCGNSYYCVTKGVSVPSIPPNNKQKRVDLFYSSWCIRPVESRRDDGVTSACEVLLFHHEDMGIPREIAKLGVKRGMWGAVKKMEPGLRAYQTHRLSDGGTKLSRSAFMAQINTKITQDHLISLSNGASPVTETPVTLNQGNRAANLKKLLIIGGAVAVVCSLSGGAFVPPAFLLGFGKRFVNGGRKRQLEGTTRSESQTTSS

SEQ ID NO: 99297 - protein, 363 aa, Arabidopsis thaliana
  peptide (1)..(363): Ceres Seq. ID no. 13602622
MALRQQRQTVSPDSSSSSYDSSEQHLDLVSRVKKTKERLPNTVTELDLRHLVQLVERKDGGQAWIQMMDRFTPGMRYQAWLREPKNGPTEYRSRTVFEDATPVMLRDFFWDDEFRPTWDTMLSNSTTVEECPSTGTMIVRWIRKFPFFCSDREYVIGRRIWNCGNSYYCVTKGVSVPSIPPNNKQKRVDLFYSSWCIRPVESRRDDGVTSACEVLLFHHEDMGIPREIAKLGVKRGMWGAVKKMEPGLRAYQTHRLSDGGTKLSRSAFMAQINTKITQDHLISLSNGASPVTETPVTLNQGNRAANLKKLLIIGGAVAVVCSLSGGAFVPPAFLLGFGKRFVNGGRKRQLEGTTRSESQTTSS

SEQ ID NO: 99298 - DNA, 1793 bp, Arabidopsis thaliana
  misc_feature (1)..(1793): Ceres Seq. ID no. 13602630
  misc_feature (1)..(1793): Ortholog of  Ceres SEQ ID NO 13596398 as cited in SEQ ID NO 68611
aaaaggatttttaattttcggagaggaagaagaagagagagatattgaagagcgctgaaggcggaaaagactattttgacctcgtcgtctccgtagatcatttttcttcagctcttcttcttcctctttctccgattctccttcttttgattttatctatccgccatgaacgagaaagccaacgtctctaaggagcttaatgcccgccatagaaagattcttgaagggcttcttaaacatccagagaacagagaatgtgctgactgcaaaacaaaaggtccaagatgggctagtgttaatttaggtatctttatctgcatgcaatgttctgggattcacaggagtctcggggtacacatatcgaaggttcgatctgccactctggacacatggctccccgagcaggttgcatttatacagtcaatgggaaatgataaagcaaatagttactgggaagcagagctacccccaaactatgatagagttggaattgagaattttatacgtgcaaagtatgaagagaagagatgggtttctagaggggaaaaggctagatcacctcctagagtcgagcaggaacggcggaaatctgtggagagaagtgggccgggatatgagcatggacatagtagtagtcctgtaaatttgtttgaggagaggaaaactattccagcatctagaacaagaaataatgttgctgcaacgagaataaatcttcccgtgcctccccaaggacccagtcaggttataaagccacagcagaaaatggagtctgcagctactccagtagagagggagaaacaagcagtaaatgttgcaccagcatcagatcctccaaaggtggattttgctactgatctgtttaacatgctatcaatggatgattcgactacaaatacctcagaggcaactcctggcgatactcctgccgatgataactcatgggctggctttcagtctgctggaagtggtcaaacggcagagaaaattgtcacagccaagcctgctgagagcagttctcctccagcttcatcttctgactttgaggatttgtttaaggacacacctaatttaacaactcaacaagcaccaaaagatgtgaaaggcgatatcatgagcctgtttgagaagacgaatatagtatcgccttttgccatgcatcagcaacaggttgctatgctcgctcagcagcaagccctttacatggctgcagcgaaagctgctggaggcactccaaacggcgtgaatcaacaagctattgctaatgctcttaacgtagcttctgcaaattggtcaaaccccggcggctaccagatccccggaatgactaaccccgtaggtggtcaagctgatctccagaaacttatgcaaaacatgaatatgaacgcaaacatgaacacgagacccgcacaaccgcaagagaacactctacaatacccatcatccagtttctacacaatgggtcaagctaatcaagtgaacggtatgaccccaaactcaaccggtaaacctcagtcatcatccgcaacccaaccaacaagcaccacaccatcttcacaatcaggcaaagactttgatttctcttccttgatggatggaatgttcacaaaacattgatcaagagagagagactttttctgaatttgcctttacatctttgttctaaatttgaagaaccaaaagaatatatatacaatcatctctggacagtttttctctgttaaacatatattttcttttctttggaactgtgttgtagccgagctttgatttatgattttactcgattgtcg

SEQ ID NO: 99299 - protein, 483 aa, Arabidopsis thaliana; identical to SEQ ID NO: 38636
  peptide (1)..(483): Ceres Seq. ID no. 13602631

SEQ ID NO: 99300 - protein, 432 aa, Arabidopsis thaliana; identical to SEQ ID NO: 38637
  peptide (1)..(432): Ceres Seq. ID no. 13602632

SEQ ID NO: 99301 - protein, 397 aa, Arabidopsis thaliana; identical to SEQ ID NO: 38638
  peptide (1)..(397): Ceres Seq. ID no. 13602633

SEQ ID NO: 99302 - DNA, 1250 bp, Arabidopsis thaliana
  misc_feature (1)..(1250): Ceres Seq. ID no. 13602634
  misc_feature (1)..(1250): Ortholog of  Ceres SEQ ID NO 14302852 as cited in SEQ ID NO 64814
  misc_feature (1)..(1250): Ortholog of  Ceres SEQ ID NO 13598593 as cited in SEQ ID NO 64978
  misc_feature (1)..(1250): Ortholog of  Ceres SEQ ID NO 14303067 as cited in SEQ ID NO 67078
  misc_feature (1)..(1250): Ortholog of  Ceres SEQ ID NO 13595992 as cited in SEQ ID NO 68401
aaaacaaaccaactttccttctctaatcaaaacaagaaagacacaaagatggagatctcaaaaacccttttgctagtgatttctctggtggctgcaacttgtttcttgcaagccaaggcagctggagtttattgtagtaacccttacactcgatgttaccgcaagtacattaggtgtccagaggaatgtccaagcaaaaccgctatgaactccaagaacaaagtgtgctacgccgattgcgatagacccacttgcaaatcccaatgccgcatgaggaaaccaaactgcaacagacctggatcagcttgttatgacccgaggttcattggaggagacggcattgtgttctacttccatggaaagagcaatgaagagtttagcctcgtctctgactctgaccttcagatcaatggtaggttcattggtcacagacccgctggtcgtgccagagacttcacatggatccaagctctaggattccttttcaactccaacaaattctccctcgaagccgcgaaaaccgcctcatgggacaacgaaatcgaccatctcaaattcagttacgatggccaagatttatctgttccagaagaaactctctccacctggtactcaccaaacaaggacatcaagatcgagagagtgagtatgagaaacagcgtgatcgtgacaatcaaagacaaagccgagatcatgatcaatgtggttccagtgacaaaagaagacgacagaatccatagctacaaagtaccatcagatgattgttttgcacatcttgaggttcaattcagattctttaacctttcacctaaggttgatggaatcttgggacgaacctacaggcccgatttccaaaatccggctaagcctggagtcgcaatgccagttgttggtggtgaagacagcttcaagacttcttctctactctccaatgactgtaaaacttgcattttctctgagtcacaagcagagattgattctgttaagtcagagattgaatatgcaactttggattgtacccgtggagcgtcttctggttacggtatcgtgtgcaggaagtaaaaaaagaatcatataaacttggcttaaaagaagaataatgccagagagctttagcttctactggagattttccaaagtataatataagtgaaggaataatatgtaaacttgcaatgtatttgtattgtatcatccaccatgtattctaatttgtattaacctaatcattgttattgatatataatacc

SEQ ID NO: 99303 - protein, 353 aa, Arabidopsis thaliana
  peptide (1)..(353): Ceres Seq. ID no. 13602635
KTNQLSFSNQNKKDTKMEISKTLLLVISLVAATCFLQAKAAGVYCSNPYTRCYRKYIRCPEECPSKTAMNSKNKVCYADCDRPTCKSQCRMRKPNCNRPGSACYDPRFIGGDGIVFYFHGKSNEEFSLVSDSDLQINGRFIGHRPAGRARDFTWIQALGFLFNSNKFSLEAAKTASWDNEIDHLKFSYDGQDLSVPEETLSTWYSPNKDIKIERVSMRNSVIVTIKDKAEIMINVVPVTKEDDRIHSYKVPSDDCFAHLEVQFRFFNLSPKVDGILGRTYRPDFQNPAKPGVAMPVVGGEDSFKTSSLLSNDCKTCIFSESQAEIDSVKSEIEYATLDCTRGASSGYGIVCRK

SEQ ID NO: 99304 - protein, 337 aa, Arabidopsis thaliana
  peptide (1)..(337): Ceres Seq. ID no. 13602636
MEISKTLLLVISLVAATCFLQAKAAGVYCSNPYTRCYRKYIRCPEECPSKTAMNSKNKVCYADCDRPTCKSQCRMRKPNCNRPGSACYDPRFIGGDGIVFYFHGKSNEEFSLVSDSDLQINGRFIGHRPAGRARDFTWIQALGFLFNSNKFSLEAAKTASWDNEIDHLKFSYDGQDLSVPEETLSTWYSPNKDIKIERVSMRNSVIVTIKDKAEIMINVVPVTKEDDRIHSYKVPSDDCFAHLEVQFRFFNLSPKVDGILGRTYRPDFQNPAKPGVAMPVVGGEDSFKTSSLLSNDCKTCIFSESQAEIDSVKSEIEYATLDCTRGASSGYGIVCRK

SEQ ID NO: 99305 - protein, 285 aa, Arabidopsis thaliana
  peptide (1)..(285): Ceres Seq. ID no. 13602637
MNSKNKVCYADCDRPTCKSQCRMRKPNCNRPGSACYDPRFIGGDGIVFYFHGKSNEEFSLVSDSDLQINGRFIGHRPAGRARDFTWIQALGFLFNSNKFSLEAAKTASWDNEIDHLKFSYDGQDLSVPEETLSTWYSPNKDIKIERVSMRNSVIVTIKDKAEIMINVVPVTKEDDRIHSYKVPSDDCFAHLEVQFRFFNLSPKVDGILGRTYRPDFQNPAKPGVAMPVVGGEDSFKTSSLLSNDCKTCIFSESQAEIDSVKSEIEYATLDCTRGASSGYGIVCRK

SEQ ID NO: 99306 - DNA, 1171 bp, Arabidopsis thaliana
  misc_feature (1)..(1171): Ceres Seq. ID no. 13602642
  misc_feature (1)..(1171): Ortholog of  Ceres SEQ ID NO 13599316 as cited in SEQ ID NO 0
atacatttctccaaaatctccgagttctacaattgtgtgatcaatcaatcttctccgatttcaagcttctcgatcaaaagaatcatcatgggaggaggaagagctatggcgacggcggcgaaggttgctggaatcggagttggtaaaggaggattcaagggatttggatttcctccggcgactgagcagtttcgtgttaaaaccgcggcggctgcggcgtcgtctaaaccggtttcggcttcgattacatcggcggttcatccttctgttgaagaagatgggatgattatgcagagaccggtttgggatgattgggaatttgctgaagaagaaccgattcctagggttgtttttagcaaacctcctagtcttgaagaagctaaagaagctactgaagatcttaaagaagcaattaatttggtgtatatgtcatctccaaagtcgtctgctgctatggaaggatcaaatgatggtggctctgtttccaaaatgctctctggttttcaatcttctgagaacagagctgttgaatcagctgttccacaagttgctcttcaagcatttgcttttctaagtgagaacactgctgcgcagactgttgttgcttccattgcgagtgacccaaaagtatgggatgctgttatggagaataaggatctcatgaaatttcttcagaccaacaaaaccgctgtttcctctcaagttgaatctgacaatgacgaccaatctgaacgttcgagcacgactgagtgtgaagtcgtggaaactaagccaatggaactcttagagattctgcaggacatgaagctaaaagctgttcggttgatggaaaatgtatcttcctactttggtgacttgtttgggttaggatcagttacagaagatggaaaagacaagaagcagacgttgttcaatgaccctcgttctctgtttggattagctgtggttgttatcttcatggtagttttaaaacgtgcttaagatctcttgttcctgaattcgccgatatagcggaaaaacaactacgtactctgtgttatcgtttaaactctgtttcattcctttgctttgttatcgtttaaactctgttttttgtttgattggaatgatttggaaccgtcattggatcttttcataatttataaataaaaagatcctttggatgttttat

SEQ ID NO: 99307 - protein, 326 aa, Arabidopsis thaliana; identical to SEQ ID NO: 21766
  peptide (1)..(326): Ceres Seq. ID no. 13602643

SEQ ID NO: 99308 - protein, 297 aa, Arabidopsis thaliana; identical to SEQ ID NO: 21767
  peptide (1)..(297): Ceres Seq. ID no. 13602644

SEQ ID NO: 99309 - protein, 291 aa, Arabidopsis thaliana; identical to SEQ ID NO: 21768
  peptide (1)..(291): Ceres Seq. ID no. 13602645

SEQ ID NO: 99310 - DNA, 811 bp, Arabidopsis thaliana
  misc_feature (1)..(811): Ceres Seq. ID no. 13602646
  misc_feature (1)..(811): Ortholog of  Ceres SEQ ID NO 12582856 as cited in SEQ ID NO 51905
  misc_feature (1)..(811): Ortholog of  Ceres SEQ ID NO 14316155 as cited in SEQ ID NO 52377
caatcgattttgtttgttctctgcttttttggtttagggttttagcttttcaaagttaaaacctttttttcccgaagaagaatcaatacgactcaaatcaatcaattgaatctatggcgatggctatgagacttccagcgatatctagagctgtgacggaagtagcttcagctccggttggtttgagacgactgttctgttcaaatgcttcaaggttctcttttttgtctccacaagctgaatcccaaacaccggctcgtcctcaggctgaacctagcaccaatctcttcgtctccgggcttagtaagcgcaccacttctgaaggactaaggactgcttttgctcagtttggagaagttgctgatgctaaggttgtcacagacagagtatcaggatattccaaagggtttggatttgttagatatgccactttagaagattctgccaaaggcatagctggaatggacgggaagtttcttgacggttgggtcatattcgcagagtatgcaagaccgagagagcaatcacagtcatatcaacctcagaacaacatgtctcgtcctccatactatggtaaccgctagagaaacagttttcttcggttcttatgaatcttttatattcatatttatgcttcattctatcctcttctatgatcgaactgtgttgtgcttcgtctcgtgttattacctttagaagattaaaaacttcaaattatattttgaaggaataatcagaaactgtcatttacaaaaccaaagtattaagtgtaatagttttttaagaggaagaggattttgcttacatggtt

SEQ ID NO: 99311 - protein, 156 aa, Arabidopsis thaliana; identical to SEQ ID NO: 29421
  peptide (1)..(156): Ceres Seq. ID no. 13602647

SEQ ID NO: 99312 - protein, 154 aa, Arabidopsis thaliana; identical to SEQ ID NO: 29422
  peptide (1)..(154): Ceres Seq. ID no. 13602648

SEQ ID NO: 99313 - protein, 152 aa, Arabidopsis thaliana; identical to SEQ ID NO: 29423
  peptide (1)..(152): Ceres Seq. ID no. 13602649

SEQ ID NO: 99314 - DNA, 766 bp, Arabidopsis thaliana
  misc_feature (1)..(766): Ceres Seq. ID no. 13602650
  misc_feature (1)..(766): Ortholog of  Ceres SEQ ID NO 15172961 as cited in SEQ ID NO 51757
  misc_feature (1)..(766): Ortholog of  Ceres SEQ ID NO 15173213 as cited in SEQ ID NO 57923
  misc_feature (1)..(766): Ortholog of  Ceres SEQ ID NO 13660855 as cited in SEQ ID NO 67670
atcgtcatctgtggaacggataggacgaaggaaaaagaagaagagtgaaagttgcagagcgagaaaaaatggcaaccatgtctgctcttcagagctcttttacttctctttctctatctcccagctcttccttcctcggccagcgtttaatttccccgatttccctctccgtcacttctccggtcaagcccgctgagaacccatgtcttgttcttgcaaagctcaagcgttgggaacgaaaagaatgcaaaccaaacagtcttccgattctccacaaaatgcatgtcaagtttggagatacagtcaaagtaatatctggacgcgacaagggtaaaatcggagaggttactaagattttcactcacaacagtaccattgtgatcaaagatgtgaacctcaaaacaaaacacatgaagagccgagaagagggagagcctggtcaaattgtcaagatagaagcacctatccacagctcaaatgtgatgttgtattcaaaagaaaaagacgtagtaagccgggtgggtcacaaggtacttgaagatggacagaaggtaagatatctgatcaaaacaggggaactcatcgacaccattgagaagtggaagctacttaaggaggctaaggataaggaaaccacccaagttgcagttacctccgcatcttagcgtctcatttctttcttcttcagtgcacttttgatataatagacctatgcattggatggatgtattgaatcccttttaaggtaaattataatatttctgct

SEQ ID NO: 99315 - protein, 198 aa, Arabidopsis thaliana; identical to SEQ ID NO: 20975
  peptide (1)..(198): Ceres Seq. ID no. 13602651

SEQ ID NO: 99316 - protein, 195 aa, Arabidopsis thaliana; identical to SEQ ID NO: 20976
  peptide (1)..(195): Ceres Seq. ID no. 13602652

SEQ ID NO: 99317 - protein, 128 aa, Arabidopsis thaliana; identical to SEQ ID NO: 20977
  peptide (1)..(128): Ceres Seq. ID no. 13602653

SEQ ID NO: 99318 - DNA, 790 bp, Arabidopsis thaliana
  misc_feature (1)..(790): Ceres Seq. ID no. 13602654
  misc_feature (1)..(790): Ortholog of  Ceres SEQ ID NO 12588828 as cited in SEQ ID NO 1280
acacaatcaaccactttccttttttcattcgtctcaatttctctcatgacgagtagtagtggaagcctcaaactagagatccacactgatgacaagacgccgggaaagtggagcgtaccgctcggcgatgatgttttccgaaggttcttgagcgggggaggaggctcggagaaggctgtgttcggtgaggggtctctttttagcccgtttttgttcgggaagtactttgatccgtcagacgcctttccgttgtgggaatttgaagctgaggttttgctggcgagccttaggagcttaggacagtgtagagtcgattggtctcagacggatcaagcttatgtccttaaatccgatatccccgtggtggggaaaaataacgtgcaggtgtacgtggacattaacggaagagtgatggagattagtggccaatggaacagcaacaagaaagcggcgaccaacagtgactggagaagcggccggtggtgggaacatggctatgtccgccgtctcgagcttcctagcgatgccgacgccaaatactctgaagctttcctctctaacaacgacgattactctttcttagagatccgaatccctaagataaattctaagaacaagttttaatctgatcatgtcgccttgacgagttttaactttagattcttttcgtaattttgttttctttagttaactattattatagatatgaaattctgtggtagagacacaatggatgaatgatatgttatatatacatactataaaatatatcaaatataacatatcgatt

SEQ ID NO: 99319 - protein, 207 aa, Arabidopsis thaliana
  peptide (1)..(207): Ceres Seq. ID no. 13602655
TQSTTFLFSFVSISLMTSSSGSLKLEIHTDDKTPGKWSVPLGDDVFRRFLSGGGGSEKAVFGEGSLFSPFLFGKYFDPSDAFPLWEFEAEVLLASLRSLGQCRVDWSQTDQAYVLKSDIPVVGKNNVQVYVDINGRVMEISGQWNSNKKAATNSDWRSGRWWEHGYVRRLELPSDADAKYSEAFLSNNDDYSFLEIRIPKINSKNKF

SEQ ID NO: 99320 - protein, 192 aa, Arabidopsis thaliana
  peptide (1)..(192): Ceres Seq. ID no. 13602656
MTSSSGSLKLEIHTDDKTPGKWSVPLGDDVFRRFLSGGGGSEKAVFGEGSLFSPFLFGKYFDPSDAFPLWEFEAEVLLASLRSLGQCRVDWSQTDQAYVLKSDIPVVGKNNVQVYVDINGRVMEISGQWNSNKKAATNSDWRSGRWWEHGYVRRLELPSDADAKYSEAFLSNNDDYSFLEIRIPKINSKNKF

SEQ ID NO: 99321 - DNA, 1401 bp, Arabidopsis thaliana
  misc_feature (1)..(1401): Ceres Seq. ID no. 13602669
  misc_feature (1)..(1401): Ortholog of  Ceres SEQ ID NO 14315626 as cited in SEQ ID NO 52943
  misc_feature (1)..(1401): Ortholog of  Ceres SEQ ID NO 14313536 as cited in SEQ ID NO 67925
aaagtttaggttttggtttttttgtccgtcgtagtgatgcagcaaccaccgtcaaacgccgccggagctggacagataccatcaggacaacagcatttgtggatgatgatgcaacagcagcagcagcagcagcagatgcagttgtctgcggcgccactaggtcaacatcagtacggtattggatctcagaatccaggatccgctagcgatgttaagtcgttgtggatcggagacttgcagcaatggatggacgagaactacatcatgagcgtctttgctcagtctggcgaggctacatcagctaaagtcattcgtaataagctgacgggacaatctgaaggttatggattcattgagttcgtcagccactctgtagcagagcgggttttgcagacttacaatggtgctcccatgccgagcactgaacagacgtttaggctcaactgggctcaggctggggctggagagaaacgattccagactgaagggcctgaccataccattttcgtaggtgacttggcacctgaggtgactgactatatgctctcggacacattcaagaatgtgtatgggtctgtcaaaggggctaaagttgtgcttgacaggaccactggaaggtccaaggggtatgggtttgttaggtttgcggatgaaaatgagcagatgcgtgccatgactgaaatgaatggtcaatactgctcgacaaggcctatgcgtattggtccggctgccaataagaatgctcttccgatgcaaccagctatgtatcaaaacactcaaggagcaaatgctggagataatgatcctaataacacaacaatttttgttggaggtctggatgctaatgttacagacgatgaattaaagtcaatttttggtcaatttggtgaacttcttcatgtgaaaatacctccaggaaaacgttgtggattcgttcaatatgccaacaaggcgtctgcagagcatgcactttcggtgctgaatggaacacaattaggtggacaaagcatccgtctttcgtggggacgtagtccaaacaagcagtctgatcaagcgcaatggaacggtggtggatactatggataccctccacagccacagggcggctatggttatgcagctcaaccaccaactcaagaccctaatgcgtactatggtggttacactggctatggcaactatcagcagcaacgtcagtgaaacatcaacatcagctatttctaccaatgtcttggaacaaaagatgagcgattgtgtcttattaggacttctagattaaaagtgctctctttttgtttgagttttattttgcaaatgagtcgatcttgaatttgctatgaacaaagtgtttactgaatgttgaaactttattctgttgttttttaaaataaatatttatcc

SEQ ID NO: 99322 - protein, 387 aa, Arabidopsis thaliana; identical to SEQ ID NO: 39504
  peptide (1)..(387): Ceres Seq. ID no. 13602670

SEQ ID NO: 99323 - protein, 365 aa, Arabidopsis thaliana; identical to SEQ ID NO: 39505
  peptide (1)..(365): Ceres Seq. ID no. 13602671

SEQ ID NO: 99324 - protein, 364 aa, Arabidopsis thaliana; identical to SEQ ID NO: 39506
  peptide (1)..(364): Ceres Seq. ID no. 13602672

SEQ ID NO: 99325 - DNA, 1372 bp, Arabidopsis thaliana
  misc_feature (1)..(1372): Ceres Seq. ID no. 13602673
  misc_feature (1)..(1372): Ortholog of  Ceres SEQ ID NO 13655881 as cited in SEQ ID NO 64426
aggaatcacagtgatgatcaagagtttatctctggcttctgctcgcatcttcttctctagaacctctccatcttttcttattcccttctcaaagctctctgtatctcatcgtcggaaattctcagtaatggccagtggaagcgacgagttcgtgaaaggaaatgtttatccaaatggcgttgctctcattactcttgatcgacctaaagctctcaacgccatgaatctagaaatggatttgaagtacaaaagcttgcttgatgaatgggaatatgatcctggagtcaaatgtgttgtcgtcgaaggaagcacatctcgggccttttgtgcaggaatggatattaaaggagttgttgcagagatcctaatggacaaaaatacgtctcttgtgcaaaaggtatttacagctgagtatagcctgatatgcaagattgctggatacagaaaaccatatatctctttaatggatggcataacaatgggatttggtcttggtctttctggacatggacgctaccgagtgataacagagaggacggtcctcgcaatgccagaaaatggaatcggcttgtttccagatgttggattttcatatattgcagctcatagccctggcgaaggatctgttggtgcttacctaggtatgactgggagaaggatttccacaccttcagatgcactgtttgtgggtcttgggacacattatgtaccatctggaaagctaggttcactcagagaagccattttgtcagctgacctttccaaggatccccaacaacacatccaagcaactttatcaaattacagcagtgatcctgaaactgagtcccacctccaaatgcttttgcctcagatagaatcagcttttagtgtaagtaagtctgttaaggaaacaatagaagagctgaaaaagttccagcagagcagtgaggcttcagttgcagaatgggctaatgaagcagtccaaggcattgaaaaaggggcacctttttctctttacctaacacacaagtacttctccaaagttgcttgtgccaagggtaaaaccaacaacgccatggcaacacttaacggtgtgatgataactgagtaccgcattgctctaagatctgcattgcgcagtgatttcactgaaggtgttagagcagtcttgactgacaaggaccagaatccgaaatggaaaccagcgagcttagacgaagtagatgaaaccgaagtggacgcgctctttatgccattaagtcctgaatttgaagagctaaacgtatgaaccaaacaacagagatattgcttagatcatgaattggtgattattgtgttgcagcttttgaacatatcccatatatttatcaaattttcaagtcgtagattg

SEQ ID NO: 99326 - protein, 422 aa, Arabidopsis thaliana
  peptide (1)..(422): Ceres Seq. ID no. 13602674
GITVMIKSLSLASARIFFSRTSPSFLIPFSKLSVSHRRKFSVMASGSDEFVKGNVYPNGVALITLDRPKALNAMNLEMDLKYKSLLDEWEYDPGVKCVVVEGSTSRAFCAGMDIKGVVAEILMDKNTSLVQKVFTAEYSLICKIAGYRKPYISLMDGITMGFGLGLSGHGRYRVITERTVLAMPENGIGLFPDVGFSYIAAHSPGEGSVGAYLGMTGRRISTPSDALFVGLGTHYVPSGKLGSLREAILSADLSKDPQQHIQATLSNYSSDPETESHLQMLLPQIESAFSVSKSVKETIEELKKFQQSSEASVAEWANEAVQGIEKGAPFSLYLTHKYFSKVACAKGKTNNAMATLNGVMITEYRIALRSALRSDFTEGVRAVLTDKDQNPKWKPASLDEVDETEVDALFMPLSPEFEELNV

SEQ ID NO: 99327 - protein, 418 aa, Arabidopsis thaliana [sequence omitted]

SEQ ID NO: 99328 - protein, 380 aa, Arabidopsis thaliana
  peptide (1)..(380): Ceres Seq. ID no. 13602676
MASGSDEFVKGNVYPNGVALITLDRPKALNAMNLEMDLKYKSLLDEWEYDPGVKCVVVEGSTSRAFCAGMDIKGVVAEILMDKNTSLVQKVFTAEYSLICKIAGYRKPYISLMDGITMGFGLGLSGHGRYRVITERTVLAMPENGIGLFPDVGFSYIAAHSPGEGSVGAYLGMTGRRISTPSDALFVGLGTHYVPSGKLGSLREAILSADLSKDPQQHIQATLSNYSSDPETESHLQMLLPQIESAFSVSKSVKETIEELKKFQQSSEASVAEWANEAVQGIEKGAPFSLYLTHKYFSKVACAKGKTNNAMATLNGVMITEYRIALRSALRSDFTEGVRAVLTDKDQNPKWKPASLDEVDETEVDALFMPLSPEFEELNV

SEQ ID NO: 99329 - DNA, 1073 bp, Arabidopsis thaliana
  misc_feature (1)..(1073): Ceres Seq. ID no. 13602677
  misc_feature (1)..(1073): Ortholog of  Ceres SEQ ID NO 13596762 as cited in SEQ ID NO 63019
ccatctaacaaaactcttgtacttaagcatggtggttaatcagaagatatccggccttgcatccgctatgaacgccaaaatcatcggttcaggagagagatcgatggtcttggcacacggtttcggaggcgaccagtcggtttgggataaaataataccggtcttgtcccaatccttcaaagttttggtctttgactggcttttctctggagccattaaagatcaaactctctatgacccttcaaagtataactccttagacgtcttctctgacgatctcattgctcttatggaggagttgaagtttggccctgtcgtgttcgtaggccattccatgtcgggggtgatcggttgtgctgcttctattaaaaggcccgacttgtttacaaatcttctccttattgctgcttctccaaggtatataaacagtgaggattacaaaggagggtttgagtcaaaagacattgacacgatcattaccagcattggctccaactacgaagcttgggcggttgatttctcctcattcgtggtcgactcgagagactctctctcggtccaaaggttcgagaagtcccttaagaagatgaagcccgagacagctcttgccttagctaagatagtgtttggtagcgacgagagagagattttgggacaagtgtcagtgccttgccatgtcatacaaccaggaaacgacgtcgtagtgcctgtctccgtcgcatacttcatgcaggagaagattaaggggaaatcgacagtggagatcatcgaggacgcgatcgggcattttccacagatgacatcacatttggagctgcttggcgtcatgaggcgcctccttgagttttaaggcttatataagagctttgcgtcgtttgatcgagtttcttcttgtctataatatcgtattactaatataacgaagtgggtctattagaatttttcatatatgtttgtgtaatgtgaatgtgttattatattcttagcacaatgattttcatttttagtgttttttttttaaacataggattgaaagtaatatgttataagtttctttatatcacactgtcaaa

SEQ ID NO: 99330 - protein, 282 aa, Arabidopsis thaliana
  peptide (1)..(282): Ceres Seq. ID no. 13602678
HLTKLLYLSMVVNQKISGLASAMNAKIIGSGERSMVLAHGFGGDQSVWDKIIPVLSQSFKVLVFDWLFSGAIKDQTLYDPSKYNSLDVFSDDLIALMEELKFGPVVFVGHSMSGVIGCAASIKRPDLFTNLLLIAASPRYINSEDYKGGFESKDIDTIITSIGSNYEAWAVDFSSFVVDSRDSLSVQRFEKSLKKMKPETALALAKIVFGSDEREILGQVSVPCHVIQPGNDVVVPVSVAYFMQEKIKGKSTVEIIEDAIGHFPQMTSHLELLGVMRRLLEF

SEQ ID NO: 99331 - protein, 273 aa, Arabidopsis thaliana
  peptide (1)..(273): Ceres Seq. ID no. 13602679
MVVNQKISGLASAMNAKIIGSGERSMVLAHGFGGDQSVWDKIIPVLSQSFKVLVFDWLFSGAIKDQTLYDPSKYNSLDVFSDDLIALMEELKFGPVVFVGHSMSGVIGCAASIKRPDLFTNLLLIAASPRYINSEDYKGGFESKDIDTIITSIGSNYEAWAVDFSSFVVDSRDSLSVQRFEKSLKKMKPETALALAKIVFGSDEREILGQVSVPCHVIQPGNDVVVPVSVAYFMQEKIKGKSTVEIIEDAIGHFPQMTSHLELLGVMRRLLEF

SEQ ID NO: 99332 - protein, 260 aa, Arabidopsis thaliana
  peptide (1)..(260): Ceres Seq. ID no. 13602680
MNAKIIGSGERSMVLAHGFGGDQSVWDKIIPVLSQSFKVLVFDWLFSGAIKDQTLYDPSKYNSLDVFSDDLIALMEELKFGPVVFVGHSMSGVIGCAASIKRPDLFTNLLLIAASPRYINSEDYKGGFESKDIDTIITSIGSNYEAWAVDFSSFVVDSRDSLSVQRFEKSLKKMKPETALALAKIVFGSDEREILGQVSVPCHVIQPGNDVVVPVSVAYFMQEKIKGKSTVEIIEDAIGHFPQMTSHLELLGVMRRLLEF

SEQ ID NO: 99333 - DNA, 1760 bp, Arabidopsis thaliana
  misc_feature (1)..(1760): Ceres Seq. ID no. 13602681
  misc_feature (1)..(1760): Ortholog of  Ceres SEQ ID NO 14307571 as cited in SEQ ID NO 58392
agaccgctagttttttttgccactctcttcgtctctctcttgtagcaatgccgcttcttcatccacagtcgttgcggcatccttctttcgagattcagacccaaagaagaagcaattccacaacaagattgcttctttctcacaagtttctccattctcaagcttccattatctcaatctccaggacaagaatcctcaaacgggtctctcagaatctctctgtagctaaagctgcttcagctcaagctagtagtagtgttggtgagagtgttgctcaaacatcagaaaaagatgtgttgaaggctctgtctcagattattgatcctgattttgggacagatattgtttcttgtggttttgtgaaagatttggggattaatgaagctttgggtgaggtttcgttccgtttggagctgacaacacccgcatgtccagtcaaagacatgtttgagaacaaggcaaatgaggtagttgcagcccttccatgggtgaagaaggtaaatgtgacaatgtcagcacaaccagccaagcccatttttgcagggcagcttccctttggattatcaagaatttcgaacatcatcgctgtttctagttgcaagggtggtgttgggaaatcaacagtagctgtaaatcttgcttatacattagctggtatgggtgctagagttggtatctttgatgctgatgtctatggtccaagtctaccaaccatggtcaatcctgagagccgtatattggaaatgaacccggagaagaagaccatcattccaacagaatacatgggcgtcaagctagtctcatttggatttgcaggacaagggcgtgccattatgagaggtcctatggtgtctggtgttataaaccaactccttacaacaactgaatggggagagctggactatcttgttatcgacatgcctcctggaactggtgatatacaactgaccttatgccaggttgcgccattgacagcagcggtaattgtcaccacccctcaaaagttggcgtttattgatgttgcaaaaggtgtaaggatgttctcaaaacttaaggtgccttgcgttgctgttgtggagaatatgtgccactttgacgctgatgggaaacgttattacccttttgggaaaggttcaggttctgaggtggtcaagcaattcggcatacctcacctctttgacctccccattagaccaacgttatctgcttcgggggatagcggaactcctgaagtagtgtcggatcctctaagtgacgttgccagaacgttccaggatcttggtgtatgtgtagtgcaacaatgcgccaagatacgccagcaagtatcaacggccgtgacatacgacaagtatctcaaggcaattagagtgaaggtaccaaactcagacgaagagttcttactgcaccctgcaaccgtcagaagaaatgatagatctgcacaaagtgtggatgaatggactggagagcaaaaagttctatatggcgatgtagcggaagatatcgaacctgaggacatacgaccaatgggaaactacgctgtctcgataacctggcccgacgggtttagccagattgctccatatgaccagttggaagaaattgaaaggctagtagatgttcctccattgtctccagtcgaagtctagttcttgaacaatatgttttcgctttacgatatctcttgaaaatgaaatttgtatattcatattaagagcattgttatgaatcttacaatgatgaaaagagggttactgtaagct

SEQ ID NO: 99334 - protein, 547 aa, Arabidopsis thaliana
  peptide (1)..(547): Ceres Seq. ID no. 13602682
TASFFCHSLRLSLVAMPLLHPQSLRHPSFEIQTQRRSNSTTRLLLSHKFLHSQASIISISRTRILKRVSQNLSVAKAASAQASSSVGESVAQTSEKDVLKALSQIIDPDFGTDIVSCGFVKDLGINEALGEVSFRLELTTPACPVKDMFENKANEVVAALPWVKKVNVTMSAQPAKPIFAGQLPFGLSRISNIIAVSSCKGGVGKSTVAVNLAYTLAGMGARVGIFDADVYGPSLPTMVNPESRILEMNPEKKTIIPTEYMGVKLVSFGFAGQGRAIMRGPMVSGVINQLLTTTEWGELDYLVIDMPPGTGDIQLTLCQVAPLTAAVIVTTPQKLAFIDVAKGVRMFSKLKVPCVAVVENMCHFDADGKRYYPFGKGSGSEVVKQFGIPHLFDLPIRPTLSASGDSGTPEVVSDPLSDVARTFQDLGVCVVQQCAKIRQQVSTAVTYDKYLKAIRVKVPNSDEEFLLHPATVRRNDRSAQSVDEWTGEQKVLYGDVAEDIEPEDIRPMGNYAVSITWPDGFSQIAPYDQLEEIERLVDVPPLSPVEV

SEQ ID NO: 99335 - protein, 532 aa, Arabidopsis thaliana
  peptide (1)..(532): Ceres Seq. ID no. 13602683
MPLLHPQSLRHPSFEIQTQRRSNSTTRLLLSHKFLHSQASIISISRTRILKRVSQNLSVAKAASAQASSSVGESVAQTSEKDVLKALSQIIDPDFGTDIVSCGFVKDLGINEALGEVSFRLELTTPACPVKDMFENKANEVVAALPWVKKVNVTMSAQPAKPIFAGQLPFGLSRISNIIAVSSCKGGVGKSTVAVNLAYTLAGMGARVGIFDADVYGPSLPTMVNPESRILEMNPEKKTIIPTEYMGVKLVSFGFAGQGRAIMRGPMVSGVINQLLTTTEWGELDYLVIDMPPGTGDIQLTLCQVAPLTAAVIVTTPQKLAFIDVAKGVRMFSKLKVPCVAVVENMCHFDADGKRYYPFGKGSGSEVVKQFGIPHLFDLPIRPTLSASGDSGTPEVVSDPLSDVARTFQDLGVCVVQQCAKIRQQVSTAVTYDKYLKAIRVKVPNSDEEFLLHPATVRRNDRSAQSVDEWTGEQKVLYGDVAEDIEPEDIRPMGNYAVSITWPDGFSQIAPYDQLEEIERLVDVPPLSPVEV

SEQ ID NO: 99336 - protein, 400 aa, Arabidopsis thaliana
  peptide (1)..(400): Ceres Seq. ID no. 13602684
MFENKANEVVAALPWVKKVNVTMSAQPAKPIFAGQLPFGLSRISNIIAVSSCKGGVGKSTVAVNLAYTLAGMGARVGIFDADVYGPSLPTMVNPESRILEMNPEKKTIIPTEYMGVKLVSFGFAGQGRAIMRGPMVSGVINQLLTTTEWGELDYLVIDMPPGTGDIQLTLCQVAPLTAAVIVTTPQKLAFIDVAKGVRMFSKLKVPCVAVVENMCHFDADGKRYYPFGKGSGSEVVKQFGIPHLFDLPIRPTLSASGDSGTPEVVSDPLSDVARTFQDLGVCVVQQCAKIRQQVSTAVTYDKYLKAIRVKVPNSDEEFLLHPATVRRNDRSAQSVDEWTGEQKVLYGDVAEDIEPEDIRPMGNYAVSITWPDGFSQIAPYDQLEEIERLVDVPPLSPVEV

SEQ ID NO: 99337 - DNA, 2154 bp, Arabidopsis thaliana
  misc_feature (1)..(2154): Ceres Seq. ID no. 13602685
  misc_feature (1)..(2154): Ortholog of  Ceres SEQ ID NO 13599779 as cited in SEQ ID NO 0
atggattcatcatcgacgaaatcgaagatctcacattcacgcaagacgaacaaaaagtcaaacaagaagcacgaatcaaatgggaaacaacaacaacaacaagacgtcgatggtggtggtgggtgtttgagatcatcatggatctgcaagaatgcatcgtgtagagctaatgtgcctaaagaagattccttttgcaagagatgttcttgttgtgtttgtcataatttcgatgaaaacaaggatcctagtctttggttagtttgtgagcctgagaaatctgatgatgttgagttctgtggcttatcgtgtcacattgagtgtgcttttcgagaagtcaaagttggtgttattgctcttgggaatctgatgaagcttgatggttgtttttgttgctactcatgtggcaaagtttctcaaattcttggatgttggaaaaagcagcttgtggcagcaaaggaagcacgacgacgtgatggactgtgttatagaatagatttgggttatagactgttgaatgggactagtcggtttagtgaattgcatgagattgttagagctgctaagtctatgctggaggatgaagttggacctcttgatggacctactgctagaactgatagaggcattgttagtaggcttcctgttgcagctaatgtgcaagagctttgcacttctgcaattaaaaaggcaggggagttgtcagccaatgcagatttagttccagctgcgtgcaggtttcatttcgaagatattgcaccaaagcaagtgactcttcgtctgattgagctacctagtgctgtagaatatgatgttaagggttacaagttatggtatttcaagaaaggagagatgcctgaggatgatttatttgttgattgcagtagaactgagaggaggatggtgatatctgaccttgagccttgcacggagtacacattccgtgttgtctcttacacagaagctggtatatttggccattcgaacgctatgtgctttacgaagagcgttgagatattgaaaccagtggatggtaaggaaaagagaacaattgatttagtaggtaacgctcagccctcagatagagaggagaaaagtagcatttcctcaagatttcaaattgggcaacttgggaagtatgtgcagttggctgaagctcaggaggaaggcttgcttgaagcgttttacaatgtagatactgagaaaatttgtgagccgccagaggaagaattgccacctcgaaggccacatgggtttgatctaaatgtagtttcagtgccagacttgaatgaggagttcactccacctgattcttctggaggtgaagacaatggagtgccgctaaattcgcttgctgaggctgatggtggtgatcatgatgataactgtgatgatgctgtgtctaacggtagacggaagaacaacaacgactgcttggttatatcagatggaagtggtgatgataccggatttgatttcctcatgaccaggaagaggaaagcaatttcagacagtaatgactcagagaaccacgagtgtgacagttcgtcgattgatgacactcttgagaaatgtgtgaaggtgatcaggtggctggagcgtgaaggccacattaaaacaacattcagggtcaggttcttgacatggttcagcatgagctcaaccgctcaggagcaatctgttgtgagcacatttgtgcagactttagaggatgatccaggtagccttgctggccaacttgtcgacgcatttactgatgttgtctccaccaaaaggccaaacaatggagtaatgacctcacattgatcaagcttcccattgattcaaccacattctttcttagtatgaataatatgattagaactaaatagtccatgatttctctaacgtggattcggctatttatcatcaatttggaccacaggattgaccacattgcaaatctctttggattggggtttagatttaggatttgacataataatattttaaaaaatctccttagggagagtattttgcctctgttccttgtttctgttcatatctaaagaggtcctgcgaaccattcgctctgttgtgtactaactcgtgtaaagtgtcaatttcatcaacttctaaaacaatatcttggttatattgattgatcgtttcagattt

SEQ ID NO: 99338 - protein, 600 aa, Arabidopsis thaliana
  peptide (1)..(600): Ceres Seq. ID no. 13602686
MDSSSTKSKISHSRKTNKKSNKKHESNGKQQQQQDVDGGGGCLRSSWICKNASCRANVPKEDSFCKRCSCCVCHNFDENKDPSLWLVCEPEKSDDVEFCGLSCHIECAFREVKVGVIALGNLMKLDGCFCCYSCGKVSQILGCWKKQLVAAKEARRRDGLCYRIDLGYRLLNGTSRFSELHEIVRAAKSMLEDEVGPLDGPTARTDRGIVSRLPVAANVQELCTSAIKKAGELSANADLVPAACRFHFEDIAPKQVTLRLIELPSAVEYDVKGYKLWYFKKGEMPEDDLFVDCSRTERRMVISDLEPCTEYTFRVVSYTEAGIFGHSNAMCFTKSVEILKPVDGKEKRTIDLVGNAQPSDREEKSSISSRFQIGQLGKYVQLAEAQEEGLLEAFYNVDTEKICEPPEEELPPRRPHGFDLNVVSVPDLNEEFTPPDSSGGEDNGVPLNSLAEADGGDHDDNCDDAVSNGRRKNNNDCLVISDGSGDDTGFDFLMTRKRKAISDSNDSENHECDSSSIDDTLEKCVKVIRWLEREGHIKTTFRVRFLTWFSMSSTAQEQSVVSTFVQTLEDDPGSLAGQLVDAFTDVVSTKRPNNGVMTSH

SEQ ID NO: 99339 - protein, 478 aa, Arabidopsis thaliana
  peptide (1)..(478): Ceres Seq. ID no. 13602687
MKLDGCFCCYSCGKVSQILGCWKKQLVAAKEARRRDGLCYRIDLGYRLLNGTSRFSELHEIVRAAKSMLEDEVGPLDGPTARTDRGIVSRLPVAANVQELCTSAIKKAGELSANADLVPAACRFHFEDIAPKQVTLRLIELPSAVEYDVKGYKLWYFKKGEMPEDDLFVDCSRTERRMVISDLEPCTEYTFRVVSYTEAGIFGHSNAMCFTKSVEILKPVDGKEKRTIDLVGNAQPSDREEKSSISSRFQIGQLGKYVQLAEAQEEGLLEAFYNVDTEKICEPPEEELPPRRPHGFDLNVVSVPDLNEEFTPPDSSGGEDNGVPLNSLAEADGGDHDDNCDDAVSNGRRKNNNDCLVISDGSGDDTGFDFLMTRKRKAISDSNDSENHECDSSSIDDTLEKCVKVIRWLEREGHIKTTFRVRFLTWFSMSSTAQEQSVVSTFVQTLEDDPGSLAGQLVDAFTDVVSTKRPNNGVMTSH

SEQ ID NO: 99340 - protein, 411 aa, Arabidopsis thaliana
  peptide (1)..(411): Ceres Seq. ID no. 13602688
MLEDEVGPLDGPTARTDRGIVSRLPVAANVQELCTSAIKKAGELSANADLVPAACRFHFEDIAPKQVTLRLIELPSAVEYDVKGYKLWYFKKGEMPEDDLFVDCSRTERRMVISDLEPCTEYTFRVVSYTEAGIFGHSNAMCFTKSVEILKPVDGKEKRTIDLVGNAQPSDREEKSSISSRFQIGQLGKYVQLAEAQEEGLLEAFYNVDTEKICEPPEEELPPRRPHGFDLNVVSVPDLNEEFTPPDSSGGEDNGVPLNSLAEADGGDHDDNCDDAVSNGRRKNNNDCLVISDGSGDDTGFDFLMTRKRKAISDSNDSENHECDSSSIDDTLEKCVKVIRWLEREGHIKTTFRVRFLTWFSMSSTAQEQSVVSTFVQTLEDDPGSLAGQLVDAFTDVVSTKRPNNGVMTSH

SEQ ID NO: 99341 - DNA, 624 bp, Arabidopsis thaliana
  misc_feature (1)..(624): Ceres Seq. ID no. 13602689
  misc_feature (1)..(624): Ortholog of  Ceres SEQ ID NO 13594501 as cited in SEQ ID NO 51327
atcttcatcgtttctcaatttcaaaactcagattaataaaattttcgcgttgttcctttctctcaattcatcgacgatgccgagcagatacccaggagcagtaacacaagactgggaaccagtagttctccacaaatcaaaacaaaagagccaagacctacgcgatccgaaagcggttaacgcagctctgagaaacggtgtcgcggttcaaacggttaagaaattcgatgccggttcgaacaaaaaggggaaatctacggcggttccggtgattaacacgaagaagctggaagaagaaacagagcctgcggcgatggatcgtgtgaaagcagaggtgaggttgatgatacagaaagcgagattggagaagaagatgtcacaagcggatttggcgaaacagatcaatgagaggactcaggtagttcaggaatatgagaatggtaaagctgttcctaatcaggctgtgcttgcgaagatggagaaggttctaggtgttaaacttaggggtaaaattgggaaatgattaaacgatgtcgtttatcttgtattttgttgaccaatgtaaaaagtaaaaaaaaagtcttgttgttttgtttgataaatgaaaaaacaatatatatcttt

SEQ ID NO: 99342 - protein, 173 aa, Arabidopsis thaliana
  peptide (1)..(173): Ceres Seq. ID no. 13602690
SSSFLNFKTQINKIFALFLSLNSSTMPSRYPGAVTQDWEPVVLHKSKQKSQDLRDPKAVNAALRNGVAVQTVKKFDAGSNKKGKSTAVPVINTKKLEEETEPAAMDRVKAEVRLMIQKARLEKKMSQADLAKQINERTQVVQEYENGKAVPNQAVLAKMEKVLGVKLRGKIGK

SEQ ID NO: 99343 - protein, 148 aa, Arabidopsis thaliana
  peptide (1)..(148): Ceres Seq. ID no. 13602691
MPSRYPGAVTQDWEPVVLHKSKQKSQDLRDPKAVNAALRNGVAVQTVKKFDAGSNKKGKSTAVPVINTKKLEEETEPAAMDRVKAEVRLMIQKARLEKKMSQADLAKQINERTQVVQEYENGKAVPNQAVLAKMEKVLGVKLRGKIGK

SEQ ID NO: 99344 - DNA, 1042 bp, Arabidopsis thaliana
  misc_feature (1)..(1042): Ceres Seq. ID no. 13602696
  misc_feature (1)..(1042): Ortholog of  Ceres SEQ ID NO 14303831 as cited in SEQ ID NO 52976
  misc_feature (1)..(1042): Ortholog of  Ceres SEQ ID NO 12619453 as cited in SEQ ID NO 65952
tccaaataaaaaaaaaaacccccccccccccccccggagaaagccattgtttcagttgatgatggtgatgatatctcttcacttctctactccgccgctagcttttctcaaatctgattccaattccagatttctcaagaaccctaatcctaattttatccaattcaccccaaaatcccaacttcttttcccccaacgtctcaatttcaacaccggaacaaatttaaaccggcgaactctgagttgctatgggattaaggattcaagtgagacaacgaagtctgcgccgtcattagactccggcgacggtggcggcggagatggtggtgatgatgataaaggtgaagtggaggaaaaaaacagactttttccggaatggttggattttacctcggatgatgcacagactgtgtttgtggctatagctgtatcgttggcgtttcgttattttatcgcagaaccaagatatattccttctttgtctatgtatcctacttttgatgttggagacagattagttgcagagaaggtgagttattatttcaggaagccttgtgcaaatgatattgtcatctttaaaagtccaccagttcttcaggaagttgggtatactgatgccgatgtatttattaaacggattgttgccaaagaaggtgaccttgtggaggtacataatgggaaactgatggttaatggtgttgctaggaatgaaaaattcatcttagagcctcctggttatgaaatgacaccaattagggtaccggaaaattcagtctttgtgatgggtgataaccggaataacagttatgattcgcacgtatggggtcctctgcctttgaagaatattattggacggtcggtttttcggtattggccaccaaacagagtaagcgggacagtgctagaaggtggctgtgctgtggataagcaatagaacatattgtaacgttttgattcggcatgtcttcatttgaaacacttgtgcagataaaaacgaaaacaatgtacctttttatgaaggagagagttgcacatttgaatt

SEQ ID NO: 99345 - protein, 310 aa, Arabidopsis thaliana
  peptide (1)..(310): Ceres Seq. ID no. 13602697
PNKKKNPPPPPRRKPLFQLMMVMISLHFSTPPLAFLKSDSNSRFLKNPNPNFIQFTPKSQLLFPQRLNFNTGTNLNRRTLSCYGIKDSSETTKSAPSLDSGDGGGGDGGDDDKGEVEEKNRLFPEWLDFTSDDAQTVFVAIAVSLAFRYFIAEPRYIPSLSMYPTFDVGDRLVAEKVSYYFRKPCANDIVIFKSPPVLQEVGYTDADVFIKRIVAKEGDLVEVHNGKLMVNGVARNEKFILEPPGYEMTPIRVPENSVFVMGDNRNNSYDSHVWGPLPLKNIIGRSVFRYWPPNRVSGTVLEGGCAVDKQ

SEQ ID NO: 99346 - protein, 291 aa, Arabidopsis thaliana
  peptide (1)..(291): Ceres Seq. ID no. 13602698
MMVMISLHFSTPPLAFLKSDSNSRFLKNPNPNFIQFTPKSQLLFPQRLNFNTGTNLNRRTLSCYGIKDSSETTKSAPSLDSGDGGGGDGGDDDKGEVEEKNRLFPEWLDFTSDDAQTVFVAIAVSLAFRYFIAEPRYIPSLSMYPTFDVGDRLVAEKVSYYFRKPCANDIVIFKSPPVLQEVGYTDADVFIKRIVAKEGDLVEVHNGKLMVNGVARNEKFILEPPGYEMTPIRVPENSVFVMGDNRNNSYDSHVWGPLPLKNIIGRSVFRYWPPNRVSGTVLEGGCAVDKQ

SEQ ID NO: 99347 - protein, 290 aa, Arabidopsis thaliana
  peptide (1)..(290): Ceres Seq. ID no. 13602699
MVMISLHFSTPPLAFLKSDSNSRFLKNPNPNFIQFTPKSQLLFPQRLNFNTGTNLNRRTLSCYGIKDSSETTKSAPSLDSGDGGGGDGGDDDKGEVEEKNRLFPEWLDFTSDDAQTVFVAIAVSLAFRYFIAEPRYIPSLSMYPTFDVGDRLVAEKVSYYFRKPCANDIVIFKSPPVLQEVGYTDADVFIKRIVAKEGDLVEVHNGKLMVNGVARNEKFILEPPGYEMTPIRVPENSVFVMGDNRNNSYDSHVWGPLPLKNIIGRSVFRYWPPNRVSGTVLEGGCAVDKQ

SEQ ID NO: 99348 - DNA, 623 bp, Arabidopsis thaliana
  misc_feature (1)..(623): Ceres Seq. ID no. 13602700
  misc_feature (1)..(623): Ortholog of  Ceres SEQ ID NO 14305493 as cited in SEQ ID NO 0
atgtcgtataattcttacgccgagatgagttatcttctgaagacgttaacgacgaaggaagagattgatcgggttatcagagacaccattgatgaagttcttgttttacgatttggtcgttcctccgacgccgtttgtcttcagcatgatgaaatccttgcgaaatcggtgagagatgtttcgaaatttgctaaggtagctttggttgatgttgattcagaggatgttcaagtgtatgtgaagtattttgatatcacgttgtttccttcgacgatcttcttcttcaatgcgcatcatatgaaattggattctggaactgcggatcatactaaatgggttggtgcatttcatataaaacaagactttattgatgttgttgaggctatatatcgaggagcaatgaaagggaagatgattgttcaatgtccaataccgccagagaggataccaaagtaccagctcgtgtacaaggatgtgtagacactaaagtttgttgtgcttacaatgcaaaatctgtttctcatcttctgtgttggcaataatatttacatttgacattttgagatttacagttatgtttttgtacaaagttgaagaatgagaataaatatgcagatttttcg

SEQ ID NO: 99349 - protein, 159 aa, Arabidopsis thaliana
  peptide (1)..(159): Ceres Seq. ID no. 13602701
MSYNSYAEMSYLLKTLTTKEEIDRVIRDTIDEVLVLRFGRSSDAVCLQHDEILAKSVRDVSKFAKVALVDVDSEDVQVYVKYFDITLFPSTIFFFNAHHMKLDSGTADHTKWVGAFHIKQDFIDVVEAIYRGAMKGKMIVQCPIPPERIPKYQLVYKDV

SEQ ID NO: 99350 - protein, 151 aa, Arabidopsis thaliana
  peptide (1)..(151): Ceres Seq. ID no. 13602702
MSYLLKTLTTKEEIDRVIRDTIDEVLVLRFGRSSDAVCLQHDEILAKSVRDVSKFAKVALVDVDSEDVQVYVKYFDITLFPSTIFFFNAHHMKLDSGTADHTKWVGAFHIKQDFIDVVEAIYRGAMKGKMIVQCPIPPERIPKYQLVYKDV

SEQ ID NO: 99351 - DNA, 1062 bp, Arabidopsis thaliana
  misc_feature (1)..(1062): Ceres Seq. ID no. 13602711
  misc_feature (1)..(1062): Ortholog of  Ceres SEQ ID NO 13598479 as cited in SEQ ID NO 60680
ttttccaagaaaataaaaaacagaaaaaattcgtggaaacgccattaacgagatctagcacaaactcgtagtgtggtgtagaagaagacaaaagcaaggagcttcataataaaaccctagagatatttgtttctccaatttcaaaagacgagacgtgaagaagacgatcgaagatgaacattttcagattagctggtgatatgactcacctagccagtgttcttgtcttgcttctcaagatccacaccatcaaatcctgcgctggtgtttcattgaagactcaagaactctatgccattgtctttgcgacgcgttatttggatattttcacgagttttgtgtctctgtacaacacctctatgaagttggtgtttttaggaagttctttttcgattgtgtggtacatgaagtatcataaggccgtccacaggacttacgacagagagcaagatacgtttcgtcattggttccttgtgcttccttgctttctcttagctcttttgatacatgaaaagtttacctttcttgaggtattgtggacgtcttcattgtacttggaggctgttgccatattacctcagcttgtcttgttgcaaaggactagaaatattgacaacttgaccggacaatatatatttctccttggggggtaccgtggattatacatcctcaactggatctaccgttacttcactgagccgcactttgttcactggataacatggatcgccgggtttgttcaaacactgctctatgccgacttcttctattattatttcctaagctggaagaacaacaaaaagctccaattaccagcttaatttctaaagtttcaatgctcgggaaccctacggattcgatttggtgcccgacaaaacatctaccggaatgttaccaatttactctgttggtggttattagaggagaacgagcatagatgtgtaaactccagcaatctaacttattacactttctttagactttctcgtctctcatcttttttttggtcgacttagtgttactaaatatttcgacgcgacagtaatatattcaccacaattc

SEQ ID NO: 99352 - protein, 215 aa, Arabidopsis thaliana; identical to SEQ ID NO: 35467
  peptide (1)..(215): Ceres Seq. ID no. 13602712

SEQ ID NO: 99353 - protein, 206 aa, Arabidopsis thaliana; identical to SEQ ID NO: 35468
  peptide (1)..(206): Ceres Seq. ID no. 13602713

SEQ ID NO: 99354 - protein, 153 aa, Arabidopsis thaliana; identical to SEQ ID NO: 35469
  peptide (1)..(153): Ceres Seq. ID no. 13602714

SEQ ID NO: 99355 - DNA, 1919 bp, Arabidopsis thaliana
  misc_feature (1)..(1919): Ceres Seq. ID no. 13602718
  misc_feature (1)..(1919): Ortholog of  Ceres SEQ ID NO 14307896 as cited in SEQ ID NO 66915
  misc_feature (1)..(1919): Ortholog of  Ceres SEQ ID NO 13657008 as cited in SEQ ID NO 69164
acactgtgagattcaagtgtaaagtgctctctccccaatggctaatcaccaccgacttttacgcggcggcggatctccggccataatcggtggcagaatcacactcacagctttcgcttccactatcgcactcttcctcttcactctctccttcttcttcgcttcagattctaacgattctcctgatctccttcttcccggtgttgagtactctaatggagtcggatctagaagatccatgttggatatcaaatcggatccgcttaagccacggttgattcagatccggaaacaagctgatgatcatcggtcattagcattagcttatgcttcttacgcgagaaagcttaagctcgagaattcgaaactcgtcaggatcttcgctgatctttcgaggaattacacggatctgattaacaaaccgacgtatcgagctttgtatgattctgatggagcctcgattgaagaatctgtgcttaggcaatttgagaaagaagttaaggaacggattaaaatgactcgtcaagtgattgctgaagctaaagagtcttttgataatcagttgaagattcagaagctgaaagatacgattttcgctgttaacgaacagttaactaatgctaagaagcaaggtgcgttttcgagtttgatcgctgcgaaatcgattccgaaaggattgcattgtcttgctatgaggctgatggaagagaggattgctcaccctgagaagtatactgatgaagggaaagatagaccgcgggagctcgaggatccgaatctttaccattacgctatattttcggataatgtgattgcggcttcggtggttgtgaactctgctgtgaagaatgctaaggagccgtggaagcatgtttttcacgttgtgactgataagatgaatcttggagctatgcaggttatgtttaaactgaaggagtataaaggagctcatgtagaagttaaagctgttgaggattatacgtttttgaactcttcgtatgtgcctgtgttgaagcagttagaatctgcgaatcttcagaagttttatttcgagaataagctcgagaatgcgacgaaagataccacgaatatgaagttcaggaaccccaagtatttatctatattgaatcacttgaggttttatttacccgagatgtacccgaaactacataggatactgtttttggacgatgatgtggttgtgcagaaggatttaacgggtctgtgggagattgatatggatgggaaagtgaatggagctgtagagacttgttttgggtcgtttcatcggtacgctcaatacatgaatttctcacatcctttgatcaaagagaagtttaatcccaaagcatgtgcgtgggcgtatggaatgaacttctttgatcttgatgcttggagaagagagaagtgcacagaagaatatcactactggcaaaatctgaacgagaacagggctctatggaaactggggacgttaccaccgggactgatcaccttttactcaaccacaaagccgctggacaaatcatggcatgtgcttgggctgggttacaatccgagcattagcatggatgagatccgcaacgctgcagtggtacacttcaacggtaacatgaagccatggcttgacatagctatgaaccagtttcgaccactttggaccaaacacgtcgactatgacctcgagtttgttcaggcttgcaattttggcctctgaactatgaaaattttctttatcatcaaaatctgaaagcatatgttgtttgttacttcagctctacgaagttttaaccttagtttttgtttgtgtttatttatatatttttgggggtttagtagaacacttgtattttgttcatagctatctttgttctatggcaacctataatcaaagcttaattataaagtcacattatgcc

SEQ ID NO: 99356 - protein, 559 aa, Arabidopsis thaliana; identical to SEQ ID NO: 35694
  peptide (1)..(559): Ceres Seq. ID no. 13602719

SEQ ID NO: 99357 - protein, 492 aa, Arabidopsis thaliana; identical to SEQ ID NO: 35695
  peptide (1)..(492): Ceres Seq. ID no. 13602720

SEQ ID NO: 99358 - protein, 400 aa, Arabidopsis thaliana; identical to SEQ ID NO: 35696
  peptide (1)..(400): Ceres Seq. ID no. 13602721

SEQ ID NO: 99359 - DNA, 1829 bp, Arabidopsis thaliana
  misc_feature (1)..(1829): Ceres Seq. ID no. 13602722
  misc_feature (1)..(1829): Ortholog of  Ceres SEQ ID NO 14314620 as cited in SEQ ID NO 56872
  misc_feature (1)..(1829): Ortholog of  Ceres SEQ ID NO 15178460 as cited in SEQ ID NO 66107
tttttttcttcttcttccatttttttgttctcacgtcgctctctctttttttcgagattcagctgtaaaaccctaactagcgccatagccaaggaagctttcctcagatcgtctctccgaaattttccggttaatcgtcagttaaggggaaaattaggctatggcgatgttaggtgcacagcaagttccagcagcagcttgtactccagatatggttgggaatgcttttgtgccccagtattatcacatattgcatcaatcacctgagcatgttcacagattttaccaagagattagcaagttaggtcgtcctgaagagaatggtttaatgagcatcacttctaccttgcaagctattgacaagaagataatggcgcttggttacggtgtaatcagtgcagagatagctactgtggacacacaagaatctcatggaggtggttatattgtactggtgactgggtatttgacgggaaaagacagtgtcaggaggacgtttagtcagaccttcttccttgctccacaggagacaggatactttgtcttgaatgatatgtttcgattcattgatgaaggcactgtcgtacatggaaatcagattccagtgaacaacgtccaagctcctgtcaacacttaccaggacacagctgctgcgaaggaaattccagatgactttgttcaggagaaatatgtccaagagaatcatgctgttaagcaaaccgaggtgttgtccaagagcattaatgagcctgaaaaagtgttcacgccctctgaagatgaacaagtatcagctgcagaagaagctctggtgactgaaacagttaatgaagcaccaattgaagtgcaaaaggttggagaatctgattctaggactggcgaaattccaaagagatcttatgcatcaattgtgaaggttatgaaagaaaatgctgcaccaatgtctgcttcgagaactccaacaaaggtggaaccaaagaaacaagaagatcaagccattcatatccctctaccaacaccattgtctgagaaatcagattcaggagcaaatgttgctgtaaatgagaacaatcaagagaatgaaagagctctaggtccatccatctatctaaagggtttaccccttgatgcaacacctgccttgcttgagaatgagttccagaaatttggacttattaggaccaatggaattcaagtgagaagccagaagggattctgttttggttttgttgagtttgaatccgcaagttccatgcaaagcgctatcgaggcatcacctgtcatgctcaatggacacaaagttgttgtggaggaaaagcgatctaccgcaagagggaactatagaggacgttcgacgtttggtgtaaacacaggctacagaaacgaaggaggaaggggtcgtgggagctttggaggtggaagaggaggatatggccggaccgatttcaacggatatggtaataacaggggaaacaatagaggcggatacgcaaaccgagcaaatggtgatggtggtgggttcccgagggccaatggtaacaatggacgagtaagacgtggtggcggaaatgatgctaacagagctacgaaacccgtggatgatgctccccgtgtgtctgttgctgcgtaaatgtgcttttgaaacaaaaagctctattggttttagagagtttaggcgtagagcaatggcaaaaaaaaacactattattttcttttcactgtgtcgccattttattaattggagtcaaaacttgagagcaagagagagtttcgtcggttcttgcttgtctattttttcttcactgctaatgaaatctctttcttcatgtggc

SEQ ID NO: 99360 - protein, 488 aa, Arabidopsis thaliana; identical to SEQ ID NO: 24918
  peptide (1)..(488): Ceres Seq. ID no. 13602723

SEQ ID NO: 99361 - protein, 486 aa, Arabidopsis thaliana; identical to SEQ ID NO: 24919
  peptide (1)..(486): Ceres Seq. ID no. 13602724

SEQ ID NO: 99362 - protein, 471 aa, Arabidopsis thaliana; identical to SEQ ID NO: 24920
  peptide (1)..(471): Ceres Seq. ID no. 13602725

SEQ ID NO: 99363 - DNA, 684 bp, Arabidopsis thaliana
  misc_feature (1)..(684): Ceres Seq. ID no. 13602729
  misc_feature (1)..(684): Ortholog of  Ceres SEQ ID NO 12635643 as cited in SEQ ID NO 340
  misc_feature (1)..(684): Ortholog of  Ceres SEQ ID NO 13661877 as cited in SEQ ID NO 61689
agttgtcttccacaacaaaagagtaccctgaaacagatctttcgtataatcagtgacgtagagatcgaagacgatgatgagctctgcatccgccatgaaagctgttggatttttgcttctgcttaccattctaacattagcttatgcgaagaagtcaggtgatgtgacagagttgcagattggtgttaagtacaagcctcagaaatgtgatctccaggctcacaaaggggataagatcaaggttcactatcggggaaagttaactgatggaactgtctttgattcaagttttgagagaggtgaccctattgagtttgagcttggaactggtcaagtcatcccaggatgggaccagggtttattgggagcttgtgtaggtgagaagagaaagttgaaaatcccatccaagcttggttatggtgataacggctcaccaccaaaaatcccgggtggggcgacactgatattcgacaccgagcttgttgctgtgaacggagaaccatccagcgaagcgaaatcaaagaatgagctttgattacaccataattgtttttcatttaaaaggaaaccttgagtagtcatcgatgttggcatttgaatcttaaacagcctagaatcatttactttgctagttgaagacaataattatattttggtcataacattagttatgttggcagttct

SEQ ID NO: 99364 - protein, 153 aa, Arabidopsis thaliana; identical to SEQ ID NO: 25440
  peptide (1)..(153): Ceres Seq. ID no. 13602730

SEQ ID NO: 99365 - protein, 152 aa, Arabidopsis thaliana; identical to SEQ ID NO: 25441
  peptide (1)..(152): Ceres Seq. ID no. 13602731

SEQ ID NO: 99366 - protein, 146 aa, Arabidopsis thaliana; identical to SEQ ID NO: 25442
  peptide (1)..(146): Ceres Seq. ID no. 13602732

SEQ ID NO: 99367 - DNA, 611 bp, Arabidopsis thaliana
  misc_feature (1)..(611): Ceres Seq. ID no. 13602733
  misc_feature (1)..(611): Ortholog of  Ceres SEQ ID NO 14305840 as cited in SEQ ID NO 52339
gatttctgatctttgccctcttttcataagatagttagggttttagtcttttgtgtaataattcattgatcatgaacaagggagaagaaggaggagaagacaaggaagtggtttctcttcaaactctgagtaagaaaatggatgattttgcaaaagctagagattgggagaagtatcacagtccaaggaatctccttcttgctatggtgggtgaagtgggagagctatcagagatattccaatggaaaggagaagtagcaagaggatgtccagattggaaagaagaagagaaagtccatcttggagaagagttatcagatgttttgttgtatttggtgaggctttcggatgcgtgtggtgtcgatttaggcaaagccgctctgcgcaagatcgagcttaatgctattaagtatccagttcccaaaaagactgatgatcattgtgttggtgatggtgaagattcaagcagcaagattaagttgaatgaagaaaactaatctctcttattagtggttttgtgagtaagtttattgtgggtattttcttgttatgaagtaggagcatgatcaagaacatataatcttcgaaggcctctaattatatttcagatg

SEQ ID NO: 99368 - protein, 141 aa, Arabidopsis thaliana; identical to SEQ ID NO: 30288
  peptide (1)..(141): Ceres Seq. ID no. 13602734

SEQ ID NO: 99369 - protein, 119 aa, Arabidopsis thaliana; identical to SEQ ID NO: 30289
  peptide (1)..(119): Ceres Seq. ID no. 13602735

SEQ ID NO: 99370 - protein, 97 aa, Arabidopsis thaliana; identical to SEQ ID NO: 30290
  peptide (1)..(97): Ceres Seq. ID no. 13602736

SEQ ID NO: 99371 - DNA, 1080 bp, Arabidopsis thaliana
  misc_feature (1)..(1080): Ceres Seq. ID no. 13602741
  misc_feature (1)..(1080): Ortholog of  Ceres SEQ ID NO 13594482 as cited in SEQ ID NO 51285
  misc_feature (1)..(1080): Ortholog of  Ceres SEQ ID NO 12617583 as cited in SEQ ID NO 64897
aaaaggctccggctttatcattctcagaccatcatcactaagcagtaagtaagcactataatcgcagaagatagataaaatggaagtagggtttctgggtttgggaatcatgggaaaagccatgtcaatgaatctattgaagaatggattcaaagtcactgtatggaacagaacactctccaagtgtgatgagcttgtggagcatggtgcatcagtatgtgagagtccagctgaagtaatcaagaaatgcaaatacactattgctatgctctctgatccttgtgctgctctttcggttgttttcgataaaggcggtgttttggagcagatatgtgaaggaaaaggttatatcgatatgtcgactgttgatgcagagacttctttgaagatcaatgaggcaatcaccgggaagggtggtcggttcgtagaaggtccggtttcaggtagcaaaaagccagctgaagatggccaactcattatccttgctgctggtgacaaggcactctttgaggaatcaatcccagcttttgatgtcttggggaagagatcgttttacttgggacaagttggaaacggagctaaaatgaagctaatagtgaacatgataatgggaagcatgatgaatgcattctctgaggggcttgtattggctgacaagagtggacttagctctgacactcttttggatattctggatctgggagcaatgactaacccgatgttcaaggggaaaggaccttcaatgaacaagagtagttacccaccagcatttccattgaaacatcagcagaaagacatgaggctagctcttgctcttggcgatgaaaacgcggtttccatgcctgtagccgcggctgcaaacgaggcttttaagaaggcgagaagcttgggactaggagatctcgacttctctgctgtgattgaagctgtgaaattctcccgcgaatagcaaactgtttcaaaacatccactcatttggattggctgagatactgaaatcattgttatcttcccaaatagagatttactcatttggccaaacacacattttactccttcaccaaataaaaagtcttaacc

SEQ ID NO: 99372 - protein, 289 aa, Arabidopsis thaliana
  peptide (1)..(289): Ceres Seq. ID no. 13602742
MEVGFLGLGIMGKAMSMNLLKNGFKVTVWNRTLSKCDELVEHGASVCESPAEVIKKCKYTIAMLSDPCAALSVVFDKGGVLEQICEGKGYIDMSTVDAETSLKINEAITGKGGRFVEGPVSGSKKPAEDGQLIILAAGDKALFEESIPAFDVLGKRSFYLGQVGNGAKMKLIVNMIMGSMMNAFSEGLVLADKSGLSSDTLLDILDLGAMTNPMFKGKGPSMNKSSYPPAFPLKHQQKDMRLALALGDENAVSMPVAAAANEAFKKARSLGLGDLDFSAVIEAVKFSRE

SEQ ID NO: 99373 - protein, 279 aa, Arabidopsis thaliana
  peptide (1)..(279): Ceres Seq. ID no. 13602743
MGKAMSMNLLKNGFKVTVWNRTLSKCDELVEHGASVCESPAEVIKKCKYTIAMLSDPCAALSVVFDKGGVLEQICEGKGYIDMSTVDAETSLKINEAITGKGGRFVEGPVSGSKKPAEDGQLIILAAGDKALFEESIPAFDVLGKRSFYLGQVGNGAKMKLIVNMIMGSMMNAFSEGLVLADKSGLSSDTLLDILDLGAMTNPMFKGKGPSMNKSSYPPAFPLKHQQKDMRLALALGDENAVSMPVAAAANEAFKKARSLGLGDLDFSAVIEAVKFSRE

SEQ ID NO: 99374 - protein, 275 aa, Arabidopsis thaliana
  peptide (1)..(275): Ceres Seq. ID no. 13602744
MSMNLLKNGFKVTVWNRTLSKCDELVEHGASVCESPAEVIKKCKYTIAMLSDPCAALSVVFDKGGVLEQICEGKGYIDMSTVDAETSLKINEAITGKGGRFVEGPVSGSKKPAEDGQLIILAAGDKALFEESIPAFDVLGKRSFYLGQVGNGAKMKLIVNMIMGSMMNAFSEGLVLADKSGLSSDTLLDILDLGAMTNPMFKGKGPSMNKSSYPPAFPLKHQQKDMRLALALGDENAVSMPVAAAANEAFKKARSLGLGDLDFSAVIEAVKFSRE

SEQ ID NO: 99375 - DNA, 893 bp, Arabidopsis thaliana
  misc_feature (1)..(893): Ceres Seq. ID no. 13602745
  misc_feature (1)..(893): Ortholog of  Ceres SEQ ID NO 13505291 as cited in SEQ ID NO 56614
  misc_feature (1)..(893): Ortholog of  Ceres SEQ ID NO 13596535 as cited in SEQ ID NO 62321
  misc_feature (1)..(893): Ortholog of  Ceres SEQ ID NO 13597394 as cited in SEQ ID NO 63457
gtcgtcgtcatcatcaacaattcgaatctgaaatctgcaattcacgagaagaagtttttttttgtaacaatggcgaatccaattcaagagattattgagaaacaagttctaacggtagcgaaagctatggaggataagatagacgacgagatagcgtctctggaaaagcttgatgaagatgatttggaagttttgagagagaggagattgaagcagatgaagaaaatggcggagaagaagaaacggtggatgagtattggacatggtgaatactctgagattcattctgagaaagatttcttctccgttgttaaatctagtgaacgcgtcgtttgtcacttctaccgtgagaattggccctgtaaagtgatggataaacacatgagcatattggcaaagcaacacattgagacacgtttcgtgaagatccaagctgagaaaagtccattcttggctgagaggcttaagattgttgttcttcccactcttgccctcattaagaacactaaagtcgatgattatgtggttgggttcaatgaactgggagggaaagatgattttagcacagaagatcttgaagagagaatagccagagcgcaagtgatccattacgagggagaatcatctcttaaacaaaagtctacaacacaagtcagaaggaacgtgaggcagagtgctcgttcagattctgactccgaataaatcccttttcttatcaaaggtttgttcgtttgtatcctcttgttagttgtaatacttgcaattcatcgttttgatgatcaaaatcaatgttgatcgttagattgatgaacatgcaatatctagaatactacattgatgttttatatgttacctagtgagagtgttggaatgaccaaagtctttttgagttt

SEQ ID NO: 99376 - protein, 233 aa, Arabidopsis thaliana
  peptide (1)..(233): Ceres Seq. ID no. 13602746
VVVIINNSNLKSAIHEKKFFFVTMANPIQEIIEKQVLTVAKAMEDKIDDEIASLEKLDEDDLEVLRERRLKQMKKMAEKKKRWMSIGHGEYSEIHSEKDFFSVVKSSERVVCHFYRENWPCKVMDKHMSILAKQHIETRFVKIQAEKSPFLAERLKIVVLPTLALIKNTKVDDYVVGFNELGGKDDFSTEDLEERIARAQVIHYEGESSLKQKSTTQVRRNVRQSARSDSDSE

SEQ ID NO: 99377 - protein, 210 aa, Arabidopsis thaliana
  peptide (1)..(210): Ceres Seq. ID no. 13602747
MANPIQEIIEKQVLTVAKAMEDKIDDEIASLEKLDEDDLEVLRERRLKQMKKMAEKKKRWMSIGHGEYSEIHSEKDFFSVVKSSERVVCHFYRENWPCKVMDKHMSILAKQHIETRFVKIQAEKSPFLAERLKIVVLPTLALIKNTKVDDYVVGFNELGGKDDFSTEDLEERIARAQVIHYEGESSLKQKSTTQVRRNVRQSARSDSDSE

SEQ ID NO: 99378 - protein, 191 aa, Arabidopsis thaliana
  peptide (1)..(191): Ceres Seq. ID no. 13602748
MEDKIDDEIASLEKLDEDDLEVLRERRLKQMKKMAEKKKRWMSIGHGEYSEIHSEKDFFSVVKSSERVVCHFYRENWPCKVMDKHMSILAKQHIETRFVKIQAEKSPFLAERLKIVVLPTLALIKNTKVDDYVVGFNELGGKDDFSTEDLEERIARAQVIHYEGESSLKQKSTTQVRRNVRQSARSDSDSE

SEQ ID NO: 99379 - DNA, 949 bp, Arabidopsis thaliana
  misc_feature (1)..(949): Ceres Seq. ID no. 13602761
  misc_feature (1)..(949): Ortholog of  Ceres SEQ ID NO 15179139 as cited in SEQ ID NO 1093
  misc_feature (1)..(949): Ortholog of  Ceres SEQ ID NO 15226793 as cited in SEQ ID NO 58689
attaaaaccaaagatcaatctcttcttaatagtcaatcatatatcaaaaaatttaaactcttcttgatcaatggcttcttcttctgctgctatgtctcttgaatccatctctatgacaactctcaacaatctctctcgtaatcatcaatctcaccgcagttctcttcttggtttctcaagatctttccaaaaccttggaatctcatctaacggtccagatttctcctcccgatcaagatctactacttccaagaacctcaacgttactcgagctttcttctggaattggggcaagaagaccgaaaactccagaccaagtaagatccaagaactaaacgtgtatgagctcaacgaaggagatagaaacagtccagcagttcttaaactcggcaagaaaccaacagagctttgtctcggagatctcgtcccattcacaaacaaactctacaccggcgatctcaagaaacgcgtgggaatcacggcaggtctctgcgttttgatccaacacgttcctgaaaagagcggtgacagattcgaagctagttacagcttctactttggtgactatggtcacttgtctgtacaaggacaatacttgacttatgaagacacgttcctcgctgtcactggtggctctggaatctttgaaggtgcgtacggacaggttaagcttcgtcagcttgtgtatccgacaaaactgttctacactttttaccttaaagggttagctaatgatttaccgctggagcttactggaacggcggttacgccgtcgaaggatgtgaaaccggcaccggaagctaaggcgatggagcctagtggagttataagtaactttactaattaagtaattagctgtttaatagttgttttgttttgtaatagaatattttgatgagttgtgtgaggttagttaatgatgtgttgagggaataaagtatttattttg

SEQ ID NO: 99380 - protein, 258 aa, Arabidopsis thaliana; identical to SEQ ID NO: 26683
  peptide (1)..(258): Ceres Seq. ID no. 13602762

SEQ ID NO: 99381 - protein, 251 aa, Arabidopsis thaliana; identical to SEQ ID NO: 26684
  peptide (1)..(251): Ceres Seq. ID no. 13602763

SEQ ID NO: 99382 - protein, 244 aa, Arabidopsis thaliana; identical to SEQ ID NO: 26685
  peptide (1)..(244): Ceres Seq. ID no. 13602764

SEQ ID NO: 99383 - DNA, 1302 bp, Arabidopsis thaliana
  misc_feature (1)..(1302): Ceres Seq. ID no. 13602772
  misc_feature (1)..(1302): Ortholog of  Ceres SEQ ID NO 15170595 as cited in SEQ ID NO 57510
  misc_feature (1)..(1302): Ortholog of  Ceres SEQ ID NO 13655218 as cited in SEQ ID NO 68872
gttgtatttttgatagggaagaaaaaaaaacacaaaagcggcgttgatttttttagattttccgacaagatttctcgtgagaagatttgtctgaatctttctttcgaagaggttttgagttaatttcaaaatggttttggagaaaaaatctgcattgttggaagatttgataaagaaatgcggcggttgtgcggtggtcgacggtggtttcgctacccagcttgagattcacggcgccgccattaacgaccctttgtggagtgctgtttctctcatcaaaaatcctgagctcatcaaaagggttcacatggaatatttggaagctggtgcagacattgtggttacttcatcttatcaggctacgatcccggggtttctttctagaggtttatcaatagaagagagcgagtctttgcttcaaaagagtgtagaattagctgttgaagctcgtgatagattctgggagaaagtgagcaaggtttcaggacatagctataacagagctcttgtagctgcatctattggaagctatggtgcttatcttgctgatggctctgagtacagtggtcactatggtgagaatgtaagtttggataaactaaaggactttcacaggagaagacttcaagtcttagtggaagctggtcctgatcttcttgcttttgaaaccataccgaataaactcgaagctcaggcttgcgttgagcttttggaggaagagaaagtgcaaatcccagcatggatctgcttcacatctgtagatggtgagaaagctccatcaggagagagctttgaggaatgtcttgaacctcttaacaaaagcaacaatatttacgcagttggtattaactgcgcacctcctcaattcatcgaaaatctgattcgcaaattcgccaagctgacgaagaaagcaatcgttgtttacccgaatagcggagaggtttgggatggaaaagctaaacaatggctgccatcacaatgctttggtgatgatgaatttgagatgtttgcaacgaaatggcgtgaccttggagctaaactcatcggaggatgttgcaggactacaccttccaccattaacgctatctccagagatttgaaacgaagatgatttttcttcagggagaaaagactgaagattctttttcaactttttaactagcttgaccattgttagggctatctatctgttttctgttgttttcttgttgttcacgttttctttgtggtttgatgatatgtattcgtaaactaggccttgggcgttttcaatgtaatggcccataaaatattttctttatc

SEQ ID NO: 99384 - protein, 326 aa, Arabidopsis thaliana; identical to SEQ ID NO: 27663
  peptide (1)..(326): Ceres Seq. ID no. 13602773

SEQ ID NO: 99385 - protein, 267 aa, Arabidopsis thaliana; identical to SEQ ID NO: 27664
  peptide (1)..(267): Ceres Seq. ID no. 13602774

SEQ ID NO: 99386 - DNA, 1615 bp, Arabidopsis thaliana
  misc_feature (1)..(1615): Ceres Seq. ID no. 13602786
  misc_feature (1)..(1615): Ortholog of  Ceres SEQ ID NO 14311755 as cited in SEQ ID NO 57271
  misc_feature (1)..(1615): Ortholog of  Ceres SEQ ID NO 15171156 as cited in SEQ ID NO 58259
  misc_feature (1)..(1615): Ortholog of  Ceres SEQ ID NO 14302212 as cited in SEQ ID NO 66507
  misc_feature (1)..(1615): Ortholog of  Ceres SEQ ID NO 13653980 as cited in SEQ ID NO 69253
agaattgcttctcttagtatttgctttcaccaacccactcgacggagtctccaacgccttcctcctcattctccactctcacaccaccaacttctgattccagatctcaacgatgcaaagctccgccgtattctccctctctccgtcgcttcctctcctaaaaccacgtcggctctctctccgccaccatcccataaccaccgccgcttcttcaagcgatctaaacgtttctccaaatgttgtctctattccttctttatctcgtcgatcttggcgtctcgcttcgtctgattcgcctctccgtgcttggtccggtgttccttctccgatctctcactccttagacacgaatcgtttcagaaccgccgctactgcagttcctgaaagtgctgaggaaggtgataacagtggtaaattgacgaaggttttggaacttggcttgttgttcgctatgtggtaccttttcaatatctacttcaacatctacaataaacaggttttgaaagctctacatgctccaatgactgtgactttggttcagtttgctgttggtagtgtgctcattactatcatgtgggttcttaacctgtacaagagaccaaagatcagtggtgctcagctagctgccatcttgccgcttgctgttgtgcacacacttggtaatctgtttacgaacatgagtcttgggaaagtttctgtttcctttactcacaccattaaagccatggagcctttcttctctgttttattgtctgctatgtttctcggggagaaacctactccatgggtactcggtgccattgtaccaattgttggtggagttgcacttgcttcaatttcggaggtctcattcaactgggctggattttcgagtgcaatggcatcaaacttgactaaccaatcccgtaatgtgctgagtaagaaagtcatggttaagaaagatgattctcttgacaacatcactctcttctcaattataacattgatgtctctcgttctgatggctcctgtgactttctttacggaaggcatcaagttcactccttcatacattcaatcagctggtgtgaatgttaaacaaatatatacaaagtctcttatcgctgcactctgcttccacgcataccagcaggtgtcgtacatgatattggcgagagtatcaccggttacacattctgtcggaaactgtgtgaaacgtgttgtggttattgtgagctctgtcatcttcttcaagacacccgtctcgcctgttaatgctttcggaactggaatcgcccttgcgggtgtcttcttatactccagagtgaagggtattaagccaaagccaaagactgcttaagcaaatatcggctaatacctaatgtcatatcactcccgcgctttggatttgtatacaatttctcgagctaaagttttcagatagatggttttattcttttgcgggttttttcacgaagtttcatcatccctttctaagcttttcgctgcagccatcggttctcttagagtttgttataagttctcttctgtgtctagacaaatgctaaactcttaaatttcttacagtttttccaagaataacttgtcaacacattctcattactgcttttagttt

SEQ ID NO: 99387 - protein, 408 aa, Arabidopsis thaliana; identical to SEQ ID NO: 34976
  peptide (1)..(408): Ceres Seq. ID no. 13602787

SEQ ID NO: 99388 - protein, 295 aa, Arabidopsis thaliana; identical to SEQ ID NO: 34977
  peptide (1)..(295): Ceres Seq. ID no. 13602788

SEQ ID NO: 99389 - protein, 272 aa, Arabidopsis thaliana; identical to SEQ ID NO: 34978
  peptide (1)..(272): Ceres Seq. ID no. 13602789

SEQ ID NO: 99390 - DNA, 1392 bp, Arabidopsis thaliana
  misc_feature (1)..(1392): Ceres Seq. ID no. 13602790
  misc_feature (1)..(1392): Ortholog of  Ceres SEQ ID NO 12364737 as cited in SEQ ID NO 51089
  misc_feature (1)..(1392): Ortholog of  Ceres SEQ ID NO 12581561 as cited in SEQ ID NO 53617
  misc_feature (1)..(1392): Ortholog of  Ceres SEQ ID NO 14316263 as cited in SEQ ID NO 55294
  misc_feature (1)..(1392): Ortholog of  Ceres SEQ ID NO 13582301 as cited in SEQ ID NO 56509
  misc_feature (1)..(1392): Ortholog of  Ceres SEQ ID NO 15176751 as cited in SEQ ID NO 59719
  misc_feature (1)..(1392): Ortholog of  Ceres SEQ ID NO 13597380 as cited in SEQ ID NO 64054
  misc_feature (1)..(1392): Ortholog of  Ceres SEQ ID NO 12625474 as cited in SEQ ID NO 64169
  misc_feature (1)..(1392): Ortholog of  Ceres SEQ ID NO 13597502 as cited in SEQ ID NO 64681
acattctcatttcatagcaaaacaccaaaacagagttcacagaaacatattcaaagatttttcacaaatattaccattttaaatctataaacaatgacgaactcggtggctaagttggcactactagggttttgcattctgcaagtgacgagcttacttgttccgcaagcaaatgctagggctttccttgtgtttggagattctctcgttgacaatggtaacaatgactttcttgctaccactgctcgtgccgataattacccttatggtatcgatttcccaactcatcgtcctacgggccgtttctccaatggtctaaacattccagatctcatcagtgaacatttgggtcaagagtctccaatgccgtaccttagtccaatgctgaagaaggacaaactcttaaggggagctaacttcgcctccgcgggtattggaatccttaacgacaccggaatccagtttctgaatattattaggatcacaaagcagctagagtacttcgagcagtacaaggttcgagtaagcgggttggtcggagaagaagagatgaatcggctcgtgaacggagctcttgtcctaataacacttggaggcaatgatttcgtcaacaactactacttggtccctttctctgcaagatctcgtcaattctctcttcctgactacgttgtctttgtcatttctgaataccgcaaagtcttacggaaaatgtacgatttgggtgctcgacgtgtccttgtgactggaacaggaccaatgggttgcgtcccggccgagctggcgcaacgtagccgcaacggcgagtgtgctaccgaactccaacgagccgcgtcactattcaacccacaactaattcaaatgataacagacctcaacaacgaagttggatcttcggccttcattgccgctaatactcaacaaatgcacatggacttcattagcgacccacaagcatatggattcgtcacgtcgaaggtggcttgttgtggacaagggccgtacaatgggatagggctatgcactccattatcaaatctttgcccaaacagagatctctttgccttttgggatccttttcacccatcagaaaaagcaagtagaatcatagctcaacaaatcctcaatggctctcctgaatacatgcatcccatgaatcttagcaccatcctcaccgttgattccatgacctaagcttctattcctcatctatcccaaatccactttatgctttgtttttgttttgcctttctcgtttattatatatttttacattggcactttaattagtttccttgagttatgttgtgagttttgtgttgttcatcaataattagtcaccaattgtgagctgagaagtaatattcaacaatcttacgaatgttcactatc

SEQ ID NO: 99391 - protein, 366 aa, Arabidopsis thaliana; identical to SEQ ID NO: 22813
  peptide (1)..(366): Ceres Seq. ID no. 13602791

SEQ ID NO: 99392 - protein, 276 aa, Arabidopsis thaliana; identical to SEQ ID NO: 22814
  peptide (1)..(276): Ceres Seq. ID no. 13602792

SEQ ID NO: 99393 - protein, 270 aa, Arabidopsis thaliana; identical to SEQ ID NO: 22815
  peptide (1)..(270): Ceres Seq. ID no. 13602793

SEQ ID NO: 99394 - DNA, 738 bp, Arabidopsis thaliana
  misc_feature (1)..(738): Ceres Seq. ID no. 13602794
  misc_feature (1)..(738): Ortholog of  Ceres SEQ ID NO 12584790 as cited in SEQ ID NO 62648
tctctctctctctctctctcataatacatagaggagaataaaaaaatgatgtgtttccaaaacttcaaagttcgtaaattctttacgtcgaggaactccggtaaagtatctccagacaccgtctcaaaatcagcggagaacagattgtggaaagaatttcaagaaaaagatgacgttctgaagatccatgtgagatcgtggttaccttcgccggaaaatattttccggtgggaagccaccgttaacggcccggtgggttgcccttacgaaaaaggagtcttcaccgtctctgttcacatcccacccaaatatccttatgaaccacccaaaatcacattcaagactaagatttttcatcctaatataagcgaaattggagaaatctttgttgatatattgggatcacgatggtcatcagccttgaccattaacttggtgttgctctctatatgttcgattttatcgaacccggttgaaccgttattggttagcaatcatgccgcgagactgtaccagaaagaccggaaagcttacgagaaagttgcgcgagaatggactttgaagtatgcaaagggatgattagttgttctcaagtttttttgatgtctattgcgattaaactatatgacttctgttttgtttcgtcagtttagtgtcgtgtaaggtcgtttactaccgagagattgaatacaatagttgtctttgtattcaagacgtcagcagctgctaaaccttgtt

SEQ ID NO: 99395 - protein, 177 aa, Arabidopsis thaliana
  peptide (1)..(177): Ceres Seq. ID no. 13602795
MMCFQNFKVRKFFTSRNSGKVSPDTVSKSAENRLWKEFQEKDDVLKIHVRSWLPSPENIFRWEATVNGPVGCPYEKGVFTVSVHIPPKYPYEPPKITFKTKIFHPNISEIGEIFVDILGSRWSSALTINLVLLSICSILSNPVEPLLVSNHAARLYQKDRKAYEKVAREWTLKYAKG

SEQ ID NO: 99396 - protein, 176 aa, Arabidopsis thaliana
  peptide (1)..(176): Ceres Seq. ID no. 13602796
MCFQNFKVRKFFTSRNSGKVSPDTVSKSAENRLWKEFQEKDDVLKIHVRSWLPSPENIFRWEATVNGPVGCPYEKGVFTVSVHIPPKYPYEPPKITFKTKIFHPNISEIGEIFVDILGSRWSSALTINLVLLSICSILSNPVEPLLVSNHAARLYQKDRKAYEKVAREWTLKYAKG

SEQ ID NO: 99397 - DNA, 1131 bp, Arabidopsis thaliana
  misc_feature (1)..(1131): Ceres Seq. ID no. 13602805
  misc_feature (1)..(1131): Ortholog of  Ceres SEQ ID NO 13583438 as cited in SEQ ID NO 60632
tttttgaatttggttttatatataacaatctggatccgccaccgtcgaattaatctccggaaagctcgtcgaaagatgtcgatgggaggcgacacgacgtgggttgggaagaagccgatcagacgcatcggtggattatctgatgctctctctatcgcctccgatctcggtttcgccgtcgctcctcctccgtcgcaggaagaattacaaagctttgcgtcttcgaatggggaaagaggtgatgatttgataagggtattgagagagttatctgttgttcaaaggaaaattgcagacttgcaggtcgagcttcaagggaggaaggatgataaaaatgtggcgcatttgactcatgttggtgaaatgcaaaagaaaatcgagactttgtcaaggattactcaaatattgaaagatgttatacaaaacaaggatcgcatcattgctcgtctccaacaaccttattcgctagattgcattccagttgaagcagaatatcagaaacaattctcagagttgctaatgaaagccgccagtgattatggcgccttaacagcatccgtgtctgattttcagtggagccaaaactttaaagaacctccttcagtctggggggaaatgctgcgtccaatacctgtggcactagcgtcatgcacgagattctttgaggccatgtctgcgatgagagaatcattcgcgactcttcaagagcttcgagttggtaactctgcagtttctttaccaacaacaccaggaggtaacgaaatgacacatagagactcagattgtgtgactccacctcaagggaggatagagtcaagcttcgacgatttagctgttcataaaacaaggagacaaaacaatgatcaaaatgaagaagaagaagaagaagaagaagaagaagatggtaataacaatgggaaccggagactatcttggcctccttctgtaaaaaagagtagcgtttaaacagttgcttttgtctttgcttgagctttttaatatcgatcgtgttttgtttcatcagcattagtgttctttatggatttacttatttctatttgatagtctttgagtgaaacttaaaacagtgtatattttgttaacactggttttcatggtccatgtgactat

SEQ ID NO: 99398 - protein, 321 aa, Arabidopsis thaliana
  peptide (1)..(321): Ceres Seq. ID no. 13602806
FLNLVLYITIWIRHRRINLRKARRKMSMGGDTTWVGKKPIRRIGGLSDALSIASDLGFAVAPPPSQEELQSFASSNGERGDDLIRVLRELSVVQRKIADLQVELQGRKDDKNVAHLTHVGEMQKKIETLSRITQILKDVIQNKDRIIARLQQPYSLDCIPVEAEYQKQFSELLMKAASDYGALTASVSDFQWSQNFKEPPSVWGEMLRPIPVALASCTRFFEAMSAMRESFATLQELRVGNSAVSLPTTPGGNEMTHRDSDCVTPPQGRIESSFDDLAVHKTRRQNNDQNEEEEEEEEEEDGNNNGNRRLSWPPSVKKSSV

SEQ ID NO: 99399 - protein, 296 aa, Arabidopsis thaliana; identical to SEQ ID NO: 24348
  peptide (1)..(296): Ceres Seq. ID no. 13602807

SEQ ID NO: 99400 - protein, 294 aa, Arabidopsis thaliana; identical to SEQ ID NO: 24349
  peptide (1)..(294): Ceres Seq. ID no. 13602808

SEQ ID NO: 99401 - DNA, 1301 bp, Arabidopsis thaliana
  misc_feature (1)..(1301): Ceres Seq. ID no. 13602809
  misc_feature (1)..(1301): Ortholog of  Ceres SEQ ID NO 15172464 as cited in SEQ ID NO 59111
caaaattcccacaaaaatctttcctccaataacataacaaaacaactcttcttctacaacaaactatgttctgattttttagtttcttcttccacacaatacaaaagaaatggggttttattcactgaagcagcttttgttactttacatcatcatcatggctctgttctcagatctcaagctagcaaaatcttcttcaccagagtacacgaacctaatctacaaaggttgtgcaagacagagattatcagatccatctggtttatactcacaagctctctctgcaatgtatggcttattggttactcaatcaacgaaaacaagattctacaaaaccacaactggaacaacaagccaaacaagcgtcactggtcttttccagtgtagaggagatttaagtaacaacgactgttacaactgtgttagtcgtcttcctgttctctctggtaagctctgtggcaaaaccattgctgctagagttcagctctccggctgttatcttctctatgaaatctctggctttgcccaaatttcaggaatggagttgttattcaagacatgtgggaagaacaacgtcgccgggacaggattcgaacagagaagagacacagctttcggggtgatgcaaaacggcgtcgttcaaggtcacggcttctacgcaacgacatacgaatcggtttacgttttaggacaatgcgaaggcgatataggcgattcagattgtagcggttgcataaaaaacgcgttacagagagctcaagtcgaatgtggaagctcaatatctggtcagatatatcttcataagtgttttgtcggttatagtttctacccaaatggtgttcccaagagatcttctccttatcctagctctggctcttcgggttcttcttcttcttcatcttcttcaggaacaacaggcaaaacggtggcaataatagtaggaggaacagctggtgttggatttcttgtcatttgcttacttttcgtcaaaaacttgatgaagaagaaatatgacgattattgaaaataattaggatgaagacaacaaaatgagtcccaaccccgaaatggaggcaagcgttaatgtgaattccgaggtgcatgcaattaattgtgtcccgatttttatatttttcgaattgttagtttattgaatacagtatttttgagaggtggaaattgtggtgggatggatgaagaagagctgggaccattttaaaatgttagaagatggagaaagtactttcaatttatttttaaaaatgtaaatgaattatctcatttgaagttccttaagtact

SEQ ID NO: 99402 - protein, 304 aa, Arabidopsis thaliana
  peptide (1)..(304): Ceres Seq. ID no. 13602810
MGFYSLKQLLLLYIIIMALFSDLKLAKSSSPEYTNLIYKGCARQRLSDPSGLYSQALSAMYGLLVTQSTKTRFYKTTTGTTSQTSVTGLFQCRGDLSNNDCYNCVSRLPVLSGKLCGKTIAARVQLSGCYLLYEISGFAQISGMELLFKTCGKNNVAGTGFEQRRDTAFGVMQNGVVQGHGFYATTYESVYVLGQCEGDIGDSDCSGCIKNALQRAQVECGSSISGQIYLHKCFVGYSFYPNGVPKRSSPYPSSGSSGSSSSSSSSGTTGKTVAIIVGGTAGVGFLVICLLFVKNLMKKKYDDY

SEQ ID NO: 99403 - protein, 288 aa, Arabidopsis thaliana
  peptide (1)..(288): Ceres Seq. ID no. 13602811
MALFSDLKLAKSSSPEYTNLIYKGCARQRLSDPSGLYSQALSAMYGLLVTQSTKTRFYKTTTGTTSQTSVTGLFQCRGDLSNNDCYNCVSRLPVLSGKLCGKTIAARVQLSGCYLLYEISGFAQISGMELLFKTCGKNNVAGTGFEQRRDTAFGVMQNGVVQGHGFYATTYESVYVLGQCEGDIGDSDCSGCIKNALQRAQVECGSSISGQIYLHKCFVGYSFYPNGVPKRSSPYPSSGSSGSSSSSSSSGTTGKTVAIIVGGTAGVGFLVICLLFVKNLMKKKYDDY

SEQ ID NO: 99404 - protein, 245 aa, Arabidopsis thaliana; identical to SEQ ID NO: 23055
  peptide (1)..(245): Ceres Seq. ID no. 13602812

SEQ ID NO: 99405 - DNA, 1555 bp, Arabidopsis thaliana
  misc_feature (1)..(1555): Ceres Seq. ID no. 13602813
  misc_feature (1)..(1555): Ortholog of  Ceres SEQ ID NO 14313074 as cited in SEQ ID NO 59199
agatattttcaattaatgacatcttcttcttctcctttcactgcaaaaccgaaagcttgagactttgagattatgtctatgtcatcttcttcttcttccatcgatcacttcatcacctttcgtcatcttgatcttattctccactgtataaaatcagcgagattttaagggattgtgaaggtaccatcttaaacacaaaatgggtacttctactacagagagtgtggtggcgtgtgaattttgcggcgagagaacggcggttctgttttgtagagccgatacggcgaagctttgtttgccttgtgaccagcacgtgcactcggcgaaccttctctcgaggaagcatgttcgttctcagatctgtgataactgtagcaaagagccggtgtccgtacgttgcttcacagataatctcgtattgtgtcaggagtgtgattgggatgttcacggaagctgttcctcctccgcgacgcatgaacgctccgccgtggaagggttttcaggttgtccttcggttttggagcttgctgctgtgtggggaatcgatttaaagggtaagaagaaagaagatgacgaagacgaattgactaagaattttgggatggggttggattcgtggggttctggatctaacatcgttcaagaactgattgttccttatgatgtgtcttgcaaaaagcaaagctttagctttgggaggtctaagcaggtagtgtttgaacagcttgagttactgaagagaggcttcgttgaaggcgaaggagagattatggttccggagggaatcaatggcggaggaagcatttctcagccatctccgacgacgtcgtttacttctttgcttatgtctcaaagtctttgtggtaatggtatgcaatggaatgctactaatcatagcactggccagaacactcagatatgggattttaacttgggacagtcgaggaaccctgatgaacctagtccagtcgaaactaaaggctctactttcacattcaacaacgttactcatctcaagaacgatacccgaaccaccaatatgaatgctttcaaagagagttaccaggaggattccgtccactcaacttctaccaagggacaggaaacatctaagagcaacaatattcctgctgccattcactcgcataaaagttctaacgactcctgtggcttgcattgcacggaacatattgctattactagtaatagagccacaagattggtggcggtaacgaatgctgatctagagcagatggcacagaacagagataatgctatgcagcggtacaaggaaaagaagaaaacgcggagatatgataagaccataagatatgaaacgaggaaggcgagagccgagaccaggttgcgtgttaagggcagatttgtgaaagctacagatccttagatgtctctccacgttaggttttacatttgagatcctaagttaggaactttttttgttttttctactttcaactaccttgtaaatgtaaatgatcgatcttcagctgcataatgtgtggccagatttttgtaatttttacgtttaaccttc

SEQ ID NO: 99406 - protein, 401 aa, Arabidopsis thaliana
  peptide (1)..(401): Ceres Seq. ID no. 13602814
MGTSTTESVVACEFCGERTAVLFCRADTAKLCLPCDQHVHSANLLSRKHVRSQICDNCSKEPVSVRCFTDNLVLCQECDWDVHGSCSSSATHERSAVEGFSGCPSVLELAAVWGIDLKGKKKEDDEDELTKNFGMGLDSWGSGSNIVQELIVPYDVSCKKQSFSFGRSKQVVFEQLELLKRGFVEGEGEIMVPEGINGGGSISQPSPTTSFTSLLMSQSLCGNGMQWNATNHSTGQNTQIWDFNLGQSRNPDEPSPVETKGSTFTFNNVTHLKNDTRTTNMNAFKESYQEDSVHSTSTKGQETSKSNNIPAAIHSHKSSNDSCGLHCTEHIAITSNRATRLVAVTNADLEQMAQNRDNAMQRYKEKKKTRRYDKTIRYETRKARAETRLRVKGRFVKATDP

SEQ ID NO: 99407 - protein, 267 aa, Arabidopsis thaliana
  peptide (1)..(267): Ceres Seq. ID no. 13602815
MGLDSWGSGSNIVQELIVPYDVSCKKQSFSFGRSKQVVFEQLELLKRGFVEGEGEIMVPEGINGGGSISQPSPTTSFTSLLMSQSLCGNGMQWNATNHSTGQNTQIWDFNLGQSRNPDEPSPVETKGSTFTFNNVTHLKNDTRTTNMNAFKESYQEDSVHSTSTKGQETSKSNNIPAAIHSHKSSNDSCGLHCTEHIAITSNRATRLVAVTNADLEQMAQNRDNAMQRYKEKKKTRRYDKTIRYETRKARAETRLRVKGRFVKATDP

SEQ ID NO: 99408 - protein, 211 aa, Arabidopsis thaliana
  peptide (1)..(211): Ceres Seq. ID no. 13602816
MVPEGINGGGSISQPSPTTSFTSLLMSQSLCGNGMQWNATNHSTGQNTQIWDFNLGQSRNPDEPSPVETKGSTFTFNNVTHLKNDTRTTNMNAFKESYQEDSVHSTSTKGQETSKSNNIPAAIHSHKSSNDSCGLHCTEHIAITSNRATRLVAVTNADLEQMAQNRDNAMQRYKEKKKTRRYDKTIRYETRKARAETRLRVKGRFVKATDP

SEQ ID NO: 99409 - DNA, 1475 bp, Arabidopsis thaliana
  misc_feature (1)..(1475): Ceres Seq. ID no. 13602817
  misc_feature (1)..(1475): Ortholog of  Ceres SEQ ID NO 13597581 as cited in SEQ ID NO 65344
aaaaagttgcgaagctctctcattgagtaaactaacggctatattctctctgatattcaaaatttgctcgaagaaacgacgatggcagccgaaacgaaggttcaggtttcagatccagaggcagagtttcttaattcgaagcaggagactggatacgagtgggagcttttcaaggagaacgtccggccattgaagagaggtcgcaatgttggtattctcaaccacgctctcaaatctcactctgaccaccaattgagaaagaatctcatcgagaaacgcaggaatttgattgaagccattgatgagtatgaaggagatgaccctttatctccatggatagagtgtataaaatgggtacaagaggcttttccaccaggaggagaatgttcaggactgttagtgatatatgagcaatgtgttcgtaaattttggcactctgaacgttacaaggatgatcttcgttatcttaaagtctggttggaatatgcggagcattgcgctgatgcggaagtgatttacaagtttttggaggtcaatgagattggaaagacacatgctgtctactatatagcttatgctttgcacattgagtttaagaataaggtcaaaactgctaatgagatcttcaatcttggaatctctagggatgcaaagccagtggaaaagttgaatgacgcgtacaagaagtttatggtgagaacgatgagaaggtccaacacagctgatgaagaaccaaaggagaataatgacttaccgtcaagaagctttggcactttattgtccaggggagataataatgcaagaaggcaggcgttaggaagttctaacccacaagccaaaaagctaaagccaaatcaatcatccaagacaccttttgctatctacgcagatgcagtttcagacaccacatcagggaatcaaccagagtcagacaagtcaagaccagagtttggtagttggctcatgcttggaggcagagcagagaggaacaaagaaaacaattctttacctagaaaatgggcatcattcaaggttcctcagaaacccattgtgagaactgttgcagcagcatctgcttccacctttgaggtttttgtcgatgaagaagaatgtacagaagaggaagaagaaaagaagaagaatgatgaaactatctcatcatcatcaaacgttctgccccttaatggcggccgtgagataaaaaaagaaacagagctgctacgacagaaccctttaagacatttcccacccaacagcttcctacgatgatgatattggactttcttctctacacgatcttatggtttgagatttgagcttttgtctataaagctccttgtgtgtttttgcctatttggatttgtttttgtgatgtactgggatatactatcctactatgtaccatgatgtgcctttcatgttttgaaattaatgtgacttgtcttgtttcaatccttatatgatttgtttctcct

SEQ ID NO: 99410 - protein, 395 aa, Arabidopsis thaliana
  peptide (1)..(395): Ceres Seq. ID no. 13602818
MAAETKVQVSDPEAEFLNSKQETGYEWELFKENVRPLKRGRNVGILNHALKSHSDHQLRKNLIEKRRNLIEAIDEYEGDDPLSPWIECIKWVQEAFPPGGECSGLLVIYEQCVRKFWHSERYKDDLRYLKVWLEYAEHCADAEVIYKFLEVNEIGKTHAVYYIAYALHIEFKNKVKTANEIFNLGISRDAKPVEKLNDAYKKFMVRTMRRSNTADEEPKENNDLPSRSFGTLLSRGDNNARRQALGSSNPQAKKLKPNQSSKTPFAIYADAVSDTTSGNQPESDKSRPEFGSWLMLGGRAERNKENNSLPRKWASFKVPQKPIVRTVAAASASTFEVFVDEEECTEEEEEKKKNDETISSSSNVLPLNGGREIKKETELLRQNPLRHFPPNSFLR

SEQ ID NO: 99411 - DNA, 1433 bp, Arabidopsis thaliana
  misc_feature (1)..(1433): Ceres Seq. ID no. 13602834
  misc_feature (1)..(1433): Ortholog of  Ceres SEQ ID NO 15177935 as cited in SEQ ID NO 60258
  misc_feature (1)..(1433): Ortholog of  Ceres SEQ ID NO 13659033 as cited in SEQ ID NO 66372
  misc_feature (1)..(1433): Ortholog of  Ceres SEQ ID NO 12625899 as cited in SEQ ID NO 69079
  misc_feature (1)..(1433): Ortholog of  Ceres SEQ ID NO 15180051 as cited in SEQ ID NO 0
atataaactcgaatccatcacaaagcctattcaagttaagagaaaagaaaaaaaaaaccgttcttggaagatgggtttcaaactcaactctcttttccttcttctttcgcttctcatactcacaatcttgtccggagccgaccaagccttggcttacgtcaagaaaccacatgtgagccaacgcaacaaaacggcgttagcagccgtcgccggaagaggaggaggaaaagagatgttgaaagggaggaagcagacgagtggttgtaacttgtttcaagggagatgggttttcgatgcttcttaccctttctacgattcatccacgtgccctttcatcgacggtgagttcgactgtctcaaattcggccgaccagacaaacagttccttaagtactcttggcagcctgattcatgcaccgtcccaaggtttgatggggaagcgtttttgaagaaatggagagggaaacgagtgatgttcgtgggtgactcactgagtctaaacatgtgggaatcgttggcatgtatgatacattcgtcggttccaaacactaagaccacttttctcaagcgaaccccactctcctctctcactttccaggaatatgacgtcacactattcctataccgaacaccatacctagtggacatctccaaagaaagtgtcgggcgtgtgcttaaccttggagccattgaagatggagctgatgcttggaaaaatatggacctcctcgtcttcaattcttggcactggtggactcacacaggagtacagtctcaagggtgggattttataagagatgggtcttcactgatgagagacatggaccgccttgatgctttcaacaaaggactcaccacttggggtcaatgggttgatcaaaatgttaatgtttcgcaaacccgagtcttcttccaaggcatttctcccactcactacatgggaagggaatggaacgagccgaggaaaacttgcaacgggcagatgcaaccgttgaccggatcaacatacccaggtggttcacttcctgcagcaagcattgtgtctcgagtattaagcacgatgagaacgcccgtttacttactcgacatcacaactctatctcaactgagaaaagatgctcatccatctacatatggaggcgatggcggaacggattgcagtcactggtgccttcctggcttgccggatacttggaaccagcttctctatgcagctctttcgatgtgaaagcttgactcaatacacacttgcatgtatattacattcttggcagtccaaaggggaaaaaaagaagaagaaacgactgacattttacttggagagaatttgaagattagaaagagtatatgacgataaagttgtaaagtgttttatattctttactcttgggtggttacaaatcataatctaatcgacttcgattgtgattacc

SEQ ID NO: 99412 - protein, 408 aa, Arabidopsis thaliana
  peptide (1)..(408): Ceres Seq. ID no. 13602835
YKLESITKPIQVKRKEKKNRSWKMGFKLNSLFLLLSLLILTILSGADQALAYVKKPHVSQRNKTALAAVAGRGGGKEMLKGRKQTSGCNLFQGRWVFDASYPFYDSSTCPFIDGEFDCLKFGRPDKQFLKYSWQPDSCTVPRFDGEAFLKKWRGKRVMFVGDSLSLNMWESLACMIHSSVPNTKTTFLKRTPLSSLTFQEYDVTLFLYRTPYLVDISKESVGRVLNLGAIEDGADAWKNMDLLVFNSWHWWTHTGVQSQGWDFIRDGSSLMRDMDRLDAFNKGLTTWGQWVDQNVNVSQTRVFFQGISPTHYMGREWNEPRKTCNGQMQPLTGSTYPGGSLPAASIVSRVLSTMRTPVYLLDITTLSQLRKDAHPSTYGGDGGTDCSHWCLPGLPDTWNQLLYAALSM

SEQ ID NO: 99413 - protein, 385 aa, Arabidopsis thaliana; identical to SEQ ID NO: 35905
  peptide (1)..(385): Ceres Seq. ID no. 13602836

SEQ ID NO: 99414 - protein, 331 aa, Arabidopsis thaliana; identical to SEQ ID NO: 35906
  peptide (1)..(331): Ceres Seq. ID no. 13602837

SEQ ID NO: 99415 - DNA, 702 bp, Arabidopsis thaliana
  misc_feature (1)..(702): Ceres Seq. ID no. 13602838
  misc_feature (1)..(702): Ortholog of  Ceres SEQ ID NO 13638986 as cited in SEQ ID NO 56098
aggttaagatcattttgagtctctccaaaccctaatatcaaattctcatctcataactaacaaaagcatcccaaaatttctagtaaatggcggaggaattcgatgaatctgaggtagtgttctccgatggtttaagctccgttctccataaagagaacgagaatcgcctgtttggttctgatatggagaggaagaagacgaggcggatcaagaggacgacgacggagaaggcgtcgttgtcgagctcgcttccggtgagtatccctgagaacatctttcggaggtacgttgggaaagaggaggatgaatactcagaggaggaatattccgaaggaggaggagagatgattccgccgcatattatgatcggacggaggatccaaggaggacaaatggcgttttccgtttgttcaggtagtggaaggactcttaagggaagagatctgagccgggttcggaattcggttcttaggttaaccggttttttggaggcttgaaccgttaccggtttgccatacttcatcatcttttcccaactcttttgtttttttgcatattacggaaaattgctagtggatccccgtgttgtttatttaagtaaagggtggggaaaatgtgaaacaaagctttctccttagtttttgtttttccatattcttttgtttttcctaaattgtaataggaaacaaggaaatttcgggt

SEQ ID NO: 99416 - protein, 136 aa, Arabidopsis thaliana; identical to SEQ ID NO: 21190
  peptide (1)..(136): Ceres Seq. ID no. 13602839

SEQ ID NO: 99417 - protein, 104 aa, Arabidopsis thaliana; identical to SEQ ID NO: 21191
  peptide (1)..(104): Ceres Seq. ID no. 13602840

SEQ ID NO: 99418 - DNA, 989 bp, Arabidopsis thaliana
  misc_feature (1)..(989): Ceres Seq. ID no. 13602841
  misc_feature (1)..(989): Ortholog of  Ceres SEQ ID NO 13594193 as cited in SEQ ID NO 58558
  misc_feature (1)..(989): Ortholog of  Ceres SEQ ID NO 15177545 as cited in SEQ ID NO 0
caatctctcaaacacacaagaaggaaaaaaaaaaaaaaaatctctcaaacacataacttcaaacatcaatcaaagcttatacagaacttttttttctttctatttctcggacaaaaagaaaaatggatgacatatcagtgagcaaaagcaaccacggaaatgttgttgtgctcaacatcaaagcgtcttctcttgcagacacttctcttccttccaacaaacacgagtcatcgtccccgcctttgctctctgtccatttcttgcaaaagctcttagcggagctcgttggaacttactatctgatatttgctggctgtgccgccattgccgtgaatgctcaacacaaccatgtagtgactcttgtggggattgctgtggtttggggtatagtgataatggttcttgtttactgtctcggccacctctctgcacatttcaatcctgctgtcactcttgccttagcatcttcccaaagattccctctgaatcaagtcccggcctacataactgttcaagtcatcggatcaaccttggcatctgcgactctgcgtcttctgtttgatctgaacaatgatgtgtgcagcaagaaacatgatgtcttcctcgggtcatctccttctgggtctgatcttcaagcattcgtgatggagttcatcattaccggcttcctcatgttagtcgtctgtgccgtcacaaccaccaagagaactacagaggaactagaggggctaatcattggggcaaccgtcacactgaatgttatatttgctggagaggtatcaggagcatcgatgaatccagccagaagcataggacctgcacttgtgtggggatgttacaaagggatttggatatacttgctggctccaacacttggtgccgtctctggggccttgattcataaaatgttaccgtcaatacagaacgcagagcctgagttctccaagacaggatcttctcataaacgagttaccgatcttcctctgtga

SEQ ID NO: 99419 - protein, 288 aa, Arabidopsis thaliana
  peptide (1)..(288): Ceres Seq. ID no. 13602842
MDDISVSKSNHGNVVVLNIKASSLADTSLPSNKHESSSPPLLSVHFLQKLLAELVGTYYLIFAGCAAIAVNAQHNHVVTLVGIAVVWGIVIMVLVYCLGHLSAHFNPAVTLALASSQRFPLNQVPAYITVQVIGSTLASATLRLLFDLNNDVCSKKHDVFLGSSPSGSDLQAFVMEFIITGFLMLVVCAVTTTKRTTEELEGLIIGATVTLNVIFAGEVSGASMNPARSIGPALVWGCYKGIWIYLLAPTLGAVSGALIHKMLPSIQNAEPEFSKTGSSHKRVTDLPL

SEQ ID NO: 99420 - protein, 197 aa, Arabidopsis thaliana
  peptide (1)..(197): Ceres Seq. ID no. 13602843
MVLVYCLGHLSAHFNPAVTLALASSQRFPLNQVPAYITVQVIGSTLASATLRLLFDLNNDVCSKKHDVFLGSSPSGSDLQAFVMEFIITGFLMLVVCAVTTTKRTTEELEGLIIGATVTLNVIFAGEVSGASMNPARSIGPALVWGCYKGIWIYLLAPTLGAVSGALIHKMLPSIQNAEPEFSKTGSSHKRVTDLPL

SEQ ID NO: 99421 - DNA, 1094 bp, Arabidopsis thaliana
  misc_feature (1)..(1094): Ceres Seq. ID no. 13602855
  misc_feature (1)..(1094): Ortholog of  Ceres SEQ ID NO 14304941 as cited in SEQ ID NO 53358
  misc_feature (1)..(1094): Ortholog of  Ceres SEQ ID NO 15176197 as cited in SEQ ID NO 58416
gtttatctccaccgaacaagaaaaaaaactaaaaccctaattccagcgncgtcttcgcgctctgagaaaaatcgcagagtagagactagaaggagaagaagatgagagtgaagaggcagaagaaaaacaggagaaccgtgagattcttcacggtctgttacggattccgtcaaccctacaaagtcctttgcgacggcactttcgtccaccatcttgtcactaatgagatcactcccgccgacactgctgtctctgaactcctcggaggtcccgtcaagctcttcaccaccagatgtgtgattgcggagttggagaaactgggtaaagattttgcggaatctctcgaagctgcccagacgcttaatacagcaacatgtgagcacgaggaggcaaaaacagcagacgagtgtttgtcagaggtaataggggtacaaaatactgagcatttcttccttggtactcaggacgcggagtttaggagaaagcttcagcaggagtctatagttcctcttgtgtttggtctaaggaacatactgctgattgatcaaccttctgatttccaacgtcagagtgccaaagactctgaaaataagcgcttaactatgaccgatacggaaaaaaagttgttggtgaaacggactgcgaaaatcatagcttctaatagaaaagaagcaacaattgcaaatgaagaatggggaatgcctcgagtagtttctacaaaaaatggacttggtgtgaaggatagacctcagttcaagcgaaatagagccaagggtccaaacccactttcatgcatgaagaaaaagaaggagaatcctcaatccaaatccaaagccgattctaactctaatgcacaaaaggaaaagaaagaaggcgggagcgatacacaaaagaggtcaagaaaacggtcaaaaaaaggaaagtctggtccggagagaaccgagtgaaaacagttgttttatatataacacatcttgagtccttactttttctactgcatacaaaaattttggtcaccaatcagactagagcttgagtctcattgctgttatactctcattttatttcaagcaaagacgacccgtgtaacagag

SEQ ID NO: 99422 - protein, 281 aa, Arabidopsis thaliana
  peptide (1)..(281): Ceres Seq. ID no. 13602856
MRVKRQKKNRRTVRFFTVCYGFRQPYKVLCDGTFVHHLVTNEITPADTAVSELLGGPVKLFTTRCVIAELEKLGKDFAESLEAAQTLNTATCEHEEAKTADECLSEVIGVQNTEHFFLGTQDAEFRRKLQQESIVPLVFGLRNILLIDQPSDFQRQSAKDSENKRLTMTDTEKKLLVKRTAKIIASNRKEATIANEEWGMPRVVSTKNGLGVKDRPQFKRNRAKGPNPLSCMKKKKENPQSKSKADSNSNAQKEKKEGGSDTQKRSRKRSKKGKSGPERTE

SEQ ID NO: 99423 - DNA, 1489 bp, Arabidopsis thaliana
  misc_feature (1)..(1489): Ceres Seq. ID no. 13602857
  misc_feature (1)..(1489): Ortholog of  Ceres SEQ ID NO 15169655 as cited in SEQ ID NO 64922
  misc_feature (1)..(1489): Ortholog of  Ceres SEQ ID NO 13596004 as cited in SEQ ID NO 68212
cgatttctccgctcttctccactcttcttctctgttctatcgcagacatttttgtttatatgcatacataataataatacactcttgtcaggatttttgattctctctttggttttctcggaaaaatgtctgcgatactccaaggagctggagctgcaacggctctctcgccgtttaattctatcgattccaacaaactcgttgctccttctcgctcttctctttcagtgaggagcaagagatacattgttgccggatctgatagtaaaagctttggttctagcctcgtagctcgtcgctctgagccgttgataccaaatgctgttacgacgaaggcggacactgctgcgagctctacttcatcaaagcctggacatgagctattacttttcgaggctcttcaagaaggtctagaagaagagatggacagagatccacatgtatgtgtcatgggtgaagatgtaggccattacggaggctcatacaaagtaactaaaggcctagctgataagtttggcgatctcagggttctggacactccaatctgtgaaaacgccttcaccggtatgggcattggagccgccatgacaggactaagacccgtcatcgaaggtatgaacatggggtttctactcttagccttcaaccaaatctccaacaactgtggtatgcttcactatacatccggtggtcaattcactatcccggttgttatccgtgggcctggaggtgtgggccggcagctcggagccgagcattcccagcgtctcgagtcttacttccagtcaatccctgggatccagatggtggcttgctcaacaccttacaacgctaaaggattgatgaaagcggcgataagaagtgagaatcctgtgattctgtttgaacacgttctgctctataacctcaaggagagtattccggatgaagaatacatatgtaatctggaagaagcagaaatggtcagacccggtgaacacatcacgatactgacgtattcaaggatgaggtaccatgtaatgcaggctgcaaagacgctggtgaacaaagggtatgatccagaggttatcgacataaggtcgttgaagccgtttgatctctacacaattggaaactcggtgaagaagacacaccgggttttgattgtggaggaatgtatgagaacgggaggaatcggagccagtttgacggctgcaataaacgagaactttcatgattacttagatgctccggtgatgtgtttgtcttctcaggatgtcccaactccttacgccggtacattggaagaatggacggttgttcagccagctcagatcgtcactgccgtcgaacaactttgccagtaattgctttttttacggtgattgtgttttacccttttttactttttgttactgtttgtcttcgatggaaaatgcttgtgaaatgaaaactctgaattttactcttatgatatgaacatttatattttctatagataataacttcc

SEQ ID NO: 99424 - protein, 406 aa, Arabidopsis thaliana; identical to SEQ ID NO: 24500
  peptide (1)..(406): Ceres Seq. ID no. 13602858

SEQ ID NO: 99425 - protein, 307 aa, Arabidopsis thaliana; identical to SEQ ID NO: 24501
  peptide (1)..(307): Ceres Seq. ID no. 13602859

SEQ ID NO: 99426 - protein, 298 aa, Arabidopsis thaliana; identical to SEQ ID NO: 24502
  peptide (1)..(298): Ceres Seq. ID no. 13602860

SEQ ID NO: 99427 - DNA, 1464 bp, Arabidopsis thaliana
  misc_feature (1)..(1464): Ceres Seq. ID no. 13602875
  misc_feature (1)..(1464): Ortholog of  Ceres SEQ ID NO 14311882 as cited in SEQ ID NO 51638
  misc_feature (1)..(1464): Ortholog of  Ceres SEQ ID NO 14308803 as cited in SEQ ID NO 55038
  misc_feature (1)..(1464): Ortholog of  Ceres SEQ ID NO 13595437 as cited in SEQ ID NO 56562
ataattctagccacaatctttttagggtttcacaagttcacttaaaaagttgaaaagagtctttcttcttcaactattgtaaatgcgaaatggatcgaagagatgcaatgggattatccgggtcaggttcttactatatccatagaggattatccgggtcgggtcctccaacgtttcatggatcaccacagcaacagcaaggtcttcgtcacttacctaatcaaaactctccattcgggtcaggctccactggtttcggatctccttctttacacggtgatccttctctggcaacagcagccggaggagccggagctcttcctcatcatatcggcgttaatatgattgctcctcctccacctcccagtgaaactccgatgaaacgaaagagaggacggcctagaaaatacggtcaagacggctctgtttctttggctctgtcgtcttcctctgtttcgaccattactcccaacaactctaacaaacgcggccgtggtcgacctccgggctccggcaagaaacagagaatggcttccgttggtgaactgatgccttcatcttctggaatgagcttcacgccacatgttatcgcggtttcaataggagaagatattgcatcaaaggttatagctttctctcaacaaggtccgagagccatttgcgttttatctgcaagtggtgcagtctctactgcaacacttattcaaccatcagcatctcccggagccattaaatacgagggccggtttgaaatcctagcgttatcaacatcttatatagtggcaactgatggaagcttccgtaaccgaactggaaacttatcggtttcgcttgctagccccgatgggcgtgtgattggcggtgccattggtgggcctttaatagctgcaagtcctgttcaggttattgtagggagctttatatgggcagctccaaagatcaagagcaagaaacgagaagaagaagcttctgaagttgttcaagaaactgatgatcaccacgttctggacaataataacaacacgatttcgcctgtccctcagcagcagccaaaccaaaacctgatttggtcaacaggttcaaggcaaatggatatgcgtcatgctcatgctgatattgatttaatgcgcggttgatgatagcgagaaagaactctgtgtatataaagcatggaatctaggaagaagaagaaggaatataagctaacctctgaacaaaagtatgtggaaatgttagggaaaaagattatgtggaaatgttagggaaaaagattaactctattagtgtacctctcatatctctaagcttgtttggttttactgtttctgtgactctgaagatttgcagagttcctttctttctctgttttagattgttcagtctttatgtaatttgcttgcaattctgattctacagcttagattcagtacattgtgtagaagtttacatgggaacctgaaaatt

SEQ ID NO: 99428 - protein, 348 aa, Arabidopsis thaliana; identical to SEQ ID NO: 36793
  peptide (1)..(348): Ceres Seq. ID no. 13602876

SEQ ID NO: 99429 - protein, 342 aa, Arabidopsis thaliana; identical to SEQ ID NO: 36794
  peptide (1)..(342): Ceres Seq. ID no. 13602877

SEQ ID NO: 99430 - protein, 264 aa, Arabidopsis thaliana; identical to SEQ ID NO: 36795
  peptide (1)..(264): Ceres Seq. ID no. 13602878

SEQ ID NO: 99431 - DNA, 976 bp, Arabidopsis thaliana
  misc_feature (1)..(976): Ceres Seq. ID no. 13610689
  misc_feature (1)..(976): Ortholog of  Ceres SEQ ID NO 15174024 as cited in SEQ ID NO 0
atgttcttaacccaaagaaacttttcattgagaccttctcttgttcatgactttcttcaacagactctcacgaccaggaaaaggactttgaatctttggctcaactttcccaaaacacccttctgctcacttctattcactgtcttgccatcatctctcccaagactctgtctcatcctttctctcctctgttttctcctccatccattctcatcttcctcttcttccttcttcttaatctctcttcttcttaccatttctcctctctcttcttcttcttcgttcgccttccttaacctaggaatccgaccacctttgcttgtccctaaaagctcaaaattgattttgctccaaccaatcttatcttcattatcccaaccaaatctctcactaatctccaacaacatcgaaacagagtttacctcttctctactcttccttacagaagttaaagctctcatgctctcatcacttccatggaggattttctctgcaaattcccactcagttctatctttataaacatcgtcttcgagcacttcatcagcaagctttgcccaatactcaaaaactcctgcacgaagattctttgagacccatttaagataagaagaaggcaaagtaccaagcattttgcccttgtgtttgccgaagtctatgattgtgtctctggcggctagggtttcgatgatttgaagttttttgattaagggtttagactgattggtggagaagataccattagatgaagaaagatttcttcttggtctgaaagatgatgatgatgagattctgaagatggtttttgttgttactgcagcagagtgaggactgtggaacaagaccaccgagaaactcattgttgtgtccccaaaatattgtctattttttcttgaatcctataaaatacatttagggggtgttattcgttaatggattttaatagaattgaaattcaacactaatttactgttat

SEQ ID NO: 99432 - protein, 173 aa, Arabidopsis thaliana
  peptide (1)..(173): Ceres Seq. ID no. 13610690
MFLTQRNFSLRPSLVHDFLQQTLTTRKRTLNLWLNFPKTPFCSLLFTVLPSSLPRLCLILSLLCFLLHPFSSSSSSFFLISLLLTISPLSSSSSFAFLNLGIRPPLLVPKSSKLILLQPILSSLSQPNLSLISNNIETEFTSSLLFLTEVKALMLSSLPWRIFSANSHSVLSL

SEQ ID NO: 99433 - DNA, 746 bp, Arabidopsis thaliana
  misc_feature (1)..(746): Ceres Seq. ID no. 13602891
  misc_feature (1)..(746): Ortholog of  Ceres SEQ ID NO 13594766 as cited in SEQ ID NO 51913
  misc_feature (1)..(746): Ortholog of  Ceres SEQ ID NO 12609226 as cited in SEQ ID NO 59300
  misc_feature (1)..(746): Ortholog of  Ceres SEQ ID NO 13654942 as cited in SEQ ID NO 62533
  misc_feature (1)..(746): Ortholog of  Ceres SEQ ID NO 13599195 as cited in SEQ ID NO 0
gccataaactttagaaaagagagagagagacaaagagagatctgatcctttgaagaaacaacaccaaaaaaaaaaaaaaaagaatggcatcagcggatgaaaaggtggtggaagagaaggcttcggtgatttcaagcttgttggacaaagccaaaggtttctttgcggagaagctggcgaatattccgacgccggaagcaaccgtggacgacgttgatttcaaaggcgtgacacgtgatggagtagattatcacgccaaggtctccgtcaagaatccttactctcaatccatccctatctgccagatctcttacatcctcaagagtgccacaaggacgatcgcgtcaggcacgataccggacccgggttcgttggttgggagcggcacgacggttctggacgtaccggttaaggtggcttatagcatagcggttagtctgatgaaggatatgtgtacggactgggacattgactatcaactagacattgggctaaccttcgacattcctgttgttggtgatatcaccattcctgtctctactcagggagagatcaagctcccttcccttcgcgacttcttttaattaccttatttcaaatatagttttcttaaatcataatctaattttcaataatgtacgatccataaacatagacgatcggagattaatacatttctggaatcctttttttattttgttgatttcaacaaggattttattggttattaattatgtatgtttttc

SEQ ID NO: 99434 - protein, 166 aa, Arabidopsis thaliana; identical to SEQ ID NO: 26434
  peptide (1)..(166): Ceres Seq. ID no. 13602892

SEQ ID NO: 99435 - DNA, 1370 bp, Arabidopsis thaliana
  misc_feature (1)..(1370): Ceres Seq. ID no. 13602929
  misc_feature (1)..(1370): Ortholog of  Ceres SEQ ID NO 13655988 as cited in SEQ ID NO 65557
aaatagctttcttcttttggccccttacccagagatagattcttatatactactgagaatcttcaatttctgcaacttttgtatctcttcctgatggagtcttcaagtccccaccatagtcacattgttgaggttaatgttggaaaatctgatgaagagagaataattgtggcgagtaaagtctgtggagaagcaccatgtgggttttcagattctaagaatgcttccggggatgctcacgaacgctctgcttctatgcggaagctttgtatcgccgtcgtgctgtgtctagtgttcatgagtgttgaagttgttggtgggattaaagccaatagtttagctatattaaccgatgcagctcatttgctctctgacgttgctgcctttgctatctccctcttctcattgtgggctgctggctgggaagcgactcctaggcagacttacgggttcttcaggattgagattttgggtgctcttgtatctatccagctcatttggttgctcacgggtattctggtttatgaagcgattatcagaattgttacagagaccagtgaggttaatggattcctcatgtttctggttgctgcctttggtctagtggtgaacatcataatggctgttctgctagggcatgatcatggtcacagtcatggacatgggcatggccacggccatgaccatcacaatcatagccatggggtgactgttaccactcatcaccatcatcacgatcatgaacatggccatagtcatggtcatggagaggacaagcatcatgctcatggggatgttactgagcaattgttggacaaatcgaagactcaagtcgcagcaaaagagaaaagaaagagaaacatcaatctccaaggagcttatctgcatgtccttggggattccatccagagtgttggtgttatgattggaggagctatcatttggtacaatccggaatggaagatagtggatctgatctgcacacttgccttttcggttattgtcctaggaacaaccatcaacatgattcgcaacattctagaagtattgatggagagtacacccagagagattgacgccacaaagctcgaaaagggtttgctcgaaatggaagaagtggtggctgttcatgagctccacatatgggctatcacagtgggaaaagtgctattggcttgccatgtcaatatcagaccagaagcagatgcagatatggtgctcaacaaggtaattgattacatccgcagggagtacaacattagtcatgtcacgatacaaatcgagcgctaaaagctaagtaagatctgatgaagggtttttgtatcagcattctcattaacaataaaatcaataaagtttctacatttttc

SEQ ID NO: 99436 - protein, 398 aa, Arabidopsis thaliana; identical to SEQ ID NO: 43642
  peptide (1)..(398): Ceres Seq. ID no. 13602930

SEQ ID NO: 99437 - protein, 344 aa, Arabidopsis thaliana; identical to SEQ ID NO: 43643
  peptide (1)..(344): Ceres Seq. ID no. 13602931

SEQ ID NO: 99438 - protein, 330 aa, Arabidopsis thaliana; identical to SEQ ID NO: 43644
  peptide (1)..(330): Ceres Seq. ID no. 13602932

SEQ ID NO: 99439 - DNA, 1577 bp, Arabidopsis thaliana
  misc_feature (1)..(1577): Ceres Seq. ID no. 13602933
  misc_feature (1)..(1577): Ortholog of  Ceres SEQ ID NO 13596807 as cited in SEQ ID NO 62275
ctccagtttcatagtcactaacctaaaagaattaatggaggaaactcggaggaggtttgtcatatcctctgttctaagtgtttctttgatctacttatgtctttcgacatgtcacgtttccgccttcgacttcggtagaaggcagctccggtttaatactgatggtcggttcaagatactgcaagtgtcagatatgcactacggttttggcaaagagacgcaatgctcagacgtttcacctgcagaatttccttactgctccgatctcaatactacctcctttttacagcgaactatcgcttccgagaagcccgatctcatcgtcttctctggagacaatgtatatggattgtgcgagacaagtgacgtggcaaaatcgatggacatggcatttgctcctgcgatcgaatcggggattccatgggtggctattttggggaatcacgaccaagaatccgacatgactagagaaacaatgatgaaatacatcatgaaactcccaaactcgttgtctcaagtaaaccctcccgatgcttggctataccaaatcgacggttttggtaattacaatctacaaatcgagggtccttttggctcccctctcttcttcaaatccattctcaatctctatctactagacggtggatcttacacgaagcttgatggttttggttacaaatatgattgggtcaaaacctctcaacagaattggtatgaacacacttctaaatggcttgagatggaacacaagaggtggccatttccacagaatagtacggcaccaggattggtttacctccacattccgatgccggaatttgcattgttcaacaaatcgacggagatgactggagtaagacaagaatctacttgttctccacctatcaactctggtttctttaccaaacttgtcgaaagaggtgaagtcaaaggtgttttcagtggtcacgaccacgtcaacgacttctgtgccgaactccatgggatcaacctttgttacgcaggcggagccgggtatcatgggtacggacaggttggttgggcaaggagagtaagagtagttgaggctcagcttgagaagactatgtatggacgttggggagctgttgatacaatcaaaacttggaaacggctcgatgataagaatcattctttgattgatactcaacttctctggaccaagaacacaactcttgagccaaattttgggtttagttgctctactataccacaacactgatcattaagcagagttgttgtacaatgatatgatattttcattttctttatttatgctttactatctattattttgtttagaataagaattaaggaagacaatgtcagcttataattgtctgctttgtttagaataagaaggaagacaatgtcagcttataattgtctgctttgttacgttcgttttatttttctcaatagagtatcattttatctataaacatgagtcaatactcaatgggtacgctttggtaaagttaataatctcgggaaatgtttatagaagagtttataatgtaggattttctgagtgggaaatattggaagactggaatcgc

SEQ ID NO: 99440 - protein, 412 aa, Arabidopsis thaliana
  peptide (1)..(412): Ceres Seq. ID no. 13602934
SSFIVTNLKELMEETRRRFVISSVLSVSLIYLCLSTCHVSAFDFGRRQLRFNTDGRFKILQVSDMHYGFGKETQCSDVSPAEFPYCSDLNTTSFLQRTIASEKPDLIVFSGDNVYGLCETSDVAKSMDMAFAPAIESGIPWVAILGNHDQESDMTRETMMKYIMKLPNSLSQVNPPDAWLYQIDGFGNYNLQIEGPFGSPLFFKSILNLYLLDGGSYTKLDGFGYKYDWVKTSQQNWYEHTSKWLEMEHKRWPFPQNSTAPGLVYLHIPMPEFALFNKSTEMTGVRQESTCSPPINSGFFTKLVERGEVKGVFSGHDHVNDFCAELHGINLCYAGGAGYHGYGQVGWARRVRVVEAQLEKTMYGRWGAVDTIKTWKRLDDKNHSLIDTQLLWTKNTTLEPNFGFSCSTIPQH

SEQ ID NO: 99441 - protein, 401 aa, Arabidopsis thaliana
  peptide (1)..(401): Ceres Seq. ID no. 13602935
MEETRRRFVISSVLSVSLIYLCLSTCHVSAFDFGRRQLRFNTDGRFKILQVSDMHYGFGKETQCSDVSPAEFPYCSDLNTTSFLQRTIASEKPDLIVFSGDNVYGLCETSDVAKSMDMAFAPAIESGIPWVAILGNHDQESDMTRETMMKYIMKLPNSLSQVNPPDAWLYQIDGFGNYNLQIEGPFGSPLFFKSILNLYLLDGGSYTKLDGFGYKYDWVKTSQQNWYEHTSKWLEMEHKRWPFPQNSTAPGLVYLHIPMPEFALFNKSTEMTGVRQESTCSPPINSGFFTKLVERGEVKGVFSGHDHVNDFCAELHGINLCYAGGAGYHGYGQVGWARRVRVVEAQLEKTMYGRWGAVDTIKTWKRLDDKNHSLIDTQLLWTKNTTLEPNFGFSCSTIPQH

SEQ ID NO: 99442 - protein, 348 aa, Arabidopsis thaliana
  peptide (1)..(348): Ceres Seq. ID no. 13602936
MHYGFGKETQCSDVSPAEFPYCSDLNTTSFLQRTIASEKPDLIVFSGDNVYGLCETSDVAKSMDMAFAPAIESGIPWVAILGNHDQESDMTRETMMKYIMKLPNSLSQVNPPDAWLYQIDGFGNYNLQIEGPFGSPLFFKSILNLYLLDGGSYTKLDGFGYKYDWVKTSQQNWYEHTSKWLEMEHKRWPFPQNSTAPGLVYLHIPMPEFALFNKSTEMTGVRQESTCSPPINSGFFTKLVERGEVKGVFSGHDHVNDFCAELHGINLCYAGGAGYHGYGQVGWARRVRVVEAQLEKTMYGRWGAVDTIKTWKRLDDKNHSLIDTQLLWTKNTTLEPNFGFSCSTIPQH

SEQ ID NO: 99443 - DNA, 1032 bp, Arabidopsis thaliana
  misc_feature (1)..(1032): Ceres Seq. ID no. 13602937
  misc_feature (1)..(1032): Ortholog of  Ceres SEQ ID NO 14312391 as cited in SEQ ID NO 55070
agttctcagtttgtcaccatcctcgagcagcttttgagctttgaaggttcgaaaatggatcgaattgcgtctgcgactttctcttgccctgcgatttcattgtcccgcgtctgtagaatcagcccttttggcttaaacattaaaaccaaccatagaaagagattctcgtgtcgagtagctgtagcttctggagagacttcggccagggtcgtcgtcgacaatgaacttgacttagaacacaagaaacacgatctactgagagctgttcaagacactcaacgaggactcactgccacttctgatcaacgatctatcattgaggaggctctggtgactgtggaagggtttaatggcggtgaagaaattgatccagtgaagttagatggaacatggaggctacaatatacatctgcacctgatgttgttgttctgtttgaagctgcttcaagacttcccttctttcaggtagggcaggtctttcagaagtttgagtgcagagatagatccgacggtgggatcattcggaatgttgttcagtggagtcttccaagcttgttggaggagcaagaaggtgcaacacttgttgttaccgcgaaatttgataaggtctctagtcgaaacatctaccttcagtttgaagagataagtgttagaaacattaacatcaatgagcagcttcaagctcttatcgcacctgcaatacttccacgctcatttctaagcctacagcttttgcagtttatccgtactttcaaagctcagattccagtaaacgcaaccagcccaggaaggagatctgtaggtggattgtattacctatcgtatctcgataacaacatgcttttgggacggtctgtaggaggaggaggagtatttgtctttacaaaatctcaacccctcgagctgtgagcatcagacaaatctataaaactctgtttttgactgtataatcacagaaaaaagaagaacattatgttagcagattctgtttatgtacaatctattcgggttttattgaagatcttgtacaat

SEQ ID NO: 99444 - protein, 302 aa, Arabidopsis thaliana; identical to SEQ ID NO: 30333
  peptide (1)..(302): Ceres Seq. ID no. 13602938

SEQ ID NO: 99445 - protein, 284 aa, Arabidopsis thaliana; identical to SEQ ID NO: 30334
  peptide (1)..(284): Ceres Seq. ID no. 13602939

SEQ ID NO: 99446 - DNA, 2331 bp, Arabidopsis thaliana
  misc_feature (1)..(2331): Ceres Seq. ID no. 13602940
  misc_feature (1)..(2331): Ortholog of  Ceres SEQ ID NO 14312594 as cited in SEQ ID NO 58686
  misc_feature (1)..(2331): Ortholog of  Ceres SEQ ID NO 13597706 as cited in SEQ ID NO 65326
atcaaattatcttctttctctttctctctgatcatttccaaattatttctaagctaagaaaatctttaaaaataacaaagcttctaaaataataatccgacctaccggattcaaaccattgatctgaagatcatctataaaccagtccttgatctataaactaaaataagggaagaaaaaaacaagagagagaaatagagaatgaagtcttttgcggctaaggtagaagagggagttaaaggaatagacggaaagccgtcggtaggtccggtgtaccggaatcttctgtcggaaaaaggttttcctccgattgattctgagatcaccactgcttgggacattttcagtaaatcagtggagaaattccctgacaataatatgcttggatggcgtcgaattgttgatgagaaggttggaccatatatgtggaaaacgtacaaggaagtatacgaagaagttttgcagattggctctgcactacgagccgccggagctgaacctgggagtcgagtggggatctacggtgttaattgtcctcagtggatcatagcaatggaggcttgtgcagctcacactctaatctgtgtacctctatatgatacattgggttcaggagcagtcgattacattgtagagcatgcggaaatcgactttgtgtttgtccaagacaccaaaattaaaggacttcttgagccagattgcaaatgtgctaaacggctaaaagctatagtttccttcactaacgtgagcgacgagcttagccacaaggcttcagaaattggagtcaaaacatactcctggatcgattttctccatatgggacgtgagaaaccggaagacacgaacccgcctaaggcgtttaacatatgcaccataatgtacaccagcggcacaagcggtgatcctaaaggtgtggttttgactcaccaagcggtcgcgacttttgttgttgggatggatctctatatggaccagtttgaagataagatgacacatgatgatgtgtatctctccttcttgcccttggctcatattcttgaccgtatgaacgaggaatacttctttcgcaaaggcgcttccgtcggctattaccatggaaatttgaacgtgttacgtgacgatattcaagaactgaaaccgacttatctagctggagtaccaagagtgtttgagagaatccatgaggggattcaaaaggctcttcaagaacttaacccaagaaggagattcatcttcaatgctctctacaaacacaagcttgcgtggttgaatcgtgggtactctcatagtaaagcttcacccatggctgatttcattgctttcagaaagattagagacaaattgggaggtcgcatccggttgctagtatctggaggagcacctttgagccctgagattgaagagtttttgagagttacttgttgttgctttgtcgttcaaggctacggtctaacggagacacttggaggaacggctttgggtttcccggacgagatgtgtatgctagggacagtcggtattccagcggtttacaacgagatacggcttgaagaggtgtctgaaatgggctatgacccgctcggagaaaatccggcaggagagatctgtataagaggacaatgtatgttttcagggtattacaagaaccctgaactcactgaagaagtcatgaaagatggatggttccacacaggagatataggtgagattcttccaaacggagtactcaagatcatcgatcgtaaaaagaatctgatcaaactttctcaaggagaatatgttgctctcgagcatttggaaaacatcttcgggcaaaactctgttgtccaagatatatgggtttatggagacagcttcaaatctatgcttgtcgcggtggttgttcccaacccagaaaccgtcaacaggtgggctaaagatctcggttttactaaaccattcgaagaactctgttctttcccggaactaaaagaacacatcatttcagaactgaagtccacggcagaaaagaacaagctaagaaagtttgagtacatcaaagcggtgacagtggagacaaaacctttcgacgtagagagagacttagtgactgcgacgctcaagaatcggaggaacaatcttctcaaatattatcaggtgcaaatcgacgaaatgtaccgcaaattggcctcaaagaaaatctgaaagtgttgcgatgatgtgtgtgctgttattgatagttatatatgtacgttatatgtatcaataattcatagatatgagctttatgctttatgtaatattttatttttatgttgtatgacatcataattatggaatttttttttgttg

SEQ ID NO: 99447 - protein, 660 aa, Arabidopsis thaliana
  peptide (1)..(660): Ceres Seq. ID no. 13602941
MKSFAAKVEEGVKGIDGKPSVGPVYRNLLSEKGFPPIDSEITTAWDIFSKSVEKFPDNNMLGWRRIVDEKVGPYMWKTYKEVYEEVLQIGSALRAAGAEPGSRVGIYGVNCPQWIIAMEACAAHTLICVPLYDTLGSGAVDYIVEHAEIDFVFVQDTKIKGLLEPDCKCAKRLKAIVSFTNVSDELSHKASEIGVKTYSWIDFLHMGREKPEDTNPPKAFNICTIMYTSGTSGDPKGVVLTHQAVATFVVGMDLYMDQFEDKMTHDDVYLSFLPLAHILDRMNEEYFFRKGASVGYYHGNLNVLRDDIQELKPTYLAGVPRVFERIHEGIQKALQELNPRRRFIFNALYKHKLAWLNRGYSHSKASPMADFIAFRKIRDKLGGRIRLLVSGGAPLSPEIEEFLRVTCCCFVVQGYGLTETLGGTALGFPDEMCMLGTVGIPAVYNEIRLEEVSEMGYDPLGENPAGEICIRGQCMFSGYYKNPELTEEVMKDGWFHTGDIGEILPNGVLKIIDRKKNLIKLSQGEYVALEHLENIFGQNSVVQDIWVYGDSFKSMLVAVVVPNPETVNRWAKDLGFTKPFEELCSFPELKEHIISELKSTAEKNKLRKFEYIKAVTVETKPFDVERDLVTATLKNRRNNLLKYYQVQIDEMYRKLASKKI

SEQ ID NO: 99448 - protein, 601 aa, Arabidopsis thaliana
  peptide (1)..(601): Ceres Seq. ID no. 13602942
MLGWRRIVDEKVGPYMWKTYKEVYEEVLQIGSALRAAGAEPGSRVGIYGVNCPQWIIAMEACAAHTLICVPLYDTLGSGAVDYIVEHAEIDFVFVQDTKIKGLLEPDCKCAKRLKAIVSFTNVSDELSHKASEIGVKTYSWIDFLHMGREKPEDTNPPKAFNICTIMYTSGTSGDPKGVVLTHQAVATFVVGMDLYMDQFEDKMTHDDVYLSFLPLAHILDRMNEEYFFRKGASVGYYHGNLNVLRDDIQELKPTYLAGVPRVFERIHEGIQKALQELNPRRRFIFNALYKHKLAWLNRGYSHSKASPMADFIAFRKIRDKLGGRIRLLVSGGAPLSPEIEEFLRVTCCCFVVQGYGLTETLGGTALGFPDEMCMLGTVGIPAVYNEIRLEEVSEMGYDPLGENPAGEICIRGQCMFSGYYKNPELTEEVMKDGWFHTGDIGEILPNGVLKIIDRKKNLIKLSQGEYVALEHLENIFGQNSVVQDIWVYGDSFKSMLVAVVVPNPETVNRWAKDLGFTKPFEELCSFPELKEHIISELKSTAEKNKLRKFEYIKAVTVETKPFDVERDLVTATLKNRRNNLLKYYQVQIDEMYRKLASKKI

SEQ ID NO: 99449 - protein, 586 aa, Arabidopsis thaliana
  peptide (1)..(586): Ceres Seq. ID no. 13602943
MWKTYKEVYEEVLQIGSALRAAGAEPGSRVGIYGVNCPQWIIAMEACAAHTLICVPLYDTLGSGAVDYIVEHAEIDFVFVQDTKIKGLLEPDCKCAKRLKAIVSFTNVSDELSHKASEIGVKTYSWIDFLHMGREKPEDTNPPKAFNICTIMYTSGTSGDPKGVVLTHQAVATFVVGMDLYMDQFEDKMTHDDVYLSFLPLAHILDRMNEEYFFRKGASVGYYHGNLNVLRDDIQELKPTYLAGVPRVFERIHEGIQKALQELNPRRRFIFNALYKHKLAWLNRGYSHSKASPMADFIAFRKIRDKLGGRIRLLVSGGAPLSPEIEEFLRVTCCCFVVQGYGLTETLGGTALGFPDEMCMLGTVGIPAVYNEIRLEEVSEMGYDPLGENPAGEICIRGQCMFSGYYKNPELTEEVMKDGWFHTGDIGEILPNGVLKIIDRKKNLIKLSQGEYVALEHLENIFGQNSVVQDIWVYGDSFKSMLVAVVVPNPETVNRWAKDLGFTKPFEELCSFPELKEHIISELKSTAEKNKLRKFEYIKAVTVETKPFDVERDLVTATLKNRRNNLLKYYQVQIDEMYRKLASKKI

SEQ ID NO: 99450 - DNA, 1302 bp, Arabidopsis thaliana
  misc_feature (1)..(1302): Ceres Seq. ID no. 13602944
  misc_feature (1)..(1302): Ortholog of  Ceres SEQ ID NO 15225707 as cited in SEQ ID NO 54212
  misc_feature (1)..(1302): Ortholog of  Ceres SEQ ID NO 14308608 as cited in SEQ ID NO 58855
  misc_feature (1)..(1302): Ortholog of  Ceres SEQ ID NO 14303684 as cited in SEQ ID NO 66254
atctttcttctctctctatctctcctctttgaaccctaaaaactctttctttacaaggattgatctttttgtatttttgattttgacatttgctttgtgttcgatctctgttttgatgcgatttctctgtttttaaagccatttgatagattgtttccggtaaagctcagcgagagaagaagaagaacaacaatggagtttacagatttctcaaagacgagtttttactacccgtcgtcacaaagcgtttgggatttcggagatttagcggcggcggagaggcattctttagggttcatggagttattaagttctcagcagcatcaagactttgctactgtttctcctcattccttccttctccaaacgtctcaaccgcaaacgcaaacgcaaccatcggcgaagctgtcttcaagtatcattcaagctccaccgtcagagcaattagtgacgtcaaaggtggagtctttgtgttcggatcatttgttgataaacccaccggcgactcctaactcgtcatcgatttcgtctgcttcaagcgaggctctaaatgaagagaaaccgaaaacagaagacaatgaagaagaaggaggtgaagatcaacaagagaagagtcatactaagaaacagttgaaagcaaagaagaataatcagaagagacagagagaggcaagagtcgcattcatgacaaagagtgaagttgatcatctcgaagatggttatcgctggcgaaaatatggtcaaaaagctgtcaaaaacagtccttttcccaggagttactaccgttgcacaacggcttcatgtaacgtgaagaagagagtggagagatcattcagagatccaagcactgtggttacaacctacgaaggtcaacacactcacattagtccactcacgtctcgtcctatttccactggaggtttcttcggatcgtcaggagctgcttcgagtctcggtaatggttgctttgggtttcctattgatggctccacgttaatctctcctcagttccaacagcttgtccaataccatcaccaacagcagcaacaagaactcatgtcttgttttggaggagtcaacgagtaccttaatagccacgctaatgagtatggtgatgataatcgtgtgaagaagagtcgagttttggttaaagataatggacttctgcaagatgttgttccgtctcatatgttgaaggaagagtagtagtatatatatagtcttatagttttaatctagtttttttttgtataattgtctaaaagaaacggatcttttgttctgatgaagaagatgttttct

SEQ ID NO: 99451 - protein, 337 aa, Arabidopsis thaliana; identical to SEQ ID NO: 40414
  peptide (1)..(337): Ceres Seq. ID no. 13602945

SEQ ID NO: 99452 - protein, 302 aa, Arabidopsis thaliana; identical to SEQ ID NO: 40415
  peptide (1)..(302): Ceres Seq. ID no. 13602946

SEQ ID NO: 99453 - protein, 173 aa, Arabidopsis thaliana; identical to SEQ ID NO: 40416
  peptide (1)..(173): Ceres Seq. ID no. 13602947

SEQ ID NO: 99454 - DNA, 1208 bp, Arabidopsis thaliana
  misc_feature (1)..(1208): Ceres Seq. ID no. 13602960
  misc_feature (1)..(1208): Ortholog of  Ceres SEQ ID NO 13658153 as cited in SEQ ID NO 66326
aaagagaatgggttctaagggagacaacgttgctgtatgtaacatgaagctcgagagacttctcagcatgaaaggtggcaaaggacaagacagctacgccaataactctcaagctcaggcaatgcatgcacggtccatgcttcacctcctagaggaaacacttgaaaatgttcacctcaactcctccgccagtccgccaccgttcacggcggttgatcttggctgttcctccggcgcaaatactgtccacataatcgatttcatagtcaaacatatctctaagaggtttgatgctgccggaatcgaccctccggagttcacagctttcttctccgatctcccaagcaacgacttcaacacgcttttccagcttcttccaccacttgtctctaacacttgcatggaggagtgtcttgctgccgacgggaaccgctcctacttcgttgctggtgttcccggatcgttttaccggcgactttttccagcgagaaccattgactttttccactctgccttctccttgcattggctctctcaggtgccggaaagtgtgacggataggagatcggcggcgtacaatagagggagagttttcatacacggtgccggagagaagacaacaacggcatacaaacggcagtttcaggccgacttagcggagtttttgagggcaagagcggcggaggttaagagaggtggggccatgttcctggtctgtcttggtcgtacctctgtggatcccaccgaccagggtggtgccggtctactcttcggcactcattttcaggacgcttgggacgaccttgtccgcgagggtttggtagcagcagagaaacgagatggattcaatatcccggtgtacgcaccaagcttgcaagatttcaaggaagtagttgacgccaacggctcatttgcaattgataagctggtagtatacaaaggagggagtccacttgtggtgaatgagccagacgatgcatcagaagttggtcgtgcctttgctagtagttgtcggagtgtggccggagtgctcgtggaagctcacataggcgaagagctaagcaataaactgttctcacgagttgaaagccgagccactagccatgccaaagatgtcttggtgaatttgcagttcttccacattgtcgcttctttgtcttttacttaattagtaccaaataatatgaaaaagaaatatgttcgtgtgc

SEQ ID NO: 99455 - protein, 388 aa, Arabidopsis thaliana
  peptide (1)..(388): Ceres Seq. ID no. 13602961
KRMGSKGDNVAVCNMKLERLLSMKGGKGQDSYANNSQAQAMHARSMLHLLEETLENVHLNSSASPPPFTAVDLGCSSGANTVHIIDFIVKHISKRFDAAGIDPPEFTAFFSDLPSNDFNTLFQLLPPLVSNTCMEECLAADGNRSYFVAGVPGSFYRRLFPARTIDFFHSAFSLHWLSQVPESVTDRRSAAYNRGRVFIHGAGEKTTTAYKRQFQADLAEFLRARAAEVKRGGAMFLVCLGRTSVDPTDQGGAGLLFGTHFQDAWDDLVREGLVAAEKRDGFNIPVYAPSLQDFKEVVDANGSFAIDKLVVYKGGSPLVVNEPDDASEVGRAFASSCRSVAGVLVEAHIGEELSNKLFSRVESRATSHAKDVLVNLQFFHIVASLSFT

SEQ ID NO: 99456 - protein, 386 aa, Arabidopsis thaliana
  peptide (1)..(386): Ceres Seq. ID no. 13602962
MGSKGDNVAVCNMKLERLLSMKGGKGQDSYANNSQAQAMHARSMLHLLEETLENVHLNSSASPPPFTAVDLGCSSGANTVHIIDFIVKHISKRFDAAGIDPPEFTAFFSDLPSNDFNTLFQLLPPLVSNTCMEECLAADGNRSYFVAGVPGSFYRRLFPARTIDFFHSAFSLHWLSQVPESVTDRRSAAYNRGRVFIHGAGEKTTTAYKRQFQADLAEFLRARAAEVKRGGAMFLVCLGRTSVDPTDQGGAGLLFGTHFQDAWDDLVREGLVAAEKRDGFNIPVYAPSLQDFKEVVDANGSFAIDKLVVYKGGSPLVVNEPDDASEVGRAFASSCRSVAGVLVEAHIGEELSNKLFSRVESRATSHAKDVLVNLQFFHIVASLSFT

SEQ ID NO: 99457 - protein, 374 aa, Arabidopsis thaliana
  peptide (1)..(374): Ceres Seq. ID no. 13602963
MKLERLLSMKGGKGQDSYANNSQAQAMHARSMLHLLEETLENVHLNSSASPPPFTAVDLGCSSGANTVHIIDFIVKHISKRFDAAGIDPPEFTAFFSDLPSNDFNTLFQLLPPLVSNTCMEECLAADGNRSYFVAGVPGSFYRRLFPARTIDFFHSAFSLHWLSQVPESVTDRRSAAYNRGRVFIHGAGEKTTTAYKRQFQADLAEFLRARAAEVKRGGAMFLVCLGRTSVDPTDQGGAGLLFGTHFQDAWDDLVREGLVAAEKRDGFNIPVYAPSLQDFKEVVDANGSFAIDKLVVYKGGSPLVVNEPDDASEVGRAFASSCRSVAGVLVEAHIGEELSNKLFSRVESRATSHAKDVLVNLQFFHIVASLSFT

SEQ ID NO: 99458 - DNA, 1624 bp, Arabidopsis thaliana
  misc_feature (1)..(1624): Ceres Seq. ID no. 13602968
  misc_feature (1)..(1624): Ortholog of  Ceres SEQ ID NO 15172560 as cited in SEQ ID NO 57325
  misc_feature (1)..(1624): Ortholog of  Ceres SEQ ID NO 13655716 as cited in SEQ ID NO 68965
ttctaactttttcttatgtaacccacccacatgcttgttcttctttctatcatcttcttacacgactacgacttgtctttctttaccctttttttttttgttttgtttaaagtttctctctttgtgggttcttgttgttagagaaatcagctgcctcagatcagagcttggttttggatttaggattgtttgttaggttttacaatggactccccacaatctgttgtttcaccattcaagattggtgagtcagagaatgagaactcaaattctgtgcagagttctggaaaccaatcgaatggcataaattccaatgggaaagattctaaaagttgtggccggcaagaccttgttggtgctcttgaggtttatgtccatcaggcaagggatatccataacatttgtatatatcacaagcaagacgtttatgccaagctttgccttacaagtgatcctgataagtctgtctcgaccaaaatcatcaatggcggtgggaggaatccggtttttgatgacaatgttaagcttgatgtcagggttctggacacttccctcaaatgtgagatttacatgatgagcagggtgaagaattatcttgaggaccagctgcttggttttactctggttcctatgtcggaactgctcttcaagaatgggaaactcgagaaagagttctctctttcttccactgatctctaccattcgccagctggttttgttcaattgtcactctcctattatggatcctaccctgacgtgatggctattccctctatgccttcgtctgtttctattgatgaaactaccaaggatccagaagggtctgaatcagttccgggtgagttggataagatagagtttccagatcctaatgttgctaatgaaaatgagaagatggtttccgagtattttgggatctcttgttccactattgactcagaaacttctgacagcttggttacttccgatgctgagaatcatgtgactaattctgtcacttctatactgaagcaagattcacctgagagcagcaatgcaacaaatggagctgcttctcctcacgcttcagctcactccgccacagaaacaccaaaccatgaacatctctctgtcgtgaactccaaagcgagttcccaggagtcagagagcgaggcttctggtgagacatctgaggagaagactgtgaaatccgtcctcactgtgaaggttgagccagagtcaaaggtggtgcagcaggatatagtcgacatgtacatgaaaagcatgcaacagtttacagattcactggctaagatgaagcttcctctggacattgacagcccaacaaaatcagaaaattcaagctctgattctcagaagctgccaacaccaaagagcaacaacggatcccgtgtgttctatgggagcaggcctttcttctgagcatctcttttaccaagttcagagaaagaacgcaggtcacccttagacttttctaatgaagaaagactaatcctaatgatgtaattttataatgtactatttcatgttgtatctcccatctggtcagcttgatgctttagttgatgtgagttattattacgtatcactagcctttactctattagaactatgtacgcattat

SEQ ID NO: 99459 - protein, 405 aa, Arabidopsis thaliana
  peptide (1)..(405): Ceres Seq. ID no. 13602969
MDSPQSVVSPFKIGESENENSNSVQSSGNQSNGINSNGKDSKSCGRQDLVGALEVYVHQARDIHNICIYHKQDVYAKLCLTSDPDKSVSTKIINGGGRNPVFDDNVKLDVRVLDTSLKCEIYMMSRVKNYLEDQLLGFTLVPMSELLFKNGKLEKEFSLSSTDLYHSPAGFVQLSLSYYGSYPDVMAIPSMPSSVSIDETTKDPEGSESVPGELDKIEFPDPNVANENEKMVSEYFGISCSTIDSETSDSLVTSDAENHVTNSVTSILKQDSPESSNATNGAASPHASAHSATETPNHEHLSVVNSKASSQESESEASGETSEEKTVKSVLTVKVEPESKVVQQDIVDMYMKSMQQFTDSLAKMKLPLDIDSPTKSENSSSDSQKLPTPKSNNGSRVFYGSRPFF

SEQ ID NO: 99460 - protein, 283 aa, Arabidopsis thaliana
  peptide (1)..(283): Ceres Seq. ID no. 13602970
MMSRVKNYLEDQLLGFTLVPMSELLFKNGKLEKEFSLSSTDLYHSPAGFVQLSLSYYGSYPDVMAIPSMPSSVSIDETTKDPEGSESVPGELDKIEFPDPNVANENEKMVSEYFGISCSTIDSETSDSLVTSDAENHVTNSVTSILKQDSPESSNATNGAASPHASAHSATETPNHEHLSVVNSKASSQESESEASGETSEEKTVKSVLTVKVEPESKVVQQDIVDMYMKSMQQFTDSLAKMKLPLDIDSPTKSENSSSDSQKLPTPKSNNGSRVFYGSRPFF

SEQ ID NO: 99461 - protein, 282 aa, Arabidopsis thaliana
  peptide (1)..(282): Ceres Seq. ID no. 13602971
MSRVKNYLEDQLLGFTLVPMSELLFKNGKLEKEFSLSSTDLYHSPAGFVQLSLSYYGSYPDVMAIPSMPSSVSIDETTKDPEGSESVPGELDKIEFPDPNVANENEKMVSEYFGISCSTIDSETSDSLVTSDAENHVTNSVTSILKQDSPESSNATNGAASPHASAHSATETPNHEHLSVVNSKASSQESESEASGETSEEKTVKSVLTVKVEPESKVVQQDIVDMYMKSMQQFTDSLAKMKLPLDIDSPTKSENSSSDSQKLPTPKSNNGSRVFYGSRPFF

SEQ ID NO: 99462 - DNA, 1997 bp, Arabidopsis thaliana
  misc_feature (1)..(1997): Ceres Seq. ID no. 13602972
  misc_feature (1)..(1997): Ortholog of  Ceres SEQ ID NO 14313739 as cited in SEQ ID NO 54143
  misc_feature (1)..(1997): Ortholog of  Ceres SEQ ID NO 14308217 as cited in SEQ ID NO 58569
ggaggaacgaagattatcgagagcaaaaatcatgagtagtacgatgttcgtgaaacggaatccgattagagaaaccaccgccgggaaaatctcttcgccgtcgtcaccgactttgaatgttgcagtcgcgcatataagagctggatcttattacgaaatcgatgcttcgattcttcctcagagatcgccggaaaatcttaaatcgattagagtcgtcatggtgagcaaaatcacggcgagtgacgtgtctctccggtacccaagcatgttttcactccgatcgcatttcgattacagtaggatgaaccggaataaaccgatgaagaagaggagtggtggtggtcttcttcctgttttcgacgagagtcatgtgatggcttcggagctagctggagacttgctttacagaagaatcgcacctcatgaactttctatgaatagaaattcctggggtttctgggtttctagttcttctcgcaggaacaaatttccaagaagggaggtggtttctcaaccggcgtacaatactcgtctctgtcgcgctgcttcaccggagggaaagtgctcgtctgagctgaaatcgggagggatgatcaagtggggaaggagattgcgtgtgcagtatcagagtcggcatattgatactaggaagaataaggaaggtgaggagagttctagagtgaaggatgaagtttacaaagaagaagagatggagaaagaagaggatgatgatgatgggaatgaaataggaggcactaaacaagaggcaaaggagataactaatggaaatcgtaagagaaagctgattgaatcaagtactgagagactcgctcagaaagctaaggtttatgatcagaagaaggaaactcaaattgtggtttataagaggaaatcagagaggaagttcattgatagatggtctgttgagaggtacaaactagctgagaggaacatgttaaaagtgatgaaggagaagaatgcagtgtttggcaactccatactcaggccagagttgaggtcagaagcaaggaagctgattggtgacacaggtctattggatcatctgcttaagcacatggctggtaaggtggctcctggaggtcaagataggtttatgagaaagcacaatgcagatggggcaatggagtattggttggagagttctgatttgattcacataaggaaagaagcaggagttaaagatccttactggactcctccacctggttggaagcttggtgacaacccttctcaagatcctgtctgcgctggagaaatccgtgacatcagagaagaattagctagcctgaaaagagaattgaagaaacttgcgtcaaagaaggaagaggaggagcttgttatcatgactacgcctaattcttgtgttactagtcagaatgataatctgatgactccagcaaaggaaatctacgctgatctgctgaaaaagaaatacaaaattgaggaccagctagtgattattggagaaaccttgcgtaaaatggaggaagacatgggatggcttaagaaaacagtggacgagaactatcctaaaaagccagactcaacagagacacctttgctactagaggattcaccaccaatacagacactagaaggagaagtgaaggtggtgaacaagggtaaccaaatcacagagtcacctcaaaacagagaaaaaggaaggaagcatgatcaacaagaaagatcaccactttcactaataagcaacactggtttcagaatctgcaggcctgtggggatgttcgcatggccccaattgcctgctcttgctgctgctactgatactaatgcttcttcgccaagtcacagacaagcctacccatccccttttccagtcaagccacttgcagctaagcgtcctcttggcttgacgtttcccttcaccatcatacccgaagaagctcccaagaatctcttcaacgtttgaagttgtcactggaaactgatgcatcagatcttactttccctacaag

SEQ ID NO: 99463 - protein, 649 aa, Arabidopsis thaliana
  peptide (1)..(649): Ceres Seq. ID no. 13602973
EERRLSRAKIMSSTMFVKRNPIRETTAGKISSPSSPTLNVAVAHIRAGSYYEIDASILPQRSPENLKSIRVVMVSKITASDVSLRYPSMFSLRSHFDYSRMNRNKPMKKRSGGGLLPVFDESHVMASELAGDLLYRRIAPHELSMNRNSWGFWVSSSSRRNKFPRREVVSQPAYNTRLCRAASPEGKCSSELKSGGMIKWGRRLRVQYQSRHIDTRKNKEGEESSRVKDEVYKEEEMEKEEDDDDGNEIGGTKQEAKEITNGNRKRKLIESSTERLAQKAKVYDQKKETQIVVYKRKSERKFIDRWSVERYKLAERNMLKVMKEKNAVFGNSILRPELRSEARKLIGDTGLLDHLLKHMAGKVAPGGQDRFMRKHNADGAMEYWLESSDLIHIRKEAGVKDPYWTPPPGWKLGDNPSQDPVCAGEIRDIREELASLKRELKKLASKKEEEELVIMTTPNSCVTSQNDNLMTPAKEIYADLLKKKYKIEDQLVIIGETLRKMEEDMGWLKKTVDENYPKKPDSTETPLLLEDSPPIQTLEGEVKVVNKGNQITESPQNREKGRKHDQQERSPLSLISNTGFRICRPVGMFAWPQLPALAAATDTNASSPSHRQAYPSPFPVKPLAAKRPLGLTFPFTIIPEEAPKNLFNV

SEQ ID NO: 99464 - protein, 639 aa, Arabidopsis thaliana
  peptide (1)..(639): Ceres Seq. ID no. 13602974
MSSTMFVKRNPIRETTAGKISSPSSPTLNVAVAHIRAGSYYEIDASILPQRSPENLKSIRVVMVSKITASDVSLRYPSMFSLRSHFDYSRMNRNKPMKKRSGGGLLPVFDESHVMASELAGDLLYRRIAPHELSMNRNSWGFWVSSSSRRNKFPRREVVSQPAYNTRLCRAASPEGKCSSELKSGGMIKWGRRLRVQYQSRHIDTRKNKEGEESSRVKDEVYKEEEMEKEEDDDDGNEIGGTKQEAKEITNGNRKRKLIESSTERLAQKAKVYDQKKETQIVVYKRKSERKFIDRWSVERYKLAERNMLKVMKEKNAVFGNSILRPELRSEARKLIGDTGLLDHLLKHMAGKVAPGGQDRFMRKHNADGAMEYWLESSDLIHIRKEAGVKDPYWTPPPGWKLGDNPSQDPVCAGEIRDIREELASLKRELKKLASKKEEEELVIMTTPNSCVTSQNDNLMTPAKEIYADLLKKKYKIEDQLVIIGETLRKMEEDMGWLKKTVDENYPKKPDSTETPLLLEDSPPIQTLEGEVKVVNKGNQITESPQNREKGRKHDQQERSPLSLISNTGFRICRPVGMFAWPQLPALAAATDTNASSPSHRQAYPSPFPVKPLAAKRPLGLTFPFTIIPEEAPKNLFNV

SEQ ID NO: 99465 - protein, 635 aa, Arabidopsis thaliana
  peptide (1)..(635): Ceres Seq. ID no. 13602975
MFVKRNPIRETTAGKISSPSSPTLNVAVAHIRAGSYYEIDASILPQRSPENLKSIRVVMVSKITASDVSLRYPSMFSLRSHFDYSRMNRNKPMKKRSGGGLLPVFDESHVMASELAGDLLYRRIAPHELSMNRNSWGFWVSSSSRRNKFPRREVVSQPAYNTRLCRAASPEGKCSSELKSGGMIKWGRRLRVQYQSRHIDTRKNKEGEESSRVKDEVYKEEEMEKEEDDDDGNEIGGTKQEAKEITNGNRKRKLIESSTERLAQKAKVYDQKKETQIVVYKRKSERKFIDRWSVERYKLAERNMLKVMKEKNAVFGNSILRPELRSEARKLIGDTGLLDHLLKHMAGKVAPGGQDRFMRKHNADGAMEYWLESSDLIHIRKEAGVKDPYWTPPPGWKLGDNPSQDPVCAGEIRDIREELASLKRELKKLASKKEEEELVIMTTPNSCVTSQNDNLMTPAKEIYADLLKKKYKIEDQLVIIGETLRKMEEDMGWLKKTVDENYPKKPDSTETPLLLEDSPPIQTLEGEVKVVNKGNQITESPQNREKGRKHDQQERSPLSLISNTGFRICRPVGMFAWPQLPALAAATDTNASSPSHRQAYPSPFPVKPLAAKRPLGLTFPFTIIPEEAPKNLFNV

SEQ ID NO: 99466 - DNA, 868 bp, Arabidopsis thaliana
  misc_feature (1)..(868): Ceres Seq. ID no. 13602979
  misc_feature (1)..(868): Ortholog of  Ceres SEQ ID NO 12626248 as cited in SEQ ID NO 65768
aatcacttgctaattctaagcttcttctctttccaaaaatggcgtcatcatcggctttagctctcaggagacttctctcttcttccaccgtcgccgtccctcgcgccttaagagccgttcgtccggtggctgcttcatctcgcctcttcaataccaacgccgccagaaactatgaagacggtgtcgataggaaccatcactcaaaccgacatgtttctcgccacggcggcgatttcttctcacatatactcgatccgtttactccaacgagaagcttgagccagatgctgaatttcatggaccaggtaagcgaaatccctttggtatcagctactcgtggaatgggagcttctggagttagacgtggttggaacgtgaaagagaaagacgacgcgttgcatctaaggatagatatgccgggactaagcagagaggatgtgaaattggctttggaacagaacacattggtgattagaggagaaggggaaacagaggagggagaagatgtttctggagatggacggaggtttacgagtaggattgagttaccggagaaagtatacaagactgatgagattaaggcggaaatgaagaatggtgtgttgaaagtggtgattccaaagattaaagaggatgagcgtaacaatattcgtcacataaacgttgactagagtgttttattttggattgtttgagatggaatggaagtaagtgagtgaatttgtgaactttaaggtgtcctttggtgaatcaaggagaatgacatttcccacggtcctatgtgttcgggattttgacttttttcgttacatcaatgatctatgtacgtttgactactttcatatcataggttcggattttgtttccc

SEQ ID NO: 99467 - protein, 222 aa, Arabidopsis thaliana
  peptide (1)..(222): Ceres Seq. ID no. 13602980
SLANSKLLLFPKMASSSALALRRLLSSSTVAVPRALRAVRPVAASSRLFNTNAARNYEDGVDRNHHSNRHVSRHGGDFFSHILDPFTPTRSLSQMLNFMDQVSEIPLVSATRGMGASGVRRGWNVKEKDDALHLRIDMPGLSREDVKLALEQNTLVIRGEGETEEGEDVSGDGRRFTSRIELPEKVYKTDEIKAEMKNGVLKVVIPKIKEDERNNIRHINVD

SEQ ID NO: 99468 - protein, 210 aa, Arabidopsis thaliana; identical to SEQ ID NO: 37214
  peptide (1)..(210): Ceres Seq. ID no. 13602981

SEQ ID NO: 99469 - protein, 128 aa, Arabidopsis thaliana; identical to SEQ ID NO: 37215
  peptide (1)..(128): Ceres Seq. ID no. 13602982

SEQ ID NO: 99470 - DNA, 2140 bp, Arabidopsis thaliana
  misc_feature (1)..(2140): Ceres Seq. ID no. 13602999
  misc_feature (1)..(2140): Ortholog of  Ceres SEQ ID NO 14307728 as cited in SEQ ID NO 54710
tcaatatctcttccccagatcctcctctctcttcttcactcttttaacggacacttttcactgatctattcactcactcaaatcgccgccggagctaaatcaatcaacaatgacgtcgacctacacgagattcgataccgtatttctcttttctaggttcgccggcgctaagtattcgccgttattgccgtctccgtcgtttactttatctacttccggcattcatatcagaaccaaaccgaattctcgttttcactcgattatagcatcctcctcatcttcatctgtagtcgccggaactgatagcattgagattaaatcgttgccgacgaagcctattgaaggacaaaagactggaactagcggactccggaagaaggtgaaagttttcatggaagataattatttagccaactggattcaggcattgtttaattcattgccacttgaggattataagaatgcaacgttggttttaggaggtgatggtcgttactttaacaaagaagcttcacagatcattatcaaaattgctgctgggaatggagttggacaaattttagttggaaaggaaggcattttgtcaaccccagcggtttccgctgtaatcaggaaaagaaaggcaaatggaggattcattatgagtgcaagccataatcctggtggacctgaatatgactggggtatcaagttcaattacagcagtggtcagcctgctcctgaaaccattactgacaaaatatatggaaatacactttcaatctctgagattaaggtggcagagattcctgatattgatctttctcaagttggagtgaccaaatatgggaatttcagtgtagaagttatagatcctgtttccgactatttggagctcatggaggatgttttcgactttgatctcatcagaggtcttctttcaagatcagattttgggttcatgtttgatgccatgcatgctgttactggtgcttatgcgaaaccaatttttgtcgacaatcttggagccaaaccggattcaatttccaacggagttcccctggaagattttgggcatggccatcctgatcctaatttgacatatgcaaaggatttggttgatgtcatgtatcgtgacaatggaccggatttcggagcagcaagtgatggtgatggtgacagaaatatggttttaggaaacaaattctttgtcactccttcagactctgtagctatcatcgcagccaatgcacaagaagcaattccatatttccgtgctggtcctaaggggctggcacgttctatgccgacaagtggtgctcttgatcgtgttgccgagaagttgaagcttcctttcttcgaggttcccactggatggaaattttttggaaatcttatggatgctggaaaattgtcaatctgtggagaagagagctttggcacaggttctgatcacatccgtgagaaggatggaatatgggctgtgttggcgtggctttcgatccttgctcatcgcaacaaggacacgaaaccaggggacaagttggtgtctgttgcagatgttgtgaaagagtattgggcgacatacggaaggaactttttttcaagatacgactatgaagaatgtgaatctgaaggagccaataaaatgatcgagtatcttagagaaatcttgtctaagagcaaggccggtgacgtttatggaaactatgtcctccagtttgcagatgacttctcatacacagaccctgttgatggaagtgttgcatccaagcaaggtgttcggtttgtgttcacggatggatccagaatcatatttcgtttatccggaactggctcagctggagctacagtgcgaatatacattgaacaatttgagccagacgtttcaaaacatgatgtggatgcacaaatagctcttaaacctttaatcgatcttgcattgtctgtatcaaagctgaaggacttcacagggagggagaagcccactgtcattacatgaagagaagtgtcacatggtcctttcgataaggcaatttgggttcctgacttcagttttgtctgccatgtttatttgaaaattccagagcaatgaaatgcttatccttgtaacatatataacttatatacgtctttctatataaataaaagcatttctttt

SEQ ID NO: 99471 - protein, 623 aa, Arabidopsis thaliana
  peptide (1)..(623): Ceres Seq. ID no. 13603000
MTSTYTRFDTVFLFSRFAGAKYSPLLPSPSFTLSTSGIHIRTKPNSRFHSIIASSSSSSVVAGTDSIEIKSLPTKPIEGQKTGTSGLRKKVKVFMEDNYLANWIQALFNSLPLEDYKNATLVLGGDGRYFNKEASQIIIKIAAGNGVGQILVGKEGILSTPAVSAVIRKRKANGGFIMSASHNPGGPEYDWGIKFNYSSGQPAPETITDKIYGNTLSISEIKVAEIPDIDLSQVGVTKYGNFSVEVIDPVSDYLELMEDVFDFDLIRGLLSRSDFGFMFDAMHAVTGAYAKPIFVDNLGAKPDSISNGVPLEDFGHGHPDPNLTYAKDLVDVMYRDNGPDFGAASDGDGDRNMVLGNKFFVTPSDSVAIIAANAQEAIPYFRAGPKGLARSMPTSGALDRVAEKLKLPFFEVPTGWKFFGNLMDAGKLSICGEESFGTGSDHIREKDGIWAVLAWLSILAHRNKDTKPGDKLVSVADVVKEYWATYGRNFFSRYDYEECESEGANKMIEYLREILSKSKAGDVYGNYVLQFADDFSYTDPVDGSVASKQGVRFVFTDGSRIIFRLSGTGSAGATVRIYIEQFEPDVSKHDVDAQIALKPLIDLALSVSKLKDFTGREKPTVIT

SEQ ID NO: 99472 - protein, 529 aa, Arabidopsis thaliana
  peptide (1)..(529): Ceres Seq. ID no. 13603001
MEDNYLANWIQALFNSLPLEDYKNATLVLGGDGRYFNKEASQIIIKIAAGNGVGQILVGKEGILSTPAVSAVIRKRKANGGFIMSASHNPGGPEYDWGIKFNYSSGQPAPETITDKIYGNTLSISEIKVAEIPDIDLSQVGVTKYGNFSVEVIDPVSDYLELMEDVFDFDLIRGLLSRSDFGFMFDAMHAVTGAYAKPIFVDNLGAKPDSISNGVPLEDFGHGHPDPNLTYAKDLVDVMYRDNGPDFGAASDGDGDRNMVLGNKFFVTPSDSVAIIAANAQEAIPYFRAGPKGLARSMPTSGALDRVAEKLKLPFFEVPTGWKFFGNLMDAGKLSICGEESFGTGSDHIREKDGIWAVLAWLSILAHRNKDTKPGDKLVSVADVVKEYWATYGRNFFSRYDYEECESEGANKMIEYLREILSKSKAGDVYGNYVLQFADDFSYTDPVDGSVASKQGVRFVFTDGSRIIFRLSGTGSAGATVRIYIEQFEPDVSKHDVDAQIALKPLIDLALSVSKLKDFTGREKPTVIT

SEQ ID NO: 99473 - protein, 446 aa, Arabidopsis thaliana
  peptide (1)..(446): Ceres Seq. ID no. 13603002
MSASHNPGGPEYDWGIKFNYSSGQPAPETITDKIYGNTLSISEIKVAEIPDIDLSQVGVTKYGNFSVEVIDPVSDYLELMEDVFDFDLIRGLLSRSDFGFMFDAMHAVTGAYAKPIFVDNLGAKPDSISNGVPLEDFGHGHPDPNLTYAKDLVDVMYRDNGPDFGAASDGDGDRNMVLGNKFFVTPSDSVAIIAANAQEAIPYFRAGPKGLARSMPTSGALDRVAEKLKLPFFEVPTGWKFFGNLMDAGKLSICGEESFGTGSDHIREKDGIWAVLAWLSILAHRNKDTKPGDKLVSVADVVKEYWATYGRNFFSRYDYEECESEGANKMIEYLREILSKSKAGDVYGNYVLQFADDFSYTDPVDGSVASKQGVRFVFTDGSRIIFRLSGTGSAGATVRIYIEQFEPDVSKHDVDAQIALKPLIDLALSVSKLKDFTGREKPTVIT

SEQ ID NO: 99474 - DNA, 973 bp, Arabidopsis thaliana
  misc_feature (1)..(973): Ceres Seq. ID no. 13603003
  misc_feature (1)..(973): Ortholog of  Ceres SEQ ID NO 13581804 as cited in SEQ ID NO 51424
  misc_feature (1)..(973): Ortholog of  Ceres SEQ ID NO 13663874 as cited in SEQ ID NO 67003
aatttccatcaaattatttttcttttccttcttatgtaaattattccttatctatccaaattcgtcttcttgagtgaatttttaaagcgaatctcgacaaaactagctctcaaaaggggttttgggagttaccttttgtttctcagattttcccacattttcttggaagtaactgaaatggtgagaggaaagatcgaaatcaagaagattgagaacgtgacaagtagacaagtcacgttttcgaagcgaaggagtggtctctttaagaaggctcatgagctttctgttctatgtgatgctcaagtggcagctatgatcttctctcagaaaggaagattatatgaattcgctagctccgatatcaggaacacgataaagcgatacgctgagtacaagagagagtattttgttgcagaaactcatcctatagagcaatacgtgcaggggctaaagaaggaaatggtgacaatggtgaaaaagattgaagtgcttgaagtccataaccggaagatgatgggacaaagtttggattcttgttcggtaaaagaactttcagagatagccacacagatagagaaaagccttcatatggttagattaagaaaggctaagttatatgaagatgagctacagaaactaaaagccaaggagagggaactcaaggacgagagagtcaggctttctctaaaggttggagaaagaccaatggggatgccgtcgggaagcaaagagaaagaggatgttgaaactgatctatttattggatttctgaagaaccgaccataaaatcgtccttggtcattaaacgtcatttctagctatctatctcaattaatgttatgtatatgagtaatagtgtttcaaaatttcaatcacttgtcttttcgtataaactcagaataatgtaatgtgtaagagttctaactatgcttttgtttgtggatgtaatgtaatgtaaactcttaagtttctg

SEQ ID NO: 99475 - protein, 202 aa, Arabidopsis thaliana
  peptide (1)..(202): Ceres Seq. ID no. 13603004
MVRGKIEIKKIENVTSRQVTFSKRRSGLFKKAHELSVLCDAQVAAMIFSQKGRLYEFASSDIRNTIKRYAEYKREYFVAETHPIEQYVQGLKKEMVTMVKKIEVLEVHNRKMMGQSLDSCSVKELSEIATQIEKSLHMVRLRKAKLYEDELQKLKAKERELKDERVRLSLKVGERPMGMPSGSKEKEDVETDLFIGFLKNRP

SEQ ID NO: 99476 - protein, 157 aa, Arabidopsis thaliana
  peptide (1)..(157): Ceres Seq. ID no. 13603005
MIFSQKGRLYEFASSDIRNTIKRYAEYKREYFVAETHPIEQYVQGLKKEMVTMVKKIEVLEVHNRKMMGQSLDSCSVKELSEIATQIEKSLHMVRLRKAKLYEDELQKLKAKERELKDERVRLSLKVGERPMGMPSGSKEKEDVETDLFIGFLKNRP

SEQ ID NO: 99477 - protein, 108 aa, Arabidopsis thaliana
  peptide (1)..(108): Ceres Seq. ID no. 13603006
MVTMVKKIEVLEVHNRKMMGQSLDSCSVKELSEIATQIEKSLHMVRLRKAKLYEDELQKLKAKERELKDERVRLSLKVGERPMGMPSGSKEKEDVETDLFIGFLKNRP

SEQ ID NO: 99478 - DNA, 1156 bp, Arabidopsis thaliana
  misc_feature (1)..(1156): Ceres Seq. ID no. 13603007
  misc_feature (1)..(1156): Ortholog of  Ceres SEQ ID NO 15168580 as cited in SEQ ID NO 60279
atttttcgtcaaaagaatcagtaaaaactaaacattttgactatatcctacttgaatcaattcttcggctgattttgaagttttgtgacattcagatattctagggttttgtggtaaatggaatcgaatcacgaaggcaacgcgatacaagtgattgaccaagtaacaaccatgacccatctgtctgacccgaatccgaaaaccaaaccgggtatgatgctcatgaaacaagaagacgggtatttgcagccggtgaagactaaaccggctccgaagagaccgacttctaaagaccgtcacacgaaagtagaaggacgaggtcggaggatccgaatgccggcgggttgcgctgctcgggtctttcaattgacccgtgaacttggtcacaaatccgacggagaaacgatacggtggttattggaacgagctgaaccggcgataattgaagcaaccggaaccggaactgtaccggctattgctgtatcggttaacggaactttaaaaatcccgacgagctctccagtgttgaatgacggcggccgtgacggtgacggtgacctaataaagaaacggaggaagagaaactgtacgagcgatttcgtagacgttaatgacagctgtcatagctccgttacttctgggttagctccgataacggcgtcaaactacggcgttaatatcctgaacgttaatacacaggggtttgtgccgttttggcctatgggtatgggtactgcgtttgttactggtgggccggatcaaatgggccaaatgtgggctattcctaccgttgctacagctccgtttctgaatgttggtgctagaccggtgtctagttatgtctcaaacgcttcagacgctgaggcggagatggaaacgagcggtggcggaacgacgcaaccgctgagggatttttcgttggagatttatgataagagagagcttcagtttttgggtggctcagggaactcatctccgtcttcatgtcatgagacttaaggaattttaactcttagttctagtttctttttagtttttagtaagtttgattcctgatttaggttaagtaagatttgtaaaagaattgggagcacaatttcaattttatgtttctgtcaaacattttggtaattaatggaactatcctatcattttt

SEQ ID NO: 99479 - protein, 293 aa, Arabidopsis thaliana
  peptide (1)..(293): Ceres Seq. ID no. 13603008
MESNHEGNAIQVIDQVTTMTHLSDPNPKTKPGMMLMKQEDGYLQPVKTKPAPKRPTSKDRHTKVEGRGRRIRMPAGCAARVFQLTRELGHKSDGETIRWLLERAEPAIIEATGTGTVPAIAVSVNGTLKIPTSSPVLNDGGRDGDGDLIKKRRKRNCTSDFVDVNDSCHSSVTSGLAPITASNYGVNILNVNTQGFVPFWPMGMGTAFVTGGPDQMGQMWAIPTVATAPFLNVGARPVSSYVSNASDAEAEMETSGGGTTQPLRDFSLEIYDKRELQFLGGSGNSSPSSCHET

SEQ ID NO: 99480 - protein, 275 aa, Arabidopsis thaliana
  peptide (1)..(275): Ceres Seq. ID no. 13603009
MTHLSDPNPKTKPGMMLMKQEDGYLQPVKTKPAPKRPTSKDRHTKVEGRGRRIRMPAGCAARVFQLTRELGHKSDGETIRWLLERAEPAIIEATGTGTVPAIAVSVNGTLKIPTSSPVLNDGGRDGDGDLIKKRRKRNCTSDFVDVNDSCHSSVTSGLAPITASNYGVNILNVNTQGFVPFWPMGMGTAFVTGGPDQMGQMWAIPTVATAPFLNVGARPVSSYVSNASDAEAEMETSGGGTTQPLRDFSLEIYDKRELQFLGGSGNSSPSSCHET

SEQ ID NO: 99481 - protein, 261 aa, Arabidopsis thaliana
  peptide (1)..(261): Ceres Seq. ID no. 13603010
MMLMKQEDGYLQPVKTKPAPKRPTSKDRHTKVEGRGRRIRMPAGCAARVFQLTRELGHKSDGETIRWLLERAEPAIIEATGTGTVPAIAVSVNGTLKIPTSSPVLNDGGRDGDGDLIKKRRKRNCTSDFVDVNDSCHSSVTSGLAPITASNYGVNILNVNTQGFVPFWPMGMGTAFVTGGPDQMGQMWAIPTVATAPFLNVGARPVSSYVSNASDAEAEMETSGGGTTQPLRDFSLEIYDKRELQFLGGSGNSSPSSCHET

SEQ ID NO: 99482 - DNA, 1305 bp, Arabidopsis thaliana
  misc_feature (1)..(1305): Ceres Seq. ID no. 13603034
  misc_feature (1)..(1305): Ortholog of  Ceres SEQ ID NO 15224874 as cited in SEQ ID NO 55015
atagtttcgtgtggacctaactaaaactagtcgtaactcattcatggaggctttgttctgctctgagatacccaacaacaacatcagatcttccattaacgatctatcttcttcttcttcatatacatggccaatgatcatgacctcctcttcttcttcttcttcatctcccacaatcatgaacatagagaacattcctagatgcgactgggatctctctctttccgccgttgtttcctccgcatccaccggatcagacgctatcggagcaatcgagttcgaccctaccggagagatcatagctacgggaggaatcgcaagaaagatcagatcgtatcgtttaagctctttgttagagtcacgtgacgatcacgtaacagcttcagagagctatatttgcacgccggcgaagcttagtagtctcaaatggagacccgatttttccggtcgggttatcgggtcaggagattacgacggagttgtcaccgagtacgacgtggagaaacaagtgcctgtttccgagagagacgagcatggaggtagaaggatttggagcgtggactacacgctttacaatggctctcttataggcgcgtcaggctccgacgacggaacggttcaaatgtgggatccacgtaacggagggacgttagaagaaacggttaggcccggtggtggagcggcgatttgttcggtagagttcgatccgttcggtggatcttccatagccgttggatgtgctgaccggaatgcctacgtgtatgacatcagaagactagtggaccctttgatcgtattagacggccataccaaaacggtgacgtatgctcgattcatggattctcacacgatcgttaccggttcgaccgacgggagcttgaagcaatgggatatagataatggacggcgcgtggttcgcacgtaccgagggcatgtgaatagccggaactttgttgggttgtcggtttggagacatggtggtttggtcgtgtccgggtcagagaataaccaagtgtttgtgtacgataagaggtgggaggaaccggtttgggtttgtggattgggtcatacgaaccggtttggatctgaccgacggtttgttagtagtgtgtgtttgagacaagtggatgaagattggtgcacacttgtggccggaggatccgatggggctttagaaattttctcgggcaaacaaagctaatcagtatttatattatttttttctgctcatgattaatacaaactgtttttcagttgattttatactgtctatagttattaattttaatatgattgaatgttact

SEQ ID NO: 99483 - protein, 385 aa, Arabidopsis thaliana
  peptide (1)..(385): Ceres Seq. ID no. 13603035
MEALFCSEIPNNNIRSSINDLSSSSSYTWPMIMTSSSSSSSSPTIMNIENIPRCDWDLSLSAVVSSASTGSDAIGAIEFDPTGEIIATGGIARKIRSYRLSSLLESRDDHVTASESYICTPAKLSSLKWRPDFSGRVIGSGDYDGVVTEYDVEKQVPVSERDEHGGRRIWSVDYTLYNGSLIGASGSDDGTVQMWDPRNGGTLEETVRPGGGAAICSVEFDPFGGSSIAVGCADRNAYVYDIRRLVDPLIVLDGHTKTVTYARFMDSHTIVTGSTDGSLKQWDIDNGRRVVRTYRGHVNSRNFVGLSVWRHGGLVVSGSENNQVFVYDKRWEEPVWVCGLGHTNRFGSDRRFVSSVCLRQVDEDWCTLVAGGSDGALEIFSGKQS

SEQ ID NO: 99484 - protein, 355 aa, Arabidopsis thaliana
  peptide (1)..(355): Ceres Seq. ID no. 13603036
MIMTSSSSSSSSPTIMNIENIPRCDWDLSLSAVVSSASTGSDAIGAIEFDPTGEIIATGGIARKIRSYRLSSLLESRDDHVTASESYICTPAKLSSLKWRPDFSGRVIGSGDYDGVVTEYDVEKQVPVSERDEHGGRRIWSVDYTLYNGSLIGASGSDDGTVQMWDPRNGGTLEETVRPGGGAAICSVEFDPFGGSSIAVGCADRNAYVYDIRRLVDPLIVLDGHTKTVTYARFMDSHTIVTGSTDGSLKQWDIDNGRRVVRTYRGHVNSRNFVGLSVWRHGGLVVSGSENNQVFVYDKRWEEPVWVCGLGHTNRFGSDRRFVSSVCLRQVDEDWCTLVAGGSDGALEIFSGKQS

SEQ ID NO: 99485 - protein, 353 aa, Arabidopsis thaliana
  peptide (1)..(353): Ceres Seq. ID no. 13603037
MTSSSSSSSSPTIMNIENIPRCDWDLSLSAVVSSASTGSDAIGAIEFDPTGEIIATGGIARKIRSYRLSSLLESRDDHVTASESYICTPAKLSSLKWRPDFSGRVIGSGDYDGVVTEYDVEKQVPVSERDEHGGRRIWSVDYTLYNGSLIGASGSDDGTVQMWDPRNGGTLEETVRPGGGAAICSVEFDPFGGSSIAVGCADRNAYVYDIRRLVDPLIVLDGHTKTVTYARFMDSHTIVTGSTDGSLKQWDIDNGRRVVRTYRGHVNSRNFVGLSVWRHGGLVVSGSENNQVFVYDKRWEEPVWVCGLGHTNRFGSDRRFVSSVCLRQVDEDWCTLVAGGSDGALEIFSGKQS

SEQ ID NO: 99486 - DNA, 5045 bp, Arabidopsis thaliana
  misc_feature (1)..(5045): Ceres Seq. ID no. 13603040
  misc_feature (1)..(5045): Ortholog of  Ceres SEQ ID NO 13635680 as cited in SEQ ID NO 578
atgccgccaagaagagcaagacgccccgcgaacgctcggataaaccgagtagcgaaggcaccagttgttgggcaagaccagccacctgtggtagctcaaccagctcaggcagctcaagcagatgaggcagctcaggcagctaatgcagctcatgcagcagagattgcagcgaatccacctggagttgctgcacctcagtaccatcagccaccgccgccgccaccagcacctagggttgaagttcgcgctgatgattggaggcagatgttggagaagaatttcaggacagcgaggtgcccagaggaatttaagaaggatcttgcagtgcattacctaaggggagaagcagatcattggtggaaaaattttaagaggggcttgcctgctggatatgtgcctacgtgggaggatttcttaagggagttcaataataagtactttccgcgggaagctatggaacagtttgatcatgagttcatggagcttcgtcagggcacgaggaccgttcgtgagtatgatgaggagttcagtcgtctaaggaggttcactatgaagaattttggagagcaggatatgattcaaagattcatgaggggactcagggttgatattcgtactcgtacctccattcgagggtgcactagcctcgttgagttagttgaggaggctgctaggttagagataggacttgtggaggaagttatggatctcaagaaggctcaagcaaaggtaacaaaaggagctgaatctcagaagcgcacttgggataatcgtggtgcagtatcagtccaaaatggtcagcattgcgccacatgtggaaaagacaataattgcaggaggtgttggaagccaggtcattttgcaagggattgtagagtgaatttggcagggggacaaccaggaaatcagaacagaggaattatgccaccaccgccaaagcggcaagcagtgggacctcgagtgtatgccatagcaggcgaggaggatgttgatgaggatggcgccgacccgattgttggaccaggattggtgaagtcgtcacggacctatcgggatgtccctgtagagattgaaggtgtggagttgtttgggaatttcctagagatggagttgaagcgttatgagataatcctcgggatgggttggttgaagagacataatgctaatttggattgcccaaggttgcgggttaattttactcgagaagagggtaatttgatgtttcagggagtcgaaactcgtagcgggccgatcttttcgatgattcaagcagataatttacagtggactggacctgaagcttacttggcaacaatctctattgacggaggagatacaggaatggaattaaaggatattcttgtagcagcagagtactcagatatttttgaaccgctccaaggaccgccaccagatagaggagatgctttcatcattgagttagagccagggactgctccagtatccaagacaccttaccgattagctccaacagaaatggctgaactgaagaagcagttagaggagcttacagacaaaggatttgtgaggccaagtagttcgctgtggggagcgcctgttctttttgtgaagaagaaagatggaactttcaggctttgtattgattaccgtggcttgaataaggtgactatcaagaacaaatatcctttaccgagaattgatgaattgttggaccaacttcagggagcatcttggttttcgaagatagatttggcatcaggttaccatcatattgctatctctgaggcagatgtgagtaaaacagctttcaggacacgttatgggcattatgagtttgttgtcatgccgtttggattgacgaatgcccctgcagcttttatgaagctaatgaataacatattccgggagtttttggacaagtttgttattgtgtttatcgatgacatcttgatatactctaggagtaaggaggagcatgttgagcatctaaggattgtgttacaacggttgcgagaccaccagctttttgcaaaattatcaaagtgcagtttttggcagaaaaagattggatttttgggtcatgtcatttcagaggaaggtgtagctgtggatccagagaagatcacgactatcactcattggcctagacccaagaacgctacagagattcgtagttttcttggacttgctggttattatcggaaatttgtggaaggatttgccagcattgccaaaccactaacacagttgacatgtaaggatgccaagtttgagtggacagaagcatgtgaagaaagttttggaaagttaaaggagcatttaactcagacacctatactagtattaccgaaggctggggtaccttatgcggtttatacggatgcatcgggaactgggttaggatgtgtatttgcatatgcatcatggcagttgagaaaacacgagattaattaccctactcatgaattggagttagctgcagtggtttttgctcttaaggtttggagagcctacttgtatggggagaaggtacaagtatttactgatcataagagtctgaagtatatcttcacccaagcagatttgaatctgagacagaggagatggacggagtttcttgcagactatgatttggatattgcttaccatccaggaaaagcaaatctggtggcagatgcactaagtagaaggagacatgatgtgcatgcaaccaaagaggttgaagagcttgtttcagctttgacaagtctcaatatctgtgaagctttagtggatgatgaagtagttggcttgaaagcgaaagaagatgtggtattaaagaaatcagtggagagtgaagttgaaggttatcacattaccaagaatgggacatttgtttttaaaggccgagtatgcgtcccagatgataaagatttgaaggaagagatcttgagacaggcgcatcagtcacgttttgctattcatccagggtctaccaaaatgtacagagacttgaagaggtactatcattgggttaagatgaaacgagaggttgctgactgggtagcaaagtgcacgacttgtcagttggtgaaagcagaacacaagtctccaagtggacttttacaaggtctaccattgccagaatggaaatgggatatggtgactatggattttgttactggacttccgagaacagcaagtaagcaggatgcaatttgggtaattgtagatcgacttactaagtcagctcattttctagcagtcaataaaaaagacacagctgaccgcttagctcaaaagtatatggatgagatagtgagacgtcatggagttccggtaagcattgtttctgatagagattcgaagttcacatcgttgttttggaaagcatttcagaaagctttgggaaccaaggtgcacttgagtaaagcatatcaccctcagacagatggtcaatttgagcggacgattcagactttggaggacatgcttagagcttgtatgctggattggggaggacgttgggaaaaatatctacctttggtagaatttgcttataacaacagttatcattcaagcataggcatgccgccatttgaggctctttatggaagaccttgtcgcacaccactttgttggacagaagtgggggagcgccaagacattaagcctgaaataattcaagagtcaactgagcaagtagagctgcttaaaaacaggctaagagaagctcatgaccgccaaaagagttatgcagataaaagaaggaaagggcttgagtttaaagttggtgacttggtgtatcttaaaatgagattgttcaaaggactgaatcgttgggctaagagaggaaaacttaagtcgagatacatgggtccttaccctatcatagagagagttggagctgtagcttaccgtttggacctaccagcagatttggcagcatttcatgatgtatttcacatatcggtgcttagaaaagttgtcacagaaccaaagcttatcatttcacggccaccagaggatcttgagttagacttatcggtaaaaggaaaaccggtatcaattgtgagtcatagagaaaatggttcacgggggaagaaagttaagtcgattcaagtttgctgggaaagggatggaattcaagagttgtcatgggaatcagaaagaatgatgcgggaagactacccagaactttttaaggacgaagaggaggatcatggtgatggatcgaattcgaggacgaattccattgtagtgggggagaattgtaacacccctattttacaattagaccatgaggcccaagtccaacccgctaatgatttgaacccaagtgaaaacctaatgatcccacgtgattataaaaggagaacgcaaactccaaatcaagtcataaaaaccctaagccggcaacctcgcaccactcagaccaccggagatcgttgttgtgttgagccggagtcaccgcgtgaatcatcctaaccggagagatttgtgccactccgccgttccaaccgccaagcaaaccgtaagggagactcgtcgagaaaagccaccgacaaaggtgaggaagagaatgttgagtagctgctcgcttggtgttatttcgggactttgggttttatttgatttatcgatatttcttatatttctaaacacggtttctttatacatttttatccaacgattttaatttatttatgctattattttgagacaatttatttctgatttttaataaaagaaagtttcccgaaattatgatattttatttcaagatctgatttgaagaagttgattaaatgaatggaaaagatgaaagtacgtcgtctcaaggttgagagagacgggtattataatactatctttcaagattcttttgaaatcgttgccttgcgatttcttatagtttctcattatgatttgtattgtctatctatctcttttttaaccatcgtttggtggtcttttgggtattcgtttaattacccttatgttggtttttttccatttttttggatgtaatccctcctctgatagagtttgaggcgtaactctaatgaagttatcagttggtc

SEQ ID NO: 99487 - protein, 1482 aa, Arabidopsis thaliana
  peptide (1)..(1482): Ceres Seq. ID no. 13603041
MPPRRARRPANARINRVAKAPVVGQDQPPVVAQPAQAAQADEAAQAANAAHAAEIAANPPGVAAPQYHQPPPPPPAPRVEVRADDWRQMLEKNFRTARCPEEFKKDLAVHYLRGEADHWWKNFKRGLPAGYVPTWEDFLREFNNKYFPREAMEQFDHEFMELRQGTRTVREYDEEFSRLRRFTMKNFGEQDMIQRFMRGLRVDIRTRTSIRGCTSLVELVEEAARLEIGLVEEVMDLKKAQAKVTKGAESQKRTWDNRGAVSVQNGQHCATCGKDNNCRRCWKPGHFARDCRVNLAGGQPGNQNRGIMPPPPKRQAVGPRVYAIAGEEDVDEDGADPIVGPGLVKSSRTYRDVPVEIEGVELFGNFLEMELKRYEIILGMGWLKRHNANLDCPRLRVNFTREEGNLMFQGVETRSGPIFSMIQADNLQWTGPEAYLATISIDGGDTGMELKDILVAAEYSDIFEPLQGPPPDRGDAFIIELEPGTAPVSKTPYRLAPTEMAELKKQLEELTDKGFVRPSSSLWGAPVLFVKKKDGTFRLCIDYRGLNKVTIKNKYPLPRIDELLDQLQGASWFSKIDLASGYHHIAISEADVSKTAFRTRYGHYEFVVMPFGLTNAPAAFMKLMNNIFREFLDKFVIVFIDDILIYSRSKEEHVEHLRIVLQRLRDHQLFAKLSKCSFWQKKIGFLGHVISEEGVAVDPEKITTITHWPRPKNATEIRSFLGLAGYYRKFVEGFASIAKPLTQLTCKDAKFEWTEACEESFGKLKEHLTQTPILVLPKAGVPYAVYTDASGTGLGCVFAYASWQLRKHEINYPTHELELAAVVFALKVWRAYLYGEKVQVFTDHKSLKYIFTQADLNLRQRRWTEFLADYDLDIAYHPGKANLVADALSRRRHDVHATKEVEELVSALTSLNICEALVDDEVVGLKAKEDVVLKKSVESEVEGYHITKNGTFVFKGRVCVPDDKDLKEEILRQAHQSRFAIHPGSTKMYRDLKRYYHWVKMKREVADWVAKCTTCQLVKAEHKSPSGLLQGLPLPEWKWDMVTMDFVTGLPRTASKQDAIWVIVDRLTKSAHFLAVNKKDTADRLAQKYMDEIVRRHGVPVSIVSDRDSKFTSLFWKAFQKALGTKVHLSKAYHPQTDGQFERTIQTLEDMLRACMLDWGGRWEKYLPLVEFAYNNSYHSSIGMPPFEALYGRPCRTPLCWTEVGERQDIKPEIIQESTEQVELLKNRLREAHDRQKSYADKRRKGLEFKVGDLVYLKMRLFKGLNRWAKRGKLKSRYMGPYPIIERVGAVAYRLDLPADLAAFHDVFHISVLRKVVTEPKLIISRPPEDLELDLSVKGKPVSIVSHRENGSRGKKVKSIQVCWERDGIQELSWESERMMREDYPELFKDEEEDHGDGSNSRTNSIVVGENCNTPILQLDHEAQVQPANDLNPSENLMIPRDYKRRTQTPNQVIKTLSRQPRTTQTTGDRCCVEPESPRESS

SEQ ID NO: 99488 - protein, 1394 aa, Arabidopsis thaliana
  peptide (1)..(1394): Ceres Seq. ID no. 13603042
MLEKNFRTARCPEEFKKDLAVHYLRGEADHWWKNFKRGLPAGYVPTWEDFLREFNNKYFPREAMEQFDHEFMELRQGTRTVREYDEEFSRLRRFTMKNFGEQDMIQRFMRGLRVDIRTRTSIRGCTSLVELVEEAARLEIGLVEEVMDLKKAQAKVTKGAESQKRTWDNRGAVSVQNGQHCATCGKDNNCRRCWKPGHFARDCRVNLAGGQPGNQNRGIMPPPPKRQAVGPRVYAIAGEEDVDEDGADPIVGPGLVKSSRTYRDVPVEIEGVELFGNFLEMELKRYEIILGMGWLKRHNANLDCPRLRVNFTREEGNLMFQGVETRSGPIFSMIQADNLQWTGPEAYLATISIDGGDTGMELKDILVAAEYSDIFEPLQGPPPDRGDAFIIELEPGTAPVSKTPYRLAPTEMAELKKQLEELTDKGFVRPSSSLWGAPVLFVKKKDGTFRLCIDYRGLNKVTIKNKYPLPRIDELLDQLQGASWFSKIDLASGYHHIAISEADVSKTAFRTRYGHYEFVVMPFGLTNAPAAFMKLMNNIFREFLDKFVIVFIDDILIYSRSKEEHVEHLRIVLQRLRDHQLFAKLSKCSFWQKKIGFLGHVISEEGVAVDPEKITTITHWPRPKNATEIRSFLGLAGYYRKFVEGFASIAKPLTQLTCKDAKFEWTEACEESFGKLKEHLTQTPILVLPKAGVPYAVYTDASGTGLGCVFAYASWQLRKHEINYPTHELELAAVVFALKVWRAYLYGEKVQVFTDHKSLKYIFTQADLNLRQRRWTEFLADYDLDIAYHPGKANLVADALSRRRHDVHATKEVEELVSALTSLNICEALVDDEVVGLKAKEDVVLKKSVESEVEGYHITKNGTFVFKGRVCVPDDKDLKEEILRQAHQSRFAIHPGSTKMYRDLKRYYHWVKMKREVADWVAKCTTCQLVKAEHKSPSGLLQGLPLPEWKWDMVTMDFVTGLPRTASKQDAIWVIVDRLTKSAHFLAVNKKDTADRLAQKYMDEIVRRHGVPVSIVSDRDSKFTSLFWKAFQKALGTKVHLSKAYHPQTDGQFERTIQTLEDMLRACMLDWGGRWEKYLPLVEFAYNNSYHSSIGMPPFEALYGRPCRTPLCWTEVGERQDIKPEIIQESTEQVELLKNRLREAHDRQKSYADKRRKGLEFKVGDLVYLKMRLFKGLNRWAKRGKLKSRYMGPYPIIERVGAVAYRLDLPADLAAFHDVFHISVLRKVVTEPKLIISRPPEDLELDLSVKGKPVSIVSHRENGSRGKKVKSIQVCWERDGIQELSWESERMMREDYPELFKDEEEDHGDGSNSRTNSIVVGENCNTPILQLDHEAQVQPANDLNPSENLMIPRDYKRRTQTPNQVIKTLSRQPRTTQTTGDRCCVEPESPRESS

SEQ ID NO: 99489 - protein, 1331 aa, Arabidopsis thaliana
  peptide (1)..(1331): Ceres Seq. ID no. 13603043
MEQFDHEFMELRQGTRTVREYDEEFSRLRRFTMKNFGEQDMIQRFMRGLRVDIRTRTSIRGCTSLVELVEEAARLEIGLVEEVMDLKKAQAKVTKGAESQKRTWDNRGAVSVQNGQHCATCGKDNNCRRCWKPGHFARDCRVNLAGGQPGNQNRGIMPPPPKRQAVGPRVYAIAGEEDVDEDGADPIVGPGLVKSSRTYRDVPVEIEGVELFGNFLEMELKRYEIILGMGWLKRHNANLDCPRLRVNFTREEGNLMFQGVETRSGPIFSMIQADNLQWTGPEAYLATISIDGGDTGMELKDILVAAEYSDIFEPLQGPPPDRGDAFIIELEPGTAPVSKTPYRLAPTEMAELKKQLEELTDKGFVRPSSSLWGAPVLFVKKKDGTFRLCIDYRGLNKVTIKNKYPLPRIDELLDQLQGASWFSKIDLASGYHHIAISEADVSKTAFRTRYGHYEFVVMPFGLTNAPAAFMKLMNNIFREFLDKFVIVFIDDILIYSRSKEEHVEHLRIVLQRLRDHQLFAKLSKCSFWQKKIGFLGHVISEEGVAVDPEKITTITHWPRPKNATEIRSFLGLAGYYRKFVEGFASIAKPLTQLTCKDAKFEWTEACEESFGKLKEHLTQTPILVLPKAGVPYAVYTDASGTGLGCVFAYASWQLRKHEINYPTHELELAAVVFALKVWRAYLYGEKVQVFTDHKSLKYIFTQADLNLRQRRWTEFLADYDLDIAYHPGKANLVADALSRRRHDVHATKEVEELVSALTSLNICEALVDDEVVGLKAKEDVVLKKSVESEVEGYHITKNGTFVFKGRVCVPDDKDLKEEILRQAHQSRFAIHPGSTKMYRDLKRYYHWVKMKREVADWVAKCTTCQLVKAEHKSPSGLLQGLPLPEWKWDMVTMDFVTGLPRTASKQDAIWVIVDRLTKSAHFLAVNKKDTADRLAQKYMDEIVRRHGVPVSIVSDRDSKFTSLFWKAFQKALGTKVHLSKAYHPQTDGQFERTIQTLEDMLRACMLDWGGRWEKYLPLVEFAYNNSYHSSIGMPPFEALYGRPCRTPLCWTEVGERQDIKPEIIQESTEQVELLKNRLREAHDRQKSYADKRRKGLEFKVGDLVYLKMRLFKGLNRWAKRGKLKSRYMGPYPIIERVGAVAYRLDLPADLAAFHDVFHISVLRKVVTEPKLIISRPPEDLELDLSVKGKPVSIVSHRENGSRGKKVKSIQVCWERDGIQELSWESERMMREDYPELFKDEEEDHGDGSNSRTNSIVVGENCNTPILQLDHEAQVQPANDLNPSENLMIPRDYKRRTQTPNQVIKTLSRQPRTTQTTGDRCCVEPESPRESS

SEQ ID NO: 99490 - DNA, 1003 bp, Arabidopsis thaliana
  misc_feature (1)..(1003): Ceres Seq. ID no. 13603052
  misc_feature (1)..(1003): Ortholog of  Ceres SEQ ID NO 12626061 as cited in SEQ ID NO 64594
  misc_feature (1)..(1003): Ortholog of  Ceres SEQ ID NO 15174020 as cited in SEQ ID NO 0
  misc_feature (1)..(1003): Ortholog of  Ceres SEQ ID NO 15179151 as cited in SEQ ID NO 0
ctcacacacacaccaacgcaaacctccaaaacagggccggggcgattcattcacaatctcggcgattctctcttccgtctcgagtcgctgagatccatcagtaaaaggtctgcaaaatggttgctcagggattcactgtggatcttaaaaagccccttgtatttcaggttggtcatcttggagaagattatgaggaatgggttcaccaacctatcgcgaccaaggaaggccctcggttttttcagagtgacttttgggagttcttgacacttacagtttggtgggcagttcctgtcatttggttgccagttgtagtctggtgcatatcaaggtcagtaagtatgggatgttcacttccagaaatcgtcccaattgttgtcatgggaatattcatctggacattttttgaatacgttcttcaccggttcgttttccacataaaaacgaagagttactggggaaacactgcacactatcttattcacggatgccatcataagcacccgatggaccaccttcggctcgtctttcctcctactgcaacagcgattttatgctttccgttctggaacattgcgaaggctatctcaactccttcaaccgcacctgcattgtttggtggaggcatgctcggatatgtgatgtacgatgtcactcattattaccttcaccatgcccaacctactagaccagtgaccaaaaatctcaagaagtaccatttgaatcatcacttcaggattcaggacaaaggatttggtataacttcgtcgttatgggacatagtctttgggacacttcccaccacaaaagcccccagaaaagagcaatagtagtaaaaggcaaaaactaaaaagatgtttgtaatacatttaatttaatcttaagttattaatcatccttctgaattttgagatgtttaatctgaggtttcatttggatcactgtcttttgtagtttgtaaatcaatacttcacaatcctaatataatatttttctgcgaaag

SEQ ID NO: 99491 - protein, 237 aa, Arabidopsis thaliana; identical to SEQ ID NO: 29663
  peptide (1)..(237): Ceres Seq. ID no. 13603053

SEQ ID NO: 99492 - protein, 162 aa, Arabidopsis thaliana; identical to SEQ ID NO: 29664
  peptide (1)..(162): Ceres Seq. ID no. 13603054

SEQ ID NO: 99493 - protein, 149 aa, Arabidopsis thaliana; identical to SEQ ID NO: 29665
  peptide (1)..(149): Ceres Seq. ID no. 13603055

SEQ ID NO: 99494 - DNA, 1970 bp, Arabidopsis thaliana
  misc_feature (1)..(1970): Ceres Seq. ID no. 13603059
  misc_feature (1)..(1970): Ortholog of  Ceres SEQ ID NO 12626078 as cited in SEQ ID NO 69113
aaaagaaaaaagtttcactctttggaggttggaacttaattccttgattaagaaaccccagaaaaaccctaaacccttgaagcgtctccttctctagttctttgcaagcggaaatgtatcgagtgctatcaaagttatcttcttcaattggctcgtctacttccaggaaactggtttctgggcggattataagtagcagaaactatgcggccaaggatatcagtttcgggatcggagctcgggcagctatgttgcagggtgtatccgaggttgcagaagctgtgaaagtcactatgggaccaaagggaagaaatgtgataattgagagcagttatggcggaccaaagatcacaaaggatggtgtcaccgtggcaaaaagcatatcatttcaagctaaagctaagaacattggtgccgaactcgtcaaacaggttgcaagtgccactaacaaggttgctggagatggtaccacttgtgccactgttttgactcaggcgatactcatcgaaggctgcaagtcggtggctgcaggtgtaaatgtgatggatttgcgtgttggaattaatatggcaattgctgcagttgtctctgatttgaaaagcagagctgttatgattagcaccccagaagagatcacacaggttgccactatatctgcaaatggggagcgtgaaataggggaactaattgcaagagccatggagaaagttggaaaggaaggggttatcactgttgctgatggtaacactttagataacgagctggaagtagtggaaggaatgaagctagccagaggttacatttctccttattttatcacggatgagaagacccagaaatgcgagcttgaaaatcccatcatcctcattcatgagaagaagatttcagacattaactctttgttgaaagttttagaagcggctgtgaaaagtagtagaccacttcttattgtagcagaagatgttgagagtgatgcattagctatgcttattctcaataagcatcatggtgggcttaaggtatgtgctatcaaggctccggggtttggtgacaacaggaaagcaagcttggatgatcttgcagttcttactggtgcagaggttatctctgaggagcgtgggctatctctagaaaaaattcgccctgaattgcttggaactgcgaagaaggttaccgttacccgtgatgacactattatcctacatggtggtggtgataaaaagctaattgaagaaagatgtgaagagttaagatcagccaatgaaaagagtacatccacttttgatcaagagaaaacgcaagaaagactctcaaagctatcaggtggtgttgcagtcttcaaggtgggaggggcaagtgaatctgaagttggagagagaaaagacagagtcactgatgctttaaacgccacaagagcagctgtagaagaaggcatcataccgggtggtggtgtggctctattatatgcgacaaaggctttagacaaccttcaaactgaaaacgaggatcaaagaagaggtgttcagattgttcagaatgctctcaaggctcctgcatttacaatagctgcaaatgccggttacgatggttctttagtggttggcaagttattagagcaagacgattgcaattttggtttcgatgcagccaaaggtaaatatgtggatatggtgaaagctggaatcatagacccagtcaaggtgatcagaaccgccttaaccgatgctgctagcgtttctttgcttttgacaacaacagaggcctcagtgcttgtgaaggcagacgagaacactccaaaccatgtccctgatatggccagcatgggcatgtgatcttgtgacctctacaaaaaaagaaacattcaaatttttatttttctctactaaagttagaaacttttctcgatttaaatttggttgtctggttctatatatattgttacagtgaatttttaatgaattttgttgaat

SEQ ID NO: 99495 - protein, 572 aa, Arabidopsis thaliana
  peptide (1)..(572): Ceres Seq. ID no. 13603060
MYRVLSKLSSSIGSSTSRKLVSGRIISSRNYAAKDISFGIGARAAMLQGVSEVAEAVKVTMGPKGRNVIIESSYGGPKITKDGVTVAKSISFQAKAKNIGAELVKQVASATNKVAGDGTTCATVLTQAILIEGCKSVAAGVNVMDLRVGINMAIAAVVSDLKSRAVMISTPEEITQVATISANGEREIGELIARAMEKVGKEGVITVADGNTLDNELEVVEGMKLARGYISPYFITDEKTQKCELENPIILIHEKKISDINSLLKVLEAAVKSSRPLLIVAEDVESDALAMLILNKHHGGLKVCAIKAPGFGDNRKASLDDLAVLTGAEVISEERGLSLEKIRPELLGTAKKVTVTRDDTIILHGGGDKKLIEERCEELRSANEKSTSTFDQEKTQERLSKLSGGVAVFKVGGASESEVGERKDRVTDALNATRAAVEEGIIPGGGVALLYATKALDNLQTENEDQRRGVQIVQNALKAPAFTIAANAGYDGSLVVGKLLEQDDCNFGFDAAKGKYVDMVKAGIIDPVKVIRTALTDAASVSLLLTTTEASVLVKADENTPNHVPDMASMGM

SEQ ID NO: 99496 - protein, 527 aa, Arabidopsis thaliana
  peptide (1)..(527): Ceres Seq. ID no. 13603061
MLQGVSEVAEAVKVTMGPKGRNVIIESSYGGPKITKDGVTVAKSISFQAKAKNIGAELVKQVASATNKVAGDGTTCATVLTQAILIEGCKSVAAGVNVMDLRVGINMAIAAVVSDLKSRAVMISTPEEITQVATISANGEREIGELIARAMEKVGKEGVITVADGNTLDNELEVVEGMKLARGYISPYFITDEKTQKCELENPIILIHEKKISDINSLLKVLEAAVKSSRPLLIVAEDVESDALAMLILNKHHGGLKVCAIKAPGFGDNRKASLDDLAVLTGAEVISEERGLSLEKIRPELLGTAKKVTVTRDDTIILHGGGDKKLIEERCEELRSANEKSTSTFDQEKTQERLSKLSGGVAVFKVGGASESEVGERKDRVTDALNATRAAVEEGIIPGGGVALLYATKALDNLQTENEDQRRGVQIVQNALKAPAFTIAANAGYDGSLVVGKLLEQDDCNFGFDAAKGKYVDMVKAGIIDPVKVIRTALTDAASVSLLLTTTEASVLVKADENTPNHVPDMASMGM

SEQ ID NO: 99497 - protein, 512 aa, Arabidopsis thaliana
  peptide (1)..(512): Ceres Seq. ID no. 13603062
MGPKGRNVIIESSYGGPKITKDGVTVAKSISFQAKAKNIGAELVKQVASATNKVAGDGTTCATVLTQAILIEGCKSVAAGVNVMDLRVGINMAIAAVVSDLKSRAVMISTPEEITQVATISANGEREIGELIARAMEKVGKEGVITVADGNTLDNELEVVEGMKLARGYISPYFITDEKTQKCELENPIILIHEKKISDINSLLKVLEAAVKSSRPLLIVAEDVESDALAMLILNKHHGGLKVCAIKAPGFGDNRKASLDDLAVLTGAEVISEERGLSLEKIRPELLGTAKKVTVTRDDTIILHGGGDKKLIEERCEELRSANEKSTSTFDQEKTQERLSKLSGGVAVFKVGGASESEVGERKDRVTDALNATRAAVEEGIIPGGGVALLYATKALDNLQTENEDQRRGVQIVQNALKAPAFTIAANAGYDGSLVVGKLLEQDDCNFGFDAAKGKYVDMVKAGIIDPVKVIRTALTDAASVSLLLTTTEASVLVKADENTPNHVPDMASMGM

SEQ ID NO: 99498 - DNA, 1719 bp, Arabidopsis thaliana
  misc_feature (1)..(1719): Ceres Seq. ID no. 13603083
  misc_feature (1)..(1719): Ortholog of  Ceres SEQ ID NO 15174513 as cited in SEQ ID NO 58979
  misc_feature (1)..(1719): Ortholog of  Ceres SEQ ID NO 13584616 as cited in SEQ ID NO 65234
  misc_feature (1)..(1719): Ortholog of  Ceres SEQ ID NO 15178939 as cited in SEQ ID NO 0
atcttctacggacagcttctttctctttcctctctgattttttttttctctttctacctttttctttttttattttctttcttttttttttgttagtttttttttttttctttcttcatctcgtgaacgatatagtacctgaaccctagcggaggaaaatcaaaaattgtctaggagaaacaaacagagatatctttctttctttttatcagtggggaaaaaaaatgcagaatccgagactgaagcaacatcagcagcaacaacaacaacaagctatgatgcagcaacaagctctgatgcagcaacactctctttaccatcctggtgttttggctcctcctcagttagagcctgttccaagtggaaaccttcctcctggttttgatcccagtacttgccgtagcgtgtatgttggaaacatccatacacaggtcacagagcctttgcttcaagagatttttacaagcactggccctgttgaaagcagtaaactcatcagaaaggataagtcatcatatggatttgttcactactttgatcgaagatccgctgctctggctatactgtctctgaacggaaggcatctgtttggacagcctatcaaagtcaattgggcgtatgccactggtcagagggaagatacatcaagtcatttcaacatttttgttggagatctcagtccagaggtcactgatgcaacattatatcaaagcttttctgtcttttccagttgttcggatgcgagagttatgtgggaccaaaaaactgggcgctcgagaggctttgggtttgtttccttccgcaatcaacaggatgctcaaactgccattaatgagatgaatggtaagtggttaagtagcagacaaatcagatgcaactgggccacgaagggcgctacttctggtgatgataagctcagttctgatggaaaaagtgttgtggaacttacaactggctcatcagaggatggtaaagagacattaaatgaggaaacacctgaaaataattctcagtttaccactgtttatgtgggaaaccttgctccagaggtaactcagcttgatctacaccgttacttccatgctcttggcgctggagttattgaggaggtccgtgtccaacgagacaaaggctttggtttcgtgagatataacactcatcccgaagctgctcttgctattcagatgggtaacactcagccttacctctttaacagacagataaagtgctcatggggaaacaagccaactccaccaggtacagcctcaaacccacttcccccacctgccccagctccagttcctggtctatctgcagctgatctcctaaactatgagaggcaattggcacttagcaagatggcaagtgtgaatgcgttaatgcatcaacagggtcaacaccctctaaggcaggctcatggaataaatgccgctggagcaactgcagccatgtatgatggtggctttcagaatgtagccgccgcacagcaactcatgtactatcagtaataaacctcagttcgtggcgccgatctcaagtttcaatctctttgctttttctcttttttttttgtttgtctagaacttgtttgtgtgtgtctgtttgtctctcacttaagttatctatataaagttttatctgcagttgtatgattagttatgtattcccatggattgtaagacaagcgaattacattcaataaaagggatttggatatcc

SEQ ID NO: 99499 - protein, 427 aa, Arabidopsis thaliana; identical to SEQ ID NO: 24120
  peptide (1)..(427): Ceres Seq. ID no. 13603084

SEQ ID NO: 99500 - protein, 410 aa, Arabidopsis thaliana; identical to SEQ ID NO: 24121
  peptide (1)..(410): Ceres Seq. ID no. 13603085

SEQ ID NO: 99501 - protein, 409 aa, Arabidopsis thaliana; identical to SEQ ID NO: 24122
  peptide (1)..(409): Ceres Seq. ID no. 13603086

SEQ ID NO: 99502 - DNA, 866 bp, Arabidopsis thaliana
  misc_feature (1)..(866): Ceres Seq. ID no. 13603091
  misc_feature (1)..(866): Ortholog of  Ceres SEQ ID NO 13638889 as cited in SEQ ID NO 55831
attatttcgtcagaacaacattgaaaagttaccgttaaacactctaagcgctcttcttcatcttcttatacacttctcttccaacaagaatctcaccaagaaacttcttcacttttacaaagttaaaaccatatggcgaacatgaacgctcttcaacaaatgatcttcccagacgagaacgctccaattcatcgcaaaaagtctgtcactgctgcttctgtgaaatccaaagggactgtacttggtcagaagaaacctggaggagctcgtaaggctctgaatgatattacaaacaagtctgggattcatgcgaaagctgctgcttcttcaaagaacaagcaaattgcttctgctgctgtgaaagagattgatatagctggggaaaggtttttacatgatcacagcaaatgcatcaaagaacagcaaaatctttgggatgatcactactctgctgatctcatgctacttcatcatggttccagcatcaaggagaagcatctcaattgggacattgaaaagatggatgctaaggacgatctgacttacgaagaaccagaagagatggcatcgcccaagttttctgattggctgaagaactcgactccatggcgctctccaatccgtcatggctctatgatgccttccactcctctggcttggcggttcgattcatgcgaattcacacttaaagaagactctgacgacctcttctgagtttctgtttcttaatgtcttcaaaattcatccttcagatgaagtagtaatagtagtagtggcgtttatcttttgttcagctcttcatgaatcactctgtgtctatcactttgtaactggtttcaggaaataaagttggtatcttttcaagt

SEQ ID NO: 99503 - protein, 193 aa, Arabidopsis thaliana
  peptide (1)..(193): Ceres Seq. ID no. 13603092
MANMNALQQMIFPDENAPIHRKKSVTAASVKSKGTVLGQKKPGGARKALNDITNKSGIHAKAAASSKNKQIASAAVKEIDIAGERFLHDHSKCIKEQQNLWDDHYSADLMLLHHGSSIKEKHLNWDIEKMDAKDDLTYEEPEEMASPKFSDWLKNSTPWRSPIRHGSMMPSTPLAWRFDSCEFTLKEDSDDLF

SEQ ID NO: 99504 - protein, 190 aa, Arabidopsis thaliana
  peptide (1)..(190): Ceres Seq. ID no. 13603093
MNALQQMIFPDENAPIHRKKSVTAASVKSKGTVLGQKKPGGARKALNDITNKSGIHAKAAASSKNKQIASAAVKEIDIAGERFLHDHSKCIKEQQNLWDDHYSADLMLLHHGSSIKEKHLNWDIEKMDAKDDLTYEEPEEMASPKFSDWLKNSTPWRSPIRHGSMMPSTPLAWRFDSCEFTLKEDSDDLF

SEQ ID NO: 99505 - protein, 184 aa, Arabidopsis thaliana
  peptide (1)..(184): Ceres Seq. ID no. 13603094
MIFPDENAPIHRKKSVTAASVKSKGTVLGQKKPGGARKALNDITNKSGIHAKAAASSKNKQIASAAVKEIDIAGERFLHDHSKCIKEQQNLWDDHYSADLMLLHHGSSIKEKHLNWDIEKMDAKDDLTYEEPEEMASPKFSDWLKNSTPWRSPIRHGSMMPSTPLAWRFDSCEFTLKEDSDDLF

SEQ ID NO: 99506 - DNA, 1636 bp, Arabidopsis thaliana
  misc_feature (1)..(1636): Ceres Seq. ID no. 13603095
  misc_feature (1)..(1636): Ortholog of  Ceres SEQ ID NO 12625120 as cited in SEQ ID NO 67706
  misc_feature (1)..(1636): Ortholog of  Ceres SEQ ID NO 13595999 as cited in SEQ ID NO 68173
ggagagtaacatcgagacaaagaagaaaaactaaaaaagagaaccccaaagaatcgaatatttattatttcgccccgaagattctatttctgatcatttacacccctaaaaagagtagagctttcgtgaagccaccatgtgtggaggagctataatctccgatttcatacctccgccgaggtccctccgcgtcactaacgagtttatctggccggatctgaaaaacaaagtgaaagcttcaaagaagagatcgaataagcgatccgatttcttcgatcttgacgatgatttcgaagctgatttccaagggtttaaggatgactcggcttttgactgcgaagacgatgatgatgtcttcgtcaatgttaagcctttcgtcttcaccgcaactactaagcccgtagcttccgctttcgtctccactggtatatatttggtaggttcagcatatgccaagaaaactgtagagtccgctgagcaagctgagaaatcttctaagaggaagaggaagaatcaataccgagggattaggcagcgtccttggggaaaatgggctgcggagatccgtgatccgagaaaaggctcccgagaatggcttggaacattcgacactgctgaggaagcagcaagagcttatgatgctgcagcacgcagaatccgtggcacgaaagctaaggtgaattttcccgaggagaagaaccctagcgtcgtatcccagaaacgtcctagtgctaagactaataatcttcagaaatcagtggctaaaccaaacaaaagcgtaactttggttcagcagccaacacatctgagtcagcagtactgcaacaactcctttgacaactcttttggtgatatgagtttcatggaagagaagcctcagatgtacaacaatcagtttgggttaacaaactcgttcgatgctggaggtaacaatggataccagtatttcagttccgatcagggcagtaactccttcgactgttctgagttcgggtggagtgatcacggccctaaaacacccgagatctcttcaatgcttgtcaataacaacgaagcatcatttgttgaagaaaccaatgcagccaagaagctcaaaccaaactctgatgagtcagacgatctgatggcataccttgacaacgccttgtgggacaccccactagaagtggaagccatgcttggcgcagatgctggtgctgtgactcaggaagaggaaaacccagtggagctatggagcttagatgagatcaatttcatgctggaaggagacttttgaagtgatcgatggttccttagtttgtaaataaagctgtgttggattttgctgttgggggatggtacaagtcacacctcaagctctatgcattggtatctcatgagcctctcttccatagagagtttctcttttaattttgtcgaaataaaaaaggtgtgatgaagtaaatagaggtataataatatctatctattaagtcttgttttgttctttcatttttgtatttcttttctatttaaaagacagtttattagtcttctgagctctctttttgatctttgttatagcgtatcatcaccctcgaaagtgtaatgttttgtacccccaaacttgtttagcattataataaagtctctttgg

SEQ ID NO: 99507 - protein, 379 aa, Arabidopsis thaliana; identical to SEQ ID NO: 43320
  peptide (1)..(379): Ceres Seq. ID no. 13603096

SEQ ID NO: 99508 - DNA, 2395 bp, Arabidopsis thaliana
  misc_feature (1)..(2395): Ceres Seq. ID no. 13603097
  misc_feature (1)..(2395): Ortholog of  Ceres SEQ ID NO 13584744 as cited in SEQ ID NO 69137
cttctgtctcatctggttttcgagagagatagagaaagtgagacaaggttaaggaggaagaagatgactgagaatcgggtggttttggctctgcttatactctgcattgttgggtttgagccaagtttcatccatggagctacggattcatcagatacttcggcgttaaacatcatgttcagctccatgaattctccaggacagctctcacaatggacagcatcaggaggtgatccttgtggccaaaactggaaaggcataacttgctctggctctcgagttacacaaataaagttaccaagtcttggactttctggatcacttggattcatgcttgataaattgacttctgttactgagtttgatatgagcaacaataaccttggaggcgatttgccttatcagcttcctccaaacttggagcgattgaatcttgctaataaccagttcactggatctgctcaatattccatttctatgatggctcctcttaagtacctcaaccttgctcacaaccagttgaagcagctagctattgacttcacaaaactcacctctctctctatattggacctctcttccaatgcttttatagggtctctcccaaacacttgtagctctcttacgagtgcaaaatcaatttatcttcagaacaatcagttctcaggcaccattgatattctagccacccttcctctcgaaaatctgaatattgcaaacaatcggttcacaggctggatccctgattctttgaaaggcattaacttgcaaaaagatggcaatttattaaattccgggcctgcacctccaccacctcctggtacaccaccgatcagtaaatcatcacctactccgaaatccgggaaccgtggaaaccgttccaatggtgattccagcaatagcaaagactccagcaaatcagggcttggagctggtggagtagcaggaatagtcatttctttgatagttgtaacagcagtcatagctttcttcttgatcaagagaaaaagatcaaagcggtcatcatccacggacattgaaaagactgataataacattaaccaacccattatactagcgtccaatgactttcatcaagagaataagtctgtacagaatccaccattggttgagacaaagaaactggatacgtcattgtcgatgaatctacgtcctccaccatctgagcgacataagtcgtttgatgacgatgattcaacaatgagaaaacctattgttgcaaagaaagctgctgttgttgttccttcaaatgtgaacacatatacggtttcagatcttcaagtagctaccaacagtttcagcgtagataatcttctcggtgaaggaacatttggaagagtatacagagctcagtttgaagatggaaaggtacttgctgtgaagaaaatcgactcatctgcgcttcccacggatactgctgatgattttaccgaaattgtatcgaaaatagcgcatttggatcacgaaaatgtcacaaagcttgatggttactgttctgaacacgggcaacacttggtggtctatgagttccatagaaacggctcattgcatgactttttacatcttgcagaagaggaaagcaaaccgttgatatggaatccccgtgtcaagatcgctcttggcactgcacgtgcattggagtacttgcatgaagtttgctcaccatctatagtccacaagaacattaaatcagcaaatattttacttgactcagagctgaatccacacctctcagactcaggtctcgctagcttccttcccactgcaaacgagctactaaaccaaaacgatgaaggatacagcgcaccagaaacttcaatgtcaggccaatactctttgaagagcgatgtttacagttttggagtagtgatgctcgagcttttaaccggaagaaaaccattcgacagcacaaggtcaagatcggaacaatcattggtaagatgggcaacacctcagcttcacgacattgatgctttgggcaaaatggttgatccagctctcaaagggctatacccggttaaatccctctcccgatttgcagatgttatcgccctttgcgtccagccggagccagagtttagaccacccatgtctgaagtggtgcaagcattggttgtattggtgcagagagctaacatgagcaagagaactgttggagtcggctccggtagctccggcgtcaatgattacatgtaaattctttacctgatgagaaccaacaaaaaaaaacataaaaatttgccctttttctcttgtctgctcggaatctggatgggacgacaacaagtgacaaccgaggacagacaaaacaaaacaaaatcctttttttctttcggtttcataaaactgatgatgagagaataacaacaacaac

SEQ ID NO: 99509 - protein, 738 aa, Arabidopsis thaliana; identical to SEQ ID NO: 39643
  peptide (1)..(738): Ceres Seq. ID no. 13603098

SEQ ID NO: 99510 - protein, 717 aa, Arabidopsis thaliana; identical to SEQ ID NO: 39644
  peptide (1)..(717): Ceres Seq. ID no. 13603099

SEQ ID NO: 99511 - protein, 680 aa, Arabidopsis thaliana; identical to SEQ ID NO: 39645
  peptide (1)..(680): Ceres Seq. ID no. 13603100

SEQ ID NO: 99512 - DNA, 1431 bp, Arabidopsis thaliana
  misc_feature (1)..(1431): Ceres Seq. ID no. 13603101
  misc_feature (1)..(1431): Ortholog of  Ceres SEQ ID NO 15171293 as cited in SEQ ID NO 51744
cacacacttcatctctccccagagctctattcccatcaagaaacacacttcggaagatggagatcactaacgttaccgagtatgatgcaatcgcaaagcagaagctgcctaagatggtgtacgactactatgcatctggtgcagaagaccaatggactcttcaagagaacagaaacgcttttgcaaggatcctctttcggcctcggattctgattgatgtgagcaagattgacatgacaaccaccgtcttggggttcaagatctcgatgcccatcatggttgctccaactgccatgcaaaagatggctcaccctgatggggaatatgctactgctagagctgcatctgcagctggaactatcatgacactatcttcatgggctacttccagcgttgaagaagttgcgtctacagggccagggatccgattcttccagctctatgtatacaagaacaggaatgtggttgagcagctcgtgagaagagctgagagggctgggttcaaagccattgctctcactgtagacaccccaaggctaggccgcagagagtctgatatcaagaacagattcactttgcctccaaacctgacattgaagaactttgaaggacttgacctcggaaagatggacgaggccaatgactctggcttggcttcatatgttgctggtcaaattgaccgtaccttaagctggaaggatgtccagtggctccagacaatcaccaagttgcccattcttgtcaaaggtgttcttacaggagaggatgcaaggatagcgattcaagctggtgcagccggaatcattgtatcaaaccatggagctcgccagcttgactatgtcccagcaaccatctcggcccttgaagaggttgtcaaagcgacacaaggacgaattcctgtcttcttggatggtggtgttcgacgtggcactgatgtcttcaaagcacttgcacttggagcctccgggatatttattggaagaccagtggtattctcattggcagctgaaggagaggctggagttagaaaggtgcttcaaatgctacgtgatgagttcgagctgaccatggcactgagtgggtgtcggtccctaaaggaaatctcccgtaaccacattaccaccgaatgggacactccacgtccttcagccaggttatagagaggaaaataaccaacaagcagagaacagcagcaacacagaaccaaaatattggctaaacttattcatactctgattgtacttggcttctactctgctaaatatctcaagacttgtttctccctctatcagatcacaaaccaagcctagtgattctgtaatactatttggctacttctttcttaaggccattcttatttctaaattccatgtacttacattcccacagatcaatttcttgtgattcccagataatacgatgaacatatgc

SEQ ID NO: 99513 - protein, 385 aa, Arabidopsis thaliana
  peptide (1)..(385): Ceres Seq. ID no. 13603102
HTSSLPRALFPSRNTLRKMEITNVTEYDAIAKQKLPKMVYDYYASGAEDQWTLQENRNAFARILFRPRILIDVSKIDMTTTVLGFKISMPIMVAPTAMQKMAHPDGEYATARAASAAGTIMTLSSWATSSVEEVASTGPGIRFFQLYVYKNRNVVEQLVRRAERAGFKAIALTVDTPRLGRRESDIKNRFTLPPNLTLKNFEGLDLGKMDEANDSGLASYVAGQIDRTLSWKDVQWLQTITKLPILVKGVLTGEDARIAIQAGAAGIIVSNHGARQLDYVPATISALEEVVKATQGRIPVFLDGGVRRGTDVFKALALGASGIFIGRPVVFSLAAEGEAGVRKVLQMLRDEFELTMALSGCRSLKEISRNHITTEWDTPRPSARL

SEQ ID NO: 99514 - protein, 367 aa, Arabidopsis thaliana; identical to SEQ ID NO: 25861
  peptide (1)..(367): Ceres Seq. ID no. 13603103

SEQ ID NO: 99515 - protein, 348 aa, Arabidopsis thaliana; identical to SEQ ID NO: 25862
  peptide (1)..(348): Ceres Seq. ID no. 13603104

SEQ ID NO: 99516 - DNA, 1073 bp, Arabidopsis thaliana
  misc_feature (1)..(1073): Ceres Seq. ID no. 13603112
  misc_feature (1)..(1073): Ortholog of  Ceres SEQ ID NO 15176807 as cited in SEQ ID NO 0
ctctctctgttgctaaaaacatttagatcgcttacctggttcgtgcacctgattagctgctgttatttctttttcttcccagagttcaggtcgttaaaaatctaatcttttttggtgggtgaagactcttctttatcaaatcaacctaatttctcagattctcagatctcaagagttttgtttttttagcaacaatgaataaaaatccacggctcgatttttcctcaccgtcgtcgttagccactatctccgactctgcagacggtgagctgaatgaagacgacatctttgcaatcgacatatctcacgcgccgcctcaagctcgtcattctcctgtatcatctccggcgaagcaacaaactcctgctcgtcagcttcagaggagcaaaagcggtttgaagaatgtggaagcgtctggtatcctcgcggctcttcctgaatcatctgggagtagtagttacttaagtcatgtctttcaccacaaacctgcggctgctctctctacttctgtctcctccacagcttcttcatcgtcttcttcaggtggtggtgcatcagctggttcttcgtcttcagctcgagctatcccgaccgcgcctaaaccgcctcaagagaggcttccgttttcagcttcttttgtaggtggtgggaagtatcctcaatcagctccggttcaagtgccgttagtgtcgtctgcgatgatgaatcgtcataagaaggaattcaagctgactgatgtggtggatgatgatgaggaagaagaggaaggcgaaatgcttccgcctcacgagattgtagctcggtctttggctcagtcgtcgttgttatcttgctctgtgcttgaaggagcaggaaggacacttaaagggagagatctccggcaggtaaggaatgctgttttcagaagaaccggtttcatagattgagtgtttttttttttactctcttcttcagaaagacgattctttaatttgttatcccaattgatgaactactttatcccttatttggccacagaaacttgtcaatgtgtatgttcatatgttgtctacgttagacgatttgtttacttc

SEQ ID NO: 99517 - protein, 243 aa, Arabidopsis thaliana
  peptide (1)..(243): Ceres Seq. ID no. 13603113
MNKNPRLDFSSPSSLATISDSADGELNEDDIFAIDISHAPPQARHSPVSSPAKQQTPARQLQRSKSGLKNVEASGILAALPESSGSSSYLSHVFHHKPAAALSTSVSSTASSSSSSGGGASAGSSSSARAIPTAPKPPQERLPFSASFVGGGKYPQSAPVQVPLVSSAMMNRHKKEFKLTDVVDDDEEEEEGEMLPPHEIVARSLAQSSLLSCSVLEGAGRTLKGRDLRQVRNAVFRRTGFID

SEQ ID NO: 99518 - DNA, 1404 bp, Arabidopsis thaliana
  misc_feature (1)..(1404): Ceres Seq. ID no. 13603114
  misc_feature (1)..(1404): Ortholog of  Ceres SEQ ID NO 13596370 as cited in SEQ ID NO 68071
gcatcaacgaagaagaagaagaaaaggacgagtagattgatttcttagacgacggagaaatgcgagtgatgagatcattgcgcggtaattccggtgctggattggttttccggccggcgaggttaaattctcttcggagcgtctttaccggttgccgtgctgtgattttgccccgctttggtggtccggaggtttttgagctccgggagaatgttccggtgccgaatctgaatccaaatgaggttcttgtcaaggcgaaagctgtctccgttaatcctcttgattgcagaatacgagctggatatggacgttctgtattccaaccgcatctacctattatagttggacgtgatgtcagtggtgaagttgcggcaattgggacttcagtaaagtcacttaaagtaggacaagaagtttttggtgcgttgcatccgacggcgttaagaggtacttatactgactatggaattctttcggaagacgaactcacggaaaagccatcatcaatttcacatgtggaagcaagtgccattccttttgcagctttgactgcttggcgtgctttgaagagtaatgcaaggataactgaaggacaaagactattagtctttggaggaggaggagcagtaggtttttctgcaatccagcttgcggtagcatctgggtgtcatgttacagcctcttgtgttggtcagactaaagacagaatacttgcagctggggccgagcaagctgttgactacacaaccgaggacattgagttggcggtaaaaggaaaatttgatgccgtgttagatactattggtgggcctgaaacggagagaataggcattaacttcttaaggaagggtggaaactatatgactcttcagggtgaggctgcatcgttgactgataaatacggttttgtggttgggcttccccttgcaacatcgctcttgatgaagaaaaagatacaatatcagtattctcatggaatagactattggtggacgtatatgagggctgatcctgaaggtctagccgagattcagcgtttagttggagctggaaagctaaaaatacctgttgaaaaaacatttccaataaccgatgttgtagcagctcatgaagccaaggagaagaaacagattccgggtaaggtggttctagagttctgaactacatatacatagtagaaataataacacctgcatagttctctagcagttgttctttctagaatttacacgcagagaaacaaatgtttcgcgtctggagttttctgtaaatgagatctatcaggcttagattcagatcaagaacttgaagtgtctgtatagactttccaaagggttcgtttttatttggattttgtctgtgttgcaaactactaagccaagtaatggaaatggtttagaaaga

SEQ ID NO: 99519 - protein, 366 aa, Arabidopsis thaliana; identical to SEQ ID NO: 22703
  peptide (1)..(366): Ceres Seq. ID no. 13603115

SEQ ID NO: 99520 - protein, 363 aa, Arabidopsis thaliana; identical to SEQ ID NO: 22704
  peptide (1)..(363): Ceres Seq. ID no. 13603116

SEQ ID NO: 99521 - DNA, 1751 bp, Arabidopsis thaliana
  misc_feature (1)..(1751): Ceres Seq. ID no. 13603121
  misc_feature (1)..(1751): Ortholog of  Ceres SEQ ID NO 14308625 as cited in SEQ ID NO 55009
attcagcttgctcgcaacgaaacatattttgttggaaaaaaaaaacaaaggaaatcgccatggaagacgttaaccagttgttcgatgctgctttcgagttcgcacactatcccggcgctcaaaacgaaacttccgttaaggaattcctcgatcgcttccctcttcctgttatcttcaatgctttgcaaaccgatccggatataccaggatttgaaaacacgttggtgacttgcttggagaggttgtttaagactaagtatggcgcttcacttattcctcagtatatgcctgttctgcaagttggtctcaaggcagattctgcagttgtgaaatctctggcttgcaaaactgttctgtgtctcttggaggattgcgatacaaacgacgtttcttctgttcagctagttgttaacaatggcatataccctcttctacttgactatatcattaacagcgatgatgaagttgcaaatgctgcaagtgagacaattaagagcctagctcgctttccagatgcaatgtccgtaattttcccttctgaaaccaacgatcctacacatcttcgtaaccttgctgcaaggtgttcatcactggcacgagtccgggttttgtcgttgatagtgaagcttttttcgatttctcgacttgtagcttcagaagttaagaaatcggggcttcttgatttactggaggcagaaatgaagggtacaaaagacactcttgtgatcttaaatgttctggaactctactatgagttaatggaagtggagcacagttcagagttcgtgccacaaacatcacttattcagctgttgtgttctatcatcagtggtacatcgacgggaccctatgaaaagttaagagcaatgatgataagtggcagactactctcaaaggaaaatatctacaaagtcgtggaagaagctagtgtgaaggcgttaatttcagctattgatgggagtctggagtcagttgagatgaatgatactgatgcacaggaagctgccattgatgcacttggtcagatgggatcaacaacgaagggagcggatcttgtcctttcaacttcacctccagctgcaagacatgttgtagcttctgcctttgatcgtaatgcacatggaaaacagttggctgcactgcatgcactggcaaacatcgcaggtgaaacacgacctaagagcaacagaatagttgatggaaaagctgaagaaagccttagatgtttgatatacgacgctgcagcacagagcacaaaactaaccccatccggtttattcctctcagttcttcaacaaagctcagagattcgtcttgcgggttatcgaacgttaacagcattagtggctcggccatggtgcctggtggaaatcttggccaaagaagagataataaacatagttacggatgcaaccactgaaactgcaaaaatagcaatggaagcaaggtataactgctgcaaagcaattcacgaagcgttcttgtgtagtaactttgttgatgaccctcgtcgtctaaaaaccggtgacaagttgcaagaagctgttcgaagtggaccatatatgtcgaagaagcacagaggcgcacgaccagaagtaatgacaggcgaaggattttaaagacaactaaagaaaaaaagttaaaacttctttgttaaccaaagttttttatatcttctctggctgttcgataagtaaactttagttctttctataaacaacgaaggctaggagtaaacgttttggcggttg

SEQ ID NO: 99522 - protein, 538 aa, Arabidopsis thaliana
  peptide (1)..(538): Ceres Seq. ID no. 13603122
SACSQRNIFCWKKKTKEIAMEDVNQLFDAAFEFAHYPGAQNETSVKEFLDRFPLPVIFNALQTDPDIPGFENTLVTCLERLFKTKYGASLIPQYMPVLQVGLKADSAVVKSLACKTVLCLLEDCDTNDVSSVQLVVNNGIYPLLLDYIINSDDEVANAASETIKSLARFPDAMSVIFPSETNDPTHLRNLAARCSSLARVRVLSLIVKLFSISRLVASEVKKSGLLDLLEAEMKGTKDTLVILNVLELYYELMEVEHSSEFVPQTSLIQLLCSIISGTSTGPYEKLRAMMISGRLLSKENIYKVVEEASVKALISAIDGSLESVEMNDTDAQEAAIDALGQMGSTTKGADLVLSTSPPAARHVVASAFDRNAHGKQLAALHALANIAGETRPKSNRIVDGKAEESLRCLIYDAAAQSTKLTPSGLFLSVLQQSSEIRLAGYRTLTALVARPWCLVEILAKEEIINIVTDATTETAKIAMEARYNCCKAIHEAFLCSNFVDDPRRLKTGDKLQEAVRSGPYMSKKHRGARPEVMTGEGF

SEQ ID NO: 99523 - protein, 519 aa, Arabidopsis thaliana
  peptide (1)..(519): Ceres Seq. ID no. 13603123
MEDVNQLFDAAFEFAHYPGAQNETSVKEFLDRFPLPVIFNALQTDPDIPGFENTLVTCLERLFKTKYGASLIPQYMPVLQVGLKADSAVVKSLACKTVLCLLEDCDTNDVSSVQLVVNNGIYPLLLDYIINSDDEVANAASETIKSLARFPDAMSVIFPSETNDPTHLRNLAARCSSLARVRVLSLIVKLFSISRLVASEVKKSGLLDLLEAEMKGTKDTLVILNVLELYYELMEVEHSSEFVPQTSLIQLLCSIISGTSTGPYEKLRAMMISGRLLSKENIYKVVEEASVKALISAIDGSLESVEMNDTDAQEAAIDALGQMGSTTKGADLVLSTSPPAARHVVASAFDRNAHGKQLAALHALANIAGETRPKSNRIVDGKAEESLRCLIYDAAAQSTKLTPSGLFLSVLQQSSEIRLAGYRTLTALVARPWCLVEILAKEEIINIVTDATTETAKIAMEARYNCCKAIHEAFLCSNFVDDPRRLKTGDKLQEAVRSGPYMSKKHRGARPEVMTGEGF

SEQ ID NO: 99524 - protein, 444 aa, Arabidopsis thaliana
  peptide (1)..(444): Ceres Seq. ID no. 13603124
MPVLQVGLKADSAVVKSLACKTVLCLLEDCDTNDVSSVQLVVNNGIYPLLLDYIINSDDEVANAASETIKSLARFPDAMSVIFPSETNDPTHLRNLAARCSSLARVRVLSLIVKLFSISRLVASEVKKSGLLDLLEAEMKGTKDTLVILNVLELYYELMEVEHSSEFVPQTSLIQLLCSIISGTSTGPYEKLRAMMISGRLLSKENIYKVVEEASVKALISAIDGSLESVEMNDTDAQEAAIDALGQMGSTTKGADLVLSTSPPAARHVVASAFDRNAHGKQLAALHALANIAGETRPKSNRIVDGKAEESLRCLIYDAAAQSTKLTPSGLFLSVLQQSSEIRLAGYRTLTALVARPWCLVEILAKEEIINIVTDATTETAKIAMEARYNCCKAIHEAFLCSNFVDDPRRLKTGDKLQEAVRSGPYMSKKHRGARPEVMTGEGF

SEQ ID NO: 99525 - DNA, 1060 bp, Arabidopsis thaliana
  misc_feature (1)..(1060): Ceres Seq. ID no. 13603125
  misc_feature (1)..(1060): Ortholog of  Ceres SEQ ID NO 12608863 as cited in SEQ ID NO 51470
  misc_feature (1)..(1060): Ortholog of  Ceres SEQ ID NO 13639221 as cited in SEQ ID NO 56429
  misc_feature (1)..(1060): Ortholog of  Ceres SEQ ID NO 14302493 as cited in SEQ ID NO 67957
  misc_feature (1)..(1060): Ortholog of  Ceres SEQ ID NO 13624608 as cited in SEQ ID NO 0
ttcaattatctatcacaccaccactctctctctaatctatctatccgagaatggccaagatgggcttgaaacccgacccggctactactaaccagacccacaataatgccaaggagattcgttacagaggcgttaggaagcgtccttggggccgttatgccgccgagatccgagatccgggcaagaaaacccgcgtctggcttggcactttcgatacggctgaagaggcggcgcgtgcttacgatacggcggcgcgtgattttcgtggtgctaaggctaagaccaatttcccaacttttctcgagctgagtgaccagaaggtccctaccggtttcgcgcgtagccctagccagagcagcacgctcgactgtgcttctcctccgacgttagttgtgccttcagcgacggctgggaatgttcccccgcagctcgagcttagtctcggcggaggaggcggcggctcgtgttatcagatcccgatgtcgcgtcctgtctactttttggacctgatggggatcggtaacgtaggtcgtggtcagcctcctcctgtgacatcggcgtttagatcgccggtggtgcatgttgcgacgaagatggcttgtggtgcccaaagcgactctgattcgtcatcggtcgttgatttcgaaggtgggatggagaagagatctcagctgttagatctagatcttaatttgcctcctccatcggaacaggcctgagcttttaacggtgtcgtttcaattcgaagcgcatgcgtttcttcttctttttgagctgtgaaaattcgttttctcatagtttttcctctctctctctctcagtctaaatttattaccagtttttagaaagaaaaaacagattaaatctgagagagaaaaatataattttagctgacatggatcgttatgtacatattattacataaccggagatctgaacttttgttgtgtgcttttaattttttgcgacttggtttcaccccatgttgtttctctattttttttactactttttttttttttgttcttccaaattttcaatcaataatttggtaatcttc

SEQ ID NO: 99526 - protein, 222 aa, Arabidopsis thaliana; identical to SEQ ID NO: 35375
  peptide (1)..(222): Ceres Seq. ID no. 13603126

SEQ ID NO: 99527 - protein, 219 aa, Arabidopsis thaliana; identical to SEQ ID NO: 35376
  peptide (1)..(219): Ceres Seq. ID no. 13603127

SEQ ID NO: 99528 - DNA, 1413 bp, Arabidopsis thaliana
  misc_feature (1)..(1413): Ceres Seq. ID no. 13603136
  misc_feature (1)..(1413): Ortholog of  Ceres SEQ ID NO 13596780 as cited in SEQ ID NO 62360
aaagcttaagtgagaagcagaaaaaaaaatggcgaaatctcagatctggtttggttttgcgttactcgcgttgcttctggtttcagccgtagctgacgatgtggttgttttgactgacgatagcttcgaaaaggaagttggtaaagataaaggagctctcgtcgagttttacgctccctggtgtggtcactgcaagaaacttgctccagagtatgaaaagctaggggcaagcttcaagaaggctaagtctgtgttgattgcaaaggttgattgtgatgagcaaaagagtgtctgtactaaatatggtgttagtggatacccaaccattcagtggtttcctaaaggatctcttgaacctcaaaagtatgagggtccacgcaatgctgaagctttggctgaatacgtgaacaaggaaggaggcaccaacgtaaaattagctgcagttccacaaaacgtggttgttttgacacctgacaatttcgatgagattgttctggatcaaaacaaagatgtcctagtcgaattttatgcaccatggtgtggccactgcaaatcactcgctcccacatacgaaaaggtagccacagtgtttaaacaggaagaaggtgtagtcatcgccaatttggatgctgatgcacacaaagcccttggcgagaaatatggagtgagtggattcccaacattgaaattcttcccaaaggacaacaaagctggtcacgattatgacggtggcagggatttagatgactttgtaagcttcatcaacgagaaatctgggaccagcagggacagtaaagggcagcttacttcaaaggctggtatagtcgaaagcttagatgctttggtaaaagagttagttgcagctagtgaagatgagaagaaggcagtgttgtctcgcatagaagaggaagcaagtacccttaagggctccaccacgaggtatggaaagctttacttgaaactcgcaaagagctacatagaaaaaggttcagactatgctagcaaagaaacggagaggcttggacgggtgcttgggaagtcgataagtccagtgaaagctgatgaactcactctcaagagaaatatcctaaccacgttcgttgcttcttcttaaaagtcatatagcttgaagctaagagaataggagtcgagagagtttataactgatactgttttgagattttatgtttgtcaagatcaagaacgtctgtggttatttctggttagttctgaaactcttttgaacccaagtttatctgtctctggtgaacaagcgaccacgataatcataaacttcattcgcgttaaaaaaaaaggttcagtaatgggccaggctcgtattcattattaatgggctaggctcgtgttcataaaaagtctgtaatgggtcattgaggtatacaaaggacatcc

SEQ ID NO: 99529 - protein, 361 aa, Arabidopsis thaliana; identical to SEQ ID NO: 29321
  peptide (1)..(361): Ceres Seq. ID no. 13603137

SEQ ID NO: 99530 - DNA, 1912 bp, Arabidopsis thaliana
  misc_feature (1)..(1912): Ceres Seq. ID no. 13603138
  misc_feature (1)..(1912): Ortholog of  Ceres SEQ ID NO 13594037 as cited in SEQ ID NO 55666
  misc_feature (1)..(1912): Ortholog of  Ceres SEQ ID NO 13657707 as cited in SEQ ID NO 66407
atctccaaaccaaaacacaattaagctaaaaaaaaaaccaaaggatgtctcagaaactcatgttcttgttcacccttgcctgcctctcctcgttaccatctccttttatctccgcccaaataccggccattggaaatgccacttcaccgtcaaatatatgtagattcgcgccggatccatcttattgtagatcggttcttccaaaccagcccggagatatatattcctacggacgtttgtctctacgaagatccctctcacgagcccgccggttcatttcgatgatcgacgctgaacttgaccggaaaggcaaagtggctgctaaatccacagtaggggctctcgaagactgcaaattcctagccagcctgactatggactacctccttagtagctcacagacggctgattccaccaaaacactgtcgttatctagggccgaggatgttcatacatttctgagtgctgccatcaccaatgagcagacttgtcttgaaggacttaaatcaacggcgtccgaaaatggtctttccggtgatcttttcaacgatacaaaactctatggggtgtctcttgcccttttctccaaaggttgggtgccaagaaggcaaagatcgagaccgatttggcaaccacaagccaggttcaaaaagttttttggtttccgtaacggtaaattaccgttaaagatgacggaaagggcacgtgccgtttacaacaccgtgactagaagaaagcttctccaatcggatgcagacgccgttcaggtgagcgacattgtgacggtgatccagaacgggacgggaaacttcacgaccataaacgccgccattgcagctgcaccaaataaaactgacggtagtaacggttacttcttgatctacgtaacggcgggattgtacgaggaatacgtggaagttcccaagaacaagagatatgtgatgatgatcggtgacggcatcaaccagaccgttatcaccggaaacaggagtgtcgttgatggatggacaactttcaattcagccacatttattctatcaggtcccaactttattggtgtaaacataacaatccgcaatacggcaggaccaaccaaaggccaagctgtggcattgaggagtggtggggacttgtctgttttctacagttgtagttttgaagcctatcaagacacgttatacacacattctctcagacagttttatcgtgaatgtgatgtctatggtactgttgattttatatttggtaacgctgcagtggtattacaaaactgtaatttgtatccacgtcaacctcgcaaaggtcaatcgaacgaggttacggctcaaggtcgtactgatccgaaccaaaacactgggacggcaattcatggttgtactataagaccggcagatgatttggctacgagcaactatacagtgaagacttatcttggtcgaccatggaaggaatattctagaaccgttgtcatgcaaacttacatagacgggtttctagaaccgagtggttggaatgcatggtctggtgattttgcattgagcacactttactacgcggaatataataataccggacctggttctgacacgacaaaccgagtcacttggcctggttatcacgtcatcaacgcaactgatgcttccaatttcacggtcaccaatttccttgttggtgaaggttggattggacaaaccggagtgcctttcgtgggtggactgatcgcataatcaaccaaccttatactatatatgatatgttaattagttaaattatttaatcattcatgtgttgtttttttaatcaaataattatttagtggtgcctgattcaatacgatttgtaataactttaacttactattgtacaaccgaatggttttcttcgaaatctaataataatgaacgggtaatca

SEQ ID NO: 99531 - protein, 560 aa, Arabidopsis thaliana
  peptide (1)..(560): Ceres Seq. ID no. 13603139
MSQKLMFLFTLACLSSLPSPFISAQIPAIGNATSPSNICRFAPDPSYCRSVLPNQPGDIYSYGRLSLRRSLSRARRFISMIDAELDRKGKVAAKSTVGALEDCKFLASLTMDYLLSSSQTADSTKTLSLSRAEDVHTFLSAAITNEQTCLEGLKSTASENGLSGDLFNDTKLYGVSLALFSKGWVPRRQRSRPIWQPQARFKKFFGFRNGKLPLKMTERARAVYNTVTRRKLLQSDADAVQVSDIVTVIQNGTGNFTTINAAIAAAPNKTDGSNGYFLIYVTAGLYEEYVEVPKNKRYVMMIGDGINQTVITGNRSVVDGWTTFNSATFILSGPNFIGVNITIRNTAGPTKGQAVALRSGGDLSVFYSCSFEAYQDTLYTHSLRQFYRECDVYGTVDFIFGNAAVVLQNCNLYPRQPRKGQSNEVTAQGRTDPNQNTGTAIHGCTIRPADDLATSNYTVKTYLGRPWKEYSRTVVMQTYIDGFLEPSGWNAWSGDFALSTLYYAEYNNTGPGSDTTNRVTWPGYHVINATDASNFTVTNFLVGEGWIGQTGVPFVGGLIA

SEQ ID NO: 99532 - protein, 555 aa, Arabidopsis thaliana
  peptide (1)..(555): Ceres Seq. ID no. 13603140
MFLFTLACLSSLPSPFISAQIPAIGNATSPSNICRFAPDPSYCRSVLPNQPGDIYSYGRLSLRRSLSRARRFISMIDAELDRKGKVAAKSTVGALEDCKFLASLTMDYLLSSSQTADSTKTLSLSRAEDVHTFLSAAITNEQTCLEGLKSTASENGLSGDLFNDTKLYGVSLALFSKGWVPRRQRSRPIWQPQARFKKFFGFRNGKLPLKMTERARAVYNTVTRRKLLQSDADAVQVSDIVTVIQNGTGNFTTINAAIAAAPNKTDGSNGYFLIYVTAGLYEEYVEVPKNKRYVMMIGDGINQTVITGNRSVVDGWTTFNSATFILSGPNFIGVNITIRNTAGPTKGQAVALRSGGDLSVFYSCSFEAYQDTLYTHSLRQFYRECDVYGTVDFIFGNAAVVLQNCNLYPRQPRKGQSNEVTAQGRTDPNQNTGTAIHGCTIRPADDLATSNYTVKTYLGRPWKEYSRTVVMQTYIDGFLEPSGWNAWSGDFALSTLYYAEYNNTGPGSDTTNRVTWPGYHVINATDASNFTVTNFLVGEGWIGQTGVPFVGGLIA

SEQ ID NO: 99533 - protein, 481 aa, Arabidopsis thaliana; identical to SEQ ID NO: 39933
  peptide (1)..(481): Ceres Seq. ID no. 13603141

SEQ ID NO: 99534 - DNA, 1089 bp, Arabidopsis thaliana
  misc_feature (1)..(1089): Ceres Seq. ID no. 13603142
  misc_feature (1)..(1089): Ortholog of  Ceres SEQ ID NO 15172862 as cited in SEQ ID NO 51943
  misc_feature (1)..(1089): Ortholog of  Ceres SEQ ID NO 12784852 as cited in SEQ ID NO 61543
atactcttcgactcagccgtcctttcgcagaaaccatttggagttggagctttggacgacgacaatggccccgaagaaaggagtgaaggtagctgctaagaagaagaccgcggagaaagtttcaaaccctctattcgagaggaggcctaagcaattcggtattggtggagctttacctcctaagaaggatctctctcgctacatcaaatggcccaaatccatccgtcttcaaaggcaaaagaggatcctgaagcagaggttgaaggtccctccagctcttaaccaattcaccaagactcttgacaagaatcttgctaccagcctcttcaaggtccttctgaagtacaggccagaagacaaagctgccaagaaggagcgtcttgtaaagaaggcccaagctgaagctgagggaaagccttctgagtctaagaagcccattgtagtcaaatacggcctcaaccatgtgacctacctcattgagcagaacaaggcccaacttgttgttattgctcatgatgtcgacccaattgagttggttgtctggttgcctgctctgtgcaggaagatggaagtcccgtactgcattgtcaagggcaaatctcgtcttggagcggttgttcaccagaagactgcttcttgcttgtgtttgaccactgtcaagaacgaggacaagctagagttcagcaaaatcctggaagctatcaaggccaacttcaatgacaagtacgaggagtacaggaagaaatggggaggaggcataatgggatctaagtctcaggcaaagaccaaggcaaaggaaagagttattgcaaaggaggctgcccaaaggatgaattaagaggctagcttcttttgtttgtggtttgctcggattcgtaaaacttaatagagctttttgtttagctggttcttgaagtacctcttttttagttgaaccctttattatggatgttttgcaatttcttgggacagtttcaatgttattcaagctgctggatcctctttggtctctcaaccacttaaaacttgacagtgtgaaattttagccaaatgcttattgcattctggaaagagttataagtttaattc

SEQ ID NO: 99535 - protein, 278 aa, Arabidopsis thaliana
  peptide (1)..(278): Ceres Seq. ID no. 13603143
YSSTQPSFRRNHLELELWTTTMAPKKGVKVAAKKKTAEKVSNPLFERRPKQFGIGGALPPKKDLSRYIKWPKSIRLQRQKRILKQRLKVPPALNQFTKTLDKNLATSLFKVLLKYRPEDKAAKKERLVKKAQAEAEGKPSESKKPIVVKYGLNHVTYLIEQNKAQLVVIAHDVDPIELVVWLPALCRKMEVPYCIVKGKSRLGAVVHQKTASCLCLTTVKNEDKLEFSKILEAIKANFNDKYEEYRKKWGGGIMGSKSQAKTKAKERVIAKEAAQRMN

SEQ ID NO: 99536 - protein, 257 aa, Arabidopsis thaliana; identical to SEQ ID NO: 27385
  peptide (1)..(257): Ceres Seq. ID no. 13603144

SEQ ID NO: 99537 - DNA, 1456 bp, Arabidopsis thaliana
  misc_feature (1)..(1456): Ceres Seq. ID no. 13603173
  misc_feature (1)..(1456): Ortholog of  Ceres SEQ ID NO 14313155 as cited in SEQ ID NO 54706
  misc_feature (1)..(1456): Ortholog of  Ceres SEQ ID NO 13639022 as cited in SEQ ID NO 59811
gtctctctcccggagatctctctttctcttcttctccatccttcttctctcggcgcgcgcttcatccccaccaccttcgaattcgtgccctttgagggaagctgctaggatgggtgtgaagcaggctctaaggagcattgatgcgtttccaagagcagaggatcatttgcttcagaagacacaatctggcgctgttgtatctattgttggacttcttataatggctactttgttcttacacgagctgagttattatcttaacacacttacagtgcaccagatgtcagtggacttaaagcgtggagaaactcttccaattcatgtaaatatgacgtttccatctttaccttgtgatgtactgagcgtagatgctatcgacatgtcagggaagcatgaagtggatcttgatacaaacatttggaagctccgtctcaacagtcatggtcatatcataggcacagaatatatatctgatcttgttgaaaaggggcatgagcatggccactcacctcacaagcatgatggcaaagaagaacacaagaatgagactgaaaccgaagcattgaatattcttggctttgaccaagctgctgagactatgattaaaaaagtgaagcaagcattggcagatggagaaggatgtcgggtttatggtgtcctagatgtacaacgggttgccggaaacttccatatttcagttcatgggctgaacatctatgttgctcagatgatatttggcgggtccaaaaacgtaaacgtgagccatatgattcacgatctatcatttgggccgaaataccccggaattcacaacccacttgatgacaccaaccgaatactccatgacaccagtggaacattcaaatactatattaagattgttcccacagaatatagatatctttcaaaagacgtactgtcaacaaatcagtactctgtaactgaatatttcacgccaatgactgaattcgaccgtacatggccagctgtttacttcttatatgatctttcacctatcactgtgaccatcaaggaagaacgccgtagttttctccacttaatcactcgtctttgcgctgtattaggcggtacatttgctttgacaggaatgttagatcgttggatgttccgctttattgaatctttcaacaagaagccgagtactagagcgtaaactagctgaaacagagacaaaacaatgagaaacaaaaaaaaccaaaggaaggaagaagaatctctcaaatcccaaaacttgtatctgccttcttcagacaacaacacccaccagagattccaggattgatgattacattactcagaaactctagaatccatggatatagtttttttttgagtctctcttatgtattactctgattatctctggttaaactagtagagttaatttgtaatttttattcaccttgcttcctgggattttaacatttttgcatct

SEQ ID NO: 99538 - protein, 390 aa, Arabidopsis thaliana
  peptide (1)..(390): Ceres Seq. ID no. 13603174
SLSRRSLFLFFSILLLSARASSPPPSNSCPLREAARMGVKQALRSIDAFPRAEDHLLQKTQSGAVVSIVGLLIMATLFLHELSYYLNTLTVHQMSVDLKRGETLPIHVNMTFPSLPCDVLSVDAIDMSGKHEVDLDTNIWKLRLNSHGHIIGTEYISDLVEKGHEHGHSPHKHDGKEEHKNETETEALNILGFDQAAETMIKKVKQALADGEGCRVYGVLDVQRVAGNFHISVHGLNIYVAQMIFGGSKNVNVSHMIHDLSFGPKYPGIHNPLDDTNRILHDTSGTFKYYIKIVPTEYRYLSKDVLSTNQYSVTEYFTPMTEFDRTWPAVYFLYDLSPITVTIKEERRSFLHLITRLCAVLGGTFALTGMLDRWMFRFIESFNKKPSTRA

SEQ ID NO: 99539 - protein, 354 aa, Arabidopsis thaliana; identical to SEQ ID NO: 41938
  peptide (1)..(354): Ceres Seq. ID no. 13603175

SEQ ID NO: 99540 - protein, 317 aa, Arabidopsis thaliana; identical to SEQ ID NO: 41939
  peptide (1)..(317): Ceres Seq. ID no. 13603176

SEQ ID NO: 99541 - DNA, 1342 bp, Arabidopsis thaliana
  misc_feature (1)..(1342): Ceres Seq. ID no. 13603177
  misc_feature (1)..(1342): Ortholog of  Ceres SEQ ID NO 13654187 as cited in SEQ ID NO 68219
gtataaagacgacaaagtaaaccaaaaaaaaaaagagttctcctacaattttcctaaattcttggatttgagatttcactttttccgatttgaaacaatgatgataactcgcggtggagccaaggcggcgaaatcgctgttagtggcggctggaccacgtttgttctcgacggtccgtacggtttcgtctcacgaggctttatcagcaagccatattttgaagcctggtgttacatctgcttggatatggactagagctccgacgattggaggtatgagattcgctagcacgatcactctgggagagaaaactccgatgaaggaggaggacgcgaatcagaagaaaacagagaacgaatccaccggtggagacgccgccggaggtaataacaagggagataaaggaatcgcgagctattggggtgttgaacctaataagattactaaagaagatggttctgaatggaagtggaactgtttcaggccatgggaaacgtataaagctgatataacgatagatctgaagaagcatcatgttccaacgacgtttcttgatagaatagcttattggactgttaaatctcttcgttggcctaccgatttgttcttccagaggagatatggatgtcgagctatgatgcttgaaactgtagcagcagtacctggaatggttggaggaatgttactacactgcaaatcgcttcgacgttttgagcaaagtggaggatggattaaggctcttcttgaggaagcagagaatgagagaatgcatcttatgacattcatggaagtcgcgaaaccgaaatggtacgagagagcgctcgtgatcactgtgcaaggagtcttcttcaacgcttatttccttggttacttaatctctcccaagtttgctcatcgtatggttgggtaccttgaagaagaagcgatccattcttatactgagtttctcaaggaacttgacaaaggtaacattgagaatgttcctgctccggctattgctattgattactggaggcttcctgctgatgcgacacttcgtgatgttgtgatggttgttcgtgctgacgaggctcatcaccgtgatgtaaaccattttgcatctgatattcactaccaaggtcgtgaactaaaggaagctccagctccaattgggtatcattgattcgattaaaagaagagctttttctcaagtttaaaactttgttctaaagaatttaagttctttgacttgtatatacatcatcacctctgcttaagccatacttggattcggctttctttgaatgttgctacgaatgttctgatttcttctttacttttcctgtcaatgggcttttgggct

SEQ ID NO: 99542 - protein, 386 aa, Arabidopsis thaliana
  peptide (1)..(386): Ceres Seq. ID no. 13603178
YKDDKVNQKKKEFSYNFPKFLDLRFHFFRFETMMITRGGAKAAKSLLVAAGPRLFSTVRTVSSHEALSASHILKPGVTSAWIWTRAPTIGGMRFASTITLGEKTPMKEEDANQKKTENESTGGDAAGGNNKGDKGIASYWGVEPNKITKEDGSEWKWNCFRPWETYKADITIDLKKHHVPTTFLDRIAYWTVKSLRWPTDLFFQRRYGCRAMMLETVAAVPGMVGGMLLHCKSLRRFEQSGGWIKALLEEAENERMHLMTFMEVAKPKWYERALVITVQGVFFNAYFLGYLISPKFAHRMVGYLEEEAIHSYTEFLKELDKGNIENVPAPAIAIDYWRLPADATLRDVVMVVRADEAHHRDVNHFASDIHYQGRELKEAPAPIGYH

SEQ ID NO: 99543 - protein, 354 aa, Arabidopsis thaliana; identical to SEQ ID NO: 40785
  peptide (1)..(354): Ceres Seq. ID no. 13603179

SEQ ID NO: 99544 - protein, 353 aa, Arabidopsis thaliana; identical to SEQ ID NO: 40786
  peptide (1)..(353): Ceres Seq. ID no. 13603180

SEQ ID NO: 99545 - DNA, 661 bp, Arabidopsis thaliana
  misc_feature (1)..(661): Ceres Seq. ID no. 13603181
  misc_feature (1)..(661): Ortholog of  Ceres SEQ ID NO 12623585 as cited in SEQ ID NO 60992
  misc_feature (1)..(661): Ortholog of  Ceres SEQ ID NO 12625545 as cited in SEQ ID NO 63154
ttgtttcttcatcttcctcactctctgcgccgcgtttgcttccatcgttctctcgattgtttcctctcaagcgaagcttcttcttcttcgatcttcttcctcgtgtgtggattcgtttctgaaataggatcgaagtaatggccagcaaatctggaagcggtggcctaagagaaccgccgaatgagcaagctgttttgaacatgtatgaaggcaagagatcagagctaagccaaatctactccaacataaccgacctcgagatgcaagtgagcgaacattctctggtcattaacgccattcagcctctcgaccaatcgaggaaatgcttccgcatgataggaggcgttcttgtcgaaagaaccatcaaagaggtactaccagctgtccaacgtaacaaggacggacttgaagaggttgtgaggaagctatacgagacattggagaaaaagaagaaagatcttacagagtttgaagctaagtataagatcaggataacgaaacaagaagataacaaggaaggaggtaacaagaaggaaggtaatgctcaaggtgttcttgttggagctgccagttcaagccagtaaaactctatatttggcagtttgttttactgttgtatctcttttttggatcttatggttaaaagccgtaaactttgctg

SEQ ID NO: 99546 - protein, 148 aa, Arabidopsis thaliana; identical to SEQ ID NO: 37084
  peptide (1)..(148): Ceres Seq. ID no. 13603182

SEQ ID NO: 99547 - protein, 127 aa, Arabidopsis thaliana; identical to SEQ ID NO: 37085
  peptide (1)..(127): Ceres Seq. ID no. 13603183

SEQ ID NO: 99548 - protein, 107 aa, Arabidopsis thaliana; identical to SEQ ID NO: 37086
  peptide (1)..(107): Ceres Seq. ID no. 13603184

SEQ ID NO: 99549 - DNA, 995 bp, Arabidopsis thaliana
  misc_feature (1)..(995): Ceres Seq. ID no. 13603185
  misc_feature (1)..(995): Ortholog of  Ceres SEQ ID NO 14311773 as cited in SEQ ID NO 59245
  misc_feature (1)..(995): Ortholog of  Ceres SEQ ID NO 15225880 as cited in SEQ ID NO 0
taatgttgctctcacactcatgcacctctcttatctttataggagttgttgtcacttttgtatgtaacacaaaacggaacataacataacaaaacagagagatgagtcaagaagaacaaccaaagcggccacaagagccagtcacttacggtgacgtttttgaagtctccggtgaactcgctgataagcctatagcgccggaggatgcaaacatgatgcaagcagcggagacacgtgtgtttggccacactcagaaaggcggtgcagcggcagtcatgcagtctgcagccactgctaataaacgcggtggctttgtccatccaggtgacacaactgatctcgccgctgaacgaggcgtcacagtggcgcaaactgacgtccctggtgcacgtgtcacaacagaattcgtcggtggacaggtcgttggacaatacgtcgagcctaggccagtggcgactgcggcagctatggaagcagaagttgtgggtttgagtttacaaagtgcaataacgattggagaagcattggaagcgactgtgcaaaccgctggaaacaaaccggtggatcaaagcgacgcagcagcgattcaagcggcagaggttagagcttgtggcactaatgtgattgctcctggtggaatcgccgcttctgctcaatcagcagcaaatcacaacgctaccatagaccgtgatgaggataaaatcaagctcattgatgttttggcggggtgcgaccgggaagttagccgcagataaagctgtgaccaggcaggacgcagagggagtggtgagcgctgagctgaggaacaatcctaatttgtctactcaccctggtggtgtagcggcttctattactgccgccgctaggcttaacgagagagctgatatatgaaaaatcctgcgagagggagatgttttggttctgttgttcaaaaaagttcagtcataatgtaaaaaaatggtcactttccggttataaagttgaaatctttctct

SEQ ID NO: 99550 - protein, 217 aa, Arabidopsis thaliana
  peptide (1)..(217): Ceres Seq. ID no. 13603186
MSQEEQPKRPQEPVTYGDVFEVSGELADKPIAPEDANMMQAAETRVFGHTQKGGAAAVMQSAATANKRGGFVHPGDTTDLAAERGVTVAQTDVPGARVTTEFVGGQVVGQYVEPRPVATAAAMEAEVVGLSLQSAITIGEALEATVQTAGNKPVDQSDAAAIQAAEVRACGTNVIAPGGIAASAQSAANHNATIDRDEDKIKLIDVLAGCDREVSRR

SEQ ID NO: 99551 - protein, 180 aa, Arabidopsis thaliana
  peptide (1)..(180): Ceres Seq. ID no. 13603187
MMQAAETRVFGHTQKGGAAAVMQSAATANKRGGFVHPGDTTDLAAERGVTVAQTDVPGARVTTEFVGGQVVGQYVEPRPVATAAAMEAEVVGLSLQSAITIGEALEATVQTAGNKPVDQSDAAAIQAAEVRACGTNVIAPGGIAASAQSAANHNATIDRDEDKIKLIDVLAGCDREVSRR

SEQ ID NO: 99552 - protein, 179 aa, Arabidopsis thaliana
  peptide (1)..(179): Ceres Seq. ID no. 13603188
MQAAETRVFGHTQKGGAAAVMQSAATANKRGGFVHPGDTTDLAAERGVTVAQTDVPGARVTTEFVGGQVVGQYVEPRPVATAAAMEAEVVGLSLQSAITIGEALEATVQTAGNKPVDQSDAAAIQAAEVRACGTNVIAPGGIAASAQSAANHNATIDRDEDKIKLIDVLAGCDREVSRR

SEQ ID NO: 99553 - DNA, 1030 bp, Arabidopsis thaliana
  misc_feature (1)..(1030): Ceres Seq. ID no. 13603189
  misc_feature (1)..(1030): Ortholog of  Ceres SEQ ID NO 13594700 as cited in SEQ ID NO 51982
  misc_feature (1)..(1030): Ortholog of  Ceres SEQ ID NO 14309538 as cited in SEQ ID NO 52606
agaggggtagtttggtaaattttcaaatgcccttatctcatttccgatcctccttcttcttgctaccgccttcgcacccattcataaaaaaggaaagacgcaatcttttcttgtctcttccattgcttcaaatcctcctaataaagctttcctctttcactttctaatctctttaatccgtttaaatccaatcccaaatacagattttgattacaaaaatctaacattttgctgatttgtgttttagggttctctcgtgttttttatgattttgattcccgtaaagattcaatcacttttctcatatctcttgttactgaatttgatccaatcgatcgataaaccaaacccagaagctatgagagtgcacccaattcccagaaacatcaacaacacattgatccatcatcatcatcataacccgacccgagaacccggaaagaatctccgacgattaccacatatcttcaaccgtgttctggagctaccattgaggtcagaagcagatgtagcagtggaagagagacacgactgttttcgatttgtggcggagacggtaggtctctgtaacggcgatggagaaatgagggcttatatggttgagattcatcctggtataaccaagatcgttgtgaggacaaatgggtcttcttctcttggtttgtctttagacgaattagagcttgacgtgtggcgttttaggttaccggaatcaactaggcctgagcttgttactgttgcttgtgttgatggtgatttgattgttactgtgcctaagaatgctgaagaagaagatgatgatggtggtggtggtgattttggacaaggtattggtagtggaaggcttgtgcttgttcagtgaatcaaagtaatgtcctctatgtaacatgagaagaagactaatctctaatcttcttcgtttcgttgatattgtgtagccttctgtttttgttgttggcaataaaagaaaagattgaatctttgatgatctcttattttgtaagatcaacaagggttgtttaaggttgta

SEQ ID NO: 99554 - protein, 198 aa, Arabidopsis thaliana; identical to SEQ ID NO: 29617
  peptide (1)..(198): Ceres Seq. ID no. 13603190

SEQ ID NO: 99555 - protein, 167 aa, Arabidopsis thaliana; identical to SEQ ID NO: 29618
  peptide (1)..(167): Ceres Seq. ID no. 13603191

SEQ ID NO: 99556 - DNA, 1525 bp, Arabidopsis thaliana
  misc_feature (1)..(1525): Ceres Seq. ID no. 13603204
  misc_feature (1)..(1525): Ortholog of  Ceres SEQ ID NO 15172446 as cited in SEQ ID NO 60392
aaatctttcgggtcaaaatttccgaaccctaactttagccccaaattagagagagatgcagaaacgggagcttgggaaatccggcggtaattccggtggatcttcgggtccaccagcgaagagaggccgtcccttcggtagtacaagtgctaactcagctgctgctgctgcagcggcggcagcagcggacgcgatgtcaccgtcagctttacttggtccttctcttctagttcacaattccttcgtcgagcagaacaatagaagaatagttcttgcgttgcagagtggtttgaagagtgaggtgacatgggcattgaacacacttacgttgctttccttcaaggaaaaagaagatattcgaagagatgtcatgcctcttgctaagatagctggcttgcttgatgcccttctcttaattatagatgattggcgtgacatagctctcccaaaggacctgacaagaggaactagagttagaactttaggtacaaatgcttcagttacgggatttggcaatgagtatgatgctctagcctctattcaaccccctggatccgggattggttcttctgctgctgaggcattaggaaaaaagagcactggtaaacatcagtcatctcagtggtggatggaagaggatggtttgtttaatctagacgatgaagggagatcagagaaacaaatgtgtgctattgctgcatcgaacgttatccgcaacttctccttcatgcctgataatgaagttgtaatggctcagcatcgccattgcttagaaactgttttccagtgcatacacgatcatatgaccgaggatgaagagctggtcacaaactcgctagagacaattgtaaacctagcgcatttgatggatcttcgaattttcagctcgcttaagcagtcatacatcaacataaatgaaaagaaagctgttcaagctgtggtcggaatcctcaattcttctgtcaaagcttggaattgtgctgctgctgagttgctagggcgtttgataatcaatccggacaatgaacctttcattagtcctttaattccgcagatacacaagcgactaatcgatcttttgagcatacaagccgttgatgcacaagctgcagctgttggagcactctacaatctcgtggaagttaacatggattgcagattaaagctagcaagtgagagatgggcggttgataggttgctgaaagtgataaagactccgcatccggttccagaagtatgtaggaaagctgcaatgatccttgagaaccttgtctcggagcctcaaaacagaggattgctactcgcgtatgagaatgctttcgctgagctgctttttcaagagggtaagtattctgattcatttgctaggattttgtatgaactcactgctagatctaatagcagagttgcttcagctagaggaatctggggcatgtaaaagtcttctctagattagtgggtttgattaattgattgtgttgtaaactttaatcatttgctatgtattaaaaaagcagtgttgttg

SEQ ID NO: 99557 - protein, 460 aa, Arabidopsis thaliana; identical to SEQ ID NO: 41316
  peptide (1)..(460): Ceres Seq. ID no. 13603205

SEQ ID NO: 99558 - protein, 414 aa, Arabidopsis thaliana; identical to SEQ ID NO: 41317
  peptide (1)..(414): Ceres Seq. ID no. 13603206

SEQ ID NO: 99559 - protein, 355 aa, Arabidopsis thaliana; identical to SEQ ID NO: 41318
  peptide (1)..(355): Ceres Seq. ID no. 13603207

SEQ ID NO: 99560 - DNA, 1196 bp, Arabidopsis thaliana
  misc_feature (1)..(1196): Ceres Seq. ID no. 13603208
  misc_feature (1)..(1196): Ortholog of  Ceres SEQ ID NO 14304969 as cited in SEQ ID NO 53193
  misc_feature (1)..(1196): Ortholog of  Ceres SEQ ID NO 14314851 as cited in SEQ ID NO 54014
  misc_feature (1)..(1196): Ortholog of  Ceres SEQ ID NO 14307442 as cited in SEQ ID NO 54239
  misc_feature (1)..(1196): Ortholog of  Ceres SEQ ID NO 13638897 as cited in SEQ ID NO 55839
  misc_feature (1)..(1196): Ortholog of  Ceres SEQ ID NO 14302561 as cited in SEQ ID NO 56543
  misc_feature (1)..(1196): Ortholog of  Ceres SEQ ID NO 15177758 as cited in SEQ ID NO 57504
  misc_feature (1)..(1196): Ortholog of  Ceres SEQ ID NO 15177710 as cited in SEQ ID NO 59217
  misc_feature (1)..(1196): Ortholog of  Ceres SEQ ID NO 13596958 as cited in SEQ ID NO 63319
  misc_feature (1)..(1196): Ortholog of  Ceres SEQ ID NO 12614814 as cited in SEQ ID NO 68816
cttcccctcttaccttttcagagagagaaacaatatttctaatctattacaagtaacatgatcggccaacttatgaacctcaaggccacggagctctgtctcggcctccccggcggcgctgaagcagttgagagtcctgccaaatcggcggtgggaagcaagagaggcttctccgaaaccgttgatctcatgctcaatcttcaatctaacaaagaaggctccgttgatctcaaaaacgtttctgctgttcccaaggagaagactacccttaaagatccttctaagcctcctgctaaagcacaagtggtgggatggccacctgtgaggaactacaggaagaacatgatgactcagcagaagaccagtagtggtgcggaggaggccagcagtgagaaggccgggaactttggtggaggagcagccggagccggcttggtgaaggtctccatggacggtgctccatatctgaggaaagttgacctcaagatgtacaaaagctaccaggatctttctgatgcattggccaaaatgttcagctcctttactatgggaaactatggagcacaaggaatgatagatttcatgaacgagagcaagctaatgaatctgctgaatagctctgagtatgtgccaagctacgaggacaaagatggtgactggatgctcgttggcgatgtcccatgggaaatgtttgtcgagtcttgcaaacgtttgcgcattatgaagggatctgaagcagttggacttgctccgagagcaatggagaagtactgcaagaacagatcttgaattaataataaaaaaaaagaagcatcaatgatcaacaatatgacgggttcttgattttatatgtatttttatgattgtatgtggctatcacctatatatgtgtgttgtaattttaaatacttgatgggtatatagggcagtattttaccagtaagatgtggacaaacttgtaatgtgaccaaaagagaggaaacttcaatatctctgtgtttgtgtcatatttattgcccaacatgtgtctgtcggtttgatgatcaatcacaacttgatatgtgcatacatataaatgtgtgtatgtaggtgtgtgtacatgtacatgtgttttgatccctactctgctacttgtcgtttcttgtgtgtgttatctaatagttttttcccaaaatgaataattcgttgttatgttt

SEQ ID NO: 99561 - protein, 243 aa, Arabidopsis thaliana; identical to SEQ ID NO: 24397
  peptide (1)..(243): Ceres Seq. ID no. 13603209

SEQ ID NO: 99562 - protein, 238 aa, Arabidopsis thaliana; identical to SEQ ID NO: 24398
  peptide (1)..(238): Ceres Seq. ID no. 13603210

SEQ ID NO: 99563 - protein, 199 aa, Arabidopsis thaliana; identical to SEQ ID NO: 24399
  peptide (1)..(199): Ceres Seq. ID no. 13603211

SEQ ID NO: 99564 - DNA, 1552 bp, Arabidopsis thaliana
  misc_feature (1)..(1552): Ceres Seq. ID no. 13603212
  misc_feature (1)..(1552): Ortholog of  Ceres SEQ ID NO 13597446 as cited in SEQ ID NO 64098
  misc_feature (1)..(1552): Ortholog of  Ceres SEQ ID NO 15226246 as cited in SEQ ID NO 68314
cttttggatcgcttccgttcaatgtaaccggcgaaacagagcaatctgaaattatcttagggctatagttatggatattttcatggatttcttcaataaaccttctgttacagagacattcgtcgacgttttgctatgtgcagttccgatttgggtcactgttatgatcgggcttctgatcggttggtcttggcgtcctagatggactagcttggtttatttaggtttccgttctaagcttcggtttctatgtactgttcctcctggatttggtgctcgtcgtatttggcttgctttcaccgctctctctgctttttccgtttgttcaacctccaataaatcctcggttaataacggttcctctaaaccggtcgaagaagaagcattttcacgagctagtgataaagttacagagaaagagaaagatgttgtgacagagaaggatttagagcatttgttgcatctgcttgaagctggaaatgctagttttgagtggcaatctatgatggataagtctactccgaatatgagctatcaagcttggcgtcatgagcctgagataggtcctgttgtttatcgtagtcgaactgtttttgaggatgtaacaccagacattgttagggatttcttctgggacgatgagtttcgacctaaatgggatactatgcttgcttacttcaaaactttagaggaagatcctaagacaggaactaccattgttcattggattaaaaagttcccattcttctgtagtgaccgggaatacatcattggtaggagaatatgggaatctggaagaaaatattatgctgtgactaagggagtaccgtataaagctttatcaaagcgtgataagccgaggcgagtcgaactttatttctcaagttggattatcaatgcagttgaatcaagaaaaggtgatgggcaaatgacagcttgtgaagtctctcttgttcactacgaagacatgggaatcccaaaagatgtagcaaagttaggagtccgtcatggcatgtggggagctgtaaagaagctaaactctggcttaagggcgtaccaaagcgctagaaaacctgggacgtcgctctcacggagtgcgcagatggcaagtatcaccacaaagctgaacatggatttggtggaaacatctggggcagaggacgaagagagaggacgagcagtagagaatgcgaggaaacaaaatgatcagttcggtgtagactggaaatggatcgttgtaggaggagtagctttggcttgtgggcttcattctagtgctataggtaaggcgttaatggttggagctggacagagacttgctcgtaggtgagatcttttgcctgagagtttcattatcttatctgtttccctggagaattcttagaccaacacagaaacactatattactgatatggattgtgttttcttgtaactgcactgaaatgagcatagtggtttcgaaagcaaaccatgcagagtagttttgaagcaagggcaaacatttggtcgaatatttcttgtaatacggtttaagattctggagacggtttt

SEQ ID NO: 99565 - protein, 419 aa, Arabidopsis thaliana
  peptide (1)..(419): Ceres Seq. ID no. 13603213
MDIFMDFFNKPSVTETFVDVLLCAVPIWVTVMIGLLIGWSWRPRWTSLVYLGFRSKLRFLCTVPPGFGARRIWLAFTALSAFSVCSTSNKSSVNNGSSKPVEEEAFSRASDKVTEKEKDVVTEKDLEHLLHLLEAGNASFEWQSMMDKSTPNMSYQAWRHEPEIGPVVYRSRTVFEDVTPDIVRDFFWDDEFRPKWDTMLAYFKTLEEDPKTGTTIVHWIKKFPFFCSDREYIIGRRIWESGRKYYAVTKGVPYKALSKRDKPRRVELYFSSWIINAVESRKGDGQMTACEVSLVHYEDMGIPKDVAKLGVRHGMWGAVKKLNSGLRAYQSARKPGTSLSRSAQMASITTKLNMDLVETSGAEDEERGRAVENARKQNDQFGVDWKWIVVGGVALACGLHSSAIGKALMVGAGQRLARR

SEQ ID NO: 99566 - protein, 415 aa, Arabidopsis thaliana
  peptide (1)..(415): Ceres Seq. ID no. 13603214
MDFFNKPSVTETFVDVLLCAVPIWVTVMIGLLIGWSWRPRWTSLVYLGFRSKLRFLCTVPPGFGARRIWLAFTALSAFSVCSTSNKSSVNNGSSKPVEEEAFSRASDKVTEKEKDVVTEKDLEHLLHLLEAGNASFEWQSMMDKSTPNMSYQAWRHEPEIGPVVYRSRTVFEDVTPDIVRDFFWDDEFRPKWDTMLAYFKTLEEDPKTGTTIVHWIKKFPFFCSDREYIIGRRIWESGRKYYAVTKGVPYKALSKRDKPRRVELYFSSWIINAVESRKGDGQMTACEVSLVHYEDMGIPKDVAKLGVRHGMWGAVKKLNSGLRAYQSARKPGTSLSRSAQMASITTKLNMDLVETSGAEDEERGRAVENARKQNDQFGVDWKWIVVGGVALACGLHSSAIGKALMVGAGQRLARR

SEQ ID NO: 99567 - protein, 388 aa, Arabidopsis thaliana
  peptide (1)..(388): Ceres Seq. ID no. 13603215
MIGLLIGWSWRPRWTSLVYLGFRSKLRFLCTVPPGFGARRIWLAFTALSAFSVCSTSNKSSVNNGSSKPVEEEAFSRASDKVTEKEKDVVTEKDLEHLLHLLEAGNASFEWQSMMDKSTPNMSYQAWRHEPEIGPVVYRSRTVFEDVTPDIVRDFFWDDEFRPKWDTMLAYFKTLEEDPKTGTTIVHWIKKFPFFCSDREYIIGRRIWESGRKYYAVTKGVPYKALSKRDKPRRVELYFSSWIINAVESRKGDGQMTACEVSLVHYEDMGIPKDVAKLGVRHGMWGAVKKLNSGLRAYQSARKPGTSLSRSAQMASITTKLNMDLVETSGAEDEERGRAVENARKQNDQFGVDWKWIVVGGVALACGLHSSAIGKALMVGAGQRLARR

SEQ ID NO: 99568 - DNA, 774 bp, Arabidopsis thaliana
  misc_feature (1)..(774): Ceres Seq. ID no. 13603220
  misc_feature (1)..(774): Ortholog of  Ceres SEQ ID NO 12635789 as cited in SEQ ID NO 0
aaaaccctagttttttgctctctcgaagttccgtgcgactctctgctcgagcaagatctcctaccgatacaatgattatctcagaggctaaccgcaaagaaatctgcaagtacctcttcaaagaaggagtttgctttgcgaagaaggatttcaatcttgctaagcatccgttgatcgatgtccccaacctacaagtgattaagcttatgcagagtttcaaatccaaggagtatgttagggagacatttgcctggatgcattactattggtttttgaccaatgaagggatcgagttcttgagaacttatcttaatcttccatctgatgttgttcctgctactttgaagaagtcagctaagcctggtggtcgtccatttggtggcccacctggtgatcgctcaagaggacctcgccatgaaggaggagaccgtcccaggtttggtgaccgtgatgggtaccgtgcaggtcctcgagctggtggtgagtttggaggtgaaaagggtggagctcccgcagattaccagccatctttccaaggaagtggccgtggttttggccgtggtgctggtggctacagcgcagctgcaccatctggttcaggtttgccttgaaaaagaaatgtctttaggtgacagtaagaccatggaggagttttcagctttaaattttgcttttgtaattcagattccggaatccttcataatctctatctgagtttagttttgttgttgaatcaaacatccgatttaaagttatgttcattccatcttctct

SEQ ID NO: 99569 - protein, 202 aa, Arabidopsis thaliana
  peptide (1)..(202): Ceres Seq. ID no. 13603221
NPSFLLSRSSVRLSARARSPTDTMIISEANRKEICKYLFKEGVCFAKKDFNLAKHPLIDVPNLQVIKLMQSFKSKEYVRETFAWMHYYWFLTNEGIEFLRTYLNLPSDVVPATLKKSAKPGGRPFGGPPGDRSRGPRHEGGDRPRFGDRDGYRAGPRAGGEFGGEKGGAPADYQPSFQGSGRGFGRGAGGYSAAAPSGSGLP

SEQ ID NO: 99570 - protein, 179 aa, Arabidopsis thaliana; identical to SEQ ID NO: 37920
  peptide (1)..(179): Ceres Seq. ID no. 13603222

SEQ ID NO: 99571 - protein, 134 aa, Arabidopsis thaliana; identical to SEQ ID NO: 37921
  peptide (1)..(134): Ceres Seq. ID no. 13603223

SEQ ID NO: 99572 - DNA, 1332 bp, Arabidopsis thaliana
  misc_feature (1)..(1332): Ceres Seq. ID no. 13603224
  misc_feature (1)..(1332): Ortholog of  Ceres SEQ ID NO 14312324 as cited in SEQ ID NO 60453
  misc_feature (1)..(1332): Ortholog of  Ceres SEQ ID NO 12624791 as cited in SEQ ID NO 63574
  misc_feature (1)..(1332): Ortholog of  Ceres SEQ ID NO 12780574 as cited in SEQ ID NO 65624
ctacacaacacagctttttaaacccaacagagcaaaaaagcaaaagattcaacaaaaatctcctcaaattctattcatggtctctagaaattctgacggatatttcttggatccgaccggtatgactgttcctggtctcggaccttcctttacagccgccgtttcttcttcttcttcaccaacgacttcttctacggccgtggctgtggcggatgtgacggcgatggtttcttcttcggaggaggatttgagtaagaagattaggaagccttatactattactaagtctagagagagctggacggagcctgagcatgataaattccttgaagctcttcaattgtttgatagagactggaagaagattgaagcttttattggttcaaagacagtgattcagatacgaagtcatgctcagaagtattttcttaaggtacaaaagagtgggaccggtgaacatctccctcctcctcgacctaaaaggaaagccgctcatccatatcctcagaaggctcacaagaatgtgcaactgcaagtaccagggtcattcaagtcaacatctgaaccaaatgacccaagttttatgtttaggcctgagtcttcttcaatgctgatgacttcgccaaccactgctgctgcggctccatggacaaataatgcgcaaacaattagcttcactcccctcccaaaaggagcaggagctaataacaattgttctagtagttctgaaaatactccaagaccacgatccaacagggacgcaagagaccatggaaatgttggccattcattaagagttttaccggactttgcccaagtatacggcttcattggaagtgtgtttgacccatatgcaagtaatcatctacaaaagctgaagaagatggaccccatagatgttgaaacagtgttactattgatgagaaatctatccatcaacttgtctagtcctgactttgaggatcatagacggcttctttcgtcttatgatatcggatctgagacagcaactgatcatggtggagtgaataaaaccttaaacaaagacccacctgaaatctctacttaatgtttaatagaagaggagaactgtgaaaagtgtctcaggtgagccagccaacaaccagatggctacaaaatacagagattctgttgtggttttttgtttgtacataggaagaagatgaagctgatgttactcggtttagttgttgttactgttataaatagtctgttgggttaaggatggtatatgtacagtgtattatcataagttagatctcaagtttaaacatatgtatcagtctctttgatgggagaccaaaatctctt

SEQ ID NO: 99573 - protein, 355 aa, Arabidopsis thaliana
  peptide (1)..(355): Ceres Seq. ID no. 13603225
YTTQLFKPNRAKKQKIQQKSPQILFMVSRNSDGYFLDPTGMTVPGLGPSFTAAVSSSSSPTTSSTAVAVADVTAMVSSSEEDLSKKIRKPYTITKSRESWTEPEHDKFLEALQLFDRDWKKIEAFIGSKTVIQIRSHAQKYFLKVQKSGTGEHLPPPRPKRKAAHPYPQKAHKNVQLQVPGSFKSTSEPNDPSFMFRPESSSMLMTSPTTAAAAPWTNNAQTISFTPLPKGAGANNNCSSSSENTPRPRSNRDARDHGNVGHSLRVLPDFAQVYGFIGSVFDPYASNHLQKLKKMDPIDVETVLLLMRNLSINLSSPDFEDHRRLLSSYDIGSETATDHGGVNKTLNKDPPEIST

SEQ ID NO: 99574 - protein, 330 aa, Arabidopsis thaliana
  peptide (1)..(330): Ceres Seq. ID no. 13603226
MVSRNSDGYFLDPTGMTVPGLGPSFTAAVSSSSSPTTSSTAVAVADVTAMVSSSEEDLSKKIRKPYTITKSRESWTEPEHDKFLEALQLFDRDWKKIEAFIGSKTVIQIRSHAQKYFLKVQKSGTGEHLPPPRPKRKAAHPYPQKAHKNVQLQVPGSFKSTSEPNDPSFMFRPESSSMLMTSPTTAAAAPWTNNAQTISFTPLPKGAGANNNCSSSSENTPRPRSNRDARDHGNVGHSLRVLPDFAQVYGFIGSVFDPYASNHLQKLKKMDPIDVETVLLLMRNLSINLSSPDFEDHRRLLSSYDIGSETATDHGGVNKTLNKDPPEIST

SEQ ID NO: 99575 - protein, 315 aa, Arabidopsis thaliana
  peptide (1)..(315): Ceres Seq. ID no. 13603227
MTVPGLGPSFTAAVSSSSSPTTSSTAVAVADVTAMVSSSEEDLSKKIRKPYTITKSRESWTEPEHDKFLEALQLFDRDWKKIEAFIGSKTVIQIRSHAQKYFLKVQKSGTGEHLPPPRPKRKAAHPYPQKAHKNVQLQVPGSFKSTSEPNDPSFMFRPESSSMLMTSPTTAAAAPWTNNAQTISFTPLPKGAGANNNCSSSSENTPRPRSNRDARDHGNVGHSLRVLPDFAQVYGFIGSVFDPYASNHLQKLKKMDPIDVETVLLLMRNLSINLSSPDFEDHRRLLSSYDIGSETATDHGGVNKTLNKDPPEIST

SEQ ID NO: 99576 - DNA, 969 bp, Arabidopsis thaliana
  misc_feature (1)..(969): Ceres Seq. ID no. 13603249
  misc_feature (1)..(969): Ortholog of  Ceres SEQ ID NO 14305398 as cited in SEQ ID NO 60056
gagttcgtgaaaaagagacgtcgcatcgcaccgccgtcgccatttccaccgtcgtagcattgccgcttcactgactgtcgcactgaatattgttgaatcgagaaaatggcttatgttgggcaaagtagaaacgtgattcggcatgtagtctcgagaggaacagcttatcacaagtatgaaaatgcgattcatcatcctctccttttcgcttgtcaaggagttcgatacagaaaattagaagttattcttacaacgggcattgagaagcttggcaaagctggtgagactgtgaaggtagctcctggatacttcaggaatcaccttatgccaaaacttcttgctgtgcctaacattgacaagtatgcttatctcatccgagagcaacgcaagatgtataatcatgaagaagtaaaggaggaggttaaggtggttcataaaacttctgaagtccagacaaaagagtatgaaaaggctgcaaagcgtctggcgaatgctaatttggtattgaggaagttagttgacaaggaaaagttcaaaaaccgctcctcaaaagacgacaaacctgatgttcaaactcctatcacaaaggaagagatagtctctgaggtggcgaggcagctctgtgtgaagattgatccagacaatgtggttttagcggcgcctttggaaacttttggcgagtacgaggtgcctcttaaattccccaagacaattcctttgccacaaggaactgttcaatggattctcaaagtcaaagtccgtggccattaaatcttccacctttgaaagtcctccttcagtgatagttctcttcttcaatatgtttcaatatagttttggaattgcagaaacataagcaaacacaaatcagttacatttcccttgactcagtttttttttttttttttttgtagttgtataaaccgggtttactccggtctttaatttaaacaatgactcgaattttgc

SEQ ID NO: 99577 - protein, 221 aa, Arabidopsis thaliana; identical to SEQ ID NO: 41469
  peptide (1)..(221): Ceres Seq. ID no. 13603250

SEQ ID NO: 99578 - protein, 148 aa, Arabidopsis thaliana; identical to SEQ ID NO: 41470
  peptide (1)..(148): Ceres Seq. ID no. 13603251

SEQ ID NO: 99579 - protein, 126 aa, Arabidopsis thaliana; identical to SEQ ID NO: 41471
  peptide (1)..(126): Ceres Seq. ID no. 13603252

SEQ ID NO: 99580 - DNA, 2726 bp, Arabidopsis thaliana
  misc_feature (1)..(2726): Ceres Seq. ID no. 13603255
  misc_feature (1)..(2726): Ortholog of  Ceres SEQ ID NO 13595870 as cited in SEQ ID NO 62101
  misc_feature (1)..(2726): Ortholog of  Ceres SEQ ID NO 13590241 as cited in SEQ ID NO 63878
  misc_feature (1)..(2726): Ortholog of  Ceres SEQ ID NO 12617475 as cited in SEQ ID NO 64550
  misc_feature (1)..(2726): Ortholog of  Ceres SEQ ID NO 13657939 as cited in SEQ ID NO 66349
aaaggattcaaaaaaccctaaacactccaatgtcttcttctactcttcaagcttctctttttcttcgtcctcctctccatacttcttcgtttaagctttacccttgtctattctcttcttcttcattgagtttttgtccacaatctctctcaagtttctaccgtctttcttcagttcttcacaactctcgatttcgtccccttccttgctcattgcgtcaagacaatgtcgcttccgattctgatttcattcccaaagactccgcttttgaggttacggattcagctgagagtaatagattggtttccgatacggaggtttcggaattagagacgaatgatagatttgtgggtggtgaggagacgaaaagtggaggagaagaagcggaggttagtaatggagtaacggaaggtaaggaggaagatcagaagaagagcaagtttaggattgtggtgttgatgatggcactatgggcggctataaagagagctatagagaaggtaatggagtgggaatggttaagctggtggcctttctctcgccaggagaagcggctcgagaaacttattgctgaggctgatgctaatccaaaggacgcagctttgcagggtgctttattggctgagctcaataagcatattcctgaggctgtagttcaacggtttgaacaaagggaacacacagtggatagtagaggagttgctgaatatattcgagctcttgtcattacaaatgctatctcggagtatcttcctgatgaacaaacggggaagccatctagtcttcccgcactgctgcaagagctgaagcatcgtgcatcaggcaatatggacgaatcatttgtgaaccctggtatatctgagaagcaaccactgcatgttaccatggttaatcctaaagtttcaaacaaatcaagatttgcgcaagagcttgtctctacgatcttgttcactgttgcggtgggattagtgtggattatgggtgcagctgctctgcaaaagtatattggaagtcttggaggaattggaacttcgggtgttggttcaagctcttcatattccccaaaagagctgaacaaagaaataacgccagaaaagaatgtcaaaacatttaaggacgtaaagggttgtgatgatgcaaaacaagagctcgaagaggtagttgaatatctcaaaaatccatcaaagtttacccgccttggaggaaagttgccaaagggaattcttctaaccggggcacctggtactggaaagacattgctggccaaagcaattgctggagaagctggagtacccttcttctatagagctggatctgaatttgaagagatgtttgttggggtaggagctcgccgtgtgagatccttgtttcaggcagccaagaagaaggcaccttgtattattttcattgacgaaattgatgctgttggatccacaagaaaacaatgggaagggcatacaaagaagacattgcatcaactacttgttgaaatggatggttttgagcagaatgagggaataatagttatggctgcaacaaacttgcctgatatacttgatccagctctgacaagaccgggtagatttgatagacatattgtcgtacccagtccggatgtccgtggacgcgaagagattttggaactctacctccaaggcaaacctatgtcagaagatgttgatgttaaagcaattgctcgtggaactcctggattcaatggtgctgatcttgcaaacctggtaaatattgctgccataaaagcagctgttgaaggtgctgagaagttatcttctgaacagttggaattcgcaaaggaccgaattgtcatgggcacagagaggaagacaatgttcgtatcagaggactcaaaaaagctcactgcataccatgagagtggtcatgctattgtcgctttaaatacgaaaggtgcgcacccgatccacaaagcgactataatgccacgtggatctgcattgggaatggttacacagttaccttcaaacgatgaaacatcagtgagcaagaggcagttattagctcgtctcgatgtatgtatgggaggaagagttgcagaggagctcatctttggcttggaccatattaccactggagcgagtagcgatctgtcacaggccactgaacttgcacaatacatggtatcgagttgtgggatgagtgaggcaataggaccagttcatataaaagaaagaccaagctctgatatgcaatcacgcattgatgccgaggttgtgaagcttcttagagaagcatatgagagagtgaaatctctcttgaaacggcatgagaagcagctacacacgttagcaaacgcacttctagagtatgaaacgctaaccgcagaggacataaagcgtattctccttccaaagcaggaaggcgagaaatttgaagagcaacaacaagaagaaggagacttggtattggcctaatcacatcattcattaccataaacacacttctttgggtgaaaaagggagattcaaagctttgtacagagtaaatctcccatagcttctacaacaacaaccaaaagaaaaacatatgaaattattgatctcatgttacaaaattattgtagtttttatttcattagctcattagttttcgcttcgaccttgaaccttttgccctttttgacattctgttcaattctatgaagaaaaatgtaaaacaacattgaaaagaaagtaataattgttgtcttt

SEQ ID NO: 99581 - protein, 815 aa, Arabidopsis thaliana; identical to SEQ ID NO: 21131
  peptide (1)..(815): Ceres Seq. ID no. 13603256

SEQ ID NO: 99582 - protein, 806 aa, Arabidopsis thaliana; identical to SEQ ID NO: 21132
  peptide (1)..(806): Ceres Seq. ID no. 13603257

SEQ ID NO: 99583 - protein, 663 aa, Arabidopsis thaliana; identical to SEQ ID NO: 21133
  peptide (1)..(663): Ceres Seq. ID no. 13603258

SEQ ID NO: 99584 - DNA, 1146 bp, Arabidopsis thaliana
  misc_feature (1)..(1146): Ceres Seq. ID no. 13603263
  misc_feature (1)..(1146): Ortholog of  Ceres SEQ ID NO 13658873 as cited in SEQ ID NO 66604
  misc_feature (1)..(1146): Ortholog of  Ceres SEQ ID NO 14309137 as cited in SEQ ID NO 0
acaattaaagtgagaattttcctgaagaagaagaacttttgctttttttctgggtttgcttttttgttgtgtcaatgaaatgggagaaatggagatcgaagaaatcgaagctgttcttgagaaaatctgggatctacatgacaagcttagcgatgagattcacttgatttcgaagtctcactttctcaaatcggttaaaccttcaaatagatcggagaagagaaagaatcctcacggaaattccggcgaagataagcgacctggttatgttttcatcaaaggattcgccgtcgatgataacgactccacgattcaggaggcgaagagtcttaacgcaattcgaaccgctcttgagaaccttgaagaccagctcgagtttttccatactatacatacacagcagcgaacagagaaagatgttgcgattgctcggcttgaacagagcaggatattactagcaatgagattagctgaacaccacggcaagaactatggagtcctagaggaagctcttgcatttgttgggagcattaaatccaactcgcattacgtttcacctgatcacctctacgattcctctcgaaacccagacggagcaaactctattccagatggaatagagtcaaactttgtaatcaacgcctttgcctcgactttcgggtttgccaagagagcacttggattcaaccatgtgaaaggcgtacttggaaacgctgctatatttgccataagcgtggtcgctatgctacatcttcaccaagtggctactagtgaacatcatctgcagaagaaagaagacagattctacagaagccaacaaaggaaaacatacggaagagataagtcttcagctgacagaagtttggatcacttggacgtaatgatggctcgtggttaagaccagagatcgaacttgtctacacgtgagaaaactaaagaagagaagagataattgttgctctcataggtttcgatattatcagcaaaaggataagaatttggaggcaaagtgttggaattttctgagctcgtctgatgcaaatattgttcctttcttctaattttgattttcaaacactgtggttaatgttttgtttgttttgtttggttttgttgatttcaaatgtggttaggctttcttgtaaa

SEQ ID NO: 99585 - protein, 272 aa, Arabidopsis thaliana
  peptide (1)..(272): Ceres Seq. ID no. 13603264
MGEMEIEEIEAVLEKIWDLHDKLSDEIHLISKSHFLKSVKPSNRSEKRKNPHGNSGEDKRPGYVFIKGFAVDDNDSTIQEAKSLNAIRTALENLEDQLEFFHTIHTQQRTEKDVAIARLEQSRILLAMRLAEHHGKNYGVLEEALAFVGSIKSNSHYVSPDHLYDSSRNPDGANSIPDGIESNFVINAFASTFGFAKRALGFNHVKGVLGNAAIFAISVVAMLHLHQVATSEHHLQKKEDRFYRSQQRKTYGRDKSSADRSLDHLDVMMARG

SEQ ID NO: 99586 - protein, 269 aa, Arabidopsis thaliana
  peptide (1)..(269): Ceres Seq. ID no. 13603265
MEIEEIEAVLEKIWDLHDKLSDEIHLISKSHFLKSVKPSNRSEKRKNPHGNSGEDKRPGYVFIKGFAVDDNDSTIQEAKSLNAIRTALENLEDQLEFFHTIHTQQRTEKDVAIARLEQSRILLAMRLAEHHGKNYGVLEEALAFVGSIKSNSHYVSPDHLYDSSRNPDGANSIPDGIESNFVINAFASTFGFAKRALGFNHVKGVLGNAAIFAISVVAMLHLHQVATSEHHLQKKEDRFYRSQQRKTYGRDKSSADRSLDHLDVMMARG

SEQ ID NO: 99587 - protein, 145 aa, Arabidopsis thaliana
  peptide (1)..(145): Ceres Seq. ID no. 13603266
MRLAEHHGKNYGVLEEALAFVGSIKSNSHYVSPDHLYDSSRNPDGANSIPDGIESNFVINAFASTFGFAKRALGFNHVKGVLGNAAIFAISVVAMLHLHQVATSEHHLQKKEDRFYRSQQRKTYGRDKSSADRSLDHLDVMMARG

SEQ ID NO: 99588 - DNA, 1600 bp, Arabidopsis thaliana
  misc_feature (1)..(1600): Ceres Seq. ID no. 13603271
  misc_feature (1)..(1600): Ortholog of  Ceres SEQ ID NO 15170209 as cited in SEQ ID NO 58562
  misc_feature (1)..(1600): Ortholog of  Ceres SEQ ID NO 12616332 as cited in SEQ ID NO 63449
  misc_feature (1)..(1600): Ortholog of  Ceres SEQ ID NO 13597498 as cited in SEQ ID NO 64648
atcagagagactaggtttggtaattgatcagaaagtaattaagaagatcacacaaaattgacatcccaaaaactaatccgataaaaatcataaatctcaacggcactctcttctcttgtctctccttatttctcaatccagattccaatttttctcagcgaagtgagtgatctcgccgtttgtgttccgctggtgaatcatcaccggagaattgcagatccaatgatacattcctaatcggttttattttgagtgacgacgaatcattggatccagaaaatccgatttctggagatttgaattagtgaaatttgatcgaatttcgacagtgaagaggcatttgcgtctgattgctttgactaagagatctgattttggatctatttcaatggcgaggaaagggtcgagtataagattatcgagctcgagaatatcaacccttttgctctttatgtttgcaacttttgcttccttctatgtagcaggccgtttatggcaagaatctcaaactagggttcatctaatcaatgagctcgatagagtaaccggacaggggaaatctgctatatcagtggatgatactttgaagatcatagcttgcagggaacagaagaagacactagcagctcttgagatggaattaagttcagctaggcaagaaggctttgtttcaaaaagtcccaaacttgctgatggaactgaaaccaagaaaagaccgttagtggttatcgggataatgacaagtttgggtaacaagaagaagagggatgcagttcgtcaagcatggatggggactggtgcatcacttaaaaaacttgaaagtgaaaagggtgtgattgcaagatttgttattggaagaagtgcaaataaaggggacagcatggacaagagcattgatactgaaaatagtcaaaccgatgacttcattattctcgatgatgtagttgaggcacccgaggaagcttctaagaaggtaaaactgttctttgcctacgctgcagataggtgggatgcacagttttatgcaaaagccatcgacaatatctacgtaaatatagatgctctgggaactacgcttgcagcacatctggaaaacccacgggcttacatcggttgcatgaaatcaggcgaagtcttctcagaaccgaaccacaaatggtatgaaccagagtggtggaaattcggtgacaagaaagcatacttccggcatgcttatggggagatgtatgttataacgcacgcattggctagatttgtatcgatcaatagagacattcttcattcgtatgctcatgatgacgtcagcacgggttcatggtttgtgggtcttgatgttaagcatgtagatgaaggaaagttttgctgttctgcgtggtcctcagaagccatatgcgcaggagtgtagtagaaccaaagacgaatccaaagtgtgaggctcttggctctttggtgcttatagagaaagaagaacaaatgacatttgtctgaacttgccattttattggcattgcattatacgaagtctaggatttggatgtgggaatagatattcttaccgacaaacgttaaactccaaaaaaaataatcattcatttacagc

SEQ ID NO: 99589 - protein, 338 aa, Arabidopsis thaliana; identical to SEQ ID NO: 26027
  peptide (1)..(338): Ceres Seq. ID no. 13603272

SEQ ID NO: 99590 - protein, 317 aa, Arabidopsis thaliana; identical to SEQ ID NO: 26028
  peptide (1)..(317): Ceres Seq. ID no. 13603273

SEQ ID NO: 99591 - protein, 256 aa, Arabidopsis thaliana; identical to SEQ ID NO: 77663
  peptide (1)..(256): Ceres Seq. ID no. 13603274

SEQ ID NO: 99592 - DNA, 1663 bp, Arabidopsis thaliana
  misc_feature (1)..(1663): Ceres Seq. ID no. 13603279
  misc_feature (1)..(1663): Ortholog of  Ceres SEQ ID NO 14311313 as cited in SEQ ID NO 53503
  misc_feature (1)..(1663): Ortholog of  Ceres SEQ ID NO 14311625 as cited in SEQ ID NO 55184
  misc_feature (1)..(1663): Ortholog of  Ceres SEQ ID NO 14310588 as cited in SEQ ID NO 58770
atgggtgaagacaagaagacggcaagggagacggtggaggaggaaccacttagcccatgttcacggctgttcaattcgccggattttaactgtgcaataatcgttacaatgggatctaaagttaaaggagacacaccagccatcatccacggccttgaacacaccctcgtaaaccaccctcgcttctctagcattttagagatgaacaatgggaagaagccgcgttgggttcggacaaaagttaaagtagaagagcatgtgattgttcctgatgtggatcccgacattgaaaatccggatcagtatcttgaagactatatctctaagttaacgaccattcctatggatttgtctaaaccattatgggaaatgcacttactaggcgtcaaaacatcgaacgctgaatcctatgctattctcaagatccatcattctttgggtgatggaatgtctctcatgtctcttttactggcttgtacccgcaaaacatcagaccccgaggctttgcctaccgttgcggttcataaaaaacgctttggaccgagctgcaacagcgggtttttcaacaagatttggtggttatttgtagggctctggttcatcctaagattgctattcaacacttttgttgatatcttaatgtttgctcttacaatatttgtcttgagggatacggagactcctctcttggccaaacccggtagtgaacttatccctaagaggttcgtccaccggattatcagttttgacgatgttaagctggtgaaaaacgcaatgaaaatgacggtgaacgatgttcttcttggagtaacgcaagccggactttcgcgttaccttagtcgaaaatatgatcaagaagcaacaccgaaatcgaaagagtccatgaggagaatccgacttcgttcagccattatgattaacttgagaccaaacgcaggaattgaggctctagcggatatgatggccaagaaatcaaaatgcagatggggaaatctcttcggctacattctcctaccgttctccgttgggctagagaccgatcctctagaatacgtgcgccaagctaaagccacgattgaccgcaagaaacactctctagaagccgtattctccatggcattctttaaattgatactaaaagttcttgggctcaaggcaagtgtagttcttgtaaggaaagtgatccatagcacaacgttatcattttcaaatgtggtcggtccaaaggaagaaattacattccatggtcacccactgaattatatctccccatgtgtttttggccacccacatgctcttactctacatttccagacctacgcgaacaaggtcataatatcggtaacggctgatccaacggtcattcctgaccctcacaagatgtgtgatgatttggtggagtctctcaagatgattaaagccgctgttcttgaaagagggttatatgagattgaggtctaactaaagctcttttgttgtggatcacaatgtggattcgcccgtttcttctttgtctacggctcctcaatgattactctaaattgataccttaggaagttattattataataactagacatattgatataaaaaagttgtaagacatcaagttaaaattttaagcatgtagtgtatcattttaatagatactaattcacttccg

SEQ ID NO: 99593 - protein, 486 aa, Arabidopsis thaliana
  peptide (1)..(486): Ceres Seq. ID no. 13603280
MGEDKKTARETVEEEPLSPCSRLFNSPDFNCAIIVTMGSKVKGDTPAIIHGLEHTLVNHPRFSSILEMNNGKKPRWVRTKVKVEEHVIVPDVDPDIENPDQYLEDYISKLTTIPMDLSKPLWEMHLLGVKTSNAESYAILKIHHSLGDGMSLMSLLLACTRKTSDPEALPTVAVHKKRFGPSCNSGFFNKIWWLFVGLWFILRLLFNTFVDILMFALTIFVLRDTETPLLAKPGSELIPKRFVHRIISFDDVKLVKNAMKMTVNDVLLGVTQAGLSRYLSRKYDQEATPKSKESMRRIRLRSAIMINLRPNAGIEALADMMAKKSKCRWGNLFGYILLPFSVGLETDPLEYVRQAKATIDRKKHSLEAVFSMAFFKLILKVLGLKASVVLVRKVIHSTTLSFSNVVGPKEEITFHGHPLNYISPCVFGHPHALTLHFQTYANKVIISVTADPTVIPDPHKMCDDLVESLKMIKAAVLERGLYEIEV

SEQ ID NO: 99594 - protein, 450 aa, Arabidopsis thaliana
  peptide (1)..(450): Ceres Seq. ID no. 13603281
MGSKVKGDTPAIIHGLEHTLVNHPRFSSILEMNNGKKPRWVRTKVKVEEHVIVPDVDPDIENPDQYLEDYISKLTTIPMDLSKPLWEMHLLGVKTSNAESYAILKIHHSLGDGMSLMSLLLACTRKTSDPEALPTVAVHKKRFGPSCNSGFFNKIWWLFVGLWFILRLLFNTFVDILMFALTIFVLRDTETPLLAKPGSELIPKRFVHRIISFDDVKLVKNAMKMTVNDVLLGVTQAGLSRYLSRKYDQEATPKSKESMRRIRLRSAIMINLRPNAGIEALADMMAKKSKCRWGNLFGYILLPFSVGLETDPLEYVRQAKATIDRKKHSLEAVFSMAFFKLILKVLGLKASVVLVRKVIHSTTLSFSNVVGPKEEITFHGHPLNYISPCVFGHPHALTLHFQTYANKVIISVTADPTVIPDPHKMCDDLVESLKMIKAAVLERGLYEIEV

SEQ ID NO: 99595 - protein, 419 aa, Arabidopsis thaliana; identical to SEQ ID NO: 72929
  peptide (1)..(419): Ceres Seq. ID no. 13603282

SEQ ID NO: 99596 - DNA, 1225 bp, Arabidopsis thaliana
  misc_feature (1)..(1225): Ceres Seq. ID no. 13603283
  misc_feature (1)..(1225): Ortholog of  Ceres SEQ ID NO 12635907 as cited in SEQ ID NO 525
  misc_feature (1)..(1225): Ortholog of  Ceres SEQ ID NO 13503463 as cited in SEQ ID NO 65057
aatttccctatcaaagtgaatgactttcttctccaaaatcgatttctgaaacatcccatttcttgatttccctctttgtcgcaaacccaacaaagtagagcaaaaccctaaaacggaaaccttccatggcgattatctctgaggtagaagaagaaagcagtagcagccgacccatgatatttccctttagggcaacactcagttctgcaaacccattagggtttttggagaaagttttcgactttctcggagaacagagcgattttctcaagaaaccctccgcggaggacgagatcgtcgtcgcggttagggcggcgaaggagaagttgaaaaaggctgagaagaagaaagctgagaaggagagtgtgaagcctgtggagaagaaagccgagaaggaaattgttaagcttgtggagaagaaggtagagaaggagagtgtcaagccaactatagctgcttcaagtgctgagcctatagaagtggagaagcctaaggaggaagaggagaagaaggaatctggtcccattgttcctaacaaaggtaatggaactgatcttgagaactactcatggatccagaatctccaggaggttacagttaacattccagtgcctactgggactaaagcacggactgttgtatgtgagattaagaaaaaccgtctcaaggttggtctcaaaggccaggatccaatcgtcgatggggagctctaccgatctgtgaagcctgatgactgctactggaatatcgaggatcaaaaggtgatttcgattctcttgactaagtctgatcagatggagtggtggaaatgctgtgtgaaaggtgaacctgaaatcgatactcagaaagttgaaccagagactagtaaattaggtgaccttgatccagaaactcgctcgactgttgagaaaatgatgtttgatcaaaggcaaaagcagatgggtcttccaacaagcgaggagctacagaagcaagagatccttaagaaattcatgtctgagcatccggagatggacttctcaaatgcaaagtttaactgatgctcgtatcgtccagtctctctgccaaaaaagaaaaaccagtttttgcatcttcaccagtttttaaaagcttgttacttttgtttagtttctcatttctgaatacatagttcggtttatgtccctagctttatgattctctggtttttattgaaactttttctgaaaaaaaaaactgttttctc

SEQ ID NO: 99597 - protein, 304 aa, Arabidopsis thaliana
  peptide (1)..(304): Ceres Seq. ID no. 13603284
MAIISEVEEESSSSRPMIFPFRATLSSANPLGFLEKVFDFLGEQSDFLKKPSAEDEIVVAVRAAKEKLKKAEKKKAEKESVKPVEKKAEKEIVKLVEKKVEKESVKPTIAASSAEPIEVEKPKEEEEKKESGPIVPNKGNGTDLENYSWIQNLQEVTVNIPVPTGTKARTVVCEIKKNRLKVGLKGQDPIVDGELYRSVKPDDCYWNIEDQKVISILLTKSDQMEWWKCCVKGEPEIDTQKVEPETSKLGDLDPETRSTVEKMMFDQRQKQMGLPTSEELQKQEILKKFMSEHPEMDFSNAKFN

SEQ ID NO: 99598 - protein, 288 aa, Arabidopsis thaliana
  peptide (1)..(288): Ceres Seq. ID no. 13603285
MIFPFRATLSSANPLGFLEKVFDFLGEQSDFLKKPSAEDEIVVAVRAAKEKLKKAEKKKAEKESVKPVEKKAEKEIVKLVEKKVEKESVKPTIAASSAEPIEVEKPKEEEEKKESGPIVPNKGNGTDLENYSWIQNLQEVTVNIPVPTGTKARTVVCEIKKNRLKVGLKGQDPIVDGELYRSVKPDDCYWNIEDQKVISILLTKSDQMEWWKCCVKGEPEIDTQKVEPETSKLGDLDPETRSTVEKMMFDQRQKQMGLPTSEELQKQEILKKFMSEHPEMDFSNAKFN

SEQ ID NO: 99599 - DNA, 1743 bp, Arabidopsis thaliana
  misc_feature (1)..(1743): Ceres Seq. ID no. 13603290
  misc_feature (1)..(1743): Ortholog of  Ceres SEQ ID NO 14311957 as cited in SEQ ID NO 51628
agagaagaaatagagagagaggccacaaggcacacacaagtcagtatcccacgtgcatctgggaactcgacccctctcctctgccacaacccactcttcatttctctctttctccaccaatctctctttctctctctcaaaagaagagaaactaataattctcaaaagctcacacacagaaacagaggaatctataaggaagttttggtttttggttatcaacaatggtggaagcaaaagatcaagatatgggtgatggtatgcaatgtataaaccatccatttactaaaaacccaggtgggatctgtgctttttgtcttcaagaaaagcttggaaagcttgtaacttcatctttcccacttcctaaacacctcacttcctcttcaacttcttcttctccttccttcagatctgactctgttggtagcacaaccactgcctctgccgcaaatctctcagcgtctctttctctctctgtctccggagcaacaaacaacaacaacagcaagcttccgtttttgttagctaagaagaagaagaagatgcttactgcttcttcttcttcttcgaccacggctaatattgtctacaagagaagtcaatctacaaggactacgaagacaacgtacggagattcagatttgagcccgagaaagagaaatgggttttggtccttttttcatctctactcttcgaaacaacatggtagcagtaagaaagttggaaactttcatcaacccataagccagactgagacaaaaacagagttggcagagactacaacagtgggatcttcgtcttcttcgtcagcttcttcttcaatgtcaaagagagttgttggtggtggtgggagtagtagtaacagaaacggtattgatgtgattgttgaagaagatggaagtcctaacattgaagtcacaccaagtgagaggaaagtgtcgagatctagatctgttgggtgtggaagtagaagcttctctggtgatttctttgagaggatcacaaatgggtttggagattgtactttgagaagagttgagtcacagagagaaggtaataataacaaaggtaacaaggtcagtagtaaccctagtaatggtgttagagagatggtgagatgtggtgggatctttggtgggtttatgataatgacgtcatcgtcttcttcttcatcttcatcatcatgggtatcatcatcatcagctgaacatcatcatcatcataatcataacatgggtcatggtggtggaggaaggaacagaagctggggatggtcatttgcaagtccaatgagagcttttacttcttcttcttactctggtaaaagaggccgtacaatttcagattctactacaagcaagaacacaactccaaacttgggtgcaattccttctttgttgtctgtcagaagctgaattaataataaactttgatctatgtgtttctaataagttcttaaacgagaaaatacatttaattagtttttatcattttcatcaatgtgtttatcttttttttaggtgttcttcaaatatttgttgatgctctttttgataatcttattagtattgtaatgtcacaccactcttctatgttcattatcatcttttgtcaaacaaggaacttaggatactttgagctactttttctgtttatttgtctttttctcttttgtttattttgatctttggattgattcctatgtctctttgaatgatctaatggtaaataaattggttttat

SEQ ID NO: 99600 - protein, 396 aa, Arabidopsis thaliana; identical to SEQ ID NO: 40793
  peptide (1)..(396): Ceres Seq. ID no. 13603291

SEQ ID NO: 99601 - protein, 388 aa, Arabidopsis thaliana; identical to SEQ ID NO: 40794
  peptide (1)..(388): Ceres Seq. ID no. 13603292

SEQ ID NO: 99602 - protein, 384 aa, Arabidopsis thaliana; identical to SEQ ID NO: 40795
  peptide (1)..(384): Ceres Seq. ID no. 13603293

SEQ ID NO: 99603 - DNA, 1736 bp, Arabidopsis thaliana
  misc_feature (1)..(1736): Ceres Seq. ID no. 13603302
  misc_feature (1)..(1736): Ortholog of  Ceres SEQ ID NO 13658707 as cited in SEQ ID NO 66286
  misc_feature (1)..(1736): Ortholog of  Ceres SEQ ID NO 13654528 as cited in SEQ ID NO 68080
ggtcattcttctttcttttcacttcttcttcttcttcgctcttcttctcactgtcgggttccatttggcgcgaaaagttcttcactttttccagcttttttttgttctctgacagtttttttttttgtttggttacaaataaagatgccagtaagtgtggcactagttttgctgttgacattgagcagtgtgattctgattaatgggagaagttacggcgtcggaaacatatgcgatcgtggtcggagaccgagcgagagaccacacagtgtcaaaatcactgattttggtgctgtgggagatgggaaaacgttgaacacacttgcgtttcaaaatgctgtcttttatctaaagtctttcgctgataaaggtggtgctcagctttatgttcctccgggacggtggctcaccggaagtttcaacctcaccagtcatctcactctctttctcgagaaagacgccgtcatacttgcctcacaggatccatcgcattggcaagtcacggatgccttaccgtcatatgggcggggtattgatctaccagggaagagatacatgagtttgataaacggtgacatgctacatgatgtagtagtaacaggtgataacggtaccatagatgggcaaggccttgtttggtgggatcggtttaattctcattctttagagtacagtcgccctcaccttgtcgagtttgtctctgccgaaaatgtcattgtatcaaatcttacattcttgaacgctccggcttatactatccattcagtttattgtcgcaatttatacattcatagagtaacggctaatacttgtccagaatctccttataccatcggtattgtcccagattcttctgaaaatgtgtgtatccaagaatctagtatcaacatggggtatgatgccatttctcttaaaagtggttgtgatgaatacggtttatcgtatgcaagacctactgctaatgtccagataagaaatgtttaccttagagcagcttctggttcctccatttcctttggtagtgaaatgtctggtggtatatctgatgttgaggtcagtgatgctcacatacacaactcgttatccgggattgcctttagaacaacaaatggaagaggtggttatattaaggagattgatatttccaacatccatatggttaatgttggtactgcatttctagccaacggtagcttcggtactcatccggattctggtttcgatgaaaatgcttacccgcttgtgagtcacatcaggttacatgacattgttggagaaaacataagcactgctggatatttctttggaacgaaagagtctcctttcacttcgattttgttatcgaatatctctctgtcgattaaaaactcggcttcccctgctgattcttggcaatgctcatatgttgacgggtcttcggaattcgtagtccctgaaccgtgccttgagctgaagagttttgatagttactatggtagagctgaggccttatgaaaccaaacttcattaggaatgatgattcatatttgtttaagagagagcaaatggttctgattcttttcttttccccaaaaataaaccacagtgtgtagaattattacctgttccttgttggtgttgttgtccctgttatttgcagcttgtgagattaatatatcttgtacaggttcatttcttcattcatgtgtaaccaaagaaattttgtattagcccagtaaccagatattaattttttt

SEQ ID NO: 99604 - protein, 497 aa, Arabidopsis thaliana
  peptide (1)..(497): Ceres Seq. ID no. 13603303
GHSSFFSLLLLLRSSSHCRVPFGAKSSSLFPAFFCSLTVFFFVWLQIKMPVSVALVLLLTLSSVILINGRSYGVGNICDRGRRPSERPHSVKITDFGAVGDGKTLNTLAFQNAVFYLKSFADKGGAQLYVPPGRWLTGSFNLTSHLTLFLEKDAVILASQDPSHWQVTDALPSYGRGIDLPGKRYMSLINGDMLHDVVVTGDNGTIDGQGLVWWDRFNSHSLEYSRPHLVEFVSAENVIVSNLTFLNAPAYTIHSVYCRNLYIHRVTANTCPESPYTIGIVPDSSENVCIQESSINMGYDAISLKSGCDEYGLSYARPTANVQIRNVYLRAASGSSISFGSEMSGGISDVEVSDAHIHNSLSGIAFRTTNGRGGYIKEIDISNIHMVNVGTAFLANGSFGTHPDSGFDENAYPLVSHIRLHDIVGENISTAGYFFGTKESPFTSILLSNISLSIKNSASPADSWQCSYVDGSSEFVVPEPCLELKSFDSYYGRAEAL

SEQ ID NO: 99605 - protein, 449 aa, Arabidopsis thaliana; identical to SEQ ID NO: 39155
  peptide (1)..(449): Ceres Seq. ID no. 13603304

SEQ ID NO: 99606 - protein, 312 aa, Arabidopsis thaliana; identical to SEQ ID NO: 39156
  peptide (1)..(312): Ceres Seq. ID no. 13603305

SEQ ID NO: 99607 - DNA, 868 bp, Arabidopsis thaliana
  misc_feature (1)..(868): Ceres Seq. ID no. 13603306
  misc_feature (1)..(868): Ortholog of  Ceres SEQ ID NO 14305963 as cited in SEQ ID NO 52290
  misc_feature (1)..(868): Ortholog of  Ceres SEQ ID NO 14307492 as cited in SEQ ID NO 59504
  misc_feature (1)..(868): Ortholog of  Ceres SEQ ID NO 13597255 as cited in SEQ ID NO 63874
atctcctttaaaattctctgttcttttgtattcctaatctttaacaatttaagaagaaatggattcgaattcatggatcaattgtccccctgtgttttcatcatcgccttcttcacgccgttaccaatctcgatcagatttgtatttgggagatgttgaaggagaagacgatttgaaagctgagtttatgtgtcctttttgtgcagatgagtttgatattgttggtctttgttgtcatattgatgtgaatcatcctgttgaagctaagaatggggtttgtcctgtctgcacaaagaaggtgggattggacattgttggccatataacaacgcaacacgggaacgtatttaaggtgcagcgaagaagaaggttgcgtaaaggtggatatagctctacctatcttactcttaaaaaagagcttcgagaagctaacttacagtctcttggagggtcttccactttcattccctcttccaatatagattctgatcctctactctcatcctttatgtttaaacccccttcggctatacctatcactgaaggagactcggtagcacaagtctcacctaaggacacctctaaaagcaaaatacaacaagaatcattctcaaacgaagatcaagagaaggcaaagaagagcaagtttgtgcggggcttgctttggtcaaccatgcttgaagacaagttctaatttatctagatatcttatattgtaatcaatgtatcaagaaatcatacattagtctcaatgtatgtagcagaggcttgtagcaagcataatggcatgctgagtatgttgtaatcggatgttcgtggggtatcttttatgtgcataatcagaagatatataagtactatttcactc

SEQ ID NO: 99608 - protein, 211 aa, Arabidopsis thaliana
  peptide (1)..(211): Ceres Seq. ID no. 13603307
MDSNSWINCPPVFSSSPSSRRYQSRSDLYLGDVEGEDDLKAEFMCPFCADEFDIVGLCCHIDVNHPVEAKNGVCPVCTKKVGLDIVGHITTQHGNVFKVQRRRRLRKGGYSSTYLTLKKELREANLQSLGGSSTFIPSSNIDSDPLLSSFMFKPPSAIPITEGDSVAQVSPKDTSKSKIQQESFSNEDQEKAKKSKFVRGLLWSTMLEDKF

SEQ ID NO: 99609 - protein, 168 aa, Arabidopsis thaliana
  peptide (1)..(168): Ceres Seq. ID no. 13603308
MCPFCADEFDIVGLCCHIDVNHPVEAKNGVCPVCTKKVGLDIVGHITTQHGNVFKVQRRRRLRKGGYSSTYLTLKKELREANLQSLGGSSTFIPSSNIDSDPLLSSFMFKPPSAIPITEGDSVAQVSPKDTSKSKIQQESFSNEDQEKAKKSKFVRGLLWSTMLEDKF

SEQ ID NO: 99610 - DNA, 1162 bp, Arabidopsis thaliana
  misc_feature (1)..(1162): Ceres Seq. ID no. 13603318
  misc_feature (1)..(1162): Ortholog of  Ceres SEQ ID NO 15180047 as cited in SEQ ID NO 0
aatgctcgtaagttcaagcaaaatcacaagagcgagagagatggtgacgaaaacagaggagaagcaattgaaccagctagagattcaagtcgataatggcggaggcggaacatgggagtatctttgcctcgttcgtaatctcaaagttcgccggtcggagaaagtgttaaaacacggttcctcgattttgaatgatcagaagaaacgatctgctcttggtccagatgaatggacactaaatgagcaggtggcaattgcagctatggactgtcaatgtctcggtgtcgcacagagttgcattaaggctttgcagacaaaatttcctgggagcaaaagagttgggaggcttgaggcattgcttcttgaagcgaagggattatggggagaggctgaggaagcatatgcgagtcttttggaggataatccactcgaccaagcgatacacaaacgaagagtggctatatccaaggcactaggcaaaccttccatagccattgagcttcttaacaaatatcttgaactattcatggctgatcatgatgcatggagagaactcgcagagctttacctttccttgcaaatgtataagcaagcagctttctgctatgaagagctcatactatctcagcctactgttccattgtaccacctcgcatatgctgaggttctctatacaatcggtggagtagaaaacattatctcagcaagaaaatactatgcagcgaccgtagatttaacaggcggcaaaaacactagagctcttctcggaatctgcttgtgtgcatcggccattgcacagctctcaaaaggcaggaacaaagaggacaaagacgctacggcagccccagagcttcattccctggctgcagctgcagtagagaaagaatacaagcaaaaagccccggacaaacttcaactcatctcttccgcgttaagaatcttgaagacttgatcgcaagtaaacgatgttctggcccacaagacgcaaacgatttagcagtagtagatagtcggaaaatatcgaactctaaattcaaataactttctttaaagtttaaaccaaagagaattttgattactgttagataccaaaaccaaataactgtatcactccttagcctttacggtttccatgcttgcgacgtgcagcttcttttgtatc

SEQ ID NO: 99611 - protein, 316 aa, Arabidopsis thaliana; identical to SEQ ID NO: 29609
  peptide (1)..(316): Ceres Seq. ID no. 13603319

SEQ ID NO: 99612 - protein, 303 aa, Arabidopsis thaliana; identical to SEQ ID NO: 29610
  peptide (1)..(303): Ceres Seq. ID no. 13603320

SEQ ID NO: 99613 - protein, 229 aa, Arabidopsis thaliana; identical to SEQ ID NO: 29611
  peptide (1)..(229): Ceres Seq. ID no. 13603321

SEQ ID NO: 99614 - DNA, 1566 bp, Arabidopsis thaliana
  misc_feature (1)..(1566): Ceres Seq. ID no. 13603322
  misc_feature (1)..(1566): Ortholog of  Ceres SEQ ID NO 13647121 as cited in SEQ ID NO 151
  misc_feature (1)..(1566): Ortholog of  Ceres SEQ ID NO 15176411 as cited in SEQ ID NO 54468
  misc_feature (1)..(1566): Ortholog of  Ceres SEQ ID NO 14307131 as cited in SEQ ID NO 59707
aagaaaatctcaaatagatataacaagtattctggaagaaagaaaagagagagaaaatgtcgtccagtaaaatccaggtacgagggcagccacttcttagggttccggcaagaaaccaccgtatgacacacttggttgtttgcggcgtttccacaaaacgccaccaccgtgaaatcaatgcactcagcagtaatagtggtccatcgttggattcggtcccaacaagaaccgacaagaggcagtttcttcgtggtgacggtaacggtaaattcgggaggttcggtgggaagtttgtaccggagacattgatgtctcgcctgatagaacttgaagacgaatttaactttgttaggtgcgatcacgaatttcaggaggagcttaccacagcgttaagagactacgtaggaagagaaacgcctctctacttcgccgaacgtctaaccgaacactacaagaacatagttccaaccatcgaaggtggaccagagatatacttgaaacgggaagatcttagccactgtgggtctcacaaaatcaataatgctctcgctcaggccatgatttcccggcggcttggttgcagccgtgtggtggcggccactggagccggacaacatggagtcgccacagcggctgcatgtgcaaagctctccttggagtgtactgttttcatgggagctgctgatatagagaaacaatcctttaatgtactttccatgaaactccttggtgctcaggttatatcagtggaaggaacattcaaagatgcaagttcagaagctatacgaaactgggtcgaaaacctatataccacatactacttatcgggtacggtcgtaggaccgcatccgtgtccgataatagtacgtgagtttcaatctgtgatcgggaaagagacaagaaggcaagccaagcaactatggggtggtaagcctgatgtgttggtggcctgtgtgggaagtggctcaaacgcattgggtttgttccatgagtttgttggggatgaggatgtgcggttagtcggtgtcgaggctgcggggcttggtctggattcggggaaacattcagctactttggcctttggagatgttggtgtataccatggttccatgagctatttattgcaagatgatcaaggacagatacttaaaccacactccgtaggtgttgggttagagtatcccggagttggaccggagattagtttcatgaaagaaactggcagagcggagttctatacagcaacagacgaagaagcaattcaagcgtgcatgcgattaagcagattggagggaataataccggcattagaagcgtctcacgcgctcgcgttcctcgacaaactcgtgcctactcttcgtgatggagccaaggtggtagtgaactgcagtggccgtggtgacaaagatttagatactctcatccaacgaggcatgccttcttctttttgttgactcaccaagatgccacattacacttaactcttttagaaaacgtatggtccaatcacaaccatcattatagatgaaatactaatatatcaatcattatttaatttttcgattt

SEQ ID NO: 99615 - protein, 465 aa, Arabidopsis thaliana
  peptide (1)..(465): Ceres Seq. ID no. 13603323
MSSSKIQVRGQPLLRVPARNHRMTHLVVCGVSTKRHHREINALSSNSGPSLDSVPTRTDKRQFLRGDGNGKFGRFGGKFVPETLMSRLIELEDEFNFVRCDHEFQEELTTALRDYVGRETPLYFAERLTEHYKNIVPTIEGGPEIYLKREDLSHCGSHKINNALAQAMISRRLGCSRVVAATGAGQHGVATAAACAKLSLECTVFMGAADIEKQSFNVLSMKLLGAQVISVEGTFKDASSEAIRNWVENLYTTYYLSGTVVGPHPCPIIVREFQSVIGKETRRQAKQLWGGKPDVLVACVGSGSNALGLFHEFVGDEDVRLVGVEAAGLGLDSGKHSATLAFGDVGVYHGSMSYLLQDDQGQILKPHSVGVGLEYPGVGPEISFMKETGRAEFYTATDEEAIQACMRLSRLEGIIPALEASHALAFLDKLVPTLRDGAKVVVNCSGRGDKDLDTLIQRGMPSSFC

SEQ ID NO: 99616 - protein, 443 aa, Arabidopsis thaliana
  peptide (1)..(443): Ceres Seq. ID no. 13603324
MTHLVVCGVSTKRHHREINALSSNSGPSLDSVPTRTDKRQFLRGDGNGKFGRFGGKFVPETLMSRLIELEDEFNFVRCDHEFQEELTTALRDYVGRETPLYFAERLTEHYKNIVPTIEGGPEIYLKREDLSHCGSHKINNALAQAMISRRLGCSRVVAATGAGQHGVATAAACAKLSLECTVFMGAADIEKQSFNVLSMKLLGAQVISVEGTFKDASSEAIRNWVENLYTTYYLSGTVVGPHPCPIIVREFQSVIGKETRRQAKQLWGGKPDVLVACVGSGSNALGLFHEFVGDEDVRLVGVEAAGLGLDSGKHSATLAFGDVGVYHGSMSYLLQDDQGQILKPHSVGVGLEYPGVGPEISFMKETGRAEFYTATDEEAIQACMRLSRLEGIIPALEASHALAFLDKLVPTLRDGAKVVVNCSGRGDKDLDTLIQRGMPSSFC

SEQ ID NO: 99617 - protein, 381 aa, Arabidopsis thaliana
  peptide (1)..(381): Ceres Seq. ID no. 13603325
MSRLIELEDEFNFVRCDHEFQEELTTALRDYVGRETPLYFAERLTEHYKNIVPTIEGGPEIYLKREDLSHCGSHKINNALAQAMISRRLGCSRVVAATGAGQHGVATAAACAKLSLECTVFMGAADIEKQSFNVLSMKLLGAQVISVEGTFKDASSEAIRNWVENLYTTYYLSGTVVGPHPCPIIVREFQSVIGKETRRQAKQLWGGKPDVLVACVGSGSNALGLFHEFVGDEDVRLVGVEAAGLGLDSGKHSATLAFGDVGVYHGSMSYLLQDDQGQILKPHSVGVGLEYPGVGPEISFMKETGRAEFYTATDEEAIQACMRLSRLEGIIPALEASHALAFLDKLVPTLRDGAKVVVNCSGRGDKDLDTLIQRGMPSSFC

SEQ ID NO: 99618 - DNA, 2402 bp, Arabidopsis thaliana
  misc_feature (1)..(2402): Ceres Seq. ID no. 13603329
  misc_feature (1)..(2402): Ortholog of  Ceres SEQ ID NO 13657677 as cited in SEQ ID NO 66119
gtggccgtctttttcaaaaccttagacaatgagtatcatgctatcaatttcccggcgccagaactcttatattctgctcaaccattctcgattcctccggcgtttttcttatgatgttgacccacggccggaaatcaaatcggagagccaggaatttgtagtagtcaaatttgtgaaaactcttcaaaataccccgcaacatgattgggcgtcgagcgagtcgctaagtgcgcttgtcgtatcttcttcttctgcttctcctttagtattctcgcaaatcacgcggcggctaggatcgtattctctagcaatctcgttcttcgagtacctggatgcgaagtctcagtctctgaaacgccgtgaagaatctctctccttggcgcttcagtcggtcattgaattcgccggtagtgaaccggacccgcgtgataaacttctccgtctctacgagatcgccaaagagaagaacattcctcttactatcgttgccactaagcttctgatccgatggtttgggcgtatgggtatggtgaatcagtcggttcttgtatacgaaagactcgattcgaatatgaaaaactcgcaggttcgtaatgttgtggtagacgtcttgctaagaaatggacttgtggatgatgccttcaaggtgctcgacgaaatgcttcagaaagaatctgtttttcctcctaatagaatcacagcggatattgtgttacacgaggtttggaaggaaaggcttttgacagaagaaaagataattgctttgatttcaagatttagctctcatggtgtctccccaaactctgtttggttgactcggtttatatcaagtctatgcaaaaatgctcgcgccaatactgcttgggatattttgagcgacctgatgaagaacaaaaccccacttgaagctcctcccttcaatgcgcttttgtcttgcttaggaaggaatatggacattagtagaatgaatgatttagtcttgaagatggatgaggtgaaaatccggcctgatgttgtgactttagggattcttattaacactttatgcaaatcaagaagggtagatgaagctctcgaagtttttgaacaaatgcgtggaaagagaactgatgatggaaatgtgattaaagctgattcgattcattttaatactctcattgacgggctctgcaaggtggggaggttgaaagaagcagaggagttattggtaaggatgaaactggaagagagatgtgtgcccaatgcagttacttacaattgcttgattgatgggtattgcagagctggaaagcttgagacggctaaagaagtcgtttctcggatgaaagaggacgagattaaacctaatgtggtaactgttaatacaatcgttggtgggatgtgcaggcaccatggattgaacatggcggttgttttctttatggatatggaaaaggaaggcgtgaaagggaatgtggttacttatatgacattgattcatgcttgttgcagcgtcagtaatgtagagaaggctatgtattggtatgaaaaaatgttggaagctggttgttctcctgatgcaaagatctattatgctttgatctctggattgtgccaagttagacgggatcatgacgccattagagtggtggagaaactgaaagaaggagggttttctcttgacttattggcttacaacatgcttattgggttgttttgtgataagaataatgcagagaaagtctatgagatgctaaccgatatggaaaaagaagggaagaaacctgattccatcacttacaacactctgatttcgtttttcggtaaacacaaggacttcgagagtgttgagagaatgatggagcagatgagagaagacgggttagacccgactgtcacgacatatggagcggtgattgacgcttattgctcagtcggcgaattagacgaagcattgaagctctttaaggacatgggtttgcactcaaaggtcaatccgaacactgtaatatacaacattctcataaacgcattttctaagctggggaatttcgggcaagcgctctctctgaaagaggaaatgaagatgaagatggtgagacctaatgttgaaacttacaatgccttgtttaagtgtcttaacgagaaaacccaaggagagacattacttaaactgatggatgagatggtcgaacagtcttgtgaaccaaatcagatcacaatggagattctaatggagcgtctctcaggttctgatgagttagttaagctgaggaagtttatgcaaggctactctgttgcttcgccgaccgagaaagcttcacctttcgatgtctttagcttgggataatgttcttttagatacagtaaccattactataatgtttttaataatttcttgattatgcattttatataattac

SEQ ID NO: 99619 - protein, 766 aa, Arabidopsis thaliana; identical to SEQ ID NO: 41448
  peptide (1)..(766): Ceres Seq. ID no. 13603330

SEQ ID NO: 99620 - protein, 763 aa, Arabidopsis thaliana; identical to SEQ ID NO: 41449
  peptide (1)..(763): Ceres Seq. ID no. 13603331

SEQ ID NO: 99621 - protein, 602 aa, Arabidopsis thaliana; identical to SEQ ID NO: 41450
  peptide (1)..(602): Ceres Seq. ID no. 13603332

SEQ ID NO: 99622 - DNA, 836 bp, Arabidopsis thaliana
  misc_feature (1)..(836): Ceres Seq. ID no. 13603344
  misc_feature (1)..(836): Ortholog of  Ceres SEQ ID NO 13595187 as cited in SEQ ID NO 56052
  misc_feature (1)..(836): Ortholog of  Ceres SEQ ID NO 14312239 as cited in SEQ ID NO 59176
  misc_feature (1)..(836): Ortholog of  Ceres SEQ ID NO 14313718 as cited in SEQ ID NO 59559
  misc_feature (1)..(836): Ortholog of  Ceres SEQ ID NO 15169505 as cited in SEQ ID NO 61011
  misc_feature (1)..(836): Ortholog of  Ceres SEQ ID NO 13662053 as cited in SEQ ID NO 61547
  misc_feature (1)..(836): Ortholog of  Ceres SEQ ID NO 13624283 as cited in SEQ ID NO 0
acgatagcctctcatcttcttttttcctctccatcatcttctcttatcaactttagactcacaagcctcctctcatcttcaccataaccgaaaaaccaaacaaaaaatccttagataatcagatcttgatattatggatcatatcatcggctttatgggcacaacaaacatgtcacataacacaaaccttatgatcgctgccgcagccactaccactacgacctcttcgtcttcctcttcgtcctccggaggctcggggactaaccagctaagcaggtacgagaatcagaagagaagagattggaacactttcggacagtatctacgcaatcaccgtccaccactttctctctcccgttgcagtggtgctcatgttcttgaattcctcaggtacctcgaccaattcggcaagactaaggttcacacacacctatgtccgttcttcggacacccaaacccaccagcaccatgtgcctgtccactccgacaagcgtggggtagtctggacgcactcattggccgtcttagagctgcttttgaagagaacggtggttcaccagagacgaacccttttggtgcacgagccgttcgactctacctaagggaagtacgtgactcgcaggctaaagcacgtgggatcagctatgaaaaaaagaagcgcaagcgacctcctccgccactaccaccggctcagccggcgatttcaagtagccctaattaacattaagtcatgagtaagatgtttcaatgaactacgtttgtttacaaatttttatcaatgacgaacatgcacgagttcttttaaagtcacatgccctttcctaaacttttatttg

SEQ ID NO: 99623 - protein, 195 aa, Arabidopsis thaliana; identical to SEQ ID NO: 22865
  peptide (1)..(195): Ceres Seq. ID no. 13603345

SEQ ID NO: 99624 - protein, 188 aa, Arabidopsis thaliana; identical to SEQ ID NO: 22866
  peptide (1)..(188): Ceres Seq. ID no. 13603346

SEQ ID NO: 99625 - protein, 183 aa, Arabidopsis thaliana; identical to SEQ ID NO: 22867
  peptide (1)..(183): Ceres Seq. ID no. 13603347

SEQ ID NO: 99626 - DNA, 1110 bp, Arabidopsis thaliana
  misc_feature (1)..(1110): Ceres Seq. ID no. 13603350
  misc_feature (1)..(1110): Ortholog of  Ceres SEQ ID NO 13599278 as cited in SEQ ID NO 0
ataattaaagtcttcttcttcttcttcttctctacaaattatctcactctcttcgtttttttttccttctcaacaatggcgacttcttctactttctcgtcactactaccttcaccaccagctcttctttccgaccaccgttctcctccaccatccatcagatactccttttctcccttaactactccaaaatcgtctcgtttgggtttcactgtaccggagaagagaaacctcgctgctaattcgtctctcgttgaagtatccattggcggagaaagtgacccaccaccatcatcatctggatcaggaggagacgacaagcaaattgcattactcaaactcaaattacttagtgtagtttcgggattaaacagaggacttgtggcgagtgttgatgatttagaaagagctgaagtggctgctaaagaacttgaaactgctgggggaccggttgatttaaccgatgatcttgataagcttcaagggaaatggaggctgttgtatagtagtgcgttctcttctcggtctttaggtggtagccgtcctggtctacctactggacgtttgatccctgttactcttggccaggtgtttcaacggattgatgtgtttagcaaagattttgataacatagcagaggtggaattaggagccccttggccatttccgccattagaagccactgcgacattggcacacaagtttgaactcttaggcacttgcaagatcaagataacatttgagaaaacaactgtgaagacatcgggaaacttgtcgcagattcctccgtttgatatcccgaggcttcccgacagtttcagaccatcgtcaaaccctggaactggggatttcgaagttacctatgttgatgataccatgcgcataactcgcggggacagaggtgaacttagggtattcgtcattgcttaattctcaaagctttgacatgtaaagataaataaatactttctgcttgatgcagtctcatgagttttgtacaaatcatgtgaacatataaatgcgctttataagtaaatgagtgtcttgttcaatgaatcatatgaaagaatttgtatgactcagaaaattggacaatgatatagaccttcc

SEQ ID NO: 99627 - protein, 309 aa, Arabidopsis thaliana
  peptide (1)..(309): Ceres Seq. ID no. 13603351
IIKVFFFFFFSTNYLTLFVFFSFSTMATSSTFSSLLPSPPALLSDHRSPPPSIRYSFSPLTTPKSSRLGFTVPEKRNLAANSSLVEVSIGGESDPPPSSSGSGGDDKQIALLKLKLLSVVSGLNRGLVASVDDLERAEVAAKELETAGGPVDLTDDLDKLQGKWRLLYSSAFSSRSLGGSRPGLPTGRLIPVTLGQVFQRIDVFSKDFDNIAEVELGAPWPFPPLEATATLAHKFELLGTCKIKITFEKTTVKTSGNLSQIPPFDIPRLPDSFRPSSNPGTGDFEVTYVDDTMRITRGDRGELRVFVIA

SEQ ID NO: 99628 - protein, 284 aa, Arabidopsis thaliana
  peptide (1)..(284): Ceres Seq. ID no. 13603352
MATSSTFSSLLPSPPALLSDHRSPPPSIRYSFSPLTTPKSSRLGFTVPEKRNLAANSSLVEVSIGGESDPPPSSSGSGGDDKQIALLKLKLLSVVSGLNRGLVASVDDLERAEVAAKELETAGGPVDLTDDLDKLQGKWRLLYSSAFSSRSLGGSRPGLPTGRLIPVTLGQVFQRIDVFSKDFDNIAEVELGAPWPFPPLEATATLAHKFELLGTCKIKITFEKTTVKTSGNLSQIPPFDIPRLPDSFRPSSNPGTGDFEVTYVDDTMRITRGDRGELRVFVIA

SEQ ID NO: 99629 - DNA, 945 bp, Arabidopsis thaliana
  misc_feature (1)..(945): Ceres Seq. ID no. 13603353
  misc_feature (1)..(945): Ortholog of  Ceres SEQ ID NO 14302035 as cited in SEQ ID NO 51855
  misc_feature (1)..(945): Ortholog of  Ceres SEQ ID NO 14301432 as cited in SEQ ID NO 56425
gtctgtctgagtggattcgtatactatattgtgatgagagtcaccacaacaaattcgttgacatgagcctttcatatatttttgaattatactgaactaaaacccatttaaaagcccatttaaagacccattataagagtagagatactcagcccatttaaagataaaattacgtcatagcgatttttccattaaaagagtgaggaagagacaaaagtgattgattggtcagaaaaaatggaagcggcgaagaaacagagtgttacaaatcagcttctcgccgtgaaatcagcttccggcaagacttttagccagttagccgcggagacaggtctaaccaacgtatacgtagctcagcttctccgtcgtcaagctcagctcaaaccggacacagtcccaaagcttaaggaagctttaccagctctgaccgatgaactaatcggagatatgatgtctcctccgtggagatcctatgatcctaatctcatccaagaacccactatctacaggttgaatgaagcagtgatgcattttggtgagagtataaaggagattatcaatgaagattttggagatggcatcatgtcggcgatagatttctattgctctgtcgacaaaatcaaaggagtggatggtaacaatcgcgtggttgtgacgcttgatggaaagtatctttcgcattccgaacagaggacggagaatatggtctcaaggctaaatctcaagggaggtacaagcgaatgataagaaagcctttacgtatccatgaaggccttattgtaagtggtaacgttgtaatacctatgtgtttgtttatctgtaatatatgcaacttcagcatctagattaaaagctgtttcaggttgaataacagtgaataaacaaaacttataaaacctttctatgtttatctttaacatcgtaatcgagttccgattcatgctt

SEQ ID NO: 99630 - protein, 168 aa, Arabidopsis thaliana; identical to SEQ ID NO: 34779
  peptide (1)..(168): Ceres Seq. ID no. 13603354

SEQ ID NO: 99631 - protein, 98 aa, Arabidopsis thaliana; identical to SEQ ID NO: 34780
  peptide (1)..(98): Ceres Seq. ID no. 13603355

SEQ ID NO: 99632 - protein, 97 aa, Arabidopsis thaliana; identical to SEQ ID NO: 34781
  peptide (1)..(97): Ceres Seq. ID no. 13603356

SEQ ID NO: 99633 - DNA, 3149 bp, Arabidopsis thaliana
  misc_feature (1)..(3149): Ceres Seq. ID no. 13603357
  misc_feature (1)..(3149): Ortholog of  Ceres SEQ ID NO 12584310 as cited in SEQ ID NO 67945
aatgtggcttggcttatctcctcagcacaagtgtttcctctttactcttcaaatccttcttcattctcccattcacaattccttcatttttcatttttaacttatcctccatttttttttctgaaaacacacaaaaaaatatattcggttttagaattccaagaaatccgggaatgagcatatctctctagctagactcattccagcaaactctgaatcaatttcccattttcagatccaaatccattgtgttaaaaagagggattaacaaaattgaatagttcttaacaaamaattagaagaaaaaaaaagaggagaaacaaaatgaaagtggcagttataggaagtggtataagtggattaggaagtgcttacgtacttgcgaatcaaggagttaaagaagttgtgttgtacgagaaagaagagtcattaggaggccatgccaagacggtgcgtttcgatggcgttgacttggatcttggtttcatggtctttaatcgtgttacatatccaaacatgatagagttcttcgagaaccttggagtagagatggaggtttcagacatgtctttcgcagtgagccttgacaatggcaaaggttgtgaatggggaagccgcaacggtgtctcgggcttatttgctcaaaagaagaacgttttaaatccgtatttctggcaaatgatcagagaaattgttagatttaaagaagacgtcttaaattacattgagaagcttgagggtaaccccgatatcgatcgaaaggaaaccttaggagaatttctcaatacacgtggatactctgagttgtttcagcaagcttacttagtaccgatatgcggttcgatatggtcatgcccatcagatggtgtcttaagcttctctgcttactctgttctttcgttttgttgcaaccaccaccttcttcagatctttgggaggccacagtggctaactgttgcaggacgttctcagacttacgtcgcaaaggttagggcagaattggagagactaggatgcaagatcagaacaagctgcgacgtaaaatctgtttcgacatccgaaaatggttgtgtaactgttacaagtggagatgggtctgaagaagtattcgataggtgcatattggctatgcacgccccagatgctctgagattgcttggtgaagaagttacatttgacgaatctagggttcttggtgctttccaatacgtttacagcgatatatatctccatcatgacattgatttgatgccacggaacaaagcagcgtggagtgcgtggaatttcttgggaagtacggaaaagaaagtatgtgtaacatactggctcaatatacttcagaaccttggcgagaacagtgaaccattctttgtaacacttaacccagacgagaccccaaagaaagcattgctcaaatggaccactggtcaccctgtaccatcagttgcagcttcgatagcttcacaagagcttcaccagattcaaggcaaacgtaacatatggttctgtggtgcatatcagggctatggtttccatgaagacgggctaaaggccggtatggcggctgcacgaggtttgttagggaaagaaacagctcttctgaacaatccgcgacatatggtcccttccttgacagaaacaggagctcggcttttcgttactagattcttgggacaatttatatcaaccggttctgtaacaatactagaagaaggaggaacaatgttcacattcggagggaaggattctacttgtcctctgaaatctatcctcaagattcacagtcctcaattttactggaaggttatgacacaagcggatttaggacttgcagatgcttatatcaatggagatttttctttcgttgataaagaatcaggacttttaaatctgattatgattctcattgctaacagagatacaaaatcaaatcttactaagaaaaggggatggtggacaccgatgtttttaactgcgggtttagcatctgcaaagtattttctaaagcatgtctctaggcagaacactctaacacaagctcgtagaaacatttctcgtcactatgaccttagcaacgagcttttcggtttgttcttggatgataccatgacttactcctcggcagtattcaagtcggatgatgaggatctgagaactgcacagatgagaaaaatatctcttctgattgataaggcgagaatagagaaggaccatgaggttttagagataggatgtggatggggaactttggccatagaagttgtgagaagaactggatgcaaatacaccggcattacgctatctattgagcagcttaaatatgctgaagaaaaagtgaaagaagctggacttcaggaccggattacttttgagctccgcgattatcgccaactatctgatgctcacaaatatgacagaattatatcttgcgagatgctagaagcggtcggacatgagtttatggagatgtttttcagtcgatgtgaagccgcacttgctgaagacggcctaatggtcttgcagttcatatcgacacccgaagagcgttacaatgagtacagactaagttcagatttcattaaagaatacatattccctggtgcatgcgttccttctttagccaaagtcacttcagccatgtcctcttcttctaggctatgcattgaacatgttgagaacattgggattcattactaccaaacattgagattgtggaggaagaacttcttggagagacagaaacaaatcatggctcttggatttgatgataaattcgtaaggacatgggaatattattttgattattgcgcagctggattcaagactcgtactcttggagactaccagttggtgttctcgcgtccagggaacgtagctgcatttgcggattcataccgaggatttccttctgcttattgtgtctcttgagaggcatccacaacgtttgattgcttatatttttcgatctatacaatgtttgrttgacctgaaatactagtattgattattgatttgtttggtgtgccaatttgtgaaagtttgttgaataaaagagagatttactttggwaaaaaataagcagtactcgtggagctttatgaccaattcatacactccatgcacaatcttgtatgcgaaacctttttgac

SEQ ID NO: 99634 - protein, 867 aa, Arabidopsis thaliana
  peptide (1)..(867): Ceres Seq. ID no. 15218796
MKVAVIGSGISGLGSAYVLANQGVKEVVLYEKEESLGGHAKTVRFDGVDLDLGFMVFNRVTYPNMIEFFENLGVEMEVSDMSFAVSLDNGKGCEWGSRNGVSGLFAQKKNVLNPYFWQMIREIVRFKEDVLNYIEKLEGNPDIDRKETLGEFLNTRGYSELFQQAYLVPICGSIWSCPSDGVLSFSAYSVLSFCCNHHLLQIFGRPQWLTVAGRSQTYVAKVRAELERLGCKIRTSCDVKSVSTSENGCVTVTSGDGSEEVFDRCILAMHAPDALRLLGEEVTFDESRVLGAFQYVYSDIYLHHDIDLMPRNKAAWSAWNFLGSTEKKVCVTYWLNILQNLGENSEPFFVTLNPDETPKKALLKWTTGHPVPSVAASIASQELHQIQGKRNIWFCGAYQGYGFHEDGLKAGMAAARGLLGKETALLNNPRHMVPSLTETGARLFVTRFLGQFISTGSVTILEEGGTMFTFGGKDSTCPLKSILKIHSPQFYWKVMTQADLGLADAYINGDFSFVDKESGLLNLIMILIANRDTKSNLTKKRGWWTPMFLTAGLASAKYFLKHVSRQNTLTQARRNISRHYDLSNELFGLFLDDTMTYSSAVFKSDDEDLRTAQMRKISLLIDKARIEKDHEVLEIGCGWGTLAIEVVRRTGCKYTGITLSIEQLKYAEEKVKEAGLQDRITFELRDYRQLSDAHKYDRIISCEMLEAVGHEFMEMFFSRCEAALAEDGLMVLQFISTPEERYNEYRLSSDFIKEYIFPGACVPSLAKVTSAMSSSSRLCIEHVENIGIHYYQTLRLWRKNFLERQKQIMALGFDDKFVRTWEYYFDYCAAGFKTRTLGDYQLVFSRPGNVAAFADSYRGFPSAYCVS

SEQ ID NO: 99635 - protein, 813 aa, Arabidopsis thaliana
  peptide (1)..(813): Ceres Seq. ID no. 15218797
MVFNRVTYPNMIEFFENLGVEMEVSDMSFAVSLDNGKGCEWGSRNGVSGLFAQKKNVLNPYFWQMIREIVRFKEDVLNYIEKLEGNPDIDRKETLGEFLNTRGYSELFQQAYLVPICGSIWSCPSDGVLSFSAYSVLSFCCNHHLLQIFGRPQWLTVAGRSQTYVAKVRAELERLGCKIRTSCDVKSVSTSENGCVTVTSGDGSEEVFDRCILAMHAPDALRLLGEEVTFDESRVLGAFQYVYSDIYLHHDIDLMPRNKAAWSAWNFLGSTEKKVCVTYWLNILQNLGENSEPFFVTLNPDETPKKALLKWTTGHPVPSVAASIASQELHQIQGKRNIWFCGAYQGYGFHEDGLKAGMAAARGLLGKETALLNNPRHMVPSLTETGARLFVTRFLGQFISTGSVTILEEGGTMFTFGGKDSTCPLKSILKIHSPQFYWKVMTQADLGLADAYINGDFSFVDKESGLLNLIMILIANRDTKSNLTKKRGWWTPMFLTAGLASAKYFLKHVSRQNTLTQARRNISRHYDLSNELFGLFLDDTMTYSSAVFKSDDEDLRTAQMRKISLLIDKARIEKDHEVLEIGCGWGTLAIEVVRRTGCKYTGITLSIEQLKYAEEKVKEAGLQDRITFELRDYRQLSDAHKYDRIISCEMLEAVGHEFMEMFFSRCEAALAEDGLMVLQFISTPEERYNEYRLSSDFIKEYIFPGACVPSLAKVTSAMSSSSRLCIEHVENIGIHYYQTLRLWRKNFLERQKQIMALGFDDKFVRTWEYYFDYCAAGFKTRTLGDYQLVFSRPGNVAAFADSYRGFPSAYCVS

SEQ ID NO: 99636 - protein, 803 aa, Arabidopsis thaliana
  peptide (1)..(803): Ceres Seq. ID no. 15218798
MIEFFENLGVEMEVSDMSFAVSLDNGKGCEWGSRNGVSGLFAQKKNVLNPYFWQMIREIVRFKEDVLNYIEKLEGNPDIDRKETLGEFLNTRGYSELFQQAYLVPICGSIWSCPSDGVLSFSAYSVLSFCCNHHLLQIFGRPQWLTVAGRSQTYVAKVRAELERLGCKIRTSCDVKSVSTSENGCVTVTSGDGSEEVFDRCILAMHAPDALRLLGEEVTFDESRVLGAFQYVYSDIYLHHDIDLMPRNKAAWSAWNFLGSTEKKVCVTYWLNILQNLGENSEPFFVTLNPDETPKKALLKWTTGHPVPSVAASIASQELHQIQGKRNIWFCGAYQGYGFHEDGLKAGMAAARGLLGKETALLNNPRHMVPSLTETGARLFVTRFLGQFISTGSVTILEEGGTMFTFGGKDSTCPLKSILKIHSPQFYWKVMTQADLGLADAYINGDFSFVDKESGLLNLIMILIANRDTKSNLTKKRGWWTPMFLTAGLASAKYFLKHVSRQNTLTQARRNISRHYDLSNELFGLFLDDTMTYSSAVFKSDDEDLRTAQMRKISLLIDKARIEKDHEVLEIGCGWGTLAIEVVRRTGCKYTGITLSIEQLKYAEEKVKEAGLQDRITFELRDYRQLSDAHKYDRIISCEMLEAVGHEFMEMFFSRCEAALAEDGLMVLQFISTPEERYNEYRLSSDFIKEYIFPGACVPSLAKVTSAMSSSSRLCIEHVENIGIHYYQTLRLWRKNFLERQKQIMALGFDDKFVRTWEYYFDYCAAGFKTRTLGDYQLVFSRPGNVAAFADSYRGFPSAYCVS

SEQ ID NO: 99637 - DNA, 3148 bp, Arabidopsis thaliana
  misc_feature (1)..(3148): Ceres Seq. ID no. 13603358
  misc_feature (1)..(3148): Ortholog of  Ceres SEQ ID NO 12584310 as cited in SEQ ID NO 67945
aatgtggcttggcttatctcctcagcacaagtgtttcctctttactcttcaaatccttcttcattctcccattcacaattccttcatttttcatttttaacttatcctccatttttttttctgaaaacacacaaaaaaatatattcggttttagaattccaagaaatccgggaatgagcatatctctctagctagactcattccagcaaactctgaatcaatttcccattttcagatccaaatccattgtgttaaaaagagggattaacaaaattgaatagttcttaacaaacaattagaagaaaaaaaaagaggagaaacaaaatgaaagtggcagtgataggaagtggaataagtggattaggaagtgcttacgtacttgcgaatcaaggagttaaagaagttgtgttatacgagaaagaagagtcattaggaggtcatgctaaaacggtgcgtttcgatggcgttgacttggatcttggtttcatggtctttaatcgtgttacatatccaaacatgatggagttcttcgagaatcttggagtagagatggaggtttcagacatgtctttcgcagtgagccttgacaatgggaaaggttgtgaatggggaagccgcaacggtgtctcgggcttatttgctcagaagaagaacgttttaaatccgtatttctggcaaatgatcagagaaattgttagatttaaagaagacgtcttaaagtacattgaggagcttgagggtaaccccgatattgatcgaaaggaaacattaggagaatttctcaattcacgtggatactctgagttgtttcagcaagcttacttggtaccgatatgcggttcgatatggtcatgcccatcagacggtgtcttaagcttctctgcatactctgttctttcgttttgctgcaaccaccatcttcttcagatctttgggaggccacagtggctaactgttgcaggacgttctcagacttatgtcgcaaaggttaggacagaattggagagactaggatgcaggatcagaacaagctgcgacgtaaaatctgtttcgacatccgaaaatggttgtgtaactgttacaagtggagatgggtctaaagaagtattcgataggtgcatattggctatgcacgccccagatgctctgagattgcttggtgaagaagtaacgtttgacgaatctagggttcttggtgctttccaatacgtttacagcgatatatatctccatcacgacattgatttgatgccaaggaaccaagcagcgtggagtgcgtggaatttcttgggaagtacggaaaagaaagtatgtgtaacatactggctcaatatacttcagaaccttggcgagaacagtgaaccattctttgtaacacttaacccagacgagaccccaaagaaaacgttgctcaaatggaccactggtcaccctgtaccttcagttgctgcttggacagcttcacaagagcttcacaagattcaaggcaaacgtaacatatggttctgtggtgcatatcagggctatggtttccatgaagatggactaaaggctggtatggctgctgcacgaggtttgttaggcaaagaaactgctcttctgaacaatccgcgacatatggtcccttccttgacagaaacaggagctcggcttttcgttacaagattcttgggacaattcatatcaaccggttctgtaacaatactagaagaaggaggaacaatgttcacattcggagggaaggattctacttgtcctctaaaatctatcctcaagattcacagtcctcaattttactggaaggttatgacacaagcggatttaggacttgcagatgcttatatcaatggagatttttctttcgttgataaagaatcaggacttttaaatctgattatgattctcattgctaacagagatacaaaatcaaatcttagtaagaaaaggggatggtggacaccgatgtttttaactgcgggtttagcatctgcaaagtattttctaaagcatgtctctaggcagaacactctaacacaagctcgtagaaacatttctcgtcactatgaccttagcaacgagcttttcggtttcttcttggatgataccatgacttactcctctgcagtattcaagtcggatgatgaggatctgagaactgcacagatgagaaaaatctcgcttctgattgataaggcgagaatagagaaggaccacgaggttttagagataggatgtggatggggaactttggccatagaagttgtgagaagaactggatgcaaatacaccgggattacgctatctattgaacagcttaaatatgctgaagaaaaagtgaaagaagctggacttcaggactggattacttttgagctccgcgattatcgccaactatctgatgctcagaaatatgacagaattatatcttgcgagatgctagaagcggtcggacatgagttcatggagatgtttttcagtcgatgtgaagccgcacttgcagaaaatggcctaatagtcttgcagttcatatcgatacccgaagagcgttacaatgagtacagactaagttcagatttcattaaagaatacatattccctggtggatgccttccttctttagccagagtcactacagccatgtcctcttcttctaggctatgcatcgaacatgttgagaacattgggattcattactaccaaacattgagattgtggaggaagaacttcttggcgagacagaaacaaatcatggctcttggatttgatgacaaattcgtaaggacgtgggaatattattttgattattgcgcagctggattcaagactcttactcttggaaactaccagttggtgttctcgcgtccagggaacgtagctgcatttgcggattcatacagaggattcccttctgcttattgtgtcacctgagaggcatccacaacgtttgattgcttatatttttcgatctatacaatgtttgattgacctgaaatactagtattgattattgatttgtttggtgtgccaatttgtgaaagtttgttgaataaaagagagatttactttggaaaaaaataagcagtactcgtggagctttatgaccaattcatacactccatgcacaatcttgtatgcgaaacctttttga

SEQ ID NO: 99638 - protein, 867 aa, Arabidopsis thaliana
  peptide (1)..(867): Ceres Seq. ID no. 13603359
MKVAVIGSGISGLGSAYVLANQGVKEVVLYEKEESLGGHAKTVRFDGVDLDLGFMVFNRVTYPNMMEFFENLGVEMEVSDMSFAVSLDNGKGCEWGSRNGVSGLFAQKKNVLNPYFWQMIREIVRFKEDVLKYIEELEGNPDIDRKETLGEFLNSRGYSELFQQAYLVPICGSIWSCPSDGVLSFSAYSVLSFCCNHHLLQIFGRPQWLTVAGRSQTYVAKVRTELERLGCRIRTSCDVKSVSTSENGCVTVTSGDGSKEVFDRCILAMHAPDALRLLGEEVTFDESRVLGAFQYVYSDIYLHHDIDLMPRNQAAWSAWNFLGSTEKKVCVTYWLNILQNLGENSEPFFVTLNPDETPKKTLLKWTTGHPVPSVAAWTASQELHKIQGKRNIWFCGAYQGYGFHEDGLKAGMAAARGLLGKETALLNNPRHMVPSLTETGARLFVTRFLGQFISTGSVTILEEGGTMFTFGGKDSTCPLKSILKIHSPQFYWKVMTQADLGLADAYINGDFSFVDKESGLLNLIMILIANRDTKSNLSKKRGWWTPMFLTAGLASAKYFLKHVSRQNTLTQARRNISRHYDLSNELFGFFLDDTMTYSSAVFKSDDEDLRTAQMRKISLLIDKARIEKDHEVLEIGCGWGTLAIEVVRRTGCKYTGITLSIEQLKYAEEKVKEAGLQDWITFELRDYRQLSDAQKYDRIISCEMLEAVGHEFMEMFFSRCEAALAENGLIVLQFISIPEERYNEYRLSSDFIKEYIFPGGCLPSLARVTTAMSSSSRLCIEHVENIGIHYYQTLRLWRKNFLARQKQIMALGFDDKFVRTWEYYFDYCAAGFKTLTLGNYQLVFSRPGNVAAFADSYRGFPSAYCVT

SEQ ID NO: 99639 - protein, 813 aa, Arabidopsis thaliana
  peptide (1)..(813): Ceres Seq. ID no. 13603360
MVFNRVTYPNMMEFFENLGVEMEVSDMSFAVSLDNGKGCEWGSRNGVSGLFAQKKNVLNPYFWQMIREIVRFKEDVLKYIEELEGNPDIDRKETLGEFLNSRGYSELFQQAYLVPICGSIWSCPSDGVLSFSAYSVLSFCCNHHLLQIFGRPQWLTVAGRSQTYVAKVRTELERLGCRIRTSCDVKSVSTSENGCVTVTSGDGSKEVFDRCILAMHAPDALRLLGEEVTFDESRVLGAFQYVYSDIYLHHDIDLMPRNQAAWSAWNFLGSTEKKVCVTYWLNILQNLGENSEPFFVTLNPDETPKKTLLKWTTGHPVPSVAAWTASQELHKIQGKRNIWFCGAYQGYGFHEDGLKAGMAAARGLLGKETALLNNPRHMVPSLTETGARLFVTRFLGQFISTGSVTILEEGGTMFTFGGKDSTCPLKSILKIHSPQFYWKVMTQADLGLADAYINGDFSFVDKESGLLNLIMILIANRDTKSNLSKKRGWWTPMFLTAGLASAKYFLKHVSRQNTLTQARRNISRHYDLSNELFGFFLDDTMTYSSAVFKSDDEDLRTAQMRKISLLIDKARIEKDHEVLEIGCGWGTLAIEVVRRTGCKYTGITLSIEQLKYAEEKVKEAGLQDWITFELRDYRQLSDAQKYDRIISCEMLEAVGHEFMEMFFSRCEAALAENGLIVLQFISIPEERYNEYRLSSDFIKEYIFPGGCLPSLARVTTAMSSSSRLCIEHVENIGIHYYQTLRLWRKNFLARQKQIMALGFDDKFVRTWEYYFDYCAAGFKTLTLGNYQLVFSRPGNVAAFADSYRGFPSAYCVT

SEQ ID NO: 99640 - protein, 803 aa, Arabidopsis thaliana
  peptide (1)..(803): Ceres Seq. ID no. 13603361
MMEFFENLGVEMEVSDMSFAVSLDNGKGCEWGSRNGVSGLFAQKKNVLNPYFWQMIREIVRFKEDVLKYIEELEGNPDIDRKETLGEFLNSRGYSELFQQAYLVPICGSIWSCPSDGVLSFSAYSVLSFCCNHHLLQIFGRPQWLTVAGRSQTYVAKVRTELERLGCRIRTSCDVKSVSTSENGCVTVTSGDGSKEVFDRCILAMHAPDALRLLGEEVTFDESRVLGAFQYVYSDIYLHHDIDLMPRNQAAWSAWNFLGSTEKKVCVTYWLNILQNLGENSEPFFVTLNPDETPKKTLLKWTTGHPVPSVAAWTASQELHKIQGKRNIWFCGAYQGYGFHEDGLKAGMAAARGLLGKETALLNNPRHMVPSLTETGARLFVTRFLGQFISTGSVTILEEGGTMFTFGGKDSTCPLKSILKIHSPQFYWKVMTQADLGLADAYINGDFSFVDKESGLLNLIMILIANRDTKSNLSKKRGWWTPMFLTAGLASAKYFLKHVSRQNTLTQARRNISRHYDLSNELFGFFLDDTMTYSSAVFKSDDEDLRTAQMRKISLLIDKARIEKDHEVLEIGCGWGTLAIEVVRRTGCKYTGITLSIEQLKYAEEKVKEAGLQDWITFELRDYRQLSDAQKYDRIISCEMLEAVGHEFMEMFFSRCEAALAENGLIVLQFISIPEERYNEYRLSSDFIKEYIFPGGCLPSLARVTTAMSSSSRLCIEHVENIGIHYYQTLRLWRKNFLARQKQIMALGFDDKFVRTWEYYFDYCAAGFKTLTLGNYQLVFSRPGNVAAFADSYRGFPSAYCVT

SEQ ID NO: 99641 - DNA, 928 bp, Arabidopsis thaliana
  misc_feature (1)..(928): Ceres Seq. ID no. 13603362
  misc_feature (1)..(928): Ortholog of  Ceres SEQ ID NO 14314461 as cited in SEQ ID NO 52355
  misc_feature (1)..(928): Ortholog of  Ceres SEQ ID NO 14306812 as cited in SEQ ID NO 56361
  misc_feature (1)..(928): Ortholog of  Ceres SEQ ID NO 15168461 as cited in SEQ ID NO 57068
ctttgtatcatctctctgtttttccgaagaactaacacatgtcgggacctcagtgctgtgaaaacccgccaactcttaacccggtttccgggtcgggtcatgtcgagaagctgggtgggcttgatgcctacgtctccggctctgccgagtccaagctctgcgtcctcctcatttctgatatttttggttttgaagctccaaacttaagggcgcttgcggacaaggttgcagcttctggattctatgttgtggttcctgattactttggtggagatccttataatccctctaaccaggacagacccatccctgtctggatcaaagaccatggctgtgataagggctttgaaaacacgaaaccagtacttgaaaccataaagaacaaaggcataactgccattggagccgcagggatgtgttggggtgcaaaagtagtggtggaactgtctaaagaagagcttattcaagcagctgtgttgcttcatccttcttttgtcaatgttgatgatatcaaaggtgggaaggctccaattgctatattaggagctgaaattgatcaaatgtccccaccagcactcttgaagcaatttgaggagattctatcttccaaacccgaggtgaatagttacgtgaagatacacccgaaagtgtcacacggatggacagttagatacaacatcgatgaaccagaggcggttaaagcagcagaagaagctcacaaggagatgcttgattggtttgtgacctacatcaaatgatttgagaaagaaagaaaggtattgtctattacttcatatatgcaaagaataaaaattaaagagagacaaagcaaaactcttggttggtgtttcaatttctactttctatagtcttttgaagcattctctgagattctgtgataccttttgttaatcattgttttatgatt

SEQ ID NO: 99642 - protein, 239 aa, Arabidopsis thaliana; identical to SEQ ID NO: 28662
  peptide (1)..(239): Ceres Seq. ID no. 13603363

SEQ ID NO: 99643 - DNA, 1307 bp, Arabidopsis thaliana
  misc_feature (1)..(1307): Ceres Seq. ID no. 13603364
  misc_feature (1)..(1307): Ortholog of  Ceres SEQ ID NO 13638540 as cited in SEQ ID NO 51531
  misc_feature (1)..(1307): Ortholog of  Ceres SEQ ID NO 13595337 as cited in SEQ ID NO 56160
  misc_feature (1)..(1307): Ortholog of  Ceres SEQ ID NO 12615230 as cited in SEQ ID NO 62513
atatcaatcaatcgaaaaacctttctctcttctttcggagccgtcgcttgtgaaactttccggcgatttaacagagtcatgatggaaatacgaactccgaagactggcaaagccaagcgtgttctcgaaagccgagctcctaagttggttgaaactgggaagaagacgttgatacttcatggaacaaagacgagtgctacacttagctctgtaatgacggaactctaccgtttgaagaagggaggtgccatcagatattcaaggaggaatgagaatattaggcctttcgagagtggaggtgaaacttcattagagttcttctctcagaaaacagattgtagcatttttgtgtatggttctcacacgaagaaacgacctgacaatcttgtacttgggagaatgtatgatcaccaagtctatgatcttatagaagttgggattgagaactttaaatccttgcgggcgttttcgtatgacaagaaattcgcacctcatgaaggaacaaagcctttcatttgctttattggtgaaggttttgagaatgtatcagagcttaagcatctcaaagaagtcctcactgatctttttcgtggcgaggttgtggataatctaaatcttactggtttagaccgcgcttacgtatgttcagctatatccccaacaaaggttttccttactcattgcgcattgaagcttaaaaagtcaggatccattgttccgagaatggagcttgttgaagtcggtccatccatggacttggttatcaggcgtaatcgtcttcctaacgatagcttaatgaaagaagcaatgagaacatccaaggataagcctaagaagaaggagaaaaacgttgatcaagatgcagtactagggaagactgggaagatttatatgcctgatcagaagctgaaagaaatgaaactgttcgataaatctaagggatcgaagagagagcggaaagacgctaagcttaagcataaggaagagactgttgccaaaaagatgaaggtgtcttctgagtgactcaacagaccactcttggctctgcatcaacagctttcaatatgtggaagatgaaatgattttgtagtgtaatgagcttgacttttatttttccattagaatctataactgaatgttttctatacgctaatattttattaaggtgattttgttttgttaaaactctgcagcaacagaaactggatatgataaaaacacatttttgtctatctctgtttcctactgcagtacatgcgtaagacagcaacttttttcccgtgttgaatgagaccacaatttttgcc

SEQ ID NO: 99644 - protein, 340 aa, Arabidopsis thaliana; identical to SEQ ID NO: 35984
  peptide (1)..(340): Ceres Seq. ID no. 13603365

SEQ ID NO: 99645 - protein, 314 aa, Arabidopsis thaliana; identical to SEQ ID NO: 35985
  peptide (1)..(314): Ceres Seq. ID no. 13603366

SEQ ID NO: 99646 - protein, 313 aa, Arabidopsis thaliana; identical to SEQ ID NO: 35986
  peptide (1)..(313): Ceres Seq. ID no. 13603367

SEQ ID NO: 99647 - DNA, 1788 bp, Arabidopsis thaliana
  misc_feature (1)..(1788): Ceres Seq. ID no. 13603371
  misc_feature (1)..(1788): Ortholog of  Ceres SEQ ID NO 13596816 as cited in SEQ ID NO 62287
atcccaaatcacactcaccactctctcttctcaacatttttctccaacaaaaacaaaaaacaatgactccttttgctctgttcctcttcactctccttgccctttcaagttcatgttgctctgccattggtccacaaaacaacagaacagtgttagcacttgcaagcagaattgggatcaactatggaaaattaggcaacaatcttccttttccttaccaatcaatcaacctcatcaaaaccattaaagcaggccacgtcaagctctatgacgccgatccagaaaccctaaagctcctctctacgaccaatctttacgtcaccatcatggtccctaacaaccagatcatctcaataggtgctgatcaagccgctgctgataactgggtcgccactaatgtccttccttttcacccgcaaacccgaatccgattcgtcctcgttggcaacgaggtcctcagctacagttctgatcaagacaagcaaatatgggctaatcttgtccctgccatgcgtaaagtagtgaactctcttagagctcgtggaattcacaacatcaaagttgggacacctcttgccatggacgctcttcgttcgagttttcctccttcgagtggtacattccgggaagatatcgctgttccggtgatgttaccgttgttgaagtttctcaatggaacaaactctttcttcttccttgatgtttacccttacttcccttggtctactgatccggttaataaccatttggattttgctctgtttgaatcgaattctacttataccgatcctcaaaccggtttggtttacaccaatcttctagaccagatgctcgattcggttatctttgcgatgaccaagctcggttatccgaatatcagtctcgcaatctctgaaaccgggtggcctaatgacggtgatatccatgaaaccggagctaatattgtcaatgccgcgacgtataaccggaatttgatcaagaagatgactgctaacccgccactcggtacaccagctaggcgcggtgcacctataccgacgtttttgttctctttgttcaatgaaaaccagaaacccggttcgggaacagagagacattggggaattttgaaccctgacggtacaccgatctacgacatcgatttcagcggtagaagatcgttttctggttttgattcgttgcctaaaccgagtaacaatgttccgtttaaaggtaatgtatggtgtgtggcggttgatggggccgatgaggcagagctagggcaggcgcttaactttgcttgcggaagaagcaatgcaacatgtgcagcgttggctccaggaggagaatgctatgcaccggtgacggttacttggcatgcaagctatgcgtttagctcgtactgggctcagttccggaaccaaagctctcaatgctacttcaatggtttggctcgtgagaccacgaccaaccctggaaatgagcgttgcaagtttcctagcgttacattgtgaggctgcctcgtgactcaggcgtgtggaggaaaggatcaaaagaatcattcgcattaagttgattatatctcttgataattatgattagtttcctttttattccaagtttttactctttgtgtcccattgttgtgcaagatctataataatctatagaaatttgttcctcatcccttctcatttctcatatatctagtagtttattaatgttctgaaggaaattatgagaattttataactaattcaagaacatgttttgcgatcattactatacgagaaatatgaagtttttgat

SEQ ID NO: 99648 - protein, 496 aa, Arabidopsis thaliana
  peptide (1)..(496): Ceres Seq. ID no. 13603372
PKSHSPLSLLNIFLQQKQKTMTPFALFLFTLLALSSSCCSAIGPQNNRTVLALASRIGINYGKLGNNLPFPYQSINLIKTIKAGHVKLYDADPETLKLLSTTNLYVTIMVPNNQIISIGADQAAADNWVATNVLPFHPQTRIRFVLVGNEVLSYSSDQDKQIWANLVPAMRKVVNSLRARGIHNIKVGTPLAMDALRSSFPPSSGTFREDIAVPVMLPLLKFLNGTNSFFFLDVYPYFPWSTDPVNNHLDFALFESNSTYTDPQTGLVYTNLLDQMLDSVIFAMTKLGYPNISLAISETGWPNDGDIHETGANIVNAATYNRNLIKKMTANPPLGTPARRGAPIPTFLFSLFNENQKPGSGTERHWGILNPDGTPIYDIDFSGRRSFSGFDSLPKPSNNVPFKGNVWCVAVDGADEAELGQALNFACGRSNATCAALAPGGECYAPVTVTWHASYAFSSYWAQFRNQSSQCYFNGLARETTTNPGNERCKFPSVTL

SEQ ID NO: 99649 - protein, 476 aa, Arabidopsis thaliana
  peptide (1)..(476): Ceres Seq. ID no. 13603373
MTPFALFLFTLLALSSSCCSAIGPQNNRTVLALASRIGINYGKLGNNLPFPYQSINLIKTIKAGHVKLYDADPETLKLLSTTNLYVTIMVPNNQIISIGADQAAADNWVATNVLPFHPQTRIRFVLVGNEVLSYSSDQDKQIWANLVPAMRKVVNSLRARGIHNIKVGTPLAMDALRSSFPPSSGTFREDIAVPVMLPLLKFLNGTNSFFFLDVYPYFPWSTDPVNNHLDFALFESNSTYTDPQTGLVYTNLLDQMLDSVIFAMTKLGYPNISLAISETGWPNDGDIHETGANIVNAATYNRNLIKKMTANPPLGTPARRGAPIPTFLFSLFNENQKPGSGTERHWGILNPDGTPIYDIDFSGRRSFSGFDSLPKPSNNVPFKGNVWCVAVDGADEAELGQALNFACGRSNATCAALAPGGECYAPVTVTWHASYAFSSYWAQFRNQSSQCYFNGLARETTTNPGNERCKFPSVTL

SEQ ID NO: 99650 - protein, 388 aa, Arabidopsis thaliana
  peptide (1)..(388): Ceres Seq. ID no. 13603374
MVPNNQIISIGADQAAADNWVATNVLPFHPQTRIRFVLVGNEVLSYSSDQDKQIWANLVPAMRKVVNSLRARGIHNIKVGTPLAMDALRSSFPPSSGTFREDIAVPVMLPLLKFLNGTNSFFFLDVYPYFPWSTDPVNNHLDFALFESNSTYTDPQTGLVYTNLLDQMLDSVIFAMTKLGYPNISLAISETGWPNDGDIHETGANIVNAATYNRNLIKKMTANPPLGTPARRGAPIPTFLFSLFNENQKPGSGTERHWGILNPDGTPIYDIDFSGRRSFSGFDSLPKPSNNVPFKGNVWCVAVDGADEAELGQALNFACGRSNATCAALAPGGECYAPVTVTWHASYAFSSYWAQFRNQSSQCYFNGLARETTTNPGNERCKFPSVTL

SEQ ID NO: 99651 - DNA, 651 bp, Arabidopsis thaliana
  misc_feature (1)..(651): Ceres Seq. ID no. 13603375
  misc_feature (1)..(651): Ortholog of  Ceres SEQ ID NO 12556948 as cited in SEQ ID NO 54
aaaccgaccggtttaactcccaagagctacttggagttgtcgtaaacacagagatcacaatcttaccaaattttcacacaccgacatgtctagatccttagctctcgtttacttatccttactttgtcttcaaacccatctctcaatctccgtcacagttccgattccgtcggtaaacggcgaaatcgacgcaatgctgaaccggaacggcgtaatcggagaggaagaaggagaggagatgatgccatcggagataagtcggagagtaatgatgatgcggaaacagtacataagctacgaaactttaaggagagatatggttccttgtcagaaaccaggtgcttcttattacgcttgtcgctctggtcaggctaatgcttacaacagaggatgtagtgtcattactaggtgtgctagagacactaacgacatcaagacttgaaaacattggggtctttaagtacatttgagttttaaactcagatgctctagaggcaagtgaaatcttattattcttgtcttttgttttgtaatgttgttgtttacattagatttcttaattattgatatgtaattttggctattaatgttcaagtaattgatatttatagtcttgaaagtgttgagtggagtaatagatggaagattgtg

SEQ ID NO: 99652 - protein, 118 aa, Arabidopsis thaliana
  peptide (1)..(118): Ceres Seq. ID no. 13603376
MSRSLALVYLSLLCLQTHLSISVTVPIPSVNGEIDAMLNRNGVIGEEEGEEMMPSEISRRVMMMRKQYISYETLRRDMVPCQKPGASYYACRSGQANAYNRGCSVITRCARDTNDIKT

SEQ ID NO: 99653 - protein, 82 aa, Arabidopsis thaliana
  peptide (1)..(82): Ceres Seq. ID no. 13603377
MLNRNGVIGEEEGEEMMPSEISRRVMMMRKQYISYETLRRDMVPCQKPGASYYACRSGQANAYNRGCSVITRCARDTNDIKT

SEQ ID NO: 99654 - protein, 67 aa, Arabidopsis thaliana; identical to SEQ ID NO: 28721
  peptide (1)..(67): Ceres Seq. ID no. 13603378

SEQ ID NO: 99655 - DNA, 710 bp, Arabidopsis thaliana
  misc_feature (1)..(710): Ceres Seq. ID no. 13603379
  misc_feature (1)..(710): Ortholog of  Ceres SEQ ID NO 13594809 as cited in SEQ ID NO 51847
  misc_feature (1)..(710): Ortholog of  Ceres SEQ ID NO 12617639 as cited in SEQ ID NO 65219
  misc_feature (1)..(710): Ortholog of  Ceres SEQ ID NO 14309033 as cited in SEQ ID NO 0
  misc_feature (1)..(710): Ortholog of  Ceres SEQ ID NO 15173998 as cited in SEQ ID NO 0
  misc_feature (1)..(710): Ortholog of  Ceres SEQ ID NO 15178333 as cited in SEQ ID NO 0
catcctctcactgcctcttttctcactcactgttacttcgctaaaaccctaatttcgccattcccttctctaagttttgtgtgtagacatttagaaatggctttctgcaacaaacttagcggtatcttgagacaaggggtttctcagagctcaaatggtccagttacatctatgcttggctctcttcgttacatgtcctctaagctttttgttggtggtctctcttggggaactgatgacagctccttaaagcaagctttcactagctttggtgaagtcacagaagcaacggtgattgcagacagagagacagggaggtcgaggggattcggatttgttagcttcagctgtgaggattctgctaacaatgccataaaagaaatggatggaaaggagctgaatggtaggcaaatccgtgtgaatcttgcaaccgaaagatcgagtgccccgagatcatcatttggtggtggtggcggttacggtggtggcggtggtggtggctactaaagcaaacaagccagaggatttgagagagagaggagcctcagaactttcagtagttagttagtttgtttgtttcctctttgtttaactgcaaataaccttaactggttttgttaaacttatttagccctgttttttggttgtgtctgaataccgtagtattgttgctccatcttctgcaaatctattagcatcgagttcgattc

SEQ ID NO: 99656 - protein, 168 aa, Arabidopsis thaliana; identical to SEQ ID NO: 30689
  peptide (1)..(168): Ceres Seq. ID no. 13603380

SEQ ID NO: 99657 - protein, 136 aa, Arabidopsis thaliana; identical to SEQ ID NO: 25481
  peptide (1)..(136): Ceres Seq. ID no. 13603381

SEQ ID NO: 99658 - protein, 111 aa, Arabidopsis thaliana; identical to SEQ ID NO: 25482
  peptide (1)..(111): Ceres Seq. ID no. 13603382

SEQ ID NO: 99659 - DNA, 1445 bp, Arabidopsis thaliana
  misc_feature (1)..(1445): Ceres Seq. ID no. 13603383
  misc_feature (1)..(1445): Ortholog of  Ceres SEQ ID NO 15176440 as cited in SEQ ID NO 53697
  misc_feature (1)..(1445): Ortholog of  Ceres SEQ ID NO 14314717 as cited in SEQ ID NO 54224
  misc_feature (1)..(1445): Ortholog of  Ceres SEQ ID NO 14313429 as cited in SEQ ID NO 55662
actcagaatcatctttgtcaatatttctctaccatcttttgtctcatagccatgggtctagttcaagaagagggaagcggtcctgttcatggctttcggttatcaaccgtgagtgcgtccctgccgtcagagacaggtacgacccacgagcccaccggtttagacctcgccatgaagctccactacctaaaggcggtttacatttactcggccgggacagcacgtgacttgactgtgatggacgtgaaggcgcctttgttttcagtgttctaccagatcccttgcatcattggcaggttcaggcgacatgaatcgggacgtccgtacctaaagtgcaacgactgtggcacacgtttcgtggagagtcattgtgatctcactgtggaggagtggctccgtgtaccggaccggtccgttgatgagtctttggtttaccatcaaccagttggaccagatttggcattctctcctttgctctatattcagatgacccggtttagctgcggtggattagctttgggcttaagctgggctcatatcatgggagatccattctctctttctcatttcttcaacttatgggctcaagcctttgctggtgggaagatctactgccccaaaacctctgtcacagagagagactttcaaaacccgacctcaacattcaaaaaaccggattcagtcaaacaggttgacctggttggagatctctgggtcgctccgaataacagcaaaatgacaacattctccttcaatttaacggttaacgatttaaaaacacattttccggtgaacggagacggcgaattcgagattctcactggaatcatatggaaatgtgttgcgacggtgaggggagaatcagctccggtgacgattacggttatcagatcggatccgaagaagttgaagcctagagcggtgagaaatggtcagatgataagttccattcacgtcgatttctcggtggcggaggcgagtttggaggagattgtgaaatcgatcggtgaagcgaaagatgagagggttgtgatcgatgagattgttgatgatgtttcggattttattgtttacggagcgaatttaacgtttgtggatatgagtgaagttgatttttatgaggcgaaagttatggggaaatcgccggaatcggtttattgtaatgttcaggggattggggacgacggagcagtggtggttttaccgggggttgtggaggaggagagggttgtgacggtgacattaccggtggatgagattgagaaggtgaaatgggaaatgaagaaatgtggtttgatcacgccgttagtttaacggtgaatgaagaaatcattttatgcggttatcgttaatcgtgttttttattgtttgtttgggtttttattttatttggtgtgttttatataaaatcaaataaatgtcatttttataatttatgtttgtag

SEQ ID NO: 99660 - protein, 437 aa, Arabidopsis thaliana
  peptide (1)..(437): Ceres Seq. ID no. 13603384
TQNHLCQYFSTIFCLIAMGLVQEEGSGPVHGFRLSTVSASLPSETGTTHEPTGLDLAMKLHYLKAVYIYSAGTARDLTVMDVKAPLFSVFYQIPCIIGRFRRHESGRPYLKCNDCGTRFVESHCDLTVEEWLRVPDRSVDESLVYHQPVGPDLAFSPLLYIQMTRFSCGGLALGLSWAHIMGDPFSLSHFFNLWAQAFAGGKIYCPKTSVTERDFQNPTSTFKKPDSVKQVDLVGDLWVAPNNSKMTTFSFNLTVNDLKTHFPVNGDGEFEILTGIIWKCVATVRGESAPVTITVIRSDPKKLKPRAVRNGQMISSIHVDFSVAEASLEEIVKSIGEAKDERVVIDEIVDDVSDFIVYGANLTFVDMSEVDFYEAKVMGKSPESVYCNVQGIGDDGAVVVLPGVVEEERVVTVTLPVDEIEKVKWEMKKCGLITPLV

SEQ ID NO: 99661 - protein, 420 aa, Arabidopsis thaliana
  peptide (1)..(420): Ceres Seq. ID no. 13603385
MGLVQEEGSGPVHGFRLSTVSASLPSETGTTHEPTGLDLAMKLHYLKAVYIYSAGTARDLTVMDVKAPLFSVFYQIPCIIGRFRRHESGRPYLKCNDCGTRFVESHCDLTVEEWLRVPDRSVDESLVYHQPVGPDLAFSPLLYIQMTRFSCGGLALGLSWAHIMGDPFSLSHFFNLWAQAFAGGKIYCPKTSVTERDFQNPTSTFKKPDSVKQVDLVGDLWVAPNNSKMTTFSFNLTVNDLKTHFPVNGDGEFEILTGIIWKCVATVRGESAPVTITVIRSDPKKLKPRAVRNGQMISSIHVDFSVAEASLEEIVKSIGEAKDERVVIDEIVDDVSDFIVYGANLTFVDMSEVDFYEAKVMGKSPESVYCNVQGIGDDGAVVVLPGVVEEERVVTVTLPVDEIEKVKWEMKKCGLITPLV

SEQ ID NO: 99662 - protein, 380 aa, Arabidopsis thaliana
  peptide (1)..(380): Ceres Seq. ID no. 13603386
MKLHYLKAVYIYSAGTARDLTVMDVKAPLFSVFYQIPCIIGRFRRHESGRPYLKCNDCGTRFVESHCDLTVEEWLRVPDRSVDESLVYHQPVGPDLAFSPLLYIQMTRFSCGGLALGLSWAHIMGDPFSLSHFFNLWAQAFAGGKIYCPKTSVTERDFQNPTSTFKKPDSVKQVDLVGDLWVAPNNSKMTTFSFNLTVNDLKTHFPVNGDGEFEILTGIIWKCVATVRGESAPVTITVIRSDPKKLKPRAVRNGQMISSIHVDFSVAEASLEEIVKSIGEAKDERVVIDEIVDDVSDFIVYGANLTFVDMSEVDFYEAKVMGKSPESVYCNVQGIGDDGAVVVLPGVVEEERVVTVTLPVDEIEKVKWEMKKCGLITPLV

SEQ ID NO: 99663 - DNA, 1256 bp, Arabidopsis thaliana
  misc_feature (1)..(1256): Ceres Seq. ID no. 13603387
  misc_feature (1)..(1256): Ortholog of  Ceres SEQ ID NO 13595492 as cited in SEQ ID NO 51124
actattggttcctctgctctggctcatggatgaaactaccagagagatgttctcacctcataatcttcctcttgaaatgatggaagagattctcttaagactacccgtaaagtcattgacgcgattcaaatgcgtttgcagctcctggagatctttgatctcagagactctgtttgctctgaaacacgctttgatcttggagacatcgaaggcaactacttccacgaagagtccttacggagtcataacaacgtctcggtaccatctcaagtcatgctgcatccattctctctacaacgcgtcaacggtctacgtctcagaacatgatggtgagcttttaggaagagattactatcaagtcgtggggacgtgccatggattggtttgtttccacgtagattacgacaaaagtctctacctgtggaatccaaccatcaagcttcaacaaagattgtctagttcggatcttgaaacgagcgatgatgagtgtgttgtaacgtatgggtttggttatgatgaatctgaagatgactataaagtggttgcgttgttgcaacaaagacaccaagtgaagatagagacaaagatctactcaacgagacaaaagctatggagaagcaacacaagtttcccatctggagttgttgttgctgacaaatcaagatccggaatctacatcaacgggacactaaactgggcagccacttcctcatcatcgtcatggacgatcatatcgtatgatatgtcacgcgatgagttcaaggagcttccagggccagtttgttgtggcagaggatgttttacaatgacgcttggagatttaagaggatgtctttcgatggtgtgttattgcaaaggagctaatgcagatgtttgggtgatgaaggagtttggagaagtatattcttggtctaaactcttgagcattcctggtttgaccgactttgttcgaccgctttggatctcagacggtttagtggttttattggagtttagatccggtttagctctctataactgttccaatggaaggtttcattacccagtttcaaacagcataagtggttgtcgtgacgccaaagtttatctcaagacaatggtttctccaaatgatctttgagatataaaaaattgttcctaatgtttctatccaagattttatttaaaaaattagctcgattcgatttaactaagattggtatcaattgatagaaaagaaacagtacttatatggatatttaaattcaagaattaat

SEQ ID NO: 99664 - protein, 372 aa, Arabidopsis thaliana; identical to SEQ ID NO: 43442
  peptide (1)..(372): Ceres Seq. ID no. 13603388

SEQ ID NO: 99665 - protein, 364 aa, Arabidopsis thaliana; identical to SEQ ID NO: 43443
  peptide (1)..(364): Ceres Seq. ID no. 13603389

SEQ ID NO: 99666 - protein, 357 aa, Arabidopsis thaliana; identical to SEQ ID NO: 43444
  peptide (1)..(357): Ceres Seq. ID no. 13603390

SEQ ID NO: 99667 - DNA, 868 bp, Arabidopsis thaliana
  misc_feature (1)..(868): Ceres Seq. ID no. 13603391
  misc_feature (1)..(868): Ortholog of  Ceres SEQ ID NO 15172911 as cited in SEQ ID NO 55340
  misc_feature (1)..(868): Ortholog of  Ceres SEQ ID NO 13655345 as cited in SEQ ID NO 63222
aacatatccattttgggaaaccctaaattcccaaatgtcattcgccgaggaatttgaagctaatcttgtttcgctggcccatgttttgcagaagaaatatgctctcctgcgcgatttggataaaagtttgcaagaaaaccaacgacaaaatgaacaacgctgtgaaaaagaaatagaggatataagaaggggcagagctggaaatatcacacctaatacctctcttacaaagttctcagaggaagcacttgatgaacagaaacacagtgtccggattgctgacgagaaagtcacactggctatgcaggcatatgatctggtggatatgcatgttcagcaacttgaccagtatatgaaaaaatccgacgaagtgatccgcaaagagaaagaagctgccgctgcgacattagaactggagaacaacgggaaagccgggaatgctggtgaaggtggaagaggagggcgaaaaaagacaaggctagcaacagcagcgtcaacagcagcagcatcaactgggatgacttcaagtaatatggatctggatctgcctgtggatccaaacgaaccaacttactgcatctgcaaccaagttagctttggcgagatggttgcgtgtgacaacaatgcgtgcaagattgagtggttccatttcggttgcgtcggtctgaaagaacaacccaaggggaaatggtactgcccggagtgtgctacagtaaagaagagcaggaaaggtcgatgatttgaatgttcatgtctgctaataatccaaacagcttcatcatatctactgtaatccaaacagtttagtatatcaactcatgtaagatgttaccatgttgactataaattgtagaagtcttgtttcgtt

SEQ ID NO: 99668 - protein, 245 aa, Arabidopsis thaliana
  peptide (1)..(245): Ceres Seq. ID no. 13603392
TYPFWETLNSQMSFAEEFEANLVSLAHVLQKKYALLRDLDKSLQENQRQNEQRCEKEIEDIRRGRAGNITPNTSLTKFSEEALDEQKHSVRIADEKVTLAMQAYDLVDMHVQQLDQYMKKSDEVIRKEKEAAAATLELENNGKAGNAGEGGRGGRKKTRLATAASTAAASTGMTSSNMDLDLPVDPNEPTYCICNQVSFGEMVACDNNACKIEWFHFGCVGLKEQPKGKWYCPECATVKKSRKGR

SEQ ID NO: 99669 - protein, 234 aa, Arabidopsis thaliana
  peptide (1)..(234): Ceres Seq. ID no. 13603393
MSFAEEFEANLVSLAHVLQKKYALLRDLDKSLQENQRQNEQRCEKEIEDIRRGRAGNITPNTSLTKFSEEALDEQKHSVRIADEKVTLAMQAYDLVDMHVQQLDQYMKKSDEVIRKEKEAAAATLELENNGKAGNAGEGGRGGRKKTRLATAASTAAASTGMTSSNMDLDLPVDPNEPTYCICNQVSFGEMVACDNNACKIEWFHFGCVGLKEQPKGKWYCPECATVKKSRKGR

SEQ ID NO: 99670 - protein, 145 aa, Arabidopsis thaliana
  peptide (1)..(145): Ceres Seq. ID no. 13603394
MQAYDLVDMHVQQLDQYMKKSDEVIRKEKEAAAATLELENNGKAGNAGEGGRGGRKKTRLATAASTAAASTGMTSSNMDLDLPVDPNEPTYCICNQVSFGEMVACDNNACKIEWFHFGCVGLKEQPKGKWYCPECATVKKSRKGR

SEQ ID NO: 99671 - DNA, 886 bp, Arabidopsis thaliana
  misc_feature (1)..(886): Ceres Seq. ID no. 13603402
  misc_feature (1)..(886): Ortholog of  Ceres SEQ ID NO 15178880 as cited in SEQ ID NO 0
acaaacaaaacaaaaccagagatttcgttatccactgaagttcgtttgcttctgtcaaatttgccaaatcgtaaccaaaaaaagatggcagcttcttctccatctctccttctaccactaggttcagcatctagaaatggtctaaccaccaagaatccaaattcatcaagatatatagctgcaagagtcatagcttcagaaacaagagagcaaagctgtaaaatcagtaatctctctagccgtagagaagcaatgcttttggtactcggcgtctcaggaggattatcaatgagctcacttgcggcgtatgcagctggtttacctccagaagataaaccaagactctgtgaagcagaatgcgagaaagagcttgaaaatgttccaatggtaactacagagtcagggcttcagtataaggatattaaagttggtagaggcccgagtccaccggttggttttcaggttgctgctaattatgtggctatggttccatcagggcaaatattcgacagttctctggagaaaggtctaccgtatctatttcgcgttggctctggccaggtgatcaaaggacttgatgaaggaatcttgagtatgaaagctggtggcaaacgtagactctacatcccagggcctttggcgtttccaaagggtctagtttcagctccagggaggccgagagttgcgccaaacagcccggtgatatttgacgtgagcttagagttcataccaggtctcgattcagaggaagagtgaaactctgttttttcaagtgcaaattgtaatcttccatacacaattacaagattctatgtatgatatttatctcattgtactcattcattgaagaacatcacattgattaaaaacgtcagtatttttcaat

SEQ ID NO: 99672 - protein, 251 aa, Arabidopsis thaliana; identical to SEQ ID NO: 22972
  peptide (1)..(251): Ceres Seq. ID no. 13603403

SEQ ID NO: 99673 - protein, 223 aa, Arabidopsis thaliana; identical to SEQ ID NO: 22973
  peptide (1)..(223): Ceres Seq. ID no. 13603404

SEQ ID NO: 99674 - protein, 167 aa, Arabidopsis thaliana; identical to SEQ ID NO: 22974
  peptide (1)..(167): Ceres Seq. ID no. 13603405

SEQ ID NO: 99675 - DNA, 1487 bp, Arabidopsis thaliana
  misc_feature (1)..(1487): Ceres Seq. ID no. 13603431
  misc_feature (1)..(1487): Ortholog of  Ceres SEQ ID NO 12609146 as cited in SEQ ID NO 52118
  misc_feature (1)..(1487): Ortholog of  Ceres SEQ ID NO 14303397 as cited in SEQ ID NO 54614
  misc_feature (1)..(1487): Ortholog of  Ceres SEQ ID NO 13594056 as cited in SEQ ID NO 55691
  misc_feature (1)..(1487): Ortholog of  Ceres SEQ ID NO 14314186 as cited in SEQ ID NO 57457
  misc_feature (1)..(1487): Ortholog of  Ceres SEQ ID NO 13638136 as cited in SEQ ID NO 58644
  misc_feature (1)..(1487): Ortholog of  Ceres SEQ ID NO 13596868 as cited in SEQ ID NO 62806
  misc_feature (1)..(1487): Ortholog of  Ceres SEQ ID NO 13595885 as cited in SEQ ID NO 69265
  misc_feature (1)..(1487): Ortholog of  Ceres SEQ ID NO 12566239 as cited in SEQ ID NO 0
  misc_feature (1)..(1487): Ortholog of  Ceres SEQ ID NO 13599119 as cited in SEQ ID NO 0
  misc_feature (1)..(1487): Ortholog of  Ceres SEQ ID NO 14308987 as cited in SEQ ID NO 0
gaagccgcaaagaaagcggcggtggaagctgagacatgcaacaatggcgttcgtgtcattctcttcttctccttctctctctcttacactcgcgattcaacattaatttcgttcttcttcatacacatatatagatagtgtcttcattttccaaccatgaccggtagagaaatcctccacaagatgaaggaatccgtcaaggagaaagttgggcttggtgcatctgcttcatctgcagattcagggaaaggtaagagcaagatgttgaagcagatcacacatggttttcatttggtgaaagggaaagcttttcacgagatggaagattatgtggttgccaaattcaaggaagttgatgataatgagcttggtctgtttgctatcttcgatggccatcttagccacgagattccggactacttgtgctcccatttgtttgagaacatcttgaaagagccgaatttctggcaagaacctgagaaagcgataaagaaagcttactatataacggatacaacgattctagacaaggcagatgatttgggaaaaggaggttctactgctgtgactgcgatattgatcaattgccagaagctggtggttgctaatgttggtgactctcgagctgttatttgccaaaatggtgttgcgaagccactctcagttgatcatgagccgaacatggagaaggatgaaatcgagaacagaggaggattcgtttctaactttcctggggatgttcctcgagttgatggtcaactggctgtggcaagggcatttggtgataagagtttaaagatgcatttgagttcagaaccatatgttacggtggagataattgatgatgatgcagaatttcttatcctagcaagtgatggactatggaaggtcatgtcaaaccaagaagccgttgactcaatcaagggaataaaagatgcgaaggctgcagcaaagcaccttgcagaggaggctgttgcaaggaaaagctcagacgatatctcagtcgtcgtcgtgaaatttcagtgacattagctttcggagaagagacctctgcagactgcagatccctttcatcgcaagtcttactggtcacttaaacaagtaaagagtctttgagattggaccagctaaagaaagaatcacaagtatgggcgtttcctctgtaagatgcaattatcacctctatgttactcttttctttttttccttttcaactctgtgattatctctaagtctgtttctttctgggaataaaattttaacagtgaaaaactttctttgcttctctttttttttgttgtaaatgttttttgttatacaatagggcagtgtaagaaagatgaaatagttagaattagtgggtagtgaaagagacaggacataaaaggtttcacatgccaaactgtactcatgtctcgagtctatgacctaagcttttggggttgttatttacaataacagaataaataagcgttgtcccttttttc

SEQ ID NO: 99676 - protein, 289 aa, Arabidopsis thaliana; identical to SEQ ID NO: 40326
  peptide (1)..(289): Ceres Seq. ID no. 13603432

SEQ ID NO: 99677 - protein, 280 aa, Arabidopsis thaliana; identical to SEQ ID NO: 40327
  peptide (1)..(280): Ceres Seq. ID no. 13603433

SEQ ID NO: 99678 - protein, 254 aa, Arabidopsis thaliana; identical to SEQ ID NO: 40328
  peptide (1)..(254): Ceres Seq. ID no. 13603434

SEQ ID NO: 99679 - DNA, 1263 bp, Arabidopsis thaliana
  misc_feature (1)..(1263): Ceres Seq. ID no. 13603447
  misc_feature (1)..(1263): Ortholog of  Ceres SEQ ID NO 15176333 as cited in SEQ ID NO 52787
  misc_feature (1)..(1263): Ortholog of  Ceres SEQ ID NO 14312047 as cited in SEQ ID NO 55656
  misc_feature (1)..(1263): Ortholog of  Ceres SEQ ID NO 12611392 as cited in SEQ ID NO 56826
  misc_feature (1)..(1263): Ortholog of  Ceres SEQ ID NO 13660872 as cited in SEQ ID NO 60830
  misc_feature (1)..(1263): Ortholog of  Ceres SEQ ID NO 12616221 as cited in SEQ ID NO 63291
  misc_feature (1)..(1263): Ortholog of  Ceres SEQ ID NO 14302355 as cited in SEQ ID NO 65830
aatctcagaatacaaaaaagaaaatcaaagaagatagttttgtgattgttttctataaaaagtgcagatattttctttgtcctagagaaagaggtgataggaaaaatgggtctccaagagcttgacccgttagcccaattgagcttaccgccgggttttcggttttatccgactgacgaagagctgatggttgaatatctctgtagaaaagccgccggtcacgacttctctctccagctcatagctgaaatcgatctctacaagtttgatccatgggttttaccaagtaaggcgttattcggtgaaaaagaatggtattttttcagcccgagggataggaagtatccaaacgggtcaagacctaatcgggttgccgggtcgggttattggaaagccaccggtacggataaagttatctcgacggagggaagaagagttggtatcaagaaagctttggtgttttacattggaaaagctccaaaaggaaccaaaaccaattggattatgcatgagtaccgtctcatcgaaccctctcgtcgaaatggaagcaccaagcttgatgattgggttttatgtcgaatatacaaaaagcaaacaagcgcacaaaaacaagcttacaataatctaatgacgagtggtcgtgaatacagcaacaatggttcgtcgacatcttcttcgtctcatcaatacgacgacgttctcgagtcgttgcatgagattgacaacagaagtttggggtttgccgccggttcatcaaacgcgctgcctcatagtcatagaccggttttaaccaatcataaaaccgggtttcagggtttagccagggagccaagttttgattgggcgaatttgattggacagaactcggtcccggaactcggactgagtcataacgttccgagtattcgttacggtgacggtggaacgcagcaacaaactgaggggattcctcggtttaataataactcggacgtctcggctaatcagggttttagtgttgacccggttaacggatttgggtactcgggtcaacaatctagtgggttcgggtttatttgattgtgtaatggtaacgtaataagaaaaacatatttttattttttgtccgtgtcagattagttaattaatatagcgtagaattcgaactctagggttagatttaggttctacgacttgtattgtatattcgtcgtcatttgtcctgacatttacatttttgtaaacttttatagctggaacttttgtattgatcaattatttatt

SEQ ID NO: 99680 - protein, 317 aa, Arabidopsis thaliana
  peptide (1)..(317): Ceres Seq. ID no. 13603448
MGLQELDPLAQLSLPPGFRFYPTDEELMVEYLCRKAAGHDFSLQLIAEIDLYKFDPWVLPSKALFGEKEWYFFSPRDRKYPNGSRPNRVAGSGYWKATGTDKVISTEGRRVGIKKALVFYIGKAPKGTKTNWIMHEYRLIEPSRRNGSTKLDDWVLCRIYKKQTSAQKQAYNNLMTSGREYSNNGSSTSSSSHQYDDVLESLHEIDNRSLGFAAGSSNALPHSHRPVLTNHKTGFQGLAREPSFDWANLIGQNSVPELGLSHNVPSIRYGDGGTQQQTEGIPRFNNNSDVSANQGFSVDPVNGFGYSGQQSSGFGFI

SEQ ID NO: 99681 - protein, 290 aa, Arabidopsis thaliana
  peptide (1)..(290): Ceres Seq. ID no. 13603449
MVEYLCRKAAGHDFSLQLIAEIDLYKFDPWVLPSKALFGEKEWYFFSPRDRKYPNGSRPNRVAGSGYWKATGTDKVISTEGRRVGIKKALVFYIGKAPKGTKTNWIMHEYRLIEPSRRNGSTKLDDWVLCRIYKKQTSAQKQAYNNLMTSGREYSNNGSSTSSSSHQYDDVLESLHEIDNRSLGFAAGSSNALPHSHRPVLTNHKTGFQGLAREPSFDWANLIGQNSVPELGLSHNVPSIRYGDGGTQQQTEGIPRFNNNSDVSANQGFSVDPVNGFGYSGQQSSGFGFI

SEQ ID NO: 99682 - protein, 184 aa, Arabidopsis thaliana; identical to SEQ ID NO: 39803
  peptide (1)..(184): Ceres Seq. ID no. 13603450

SEQ ID NO: 99683 - DNA, 939 bp, Arabidopsis thaliana
  misc_feature (1)..(939): Ceres Seq. ID no. 13603451
  misc_feature (1)..(939): Ortholog of  Ceres SEQ ID NO 13596958 as cited in SEQ ID NO 63319
  misc_feature (1)..(939): Ortholog of  Ceres SEQ ID NO 12614814 as cited in SEQ ID NO 68816
tttcataattgtatcaaattgtgagaggaaaaaaagaagttcaagaaatggagaaggaaggactcgggcttgagataacggagctgagattggggcttccggggagagatgtggcagagaagatgatgaagaagagagctttcacggagatgaatatgacgtcgtcgggtagtaatagtgatcaatgtgaaagcggcgtcgtttcatctggtggtgacgctgagaaggttaatgattcgccggcggcgaaaagccaggtggtggggtggccaccggtttgttcttaccggaagaaaaacagctgtaaggaagcttcgaccacgaaagtggggttagggtatgtgaaagtgagcatggatggtgtgccttatttgaggaagatggatcttggttcgagccaaggctatgatgatctagcctttgctcttgataagctcttcggtttccgtggcatcggtgtggccttgaaagatggtgacaactgcgaatacgttaccatatacgaagacaaagatggagactggatgctcgccggtgatgtaccttgggggatgtttctagagtcatgcaagaggttgagaataatgaaaagatcggatgctaccgggtttgggctgcagcctagaggagtagacgagtgatgatgacttgaacaagaagcaaggagctggttcattaatttaatcttaaacttgatcatcaagatcctttagaacatttttcctattcatgttatataaatatatatgttatagtatattattttgcaacaaaatttcatgttatggttttgcataattatcttcagaaagacagctatatatatatacactacttgtttcttgagtgttgagttaaaacattaatctgtttcaaaatttattgttatttcggatctatatatgtgtgtagaaacatatgtaataagtatccattatt

SEQ ID NO: 99684 - protein, 197 aa, Arabidopsis thaliana; identical to SEQ ID NO: 38104
  peptide (1)..(197): Ceres Seq. ID no. 13603452

SEQ ID NO: 99685 - protein, 172 aa, Arabidopsis thaliana; identical to SEQ ID NO: 38105
  peptide (1)..(172): Ceres Seq. ID no. 13603453

SEQ ID NO: 99686 - protein, 171 aa, Arabidopsis thaliana; identical to SEQ ID NO: 38106
  peptide (1)..(171): Ceres Seq. ID no. 13603454

SEQ ID NO: 99687 - DNA, 2143 bp, Arabidopsis thaliana
  misc_feature (1)..(2143): Ceres Seq. ID no. 13603455
  misc_feature (1)..(2143): Ortholog of  Ceres SEQ ID NO 14313943 as cited in SEQ ID NO 54725
gagccgctgagaatttggtccccttggcacgtataaaccctagcagagacattaaaccctgaaagtaattagggatcactgttctccggctccggcgaaaaaatccctcgaaatcgatcctaacctcaattgattgaaggaagttatgtattcgctttcgaggattctccaaaggagtcaaagatataactttgcaccttcttcgtttggtgcggtcagtaaattagaagtatcaagtggtggtgataaagaacgggtctttaaatcatttggattgatttatagcaaacctcaaggtttagtcagactttattccgcaagagatgtgttttcacggttctttggcatccacaagctttcttctatagctgatgctaaagataaaggagatgaggtagttagggaagaggagctgtctgaatcagaggaggcggttcctgtttctggggatgtaccagagggagttgttgatgatgattctttgttcgagcctgaacttggtagtgacaatgatgatcttgaaattgaagagaagcattcgaaagatggtgggaaaccaactaagaaaagaggtcaatctgagctgtacgaatccattgttgcttataaatcagtgaaacatgttcttgaaaaatgggtcaaagaaggaaaagatttgagtcaagctgaggttactcttgctatacacaatctgcgtaaacgcaaatcctatgctatgtgtttgcagttgtgggagtggttgggagctaatacgcagtttgagttcacagaggcaaattatgcttctcagttggatttggtggccaaggtacatagtttacaaaaagctgaaatctttttgaaagatattccagaatcttctaggggagaagtagtatacagaaccctgctggcaaattgtgtacttaagcatcatgtaaataaagctgaagacattttcaacaaaatgaaagagctaaaatttccaacaagtgtgtttgcttgcaaccagctgcttctcctctacagtatgcatgatagaaagaagataagtgatgttttgttgctaatggagagagaaaacatcaagccgagtcgtgctacctatcattttttaatcaatagtaaaggtttagccggagacataactggaatggagaagatcgtggagacaattaaggaagaaggcatcgaactagatcctgaactgcagtctattctggctaagtactacataagagcggggcttaaagaaagagcacaagaccttatgaaggagatagaagggaaaggtttgcaacaaactccatgggtgtgccggtcattactcccactttatgcagacataggagacagtgacaatgtgagaagactgagtaggtttgttgatcaaaatccgagatacgataattgcatttctgccattaaagcatggggaaagctgaaggaagtcgaagaagcagaggcagtgtttgagagacttgtggagaaatacaaaattttccctatgatgccatattttgccctcatggagatatacacagagaacaagatgctagcaaaaggcagagatctggttaaaagaatgggaaatgcagggattgcgattgggccgtcgacatggcacgcgcttgtgaagctatacatcaaagcaggagaagttggaaaagctgagttgatattgaacagagctacaaaggataataagatgagacctatgttcactacttacatggcgattcttgaagaatatgcaaaaagaggcgatgttcataacacagagaaggtattcatgaaaatgaaaagggcaagctatgcagctcagcttatgcagtatgaaaccgtgctcctggcttatatcaacgccaaaactcctgcttacgggatgattgagaggatgaaggcagacaatgtgttcccgaacaagagtctagctgcgaaactggctcaggttaatccgtttaaaaagtgtccagtgtctgttttacttgacatataacgataatcatcttatgtattgagctgttaagtgtttgttctggttgcttccaagctaggaaataataaacagaggattcgtttttcttccaaagtttctcatttttgagtttgtgttcctgtggttttttgtaagtgacataaactggaataaaattgaactgga

SEQ ID NO: 99688 - protein, 610 aa, Arabidopsis thaliana; identical to SEQ ID NO: 26610
  peptide (1)..(610): Ceres Seq. ID no. 13603456

SEQ ID NO: 99689 - protein, 420 aa, Arabidopsis thaliana; identical to SEQ ID NO: 26611
  peptide (1)..(420): Ceres Seq. ID no. 13603457

SEQ ID NO: 99690 - protein, 343 aa, Arabidopsis thaliana; identical to SEQ ID NO: 26612
  peptide (1)..(343): Ceres Seq. ID no. 13603458

SEQ ID NO: 99691 - DNA, 1540 bp, Arabidopsis thaliana
  misc_feature (1)..(1540): Ceres Seq. ID no. 13603459
  misc_feature (1)..(1540): Ortholog of  Ceres SEQ ID NO 14301420 as cited in SEQ ID NO 56580
actttcttcttcgattagccacttttttttcttttgtaattttcctttcttttttttttcttttgaattttcgggaagcagcatttccactggagctgcaaaatcttcctatcaaaattatagatcgatccaagttttagattcgagaattattttctccaaattagatttatatatcaaaaggaatcgaaaatagacagcaatttttgttttgtcggatcgtattgaatcagctgtgaattttagcgccaatttaaccactgaatcgtttgattagaagctaagatttggtcttacgatcgatctaagtagggttcttcttcttaagtgtgtgttttgttaaaattagtaaagagagatggagaagaagaaagtcgcgactccgctagtgtgccatggccattcgagacctgttgtggatttgttctacagtccaatcactcctgatggtttcttcctcatcagcgcaagtaaagattctcaaccaatgttgagaaatggggaaactggagattggattggtacatttgaaggtcataaaggtgctgtgtggagttcttgtcttgataacaatgctttacgtgcagcttctgcatctgctgatttttcagcgaagctttgggatgctttgactggggatgtcttgcattcttttgagcacaagcatattgttcgagcatgcgccttctctcaggatacgaaatatctaatcacaggaggatttgagaaaattcttcgtgttttcgacttgaatcgcttggatgcacctcctacagaaattgataaatctcctggttctatcagaacactaacatggcttcacggtgatcaaacaatattaagttcttgcactgatattggtggtgtgaggttatgggatgtgaggagtggcaaaatagtgcaaactctagaaaccaagtctcctgtcaccagtgctgaagtgagtcaagatggacggtatataacaactgccgatgggtcaactgttaaattttgggatgcaaatcattttggactagtgaaaagttacgacatgccctgcaatatcgaatctgcatcgcttgagccaaaatctggcaacaaattcgttgctggtggagaagatatgtgggttcgactctttgatttccacaccggaaaggagattggatgcaacaagggacatcatggtccggttcactgtgtgagatttgcaccaacaggtgagtcttatgcttcagggtctgaagatggtacaatcagaatttggcaaactggaccggtgaatcctgaagagatcagcgagtcaaagccgaagcagagtgtggatgaggttgctcgtaagattgaaggctttcacattaacaaggaaggaaaaaccgcagagaaaccatctgatgcttaaaccaagaaaagaaccaagaaaaatggctgcttctctttgtcttcttactgtgtttttacttccagactgaatatacggaaattcaaaacaagtgtttgaaaaacagtcgttgtcaatcttcattcgagtcaagtttatggatgtggctgaaaattt

SEQ ID NO: 99692 - protein, 341 aa, Arabidopsis thaliana; identical to SEQ ID NO: 38690
  peptide (1)..(341): Ceres Seq. ID no. 13603460

SEQ ID NO: 99693 - protein, 298 aa, Arabidopsis thaliana; identical to SEQ ID NO: 38691
  peptide (1)..(298): Ceres Seq. ID no. 13603461

SEQ ID NO: 99694 - DNA, 912 bp, Arabidopsis thaliana
  misc_feature (1)..(912): Ceres Seq. ID no. 13603462
  misc_feature (1)..(912): Ortholog of  Ceres SEQ ID NO 12467471 as cited in SEQ ID NO 55509
  misc_feature (1)..(912): Ortholog of  Ceres SEQ ID NO 13598557 as cited in SEQ ID NO 65168
tcgcatcactctttcaaagcctcgtgtcttgatttctttcaccaaactcatataatcacatatctctccaagttcatcaagaaaataatataaacacacacatacaagaactgaagaatgagcagacccggagattggaactgcaggtcatgcagccatctcaacttccagcgccgtgactcttgccagcgatgcggtgactctcgttccggccccggtggagttggtggcttagactttggtaatttcggtggcagagccatgtctgctttcggattcaccaccggctccgacgttcgtcccggtgattggtactgcaccgtgggaaactgcgggacacacaacttcgccagtcgctccacctgcttcaaatgcggcactttcaaggacgagaccggcgctggaggcggaggtggtggcatcggcggtccggccatgtttgacgccgacattatgcggtctagagtccccggtaacggtggtcgctctagctggaaatccggcgactggatttgcactaggattggttgcaatgagcataactttgcaagcagaatggaatgcttcaggtgcaatgcaccaagggacttcagcaacagaacctctttctaagttatacaaactgcttttgaagtagccttgtctccaatttcttaggcaccgtttcgatcaatggaaaggagaagcaggagcaaaagagagaattaaaagatgataattttgttagatgttgcaatgagagccaatattgtaactttagctgtcgtgcttttggatgtattatccatttttattaagatttcttttcattttctccttaattcgtaatttttcttttgcagtttctttttaagagttttattattctaatcattgtacgctgcatgtctttcttaaaagaagattctcttc

SEQ ID NO: 99695 - protein, 164 aa, Arabidopsis thaliana
  peptide (1)..(164): Ceres Seq. ID no. 13603463
MSRPGDWNCRSCSHLNFQRRDSCQRCGDSRSGPGGVGGLDFGNFGGRAMSAFGFTTGSDVRPGDWYCTVGNCGTHNFASRSTCFKCGTFKDETGAGGGGGGIGGPAMFDADIMRSRVPGNGGRSSWKSGDWICTRIGCNEHNFASRMECFRCNAPRDFSNRTSF

SEQ ID NO: 99696 - protein, 116 aa, Arabidopsis thaliana
  peptide (1)..(116): Ceres Seq. ID no. 13603464
MSAFGFTTGSDVRPGDWYCTVGNCGTHNFASRSTCFKCGTFKDETGAGGGGGGIGGPAMFDADIMRSRVPGNGGRSSWKSGDWICTRIGCNEHNFASRMECFRCNAPRDFSNRTSF

SEQ ID NO: 99697 - DNA, 1089 bp, Arabidopsis thaliana
  misc_feature (1)..(1089): Ceres Seq. ID no. 13603471
  misc_feature (1)..(1089): Ortholog of  Ceres SEQ ID NO 13594490 as cited in SEQ ID NO 51289
  misc_feature (1)..(1089): Ortholog of  Ceres SEQ ID NO 14309434 as cited in SEQ ID NO 0
acaattactgcctttgcctgttacttgttctgctccgtcgctcagataggatctcaacaagacaccacaaaccctaaatttcgtcaactccacagcgactcgattcgatcaaggaaatggcgtacgcttctcgttttctctccagatctaagcagctacaggggggtctggtcattttgcagcagcaacatgctattccagtccgagcttttgctaaggaagctgctcgtccaacctttaaaggagatgagatgttgaagggtgtcttttttgatatcaagaacaaattccaggctgctgttgatattctccgtaaggaaaagatcacccttgatccagaggacccagctgccgtaaaacagtatgcaaatgtaatgaagaccatcaggcaaaaggcagacatgttctcagaatctcagcgcattaaacatgacattgatactgagactcaagacattccagatgctcgtgcatacttgttgaagttgcaggaaattcgcaccaggagggggcttactgatgagcttggtgctgaggccatgatgttcgaggctttggagaaagtcgagaaggacataaagaagcctctcctgagaagtgacaagaaaggaatggatcttttggttgcagagtttgagaaaggcaacaaaaagcttgggattaggaaagaagatcttcctaagtacgaagaaaatttggagctcagcatggccaaagcacagttggatgagctgaagagtgatgctgttgaagctatggaatctcagaaaaagaaggaggaattccaggatgaggaaatgccggacgtgaagtctctagacatccgtaacttcatctaaggtttgatccttagaaacatttgatttgttgtaagaaaaggcaaagatctctcacttgattgtctttgaaagagaagatcgttcccttgctgctgttttggtttggcgttcaataaggtctctcacctggatttgagtctaactctctctgtggttattacgcttgagattcttagacacaaacgttgtttcatgtttttttgataatggtgatcactggaatttgagataattaataaaagttgtgatg

SEQ ID NO: 99698 - protein, 240 aa, Arabidopsis thaliana; identical to SEQ ID NO: 21830
  peptide (1)..(240): Ceres Seq. ID no. 13603472

SEQ ID NO: 99699 - protein, 195 aa, Arabidopsis thaliana; identical to SEQ ID NO: 21831
  peptide (1)..(195): Ceres Seq. ID no. 13603473

SEQ ID NO: 99700 - protein, 154 aa, Arabidopsis thaliana; identical to SEQ ID NO: 21832
  peptide (1)..(154): Ceres Seq. ID no. 13603474

SEQ ID NO: 99701 - DNA, 944 bp, Arabidopsis thaliana
  misc_feature (1)..(944): Ceres Seq. ID no. 13603475
  misc_feature (1)..(944): Ortholog of  Ceres SEQ ID NO 13660094 as cited in SEQ ID NO 60820
aagatcatcaagaccaatctcgtagacttcttgtctctgtccaaaaaccataaagaaactttattggcataaaaagagaacaatctcgtagattcttgagcttctgacaatggattctttgaagaatagaacattgcttaaggtcattgttcttggagatagcggggtaggcaaaacttcattgatgaatcaatatgtgtacaagaaatttaacaagcaatataaggctacgatcggagcagatttcgtcaccaaagagcttcatatagatgaaaaatctgtcactttacagatatgggataccgctggacaagagagatttcaaagtctaggggccgcgttctatagaggtgctgattgttgcgttcttgtctacgacgtgaacaatctcaaatcttttgaaactctcaataactggcacacagagttcctcaaacaggcaaatcctatggaaccggagacatttccctttgttttgatcgggaacaagaccgatgtagatggcggaaacagccgagttgtttcaaataagagagccatcgagtggtgtggctcaaagggaaacataccgtaccatgaaacctctgcgaaggaagataccaatatcgatgaagcttttttgagtgttgcacacattgctctctctaatgaacgtaaacaaagcaatgacatatatcctagaggccagtatcatgactctgttacggatattattgatccagatcagtcaagaggttgtgcttgctgattccatgtttgacatatctgatcaaataatatcgagtcccagctctttcatttgcagtccttgtttttggtaactttttttctatttattggtttaataatatcatttatagaggtttattaacgacaaaaaacagttgatacatactactttctgagtgttttgattcatgtaaagcattaattaatttctattt

SEQ ID NO: 99702 - protein, 212 aa, Arabidopsis thaliana; identical to SEQ ID NO: 41666
  peptide (1)..(212): Ceres Seq. ID no. 13603476

SEQ ID NO: 99703 - protein, 187 aa, Arabidopsis thaliana; identical to SEQ ID NO: 41667
  peptide (1)..(187): Ceres Seq. ID no. 13603477

SEQ ID NO: 99704 - DNA, 747 bp, Arabidopsis thaliana
  misc_feature (1)..(747): Ceres Seq. ID no. 13603487
  misc_feature (1)..(747): Ortholog of  Ceres SEQ ID NO 13583412 as cited in SEQ ID NO 62624
agcattttcaacatttctattaatatttccatagactagatctctctttcttatacatccatatcaccgatgatgcctcgccgtgacgtcctcttcctctcactcctcctcgtcatcgccaccgtctccgctgtcgcattagccgacgatgaagcagattgtgtctacacattcttccttagaaccggatcaaccttcaaagccggtacagattcgatcataagcgctagagtctacgacaaatacggagactacatcgggatccgaaacctagaagcatggggtggtttaatgggaccaggttacaactactacgagaggggtaatctcgacattttcagtgggaaagcaccatgtcttccgagcccagtctgttcattaaatctgacctctgacggctccggtgaccaccacggttggtatgttaactacgtggaagtcacgacagccggagttcatgcaaagtgctcgtaccaaagctttgatgttgagcaatggcttgcgtccgatacatcgccgtatgagctcagtgctgttcggaataactgtccagtttcgcttagggaaagtgtcggtcgggtcgggtctgagatccggaagactctctcttggatcgtgtgagagtagtgaatgaaatgtcaaatgtgtatgtgtgtgtgtaacttggagagttgttctttgttgtcttgtgaacgtgtgatggcaataatgaaaatgattcgatcgaataaaagttccgttctttgt

SEQ ID NO: 99705 - protein, 183 aa, Arabidopsis thaliana; identical to SEQ ID NO: 29707
  peptide (1)..(183): Ceres Seq. ID no. 13603488

SEQ ID NO: 99706 - protein, 182 aa, Arabidopsis thaliana; identical to SEQ ID NO: 29708
  peptide (1)..(182): Ceres Seq. ID no. 13603489

SEQ ID NO: 99707 - protein, 109 aa, Arabidopsis thaliana; identical to SEQ ID NO: 29709
  peptide (1)..(109): Ceres Seq. ID no. 13603490

SEQ ID NO: 99708 - DNA, 1138 bp, Arabidopsis thaliana
  misc_feature (1)..(1138): Ceres Seq. ID no. 13603491
  misc_feature (1)..(1138): Ortholog of  Ceres SEQ ID NO 13595423 as cited in SEQ ID NO 56775
atgtcctcttcgctccattgctcggaatcacagaaaaaggtgagattaaggaggagcgaaacatgacgaatccacttaattccaccgccgctaatcgctctaaccagccgtcttctgatggaatcagcgacggtcaaatcaccaatgaggaagctgaatcactaattaacaagaagaactgttcagggcacaagctaaaagaagtaactgatagtgacacattctctgacaatggtaaagatgattcagataccaagaaaagattccattaccatcaggatcagcggaggatgagtttgacatcgattgtggcggtggagtctccttcatcgagcaacgctccctctagaaaaaccattgatcttggccatggaagcgacctcatttacattcagaggtttcttccatttcaacaatcttggactttcttcgattatctcgacaagcatattccttggaccaggcctactattcgtgtctttggtcgatcttgcctccagccgagagatacttgttatgttgcaagtagcggattgactgcgttggtgtacagtggatatcgacctacctcctattcgtgggatgatttcccacctctcaaggagattctggatgctatttacaaggtgcttcctggaagcagattcaacagcttgctcttaaatagatacaaaggtgccagtgattatgtggcttggcatgcagatgatgaaaagatttatggtccaactccagaaattgcttcagtctcgtttggatgtgaacgtgattttgtgttgaagaaaaagaaagatgaagaatcttcccaagggaaaacaggagacagtggaccagctaagaagaggttaaagagaagcagcagagaggatcaacaaagtttgacattgaaacatggatcgttgctggtgatgagaggatacactcaaagagactggattcattctgtgccaaagcgtgcaaaggcagagggcactcgtatcaacctcacattcaggcttgttttgtaaattgagcatcatatgcaagaaggtgggcttgatcttggtctccattgacatattctaagcttctcatcttaattctctataaacatcaattggtgtagacatttcaagaagcaaattggacgggaagattg

SEQ ID NO: 99709 - protein, 334 aa, Arabidopsis thaliana
  peptide (1)..(334): Ceres Seq. ID no. 13603492
VLFAPLLGITEKGEIKEERNMTNPLNSTAANRSNQPSSDGISDGQITNEEAESLINKKNCSGHKLKEVTDSDTFSDNGKDDSDTKKRFHYHQDQRRMSLTSIVAVESPSSSNAPSRKTIDLGHGSDLIYIQRFLPFQQSWTFFDYLDKHIPWTRPTIRVFGRSCLQPRDTCYVASSGLTALVYSGYRPTSYSWDDFPPLKEILDAIYKVLPGSRFNSLLLNRYKGASDYVAWHADDEKIYGPTPEIASVSFGCERDFVLKKKKDEESSQGKTGDSGPAKKRLKRSSREDQQSLTLKHGSLLVMRGYTQRDWIHSVPKRAKAEGTRINLTFRLVL

SEQ ID NO: 99710 - protein, 314 aa, Arabidopsis thaliana
  peptide (1)..(314): Ceres Seq. ID no. 13603493
MTNPLNSTAANRSNQPSSDGISDGQITNEEAESLINKKNCSGHKLKEVTDSDTFSDNGKDDSDTKKRFHYHQDQRRMSLTSIVAVESPSSSNAPSRKTIDLGHGSDLIYIQRFLPFQQSWTFFDYLDKHIPWTRPTIRVFGRSCLQPRDTCYVASSGLTALVYSGYRPTSYSWDDFPPLKEILDAIYKVLPGSRFNSLLLNRYKGASDYVAWHADDEKIYGPTPEIASVSFGCERDFVLKKKKDEESSQGKTGDSGPAKKRLKRSSREDQQSLTLKHGSLLVMRGYTQRDWIHSVPKRAKAEGTRINLTFRLVL

SEQ ID NO: 99711 - protein, 238 aa, Arabidopsis thaliana
  peptide (1)..(238): Ceres Seq. ID no. 13603494
MSLTSIVAVESPSSSNAPSRKTIDLGHGSDLIYIQRFLPFQQSWTFFDYLDKHIPWTRPTIRVFGRSCLQPRDTCYVASSGLTALVYSGYRPTSYSWDDFPPLKEILDAIYKVLPGSRFNSLLLNRYKGASDYVAWHADDEKIYGPTPEIASVSFGCERDFVLKKKKDEESSQGKTGDSGPAKKRLKRSSREDQQSLTLKHGSLLVMRGYTQRDWIHSVPKRAKAEGTRINLTFRLVL

SEQ ID NO: 99712 - DNA, 3237 bp, Arabidopsis thaliana
  misc_feature (1)..(3237): Ceres Seq. ID no. 13603499
  misc_feature (1)..(3237): Ortholog of  Ceres SEQ ID NO 14308747 as cited in SEQ ID NO 55372
atggcggaagcaagacgattcagcccagttcatgaattagatgttggacaaatactctcagaagcacgacatcgatggcttcgtcctcctgaaatctgtgaaattttacagaattaccaaagatttcaaatttctactgagccacctactacaccatcaagtgggtctgtttttatgtttgatcgaaaggtgctcagatacttcaggaaagacggtcacaattggaggaagaaaaaagatggaaagactgtgaaggaagctcatgagaggttgaaggcgggaagcgttgatgttctacattgttactatgcgcatggacaggacaatgaaaactttcaaagacgcagttactggttgcttcaggaagaactttcccacatagtttttgttcactacctcgaagttaagggtagtagagtttctacttcttttaaccggatgcaaaggactgaagacgcggctcggtctcctcaagaaactggggacgccttgaccagtgaacatgatggttatgcttcttgcagcttcaatcaaaatgatcatagcaatcattcacaaactactgactcagcaagtgtcaatggttttcactctccagaacttgaagatgctgaatcagcatacaatcagcatggaagttccacagcttactctcatcaagaacttcagcagcctgcaacaggaggaaaccttactggttttgatccttactatcaaatctctttgacgcccagggatagttatcaaaaagagcttcgcacaatccccgtaactgattcttcaattatggtagacaaaagcaaaactatcaacagtcctggagtaacaaatgggttaaaaaacagaaaatccattgattcccaaacctgggaagagattctgggaaattgtggttctggagttgaagccttacctttgcagcctaacagtgagcatgaagtgctggaccaaatactcgaaagctcttttacaatgcaagattttgctagtctacaagagtccatggtcaaaagccagaatcaggagttaaattcaggacttacatctgatcgtaccgtgtggttccaaggacaagatatggagctaaatgctataagcaatctagcttcgaatgaaaaagctccatatctatctacgatgaaacaacatctgttacacggtgcattgggcgaagaaggtctgaaaaagatggacagtttcaatcgctggatgagcaaagaacttggagatgttggtgttatagctgatgcaaacgagtcctttactcaatcaagttcaagaacctactgggaagaagttgagagtgaggatgggtccaatggtcacaactctaggagggacatggatggatatgttatgagtccttccctctcaaaggaacagctctttagcatcaatgacttctctccaagctgggcttatgtgggttgtgaagtggtggtttttgtcactggaaaattcttaaagactcgggaggagactgaaattggcgagtggtcttgcatgtttgggcaaacagaagttccagcagatgttatatctaatggtattctccaatgtgttgctcctatgcatgaggctggaagagttcccttttatgtaacatgttccaacagattggcatgcagtgaagtgcgtgaattcgagtataaggttgccgagtctcaagtttttgatagagaagcagatgatgagtctactattgacattcttgaggcaagatttgttaaactgttgtgctcgaaatctgaaaatacaagccctgtttctgggaatgacagtgatttgtcacaattgagcgagaagattagtttactacttttcgagaacgatgaccagttggatcagatgctcatgaatgaaatctcccaagaaaatatgaaaaacaaccttttgcaggaatttctgaaagaaagcttacactcatggcttttacaaaagatagcagaaggtggaaaaggtccaagtgttttggatgaaggtggccaaggtgtattacattttgcagcttctcttggttacaactgggccttagaaccaacaataatcgctggtgtaagcgttgattttcgcgatgtaaatggttggaccgcacttcattgggcagctttctttggcagggagaggataattggttcactcatagctcttggtgctgctcctggaactttaactgacccaaatccagatttcccatcaggaagcacaccttctgatctagcctatgctaatggtcacaaaggaattgctggttatctctcagaatatgccttaagagctcatgtttctttgctcagtctaaatgataaaaatgccgaaactgttgagatggctcctagcccatccagctcatcattgacagactcgttgacagctgtacgtaacgctactcaggcagcagctcggattcatcaggttttcagggctcagtctttccagaagaagcaactaaaagaatttggagataaaaagcttggaatgtcggaggagcgtgctctttcgatgcttgctcctaaaacacacaaatcaggaagggcacatagtgatgattccgtgcaagccgctgctattcggattcagaacaagttccgaggttacaagggaagaaaagactatttgattaccagacaaagaatcatcaaaatacaggctcatgtgagaggttatcagtttaggaaaaactacagaaagataatttggtcagtgggggtattagagaaggtgatattacgttggagacggaaaggagctggtttgcgcgggtttaagtcagaagcacttgttgagaagatgcaagacggaacagagaaagaagaagatgatgattttttcaaacaaggaagaaagcaaacagaggataggctacaaaaagctcttgcaagagtgaaatccatggttcaatatcctgaagctagagatcaataccgtagattgctaaatgttgtcaacgacatccaagaaagcaaggttgaaaaagctcttgaaaattcagaagcaacttgttttgatgatgatgatgatctgatagatattgaagcattgttggaagatgatgacacattgatgttgcctatgtcctcatctttgtggaccagttaaatcactctcaagctttgttgtgatattgtgtcacagtattattgactcattaaacttgtaaattcttgtgtaatcactcttctcatatactgtaactgcattcatgactctaatttaaatgatatatatttgaaacat

SEQ ID NO: 99713 - protein, 1032 aa, Arabidopsis thaliana; identical to SEQ ID NO: 24425
  peptide (1)..(1032): Ceres Seq. ID no. 13603500

SEQ ID NO: 99714 - protein, 974 aa, Arabidopsis thaliana; identical to SEQ ID NO: 24426
  peptide (1)..(974): Ceres Seq. ID no. 13603501

SEQ ID NO: 99715 - protein, 886 aa, Arabidopsis thaliana; identical to SEQ ID NO: 97065
  peptide (1)..(886): Ceres Seq. ID no. 13603502

SEQ ID NO: 99716 - DNA, 1519 bp, Arabidopsis thaliana
  misc_feature (1)..(1519): Ceres Seq. ID no. 13603503
  misc_feature (1)..(1519): Ortholog of  Ceres SEQ ID NO 13639663 as cited in SEQ ID NO 57850
aagaaacaagaggtaggctcttctagcgaactcctttcatacgttttctctctactctcatcgcttttcttatctctctcggagctcttccgtcgtccaccattgattacgggagtgtattgagctaaatatggctataatacaacttggaagtacatgtgttgctcaatggagtattcgtcctcaatttgcagtcagagcttattatcccagcagaatcgaatcaactcgccatcaaaattccagtagccaagtaaattgtttgggagcttcaaagtcgagtatgttctcacatgggtcattgcccttcttgtccatgacgggaatgtccagaaatatgcatcctcctcgcagaggatctcgcttcactgttagagctgatgcagattactattcggtactcggagtttcgaaaaatgcaaccaaagctgagattaaaagcgcttatcggaagctggctaggaattaccatccggatgtgaacaaggatcctggcgcagaagagaaattcaaagaaataagtaacgcatatgaggttttatcagatgatgaaaagaaatctctttacgataggtatggtgaggccggacttaaaggcgctgctggatttggcaatggggattttagtaatccgttcgatctattcgactcattattcgaaggcttcggtggtgggatgggtagaggttcaagaagcagagctgtggatggtcaagacgagtattacacgctaatcttaaacttcaaagaagcggttttcggaatggagaaagaaatagagatatcccggctcgagagctgtgggacatgtgaaggttcaggtgcaaaacctggaaccaaaccgaccaaatgcaccacgtgtggcggacaaggccaagtggtttcagcagctagaactcctctgggcgtgttccaacaagtcatgacttgctcgtcctgtaatggcactggagagatctcgacgccgtgtggtacttgctctggagacggacgcgtgaggaagacaaaacggataagtctcaaagtaccagccggggttgattcaggtagccggttgagagtgagaggagaaggcaatgccgggaagagaggcggatcaccaggcgatctgtttgttgttatagaagttatcccagacccgattttgaaacgagacgatacaaatattctctacacttgcaagatatcgtatatcgatgcgattttagggacgacactgaaagtaccaacagtggatgggacagtagatttgaaagttccagctgggacacaacctagcacgacgcttgtgatggcgaaaaaaggagttccggtattgaacaagagtaatatgagaggagatcagttggtgagagtacaagtggagatacctaagagattgagcaaagaggagaaaaaacttattgaagagcttgctgatatgagcaagaacaagactgctaatagcaccagtagatgattagaaacacgaaaattttgacattgaaattatgaatctctctatacatatacatttttc

SEQ ID NO: 99717 - protein, 442 aa, Arabidopsis thaliana
  peptide (1)..(442): Ceres Seq. ID no. 13603504
MAIIQLGSTCVAQWSIRPQFAVRAYYPSRIESTRHQNSSSQVNCLGASKSSMFSHGSLPFLSMTGMSRNMHPPRRGSRFTVRADADYYSVLGVSKNATKAEIKSAYRKLARNYHPDVNKDPGAEEKFKEISNAYEVLSDDEKKSLYDRYGEAGLKGAAGFGNGDFSNPFDLFDSLFEGFGGGMGRGSRSRAVDGQDEYYTLILNFKEAVFGMEKEIEISRLESCGTCEGSGAKPGTKPTKCTTCGGQGQVVSAARTPLGVFQQVMTCSSCNGTGEISTPCGTCSGDGRVRKTKRISLKVPAGVDSGSRLRVRGEGNAGKRGGSPGDLFVVIEVIPDPILKRDDTNILYTCKISYIDAILGTTLKVPTVDGTVDLKVPAGTQPSTTLVMAKKGVPVLNKSNMRGDQLVRVQVEIPKRLSKEEKKLIEELADMSKNKTANSTSR

SEQ ID NO: 99718 - protein, 391 aa, Arabidopsis thaliana
  peptide (1)..(391): Ceres Seq. ID no. 13603505
MFSHGSLPFLSMTGMSRNMHPPRRGSRFTVRADADYYSVLGVSKNATKAEIKSAYRKLARNYHPDVNKDPGAEEKFKEISNAYEVLSDDEKKSLYDRYGEAGLKGAAGFGNGDFSNPFDLFDSLFEGFGGGMGRGSRSRAVDGQDEYYTLILNFKEAVFGMEKEIEISRLESCGTCEGSGAKPGTKPTKCTTCGGQGQVVSAARTPLGVFQQVMTCSSCNGTGEISTPCGTCSGDGRVRKTKRISLKVPAGVDSGSRLRVRGEGNAGKRGGSPGDLFVVIEVIPDPILKRDDTNILYTCKISYIDAILGTTLKVPTVDGTVDLKVPAGTQPSTTLVMAKKGVPVLNKSNMRGDQLVRVQVEIPKRLSKEEKKLIEELADMSKNKTANSTSR

SEQ ID NO: 99719 - protein, 380 aa, Arabidopsis thaliana
  peptide (1)..(380): Ceres Seq. ID no. 13603506
MTGMSRNMHPPRRGSRFTVRADADYYSVLGVSKNATKAEIKSAYRKLARNYHPDVNKDPGAEEKFKEISNAYEVLSDDEKKSLYDRYGEAGLKGAAGFGNGDFSNPFDLFDSLFEGFGGGMGRGSRSRAVDGQDEYYTLILNFKEAVFGMEKEIEISRLESCGTCEGSGAKPGTKPTKCTTCGGQGQVVSAARTPLGVFQQVMTCSSCNGTGEISTPCGTCSGDGRVRKTKRISLKVPAGVDSGSRLRVRGEGNAGKRGGSPGDLFVVIEVIPDPILKRDDTNILYTCKISYIDAILGTTLKVPTVDGTVDLKVPAGTQPSTTLVMAKKGVPVLNKSNMRGDQLVRVQVEIPKRLSKEEKKLIEELADMSKNKTANSTSR

SEQ ID NO: 99720 - DNA, 1140 bp, Arabidopsis thaliana
  misc_feature (1)..(1140): Ceres Seq. ID no. 13603511
  misc_feature (1)..(1140): Ortholog of  Ceres SEQ ID NO 14314050 as cited in SEQ ID NO 59952
  misc_feature (1)..(1140): Ortholog of  Ceres SEQ ID NO 13596474 as cited in SEQ ID NO 62169
  misc_feature (1)..(1140): Ortholog of  Ceres SEQ ID NO 13598714 as cited in SEQ ID NO 62656
  misc_feature (1)..(1140): Ortholog of  Ceres SEQ ID NO 13596969 as cited in SEQ ID NO 63375
  misc_feature (1)..(1140): Ortholog of  Ceres SEQ ID NO 13597519 as cited in SEQ ID NO 64759
  misc_feature (1)..(1140): Ortholog of  Ceres SEQ ID NO 14302388 as cited in SEQ ID NO 65655
  misc_feature (1)..(1140): Ortholog of  Ceres SEQ ID NO 13595926 as cited in SEQ ID NO 67778
  misc_feature (1)..(1140): Ortholog of  Ceres SEQ ID NO 13587054 as cited in SEQ ID NO 0
tataaacacaaaagcctttagtatcattctcgaaaaccaccaaaaacctctttataacccaacaaacaaagtctctacttcttcttcaatcactgaaacacaacaccaaaaaagaaaaaagtatgtctcttcttccccatctcatcctctacctaacacttttgacggtggttgttactggagaaactctccgaccaagattctacagcgagacatgccctgaagctgaatccatagtaagaagagaaatgaagaaagcaatgatcaaagaagcaagaagcgtcgcttccgtcatgcgtttccaatttcacgactgtttcgtcaatggatgtgacgcatctctgttgcttgacgacacaccaaacatgcttggtgaaaaactatcactttccaacatcgattcactaagatctttcgaagtcgttgacgacattaaagaagctctagagaaagcttgtccagctactgtttcttgtgccgatatcgttatcatggccgctcgtgacgccgttgctcttacaggaggaccagattgggaagtgaagctagggaggaaagacagtttaacagcgagtcagcaagattccgacgatataatgccaagtccaagagccaacgcaactttcttgattgatctcttcgaaagattcaatctttctgtaaaagacatggttgctttatcagggtcacactcaataggtcaaggtcggtgtttttcaatcatgttcagactttataaccaatccggttctggtaaaccggatccagctcttgaaccgagttaccgtaagaagcttgataagctttgtcctttgggtggagatgagaatgtgactggagatctagatgcaacacctcaggtttttgataatcagtatttcaaagacttggtttcagggagagggtttcttaactctgatcagactttgtacacgaatctagtgacgagagagtatgtgaagatgtttagtgaggatcaagatgagttctttagggcttttgcagaaggcatggtgaagttgggtgatttgcaatctgggagacctggtgagattaggtttaattgtagagttgttaatagaaggcctattgatgtattgcttgtatcttgaattatcattagtaaagagaagaaatctt

SEQ ID NO: 99721 - protein, 329 aa, Arabidopsis thaliana
  peptide (1)..(329): Ceres Seq. ID no. 13603512
MSLLPHLILYLTLLTVVVTGETLRPRFYSETCPEAESIVRREMKKAMIKEARSVASVMRFQFHDCFVNGCDASLLLDDTPNMLGEKLSLSNIDSLRSFEVVDDIKEALEKACPATVSCADIVIMAARDAVALTGGPDWEVKLGRKDSLTASQQDSDDIMPSPRANATFLIDLFERFNLSVKDMVALSGSHSIGQGRCFSIMFRLYNQSGSGKPDPALEPSYRKKLDKLCPLGGDENVTGDLDATPQVFDNQYFKDLVSGRGFLNSDQTLYTNLVTREYVKMFSEDQDEFFRAFAEGMVKLGDLQSGRPGEIRFNCRVVNRRPIDVLLVS

SEQ ID NO: 99722 - protein, 287 aa, Arabidopsis thaliana
  peptide (1)..(287): Ceres Seq. ID no. 13603513
MKKAMIKEARSVASVMRFQFHDCFVNGCDASLLLDDTPNMLGEKLSLSNIDSLRSFEVVDDIKEALEKACPATVSCADIVIMAARDAVALTGGPDWEVKLGRKDSLTASQQDSDDIMPSPRANATFLIDLFERFNLSVKDMVALSGSHSIGQGRCFSIMFRLYNQSGSGKPDPALEPSYRKKLDKLCPLGGDENVTGDLDATPQVFDNQYFKDLVSGRGFLNSDQTLYTNLVTREYVKMFSEDQDEFFRAFAEGMVKLGDLQSGRPGEIRFNCRVVNRRPIDVLLVS

SEQ ID NO: 99723 - protein, 283 aa, Arabidopsis thaliana
  peptide (1)..(283): Ceres Seq. ID no. 13603514
MIKEARSVASVMRFQFHDCFVNGCDASLLLDDTPNMLGEKLSLSNIDSLRSFEVVDDIKEALEKACPATVSCADIVIMAARDAVALTGGPDWEVKLGRKDSLTASQQDSDDIMPSPRANATFLIDLFERFNLSVKDMVALSGSHSIGQGRCFSIMFRLYNQSGSGKPDPALEPSYRKKLDKLCPLGGDENVTGDLDATPQVFDNQYFKDLVSGRGFLNSDQTLYTNLVTREYVKMFSEDQDEFFRAFAEGMVKLGDLQSGRPGEIRFNCRVVNRRPIDVLLVS

SEQ ID NO: 99724 - DNA, 1643 bp, Arabidopsis thaliana
  misc_feature (1)..(1643): Ceres Seq. ID no. 13603515
  misc_feature (1)..(1643): Ortholog of  Ceres SEQ ID NO 14308723 as cited in SEQ ID NO 58758
ggttcagtctcttcgaagctcgtcgtctctctcttcaaaactccggtgaaaatggcgtcgcttactctccggtgcgattcgacgcatcttttgccttcccgtgatgttgtcaagggaacaaaaccatttggaacgagcttggtgtatcctaggatcatatcgaagaagtttaatgttagaatgagagtgatacctgaggaaggagatgtgttctcttcttctaagagtaatggatcatcaatggggattgagttacagccagatttggtttcgtttggaacattagcagctgaaatgattcctacaacaatggattctcctgaagttgaggatgaagagtttgatttagatcgacctactgatggatttgcgtctattcctcaagctattgaagatattcgacatggcaagatggtagttgttgtagatgatgaagatagagaaaacgaaggagatttgataatggcggcatctttggctacacctgaagctatggcttttgttgtaaagcatgggactggaatcgtgtgtgtgagcatgaaaggcgaagacttggagaggttagagcttcctttaatggtaacgcgtaaggataacgaggaaaaactccgcacggccttcacggtttcagtggacgcaaaaaagggaacatccacaggtgtctcagctcgtgatagggcgcaaacaatattaacccttgcatcaaaagattcaaaacctgaagatttcaatcgtcctggtcatatttttcctttgagatacagagaaggtggtgttcttaaaagagcagggcatacagaagcctctgttgacttgactgtgttggccggtttagaaccagtatctgttttatgtgagattgtagatgatgatggttccatggctagattaccaagactccgccaattcgctcaagagaacaacttgaaattaatttcaatcgctgatttaatcagataccgaaggaaaagagagagactggttgagtttactgcggttgcgcctataccgacaatgtggggaccattcaaagcacattgctttaagtcattacttgatggagttgagcacattgcaatggtcaagggagaaatcggagatgggaaggatattctcgtgagagtacacgcggagtgtatcacagatgatatattcggaaatagctctggtggaaaacagttagcgattgcaatgagactgattgaagaaaatgggagaggtgtttttgtctacttacgtggtcctgaaagtaaaggcattgatctaagccacaagcctcgtacttacaacaccaattcagatcaagccgagggtgtttcatttcccgttgcttcacgggaatacggcattggagcacaaattctaagggatcttggagttagagagatgaaggtgatgacgaataatccagcacattacgttggtcttaaaggctatggtttatcaatttctggtaaggttccactcattactactccttaagtgttgttttgaccgttgtttgattacgttaagagacgacacgtgtcggcttcttgagtgacttagtttgttgtttagttgtggttttggcgcctaaatcatgtgatctgatattgtgttttttgacctccataattatcattagaattattttaaatggc

SEQ ID NO: 99725 - protein, 493 aa, Arabidopsis thaliana
  peptide (1)..(493): Ceres Seq. ID no. 13603516
GSVSSKLVVSLFKTPVKMASLTLRCDSTHLLPSRDVVKGTKPFGTSLVYPRIISKKFNVRMRVIPEEGDVFSSSKSNGSSMGIELQPDLVSFGTLAAEMIPTTMDSPEVEDEEFDLDRPTDGFASIPQAIEDIRHGKMVVVVDDEDRENEGDLIMAASLATPEAMAFVVKHGTGIVCVSMKGEDLERLELPLMVTRKDNEEKLRTAFTVSVDAKKGTSTGVSARDRAQTILTLASKDSKPEDFNRPGHIFPLRYREGGVLKRAGHTEASVDLTVLAGLEPVSVLCEIVDDDGSMARLPRLRQFAQENNLKLISIADLIRYRRKRERLVEFTAVAPIPTMWGPFKAHCFKSLLDGVEHIAMVKGEIGDGKDILVRVHAECITDDIFGNSSGGKQLAIAMRLIEENGRGVFVYLRGPESKGIDLSHKPRTYNTNSDQAEGVSFPVASREYGIGAQILRDLGVREMKVMTNNPAHYVGLKGYGLSISGKVPLITTP

SEQ ID NO: 99726 - protein, 476 aa, Arabidopsis thaliana
  peptide (1)..(476): Ceres Seq. ID no. 13603517
MASLTLRCDSTHLLPSRDVVKGTKPFGTSLVYPRIISKKFNVRMRVIPEEGDVFSSSKSNGSSMGIELQPDLVSFGTLAAEMIPTTMDSPEVEDEEFDLDRPTDGFASIPQAIEDIRHGKMVVVVDDEDRENEGDLIMAASLATPEAMAFVVKHGTGIVCVSMKGEDLERLELPLMVTRKDNEEKLRTAFTVSVDAKKGTSTGVSARDRAQTILTLASKDSKPEDFNRPGHIFPLRYREGGVLKRAGHTEASVDLTVLAGLEPVSVLCEIVDDDGSMARLPRLRQFAQENNLKLISIADLIRYRRKRERLVEFTAVAPIPTMWGPFKAHCFKSLLDGVEHIAMVKGEIGDGKDILVRVHAECITDDIFGNSSGGKQLAIAMRLIEENGRGVFVYLRGPESKGIDLSHKPRTYNTNSDQAEGVSFPVASREYGIGAQILRDLGVREMKVMTNNPAHYVGLKGYGLSISGKVPLITTP

SEQ ID NO: 99727 - protein, 433 aa, Arabidopsis thaliana
  peptide (1)..(433): Ceres Seq. ID no. 13603518
MRVIPEEGDVFSSSKSNGSSMGIELQPDLVSFGTLAAEMIPTTMDSPEVEDEEFDLDRPTDGFASIPQAIEDIRHGKMVVVVDDEDRENEGDLIMAASLATPEAMAFVVKHGTGIVCVSMKGEDLERLELPLMVTRKDNEEKLRTAFTVSVDAKKGTSTGVSARDRAQTILTLASKDSKPEDFNRPGHIFPLRYREGGVLKRAGHTEASVDLTVLAGLEPVSVLCEIVDDDGSMARLPRLRQFAQENNLKLISIADLIRYRRKRERLVEFTAVAPIPTMWGPFKAHCFKSLLDGVEHIAMVKGEIGDGKDILVRVHAECITDDIFGNSSGGKQLAIAMRLIEENGRGVFVYLRGPESKGIDLSHKPRTYNTNSDQAEGVSFPVASREYGIGAQILRDLGVREMKVMTNNPAHYVGLKGYGLSISGKVPLITTP

SEQ ID NO: 99728 - DNA, 1215 bp, Arabidopsis thaliana
  misc_feature (1)..(1215): Ceres Seq. ID no. 13603523
  misc_feature (1)..(1215): Ortholog of  Ceres SEQ ID NO 14313014 as cited in SEQ ID NO 54841
  misc_feature (1)..(1215): Ortholog of  Ceres SEQ ID NO 14316091 as cited in SEQ ID NO 57622
  misc_feature (1)..(1215): Ortholog of  Ceres SEQ ID NO 13639317 as cited in SEQ ID NO 59781
  misc_feature (1)..(1215): Ortholog of  Ceres SEQ ID NO 13654578 as cited in SEQ ID NO 68583
aaagggaacgataccattagtcccaataccaatccttgcaaaattcaaactcaaacaaaccgtttatctcacgcgccgccgtactcgccacgatccgtctttggagaccaatttatggagccgccgaagggagataccgtagtgaagactgaggtcccggtgaaggatccatcgctaagcgtcgtcgattcgaaaacgaagggagtcgaggatgcgaacactgagatagccttgtccgatgaggttgaaatcgagacgaagggaagcgattcgacaccggtgaaagctccgagtcgaacatcgtctggatcgaagaaatctgtacattggagccccgaattggtgtctggatctcaggaaccggatcagaaagctgcatcgtcttcttcggctggatctaatccgtatattgctcgttctccagctgagacttcagatgcttcgttgaaagatacgatggagactgtgaaaggagtgcttggtagatggggaaagagggttgcagaagcagcaaagaagacggagagccttgccgggaacacatggcaacacctgagaactgctccgagttttgcggatgctgcaatgggaagaattgcacagagtacaaaggtctttgcagaaggaggatatgagaagatattccgacaaacctttgagacagatcccgaagaacagttgctaaattcttttgcatgttacttgtcaacatcagctggcccagttatgggagttctatatatatccagtgccaaacttgcttactgtagtgacaaccctctctcctataaaaacggtgatcaaaccgaatggagctattacaaggtagtaattccattacatcaacttaaagcagtgaatccatcagcgagcatagtcaatcctgcagagaagtacatacaggtgatttcggtagacaatcatgagttttggttcatgggttttttaaactacgacggcgctgtcacgtctctgcaagattctttgcaagccggtgctttaaggtcggtgtgatacataactggatgactgatgaccataaaagcatgttgatctccacctcttcttgcttagtcatatcagaagactcaaatttttacattattttgcatttaatctcaatatcctatttactacagaaactagctgaattttacaaatttactttaaaatgttttatcttttgatatttttatgagaagacagcttaattgc

SEQ ID NO: 99729 - protein, 337 aa, Arabidopsis thaliana
  peptide (1)..(337): Ceres Seq. ID no. 13603524
KGNDTISPNTNPCKIQTQTNRLSHAPPYSPRSVFGDQFMEPPKGDTVVKTEVPVKDPSLSVVDSKTKGVEDANTEIALSDEVEIETKGSDSTPVKAPSRTSSGSKKSVHWSPELVSGSQEPDQKAASSSSAGSNPYIARSPAETSDASLKDTMETVKGVLGRWGKRVAEAAKKTESLAGNTWQHLRTAPSFADAAMGRIAQSTKVFAEGGYEKIFRQTFETDPEEQLLNSFACYLSTSAGPVMGVLYISSAKLAYCSDNPLSYKNGDQTEWSYYKVVIPLHQLKAVNPSASIVNPAEKYIQVISVDNHEFWFMGFLNYDGAVTSLQDSLQAGALRSV

SEQ ID NO: 99730 - protein, 299 aa, Arabidopsis thaliana
  peptide (1)..(299): Ceres Seq. ID no. 13603525
MEPPKGDTVVKTEVPVKDPSLSVVDSKTKGVEDANTEIALSDEVEIETKGSDSTPVKAPSRTSSGSKKSVHWSPELVSGSQEPDQKAASSSSAGSNPYIARSPAETSDASLKDTMETVKGVLGRWGKRVAEAAKKTESLAGNTWQHLRTAPSFADAAMGRIAQSTKVFAEGGYEKIFRQTFETDPEEQLLNSFACYLSTSAGPVMGVLYISSAKLAYCSDNPLSYKNGDQTEWSYYKVVIPLHQLKAVNPSASIVNPAEKYIQVISVDNHEFWFMGFLNYDGAVTSLQDSLQAGALRSV

SEQ ID NO: 99731 - protein, 185 aa, Arabidopsis thaliana
  peptide (1)..(185): Ceres Seq. ID no. 13603526
METVKGVLGRWGKRVAEAAKKTESLAGNTWQHLRTAPSFADAAMGRIAQSTKVFAEGGYEKIFRQTFETDPEEQLLNSFACYLSTSAGPVMGVLYISSAKLAYCSDNPLSYKNGDQTEWSYYKVVIPLHQLKAVNPSASIVNPAEKYIQVISVDNHEFWFMGFLNYDGAVTSLQDSLQAGALRSV

SEQ ID NO: 99732 - DNA, 1413 bp, Arabidopsis thaliana
  misc_feature (1)..(1413): Ceres Seq. ID no. 13603527
  misc_feature (1)..(1413): Ortholog of  Ceres SEQ ID NO 15177654 as cited in SEQ ID NO 59933
  misc_feature (1)..(1413): Ortholog of  Ceres SEQ ID NO 14303600 as cited in SEQ ID NO 64632
  misc_feature (1)..(1413): Ortholog of  Ceres SEQ ID NO 14302776 as cited in SEQ ID NO 66919
aatctcaccttctctctccctctctataacaaacattaatacacacaccaaaaaaaaacctgtttatgtctcaaagatctctgattcctcattcttcttctatagcttttggtctccattctcatctcttaatctccagtgagatcagctccaattctaactggtctctctaaataaaaaacagaaataaaaatccaacctttttcaattttcgttcaattttcccggaaaaaaaagcgatccttttgatttttcgatttctccaagtaacaattcaaaatgggtctaaagggttttgctgaaggaggaatagcttcgattgttgcgggttgttcgacccacccgcttgatctaatcaaggtccgaatgcaacttcaaggcgaatcagctccgattcaaaccaatctccgaccagctcttgcttttcagacttcgaccaccgtcaacgcgcctcctctacgtgttggtgtaatcggagtcggatctcgtttaataagagaagaaggcatgcgtgctctgttttccggcgtctccgccaccgttcttcgtcaaactctgtattcaacgactcgtatgggtttatacgacatcatcaaaggagaatggaccgacccggaaacaaaaacgatgcctttaatgaaaaaaatcggtgccggagccatcgccggagcaatcggagccgccgttgggaatcctgctgacgtggcgatggtgaggatgcaagccgatggtcgtttaccgttgactgatagaagaaactacaaaagcgttttagacgcgatcacgcaaatgattcgcggtgaaggcgttacgtcgttgtggagaggatcgtctttgacgataaacagagcaatgcttgtgacgtcatcgcagttggcttcgtatgattctgttaaagagacgattttggagaaagggttgttgaaagatgggcttgggactcatgtgtcggcgagtttcgcggcggggtttgttgcgagcgttgcgagtaatcctgttgatgtgattaagacgagagtgatgaatatgaaggtggtggctggagttgctccgccgtataaaggagcggttgattgtgctttgaaaacggtgaaagcggaagggattatgtctttgtataaaggttttatcccgacggtttcgagacaagcaccgttcacggtggttttgtttgttacgcttgaacaagttaagaagttgttcaaggactatgacttttgaaaaaaacaagagttgaattatgttgaagaagatgaatgatggtggcgacaataagcttctctttttttctggttataattttcttttgattatttgagtagttttaaattgtttcccatttgttggaatagatctatgatatgataattcttctcatggagaagaaagaaagaaagaaacagttcatttgat

SEQ ID NO: 99733 - protein, 313 aa, Arabidopsis thaliana; identical to SEQ ID NO: 34731
  peptide (1)..(313): Ceres Seq. ID no. 13603528

SEQ ID NO: 99734 - protein, 284 aa, Arabidopsis thaliana; identical to SEQ ID NO: 34732
  peptide (1)..(284): Ceres Seq. ID no. 13603529

SEQ ID NO: 99735 - protein, 237 aa, Arabidopsis thaliana; identical to SEQ ID NO: 34733
  peptide (1)..(237): Ceres Seq. ID no. 13603530

SEQ ID NO: 99736 - DNA, 934 bp, Arabidopsis thaliana
  misc_feature (1)..(934): Ceres Seq. ID no. 13603531
  misc_feature (1)..(934): Ortholog of  Ceres SEQ ID NO 13586122 as cited in SEQ ID NO 0
agttttctcaattttttctagactcgtatcgatatggcgaatcatgaaacgatatttgatcagctaaagaagcagattccagtagatgaggaagaacctctgattttgaatcgagactcaagcgttggtctcgtcatcgttgacgttgttaatggcttctgcacaattggctccggcaatatggctccaacaaagcataatgaacagatatcgaagatggtggaggaaagtgcaaagcttgctagagagttctgtgatcggaaatggccggttttggcgtttattgactctcatcatccagatattccggagagaccttatcctcctcattgtattataggaactgaagaatcagaacttgttcctgctctgaaatggcttgaaagtgaggattgtgccactcttagacgaaaggattgtattaatgggtttgtgggttcgatggagagtgatggttctaatgtttttgtggattgggttaaggaaaaacagatcaaagttattgtcgttgtaggtatctgtacagacatatgtgtgtttgattttgtggctactgcactttctgcccgaaaccacggtgttctttctcctgtagaagatgtggtagtgtactcccgtggctgtgctacttttgaccttcctcttcatgttgcgaaagacatcaaaggcgctcaggctcatcctcaggagttgatgcaccatgtaggtctatatatggctaaaggaagaggagctcaggtagtctctaaaatttcttttgagacttgaaagactatatctcgtttataaacataacactcttgatatcaaatatttcagtaaattgttgagtttgcctctcttttctttcgtgtaaattgttcatgaagcttgttctctgaatttcaactcttgtgtaactgtttcagaatgacaaataatatgatgggtttct

SEQ ID NO: 99737 - protein, 244 aa, Arabidopsis thaliana; identical to SEQ ID NO: 41005
  peptide (1)..(244): Ceres Seq. ID no. 13603532

SEQ ID NO: 99738 - protein, 195 aa, Arabidopsis thaliana; identical to SEQ ID NO: 41006
  peptide (1)..(195): Ceres Seq. ID no. 13603533

SEQ ID NO: 99739 - protein, 183 aa, Arabidopsis thaliana; identical to SEQ ID NO: 41007
  peptide (1)..(183): Ceres Seq. ID no. 13603534

SEQ ID NO: 99740 - DNA, 1537 bp, Arabidopsis thaliana
  misc_feature (1)..(1537): Ceres Seq. ID no. 13603535
  misc_feature (1)..(1537): Ortholog of  Ceres SEQ ID NO 13582281 as cited in SEQ ID NO 51014
  misc_feature (1)..(1537): Ortholog of  Ceres SEQ ID NO 14315606 as cited in SEQ ID NO 53515
  misc_feature (1)..(1537): Ortholog of  Ceres SEQ ID NO 12617417 as cited in SEQ ID NO 65089
atcatcaaagtgaaaatgacaaacttcaaagacaacgatggagatggaaccaaactccacgtggtaatgtttccatggttagcctttggtcacatggttccatacttggagctctctaaactcatagctcaaaagggtcacaaagtctctttcatttccactccacgtaacatcgaccgtctcctcccatggttaccggaaaatctctcctccgtcattaacttcgtcaagctatcacttcccgtcggcgacaacaaactcccggaagacggtgaagctaccacagacgtccctttcgaactcataccttacttaaaaatcgcttacgacgggttaaaagttccggtgacggagtttcttgaatcttcgaaacccgattgggttcttcaagatttcgcggggttttggcttcctccaatctctcgtcgtctcggaatcaaaaccggattctttagcgctttcaacggcgcgacgctcggtattcttaaaccgccggggttcgaagagtaccgtacttcgccggcggattttatgaagccgcctaagtgggttccgtttgaaacttcggtagctttcaagttatttgaatgcaggttcattttcaaaggatttatggcggaaaccaccgaagggaatgttcccgacatccaccgtgtcggcggcgtaattgacggctgtgacgtcatcttcgtacggagctgttacgagtatgaagcggagtggttaggacttacacaagaacttcaccggaaaccggttataccggtcggagttttgcctccaaaaccggacgaaaagtttgaagataccgacacgtggctgtctgttaaaaaatggttggactcacggaaaagtaagtccattgtctacgtagcttttggttcagaagctaaaccgagtcaaacggagctaaatgagatcgctctcggtttagagctttctggtttacctttcttttgggtgttaaagactcgtcgtggtccgtgggataccgaaccggtcgagcttccggaaggattcgaagagcgtacagcggatagagggatggtgtggagaggttgggttgagcaattgcgtacattgagccatgactcgatcggtttggttctgactcatcccggttggggaacgataattgaagctatccggtttgctaaaccgatggcaatgctggtttttgtgtatgaccaaggattgaatgcgagagtcattgaagagaagaaaattgggtatatgatccctcgagacgagacagaaggtttctttactaaagaaagtgttgcgaattcgctaagattggtaatggtggaagaagaaggaaaggtttatagagagaatgtgaaggagatgaaaggagtgtttggagatatggatagacaagatcgttatgtggattcattcttggaatatcttgttactaatcgttaactttgagtcttgatccaatggtcggttaattgagtgaagttgatcaagtgttgcaaggatgatcattgtataatgttatgatattttggaatggtcaagttttcttgag

SEQ ID NO: 99741 - protein, 475 aa, Arabidopsis thaliana
  peptide (1)..(475): Ceres Seq. ID no. 13603536
IIKVKMTNFKDNDGDGTKLHVVMFPWLAFGHMVPYLELSKLIAQKGHKVSFISTPRNIDRLLPWLPENLSSVINFVKLSLPVGDNKLPEDGEATTDVPFELIPYLKIAYDGLKVPVTEFLESSKPDWVLQDFAGFWLPPISRRLGIKTGFFSAFNGATLGILKPPGFEEYRTSPADFMKPPKWVPFETSVAFKLFECRFIFKGFMAETTEGNVPDIHRVGGVIDGCDVIFVRSCYEYEAEWLGLTQELHRKPVIPVGVLPPKPDEKFEDTDTWLSVKKWLDSRKSKSIVYVAFGSEAKPSQTELNEIALGLELSGLPFFWVLKTRRGPWDTEPVELPEGFEERTADRGMVWRGWVEQLRTLSHDSIGLVLTHPGWGTIIEAIRFAKPMAMLVFVYDQGLNARVIEEKKIGYMIPRDETEGFFTKESVANSLRLVMVEEEGKVYRENVKEMKGVFGDMDRQDRYVDSFLEYLVTNR

SEQ ID NO: 99742 - protein, 470 aa, Arabidopsis thaliana
  peptide (1)..(470): Ceres Seq. ID no. 13603537
MTNFKDNDGDGTKLHVVMFPWLAFGHMVPYLELSKLIAQKGHKVSFISTPRNIDRLLPWLPENLSSVINFVKLSLPVGDNKLPEDGEATTDVPFELIPYLKIAYDGLKVPVTEFLESSKPDWVLQDFAGFWLPPISRRLGIKTGFFSAFNGATLGILKPPGFEEYRTSPADFMKPPKWVPFETSVAFKLFECRFIFKGFMAETTEGNVPDIHRVGGVIDGCDVIFVRSCYEYEAEWLGLTQELHRKPVIPVGVLPPKPDEKFEDTDTWLSVKKWLDSRKSKSIVYVAFGSEAKPSQTELNEIALGLELSGLPFFWVLKTRRGPWDTEPVELPEGFEERTADRGMVWRGWVEQLRTLSHDSIGLVLTHPGWGTIIEAIRFAKPMAMLVFVYDQGLNARVIEEKKIGYMIPRDETEGFFTKESVANSLRLVMVEEEGKVYRENVKEMKGVFGDMDRQDRYVDSFLEYLVTNR

SEQ ID NO: 99743 - protein, 453 aa, Arabidopsis thaliana
  peptide (1)..(453): Ceres Seq. ID no. 13603538
MFPWLAFGHMVPYLELSKLIAQKGHKVSFISTPRNIDRLLPWLPENLSSVINFVKLSLPVGDNKLPEDGEATTDVPFELIPYLKIAYDGLKVPVTEFLESSKPDWVLQDFAGFWLPPISRRLGIKTGFFSAFNGATLGILKPPGFEEYRTSPADFMKPPKWVPFETSVAFKLFECRFIFKGFMAETTEGNVPDIHRVGGVIDGCDVIFVRSCYEYEAEWLGLTQELHRKPVIPVGVLPPKPDEKFEDTDTWLSVKKWLDSRKSKSIVYVAFGSEAKPSQTELNEIALGLELSGLPFFWVLKTRRGPWDTEPVELPEGFEERTADRGMVWRGWVEQLRTLSHDSIGLVLTHPGWGTIIEAIRFAKPMAMLVFVYDQGLNARVIEEKKIGYMIPRDETEGFFTKESVANSLRLVMVEEEGKVYRENVKEMKGVFGDMDRQDRYVDSFLEYLVTNR

SEQ ID NO: 99744 - DNA, 1402 bp, Arabidopsis thaliana
  misc_feature (1)..(1402): Ceres Seq. ID no. 13603539
  misc_feature (1)..(1402): Ortholog of  Ceres SEQ ID NO 14304969 as cited in SEQ ID NO 53193
  misc_feature (1)..(1402): Ortholog of  Ceres SEQ ID NO 14314851 as cited in SEQ ID NO 54014
  misc_feature (1)..(1402): Ortholog of  Ceres SEQ ID NO 15227214 as cited in SEQ ID NO 55368
  misc_feature (1)..(1402): Ortholog of  Ceres SEQ ID NO 13638897 as cited in SEQ ID NO 55839
  misc_feature (1)..(1402): Ortholog of  Ceres SEQ ID NO 15173484 as cited in SEQ ID NO 61804
  misc_feature (1)..(1402): Ortholog of  Ceres SEQ ID NO 13596958 as cited in SEQ ID NO 63319
  misc_feature (1)..(1402): Ortholog of  Ceres SEQ ID NO 12614573 as cited in SEQ ID NO 68344
  misc_feature (1)..(1402): Ortholog of  Ceres SEQ ID NO 12614814 as cited in SEQ ID NO 68816
  misc_feature (1)..(1402): Ortholog of  Ceres SEQ ID NO 13624040 as cited in SEQ ID NO 0
aaatttaccactccttccatgtttttgtttctctcttcttcttgattgttgcgcttttgttagctttctctggttcattttccatggacggaccttgacctctctgcttcccttcgtgcattttctctctctcactatcctctctctttctagtgtttgtttgatcctctgcgtactctgttcttcttctctcttcagataaaacaagtcctgcatattgaagatctgatgtcttatcgattgctaagtgtggataaggatgaactggttacgtcaccttgtttgaaagaacgtaactacttgggtctctctgattgttcctctgttgatagctcaactattcccaatgttgttgggaagagcaatctcaatttcaaagctactgaactgaggctaggtcttcctgagtctcaatctcctgagagagagactgatttcggtttgctgagtccgagaacacccgatgagaagcttctcttcccgttgctaccttctaaagacaatggttctgctactacagggcataagaatgttgtttctggtaacaagagaggatttgctgacacttgggatgagttttcgggtgtgaaaggatctgttagacctggaggaggaatcaacatgatgttgtcgccgaaagttaaggatgtctcgaagagtattcaagaagaaagatctcatgctaagggtggcttgaacaatgcaccagctgccaaggcacaggttgttggttggcctccaatcagatcataccggaagaatacaatggcttcttctacttcgaagaacactgatgaggttgatgggaaacctggtcttggtgttctgtttgtgaaggtgagcatggatggtgctccgtatctgagaaaggtcgacttgagaacttacacttcctatcaacagttgtcttctgcacttgagaaaatgttcagctgcttcacccttggtcaatgtggtcttcatggtgctcaagggagggaaagaatgagcgagattaaactgaaggatcttcttcatggatcagaatttgtgcttacttatgaagataaagacggtgattggatgcttgttggcgatgttccatgggagatatttactgaaacatgccagaaactgaagatcatgaagggttctgattctattggcttagctccaggtgcagtggagaaatcgaagaacaaagagcgggtttgaaacgaagatgctcaagacaaaaaaaaaacactatgcacagttccaatgtttaagttttatttactgatgtgtttgaaaactctttagtctttttactaatttgtgttgtaagactttggattctcttatttgtgtgtgcttgttcaaaacaaatacattcttatgtgtgtgtttctactttgaccttcaagatatttcgtctctacgc

SEQ ID NO: 99745 - protein, 321 aa, Arabidopsis thaliana; identical to SEQ ID NO: 23887
  peptide (1)..(321): Ceres Seq. ID no. 13603540

SEQ ID NO: 99746 - protein, 190 aa, Arabidopsis thaliana; identical to SEQ ID NO: 23888
  peptide (1)..(190): Ceres Seq. ID no. 13603541

SEQ ID NO: 99747 - protein, 189 aa, Arabidopsis thaliana; identical to SEQ ID NO: 23889
  peptide (1)..(189): Ceres Seq. ID no. 13603542

SEQ ID NO: 99748 - DNA, 1361 bp, Arabidopsis thaliana
  misc_feature (1)..(1361): Ceres Seq. ID no. 13603543
  misc_feature (1)..(1361): Ortholog of  Ceres SEQ ID NO 14307404 as cited in SEQ ID NO 54231
  misc_feature (1)..(1361): Ortholog of  Ceres SEQ ID NO 14315052 as cited in SEQ ID NO 56951
aaattcatcttctcttcttcctccgattccatctttctccgtttccggcgataatcttcatcgcttcttcagttgattatctttagaatggagctaaagaatgtcaaagatgcgtttgatcgtgttaccaaaaagcagaaactatgctatagcaaaacgcatgaagtggtagacaaaatgtctcaagaaatcgacaaggcattgaaaacgatacaggaggataatcatgaatctgttgttgctgatctgaagaaaacttttgaggagattgctccaatcaatctactagaagcgtctcagaaagaaataaatggggttcttaccaaatacccgaaagctcttgacaaaactctgaatccagatatatcgacggcttacagaaacgttaagtttgatactcatacagttcatcagatactagctcagtttttctacaggcaaggcatgtacgacgttggtgactgtttcatttccgagactggtgaggttaagcctgaatcttctgttactaaagctttcatggaaatgaatatgatacttgaagccatgaaagaacgggatctcggaccagctttgaaatgggtagcttcaaactctgacaagctaaaggaagcaaagtcagatcttgagttgaaacttcacagccttcactttttggagatagctaaagacaaaacctccgaagaagctatcaactacgcgagaaaacactttgctacgtattcagcagatagctgctgtttccctgagatacagaaactcatgtgctctctcttatggatcagaaacctcaataaatccccatactcagagttcctctcacctgtattgtggaccaacgctgccaaggaactaacccgacaatactgcatcctactcggtgaatcaccagagagtcctttaagtgtaacagttgcagcaggttcacaagttttaccgacgtttttgaagtatttgaacgtgctgccggagaaaagaaaagagtggcaaacaatggagcaacttcttgtacctgtggaactctctgaagagtatcgcttctactcggtctttgtctgccctgtctctaaagaacactcgagcgaagataatccgccgatgagattggcttgcggtcatgtcctttgcaagcagtctatcaacagaatgtcgaggaatggttcaaggtcgttcaagtgtccttattgtccaacagatattgatgcttcgcagtgtaagcagttatatttttagactagctttacaacttcttatgcagcatttctaaagaaagtagacaaatgtttcttatcttttcttttatgaacttgaattgggttcgtgtacaaaaactatagtttgaaataaaaccttttataccc

SEQ ID NO: 99749 - protein, 381 aa, Arabidopsis thaliana
  peptide (1)..(381): Ceres Seq. ID no. 13603544
MELKNVKDAFDRVTKKQKLCYSKTHEVVDKMSQEIDKALKTIQEDNHESVVADLKKTFEEIAPINLLEASQKEINGVLTKYPKALDKTLNPDISTAYRNVKFDTHTVHQILAQFFYRQGMYDVGDCFISETGEVKPESSVTKAFMEMNMILEAMKERDLGPALKWVASNSDKLKEAKSDLELKLHSLHFLEIAKDKTSEEAINYARKHFATYSADSCCFPEIQKLMCSLLWIRNLNKSPYSEFLSPVLWTNAAKELTRQYCILLGESPESPLSVTVAAGSQVLPTFLKYLNVLPEKRKEWQTMEQLLVPVELSEEYRFYSVFVCPVSKEHSSEDNPPMRLACGHVLCKQSINRMSRNGSRSFKCPYCPTDIDASQCKQLYF

SEQ ID NO: 99750 - protein, 351 aa, Arabidopsis thaliana
  peptide (1)..(351): Ceres Seq. ID no. 13603545
MSQEIDKALKTIQEDNHESVVADLKKTFEEIAPINLLEASQKEINGVLTKYPKALDKTLNPDISTAYRNVKFDTHTVHQILAQFFYRQGMYDVGDCFISETGEVKPESSVTKAFMEMNMILEAMKERDLGPALKWVASNSDKLKEAKSDLELKLHSLHFLEIAKDKTSEEAINYARKHFATYSADSCCFPEIQKLMCSLLWIRNLNKSPYSEFLSPVLWTNAAKELTRQYCILLGESPESPLSVTVAAGSQVLPTFLKYLNVLPEKRKEWQTMEQLLVPVELSEEYRFYSVFVCPVSKEHSSEDNPPMRLACGHVLCKQSINRMSRNGSRSFKCPYCPTDIDASQCKQLYF

SEQ ID NO: 99751 - protein, 262 aa, Arabidopsis thaliana
  peptide (1)..(262): Ceres Seq. ID no. 13603546
MYDVGDCFISETGEVKPESSVTKAFMEMNMILEAMKERDLGPALKWVASNSDKLKEAKSDLELKLHSLHFLEIAKDKTSEEAINYARKHFATYSADSCCFPEIQKLMCSLLWIRNLNKSPYSEFLSPVLWTNAAKELTRQYCILLGESPESPLSVTVAAGSQVLPTFLKYLNVLPEKRKEWQTMEQLLVPVELSEEYRFYSVFVCPVSKEHSSEDNPPMRLACGHVLCKQSINRMSRNGSRSFKCPYCPTDIDASQCKQLYF

SEQ ID NO: 99752 - DNA, 1352 bp, Arabidopsis thaliana
  misc_feature (1)..(1352): Ceres Seq. ID no. 13603555
  misc_feature (1)..(1352): Ortholog of  Ceres SEQ ID NO 14312163 as cited in SEQ ID NO 57211
gaaacggaacgtaattatttacgtgacttatgaaaagtcatcggcgattgtttctaatttgtcatcgccgccgttgaactatctcgccggcgataatgatctacgttggtggagtgcaatttctagacgagagtagctctttttcattgtcttcttcatcgcagggaagtagcttgcttgttgatgtaatgagtcatcctgtgataacgttagcttctgattcctttaagaatcttgaggaaaagaatgtttctttcgatgaaagtgattcagagagctcaacaaaagacagatatgtttacatattccaaagagaatttgctgttgtgaatccagctcttgttgattttgttggcaccgatgaagcaacaacttgtgtaggccttgttatccgcaacagaaaatctggaatgacgtctgttgcacacatggattcgccagagattgtggatttggggataagccagatgttgttattggttttacaggatgacgtagatgccgagttagatgtacatatggttggtggttatgaagatgtcgacataaaaaatgctgatggtgttggtgactatgccaaaccagagggttattcatttccgttgtgttgcaaattagtagaaactttgcagaagagaagagaaaactttcacattcaaaccctctttattcttgggcacaataccaagttggattcacaagcaaacacgtgccccatttttaatggatgcctggtgaataccagcaccggtgcaatcttgccagccagtttcaacagaacatctagatgtccggatgagatcgttagaagaattcgagtttcatcatcgtttgaagattctagctggaagggaaagttacttgacacatatgacacaaaaactgatagattcatcatcgcaccatgccgctggacaatgcgcttgattgaatatgtttgggaacttaatcagcttactgatgaagaaatcctcactaactgttccacctcaccttctgctgaaggtccagacttcgtaaacagtttaagaaggaattggggatatttactgaaatatccagaatggagcaaaacattcccaaggaggcaaccacgtgtgtttgaaagaactgtcgatggacactggaaaaaatgctgactttctcatctaatcatcatgacattatccagaaatctggctaaaaacaacggttagtgtatctaacattttgagatttatgtaaatggtcaagaacacatgtgattgattcttggacacagaaaatgtttgatttatctttttgactttttgtatcaaacgttgcaagtttggttcctatgaaaatatgggccggatcaggcccggtagacc

SEQ ID NO: 99753 - protein, 347 aa, Arabidopsis thaliana; identical to SEQ ID NO: 34907
  peptide (1)..(347): Ceres Seq. ID no. 13603556

SEQ ID NO: 99754 - protein, 316 aa, Arabidopsis thaliana; identical to SEQ ID NO: 34908
  peptide (1)..(316): Ceres Seq. ID no. 13603557

SEQ ID NO: 99755 - protein, 242 aa, Arabidopsis thaliana; identical to SEQ ID NO: 34909
  peptide (1)..(242): Ceres Seq. ID no. 13603558

SEQ ID NO: 99756 - DNA, 1302 bp, Arabidopsis thaliana
  misc_feature (1)..(1302): Ceres Seq. ID no. 13603565
  misc_feature (1)..(1302): Ortholog of  Ceres SEQ ID NO 15171268 as cited in SEQ ID NO 51297
  misc_feature (1)..(1302): Ortholog of  Ceres SEQ ID NO 15170521 as cited in SEQ ID NO 55668
  misc_feature (1)..(1302): Ortholog of  Ceres SEQ ID NO 13598249 as cited in SEQ ID NO 62509
  misc_feature (1)..(1302): Ortholog of  Ceres SEQ ID NO 13598595 as cited in SEQ ID NO 64671
  misc_feature (1)..(1302): Ortholog of  Ceres SEQ ID NO 13654241 as cited in SEQ ID NO 68348
acagggaaaagcagagcactctttatctcttcttctctctttcttctactctgtgatcaaactatcgaagaaaaaacaaaccctagatttatccgcccctcttcttcctctgatgataagaaagtcgaagactttgagaatctaaagctgaaaaattttgttttttttcattgagggaatcgaatcgagttatgtacaaggatcggagtggaggaggaataatgggtggtggtggatcatcgagatcggagatccttggtggagctattgatcggaaacgaatcaatgatgctttagacaaacatcttaagaaatcttcaccttctacatctagggttttcacttctaaggacaaagattctgtcccttctacttcaactgctaaatctcagcttcattctcgttcccccgatgttgaatctgacacggatagtgaaggatcagatgtgagtggttcagaaggtgatgatacctcttggatctcatggttttgtaatttgagagggaatgagtttttctgtgaagtagatgaagattatatacaagatgatttcaatctctgtggtttgagtggtcaagttccttactatgattatgcacttgatctcattttagatgttgaatcatcaaatggtgatatgtttactgaagaacagcatgagatggtggaatcagctgctgagatgttatatggtcttattcatgttcgttatattctcactactaaaggaatggctgctatgatggagaagtataagaattatgatttcgggagatgccccagagttttctgttgcggacagtcttgtcttccggttggccaatctgatatcccgaggtcgagcactgtgaagatatactgcccaaaatgcgaggatatttactacccgcgatctaaataccaaggcaacattgatggagcttactttggaactactttccctcatttgtttctcatggcctatgggaacatgaaaccgcagaagccggctcaaaactacgttcctaagatctttggctttaaggtacacaacaaacaatgatactctctcctctcaacagtcttgtggttgaatacaatctcggtggctaaaccaccattcttctgatggtcacgggtttgaaatggatgatactaaactgcgtttggaggatgagaagagctaatgaagaaaggtcgacacttaaaagtttttcactatgtaatctcaaaagttctaagtagaatcttcaacatagaaccgttctttgatgggtcttgggaaattctttacctgtgagtaatcaattaaatcatttacc

SEQ ID NO: 99757 - protein, 283 aa, Arabidopsis thaliana; identical to SEQ ID NO: 25592
  peptide (1)..(283): Ceres Seq. ID no. 13603566

SEQ ID NO: 99758 - protein, 273 aa, Arabidopsis thaliana; identical to SEQ ID NO: 25593
  peptide (1)..(273): Ceres Seq. ID no. 13603567

SEQ ID NO: 99759 - DNA, 1153 bp, Arabidopsis thaliana
  misc_feature (1)..(1153): Ceres Seq. ID no. 13603568
  misc_feature (1)..(1153): Ortholog of  Ceres SEQ ID NO 14304408 as cited in SEQ ID NO 58051
  misc_feature (1)..(1153): Ortholog of  Ceres SEQ ID NO 14314759 as cited in SEQ ID NO 59915
  misc_feature (1)..(1153): Ortholog of  Ceres SEQ ID NO 13661769 as cited in SEQ ID NO 61435
  misc_feature (1)..(1153): Ortholog of  Ceres SEQ ID NO 13600585 as cited in SEQ ID NO 0
aaccatctctctaaagcttcttctctcataacaatggcaagacaaatcaacatagagagtagtgtttctcaagttacctttatctcctccgccatccccgccgtatcttcctcctcctccatcaccgcttccgcctcattgtcctcttcacctactacatcttcctcttcttcgtcatcaacaaattctaacttcattgaggaagacaactctaaaagaaaagcatctcgaagatcattgtcatcgttagtctccgttgaagacgatgatgatcaaaacggtggaggtgggaaacggcgaaagaccaacggtggagataaacatccgacgtatagaggagtgaggatgaggagttggggaaaatgggtgtcggagattagagagccgagaaagaaatcaagaatctggctcgggacttatccaacggctgagatggcagctcgagctcatgacgtagcggctttagccattaaaggtacaacggcttacctcaattttcccaagttagccggcgagcttcctcgtccagtcacaaattctcctaaagacattcaagccgccgcctctttagcggccgttaactggcaagattcggtcaacgatgtgagtaattctgaagtggctgaaatagttgaagccgagccgagtcgagccgtggtggctcagttgttttcttcggacacaagcacgacgacgacgactcagagtcaagagtattcggaagcttcgtgtgcttcgacttcggcgtgtacggacaaagacagtgaggaagagaagctgtttgatttgccggatttgtttaccgatgagaatgagatgatgatacgaaacgatgcgttttgctactactcgtccacgtggcagctttgtggagccgatgctgggtttcggcttgaagagccgttttttctatctgaatgactaaagtacccctctcgagagagctctcactaacactttattagtttgccatttacttcttcttcattttctctatttacgtttgatatttttttttctttccaacttgagtgatattgattttttgtaaagaaacaatttcttttttttttcctagcaaaatcgtgtttgtgtaatataaatgtggtgataacatgttgaaatattgcagaataatataatgtagccttac

SEQ ID NO: 99760 - protein, 306 aa, Arabidopsis thaliana
  peptide (1)..(306): Ceres Seq. ID no. 13603569
NHLSKASSLITMARQINIESSVSQVTFISSAIPAVSSSSSITASASLSSSPTTSSSSSSSTNSNFIEEDNSKRKASRRSLSSLVSVEDDDDQNGGGGKRRKTNGGDKHPTYRGVRMRSWGKWVSEIREPRKKSRIWLGTYPTAEMAARAHDVAALAIKGTTAYLNFPKLAGELPRPVTNSPKDIQAAASLAAVNWQDSVNDVSNSEVAEIVEAEPSRAVVAQLFSSDTSTTTTTQSQEYSEASCASTSACTDKDSEEEKLFDLPDLFTDENEMMIRNDAFCYYSSTWQLCGADAGFRLEEPFFLSE

SEQ ID NO: 99761 - protein, 295 aa, Arabidopsis thaliana; identical to SEQ ID NO: 21687
  peptide (1)..(295): Ceres Seq. ID no. 13603570

SEQ ID NO: 99762 - protein, 191 aa, Arabidopsis thaliana; identical to SEQ ID NO: 21688
  peptide (1)..(191): Ceres Seq. ID no. 13603571

SEQ ID NO: 99763 - DNA, 1298 bp, Arabidopsis thaliana
  misc_feature (1)..(1298): Ceres Seq. ID no. 13603572
  misc_feature (1)..(1298): Ortholog of  Ceres SEQ ID NO 14310880 as cited in SEQ ID NO 55342
  misc_feature (1)..(1298): Ortholog of  Ceres SEQ ID NO 14313451 as cited in SEQ ID NO 62474
atccaaaataacaaaacatctcttcacttctcatcacaccatgcatcatcatcatcatccatgcaatcgcaaacccttcacaaccatcttctccttcttccttctctatctcaatctccataaccaacaaattatcgaagctcgaaatccatctcaatttacgaccaacccatcccctgacgtctctataccggaaatcaaacgtcacctccaacagtacggttacctcccacaaaacaaagaatccgacgacgtttcgttcgaacaagctctcgttcgttaccagaaaaatctcggtctaccaataaccggtaaaccggattccgacacgttgtcacagattctattaccaagatgtgggttccctgatgacgtggaacccaaaacggcaccgtttcacacaggaaaaaaatacgtgtacttccccggacggcccaggtggacaagagacgtcccactgaaactcacgtacgccttctcgcaggagaacctaactccttacttagcaccaactgacatacggcgcgtgttccgacgcgctttcggcaagtgggcttcggtgatcccagtatccttcatcgaaacagaggattacgtcatcgccgacatcaagatcggattcttcaacggagatcacggcgacggagaaccgttcgacggcgttttaggtgttttagcacacactttctctccggaaaacggtaggcttcatctagacaaagcagagacgtgggccgtagatttcgatgaggaaaaatctagtgtggccgtcgatttggaatctgtggcggtgcacgagatcggtcacgtgcttggattaggacatagctcggtgaaagacgcggctatgtatccaactttaaagccaagaagtaagaaagtgaatttgaatatggacgacgtcgttggagtacagtctttgtacggaacaaaccctaatttcacgttaaatagtttacttgcgtcggaaacttcgacaaatctagccgatggttcgaggatacggtctcaaggaatgatctattcgactttgagtactgttatcgctctctgttttcttaattggtagttcgtagacttagataattttctttatacaagaaatccgaaaacgtatagaatcatacagacgcatgaatttgttgttcaaagtagtagtctaatcctatgtttctgtttagaataataccatgttcttttttagtttatattagattgggcttcaagttatacggcccaatagaatgctaatgtattaaacgaagaacccagttcagagcaacacaattcgttggcct

SEQ ID NO: 99764 - protein, 355 aa, Arabidopsis thaliana
  peptide (1)..(355): Ceres Seq. ID no. 13603573
SKITKHLFTSHHTMHHHHHPCNRKPFTTIFSFFLLYLNLHNQQIIEARNPSQFTTNPSPDVSIPEIKRHLQQYGYLPQNKESDDVSFEQALVRYQKNLGLPITGKPDSDTLSQILLPRCGFPDDVEPKTAPFHTGKKYVYFPGRPRWTRDVPLKLTYAFSQENLTPYLAPTDIRRVFRRAFGKWASVIPVSFIETEDYVIADIKIGFFNGDHGDGEPFDGVLGVLAHTFSPENGRLHLDKAETWAVDFDEEKSSVAVDLESVAVHEIGHVLGLGHSSVKDAAMYPTLKPRSKKVNLNMDDVVGVQSLYGTNPNFTLNSLLASETSTNLADGSRIRSQGMIYSTLSTVIALCFLNW

SEQ ID NO: 99765 - protein, 342 aa, Arabidopsis thaliana; identical to SEQ ID NO: 38243
  peptide (1)..(342): Ceres Seq. ID no. 13603574

SEQ ID NO: 99766 - DNA, 648 bp, Arabidopsis thaliana
  misc_feature (1)..(648): Ceres Seq. ID no. 13603575
  misc_feature (1)..(648): Ortholog of  Ceres SEQ ID NO 13600689 as cited in SEQ ID NO 0
  misc_feature (1)..(648): Ortholog of  Ceres SEQ ID NO 15178120 as cited in SEQ ID NO 0
aaagaaaaaggttcctttttttgactttgtatccgtagatcatcttcttcttcttcttccagagttttatccttatccgttccatcaaattctctctctaagcaaagatgaataaaggaagcatctttaagatggacgacgatttcgaaaagagaaaagctgaagctggaaggatcagggagaaataccctgatcgaattcctgtgattgtggaaaaggctgagaaaagtgaagtcccaaatatagacaagaagaagtaccttgtgccatcagacctaacagttggtcaatttgtgtatgtgattcggaagagaatcaaactaagtgcagagaaagctatcttcattttcgtagacaatgttcttcctccaacaggagagctaatgtcaagcgtttacgaggataagaaagacgaagatggcttcctttacatcacttacagtggcgagaacacattcggtgcttcttcaatctaatctctgacctctgagaatccgccacgttttaatgcttcttcccaactttcaatttgtgtgtatagtttgttctcaatatttatcatttctcaaataattgtgattactatcttcttttcacttgttaaaatgtacatagactaatcttataatattatcttcctttggtatt

SEQ ID NO: 99767 - protein, 122 aa, Arabidopsis thaliana
  peptide (1)..(122): Ceres Seq. ID no. 13603576
MNKGSIFKMDDDFEKRKAEAGRIREKYPDRIPVIVEKAEKSEVPNIDKKKYLVPSDLTVGQFVYVIRKRIKLSAEKAIFIFVDNVLPPTGELMSSVYEDKKDEDGFLYITYSGENTFGASSI

SEQ ID NO: 99768 - protein, 114 aa, Arabidopsis thaliana
  peptide (1)..(114): Ceres Seq. ID no. 13603577
MDDDFEKRKAEAGRIREKYPDRIPVIVEKAEKSEVPNIDKKKYLVPSDLTVGQFVYVIRKRIKLSAEKAIFIFVDNVLPPTGELMSSVYEDKKDEDGFLYITYSGENTFGASSI

SEQ ID NO: 99769 - DNA, 1003 bp, Arabidopsis thaliana
  misc_feature (1)..(1003): Ceres Seq. ID no. 13603578
  misc_feature (1)..(1003): Ortholog of  Ceres SEQ ID NO 14314823 as cited in SEQ ID NO 52565
  misc_feature (1)..(1003): Ortholog of  Ceres SEQ ID NO 14307324 as cited in SEQ ID NO 54131
  misc_feature (1)..(1003): Ortholog of  Ceres SEQ ID NO 14303336 as cited in SEQ ID NO 54567
  misc_feature (1)..(1003): Ortholog of  Ceres SEQ ID NO 13594940 as cited in SEQ ID NO 55819
  misc_feature (1)..(1003): Ortholog of  Ceres SEQ ID NO 13599083 as cited in SEQ ID NO 0
agatcatggtggggttttttattttctccttatcaagaatcctctgatcagtcaaatacccatcaatcaatcaaatccccaaacactcccaaaaaaagatcagcttccaatatttttccccttcttacaaaaaagatgtctatgtcgtctatgtcctccccttcctcagctgtttgttcaccggaccacttctctccttccgaccatctctgctatgtccaatgcaacttttgccaaaccatccttgcggttaatgttccttacacaagcttgttcaagaccgtaactgtccgatgtggttgctgtaccaatctcctttcggtgaacatgagatcatatgtcctcccagcttctaaccagctccagctccagctcggtcctcactcttacttcaatccccaggatattctggaggagctgagagatgcaccgtctaacatgaatatgatgatgatgaatcaacatcctactatgaatgacataccatctttcatggatcttcatcaacaacatgagattcctaaagcaccacccgttaaccgccctccagagaaaagacagagagtcccatccgcatataaccgattcatcaaggaggagatccaacgtatcaaagctggtaatcctgatataagccacagagaagcctttagtgctgctgccaagaattgggcccacttcccccacatacacttcgggctcgtgccagacaatcaacccgtgaagaaaaccaacatgccccaacaggagggagaggataacatggtgatgaaagaagggttctacgctcctgcagctgctaacgttggtgtgactccttattaaagagataaatataatcgactaagtatttgaggaattgaaatccaatttcttagggtttatcatgtccaaaagttgtggtttcttttcctttcttgaacttatttatatatattataaatatgcatgtgtctttttctgttgttgtaatcaaaaatcttgctaattaatggggtttctt

SEQ ID NO: 99770 - protein, 274 aa, Arabidopsis thaliana; identical to SEQ ID NO: 39370
  peptide (1)..(274): Ceres Seq. ID no. 13603579

SEQ ID NO: 99771 - protein, 229 aa, Arabidopsis thaliana; identical to SEQ ID NO: 39371
  peptide (1)..(229): Ceres Seq. ID no. 13603580

SEQ ID NO: 99772 - protein, 227 aa, Arabidopsis thaliana; identical to SEQ ID NO: 39372
  peptide (1)..(227): Ceres Seq. ID no. 13603581

SEQ ID NO: 99773 - DNA, 1608 bp, Arabidopsis thaliana
  misc_feature (1)..(1608): Ceres Seq. ID no. 13603586
  misc_feature (1)..(1608): Ortholog of  Ceres SEQ ID NO 14316184 as cited in SEQ ID NO 54517
  misc_feature (1)..(1608): Ortholog of  Ceres SEQ ID NO 15226529 as cited in SEQ ID NO 55005
  misc_feature (1)..(1608): Ortholog of  Ceres SEQ ID NO 12616225 as cited in SEQ ID NO 68930
atttccgttcacttcctagaaaagtaagtatatacctttctctgtatttccttcacctccggctaaatctccggcgaccgcgtaacttgttctccggtctgaatagtgaataaacacacacacggagccaaatccaggagaaattaggtttgaattagagagattaggagaatacaaattggtttggtggttttcaagtatgctaccaagtgggttgaaagaaacccaactccgtgagagcaacaacaaccaaaaagtccatcctcaaccaatggaagagtctatcaatcagaatcctgaagctatggaagcacttatctccaatctcttcggaaacatctcgtctttgaaatctgcttatatcgagcttcaaagtgctcatactccttacgatcccgagaagattcaggcagcggacaaagttgtcatttctgaactcaagaatctttccgaaatgaagcatttttacagagagaataaccccaaacctgtatgtgtctctccacaagactctcgtttagctgcagagatccaagagcagcagagtttgttgaagacttatgaggttatggtgaagaagtttcagtctgagattcagaacaaggattctgagatcacgcagatgctacagaagattgaggaagcaaaccagaaacggcttaagcttgagaagaatcttaagttaagaggaatgtctacaaacgaaggttctaatggagatggaaatatgcagtttcctgacttaactactgaactctatgtatctacttacgaagctgctgctaaagccgtgcacgatttctccaagccgctaatcaacatgatgaaagcagcaggatgggatcttgattctgcagccaattctattgagcctgatgttgtttacgccaagaggcctcacaagaaatatgcatttgaatcatacatatgccaaaggatgttcagtgggtttcagcagaagaacttctcagtaaactcagagagtgctgcggttatggccaatgatgacacagacacctttttccgccagtttcttgctctcaaggacatggatccactagatgctctaggtacaaaccctgattccaactttggtatattctgcaggagcaagtatctcctcttggtccacccaaagatggaagcttctttctttggaaatctagatcagcgtgactacgtgacaggaggtgggcacccgaggactgcgttttaccaggccttcttaaaacttgcaaagtcgatatggatcttgcacaggcttgcttactcttttgatccagctgcaaagatcttccaagtgaaaaagggtagtgagttctctgattcatacatggaaagtgttgtgaagaacatagttgtggatgaaaaagaagagaacccaagagttggtcttatggttatgcctgggttttggattggtggcagtgtcattcaaagccgagtttatgtttctggtgtgaaggtccttgagtgaaggatctcaggaactctcttaatgcttcttcccactttgttgtgcaacttttattttctctttgttataagcaagcctatatgtatcatctattgttaaaaaaaaaaaggaattaatatcttcttcgtctc

SEQ ID NO: 99774 - protein, 425 aa, Arabidopsis thaliana
  peptide (1)..(425): Ceres Seq. ID no. 13603587
MLPSGLKETQLRESNNNQKVHPQPMEESINQNPEAMEALISNLFGNISSLKSAYIELQSAHTPYDPEKIQAADKVVISELKNLSEMKHFYRENNPKPVCVSPQDSRLAAEIQEQQSLLKTYEVMVKKFQSEIQNKDSEITQMLQKIEEANQKRLKLEKNLKLRGMSTNEGSNGDGNMQFPDLTTELYVSTYEAAAKAVHDFSKPLINMMKAAGWDLDSAANSIEPDVVYAKRPHKKYAFESYICQRMFSGFQQKNFSVNSESAAVMANDDTDTFFRQFLALKDMDPLDALGTNPDSNFGIFCRSKYLLLVHPKMEASFFGNLDQRDYVTGGGHPRTAFYQAFLKLAKSIWILHRLAYSFDPAAKIFQVKKGSEFSDSYMESVVKNIVVDEKEENPRVGLMVMPGFWIGGSVIQSRVYVSGVKVLE

SEQ ID NO: 99775 - protein, 401 aa, Arabidopsis thaliana
  peptide (1)..(401): Ceres Seq. ID no. 13603588
MEESINQNPEAMEALISNLFGNISSLKSAYIELQSAHTPYDPEKIQAADKVVISELKNLSEMKHFYRENNPKPVCVSPQDSRLAAEIQEQQSLLKTYEVMVKKFQSEIQNKDSEITQMLQKIEEANQKRLKLEKNLKLRGMSTNEGSNGDGNMQFPDLTTELYVSTYEAAAKAVHDFSKPLINMMKAAGWDLDSAANSIEPDVVYAKRPHKKYAFESYICQRMFSGFQQKNFSVNSESAAVMANDDTDTFFRQFLALKDMDPLDALGTNPDSNFGIFCRSKYLLLVHPKMEASFFGNLDQRDYVTGGGHPRTAFYQAFLKLAKSIWILHRLAYSFDPAAKIFQVKKGSEFSDSYMESVVKNIVVDEKEENPRVGLMVMPGFWIGGSVIQSRVYVSGVKVLE

SEQ ID NO: 99776 - protein, 390 aa, Arabidopsis thaliana
  peptide (1)..(390): Ceres Seq. ID no. 13603589
MEALISNLFGNISSLKSAYIELQSAHTPYDPEKIQAADKVVISELKNLSEMKHFYRENNPKPVCVSPQDSRLAAEIQEQQSLLKTYEVMVKKFQSEIQNKDSEITQMLQKIEEANQKRLKLEKNLKLRGMSTNEGSNGDGNMQFPDLTTELYVSTYEAAAKAVHDFSKPLINMMKAAGWDLDSAANSIEPDVVYAKRPHKKYAFESYICQRMFSGFQQKNFSVNSESAAVMANDDTDTFFRQFLALKDMDPLDALGTNPDSNFGIFCRSKYLLLVHPKMEASFFGNLDQRDYVTGGGHPRTAFYQAFLKLAKSIWILHRLAYSFDPAAKIFQVKKGSEFSDSYMESVVKNIVVDEKEENPRVGLMVMPGFWIGGSVIQSRVYVSGVKVLE

SEQ ID NO: 99777 - DNA, 1741 bp, Arabidopsis thaliana
  misc_feature (1)..(1741): Ceres Seq. ID no. 13603590
  misc_feature (1)..(1741): Ortholog of  Ceres SEQ ID NO 15172472 as cited in SEQ ID NO 55361
atgccttcttctcatttctcaccaactccctccaaacccaacaaaagtgtttatattagcaaagccgccaaagtgtaaacgaaagtttataaatttcatttctgtgatcttacgtaattggaggaagatcaaaattttcaatccccattcttcgattgcttcaattgaagtttctccgatggcgcaagttagcagaatctgcaatggtgtgcagaacccatctcttatctccaatctctcgaaatccagtcaacgcaaatctcccttatcggtttctctgaagacgcagcagcatccacgagcttatccgatttcgtcgtcgtggggattgaagaagagtgggatgacgttaattggctctgagcttcgtcctcttaaggtcatgtcttctgtttccacggcggagaaagcgtcggagattgtacttcaacccattagagaaatctccggtcttattaagcttcctggctccaagtctctatcaaatcggatcctgcttctcgctgctctgtctgagggaacaactgtagtggacaacttgttgaatagcgatgacatcaattacatgcttgatgcgttgaagagattgggacttaatgtggaaactgacagtgaaaataatcgtgctgtagttgaaggatgtggcgggatattcccagcttccatagattcaaagagtgatatcgaactttacctcggtaatgcaggaacagcaatgcgtccacttaccgctgcggtcactgctgcaggtggaaacgcaagttatgtgcttgatggggtgcctcgtatgagagaaagacctataggggatttggttgttggtcttaagcagcttggtgctgatgttgaatgtactcttggaactaactgccctcctgttcgtgtcaacgctaatggtggccttcccggtggaaaggtgaagctttctggatcaattagtagtcagtacttgactgctctgctcatgtctgctcccttagctcttggagacgtcgagattgagattgtcgataaattaatttctgttccatatgttgaaatgacattgaagttgatggaacgtttcggggttagtgtcgagcatagtgatagctgggatcgtttctttgtcaagggcgggcaaaaatacaagtctccgggtaatgcgtatgtagaaggtgatgcttctagtgctagttatttcttggctggtgctgccattaccggtgaaactgtcacagtcgaaggttgtggaactaccagcttgcagggagatgtaaaattcgccgaggtccttgagaaaatgggatgtaaagtgtcctggacagagaacagtgtgactgtgacaggaccacctagagatgcttttggaatgagacacttgcgggctattgatgtcaacatgaacaaaatgcctgatgtagccatgacccttgccgtcgttgctctctttgctgacggtccaaccaccattagagatgtggctagctggagagtaaaggagacagaaaggatgattgccatttgcacagagcttagaaaactgggagctacagtggaagaaggttcagattattgtgtgataactccgcccaaaaaggtgaaaacggcagagattgatacatatgatgatcatagaatggcaatggcattctctcttgcagcttgtgctgatgttccaatcaccatcaacgatcctggttgcaccaggaaaaccttccccgactacttccaagtacttgaaagaatcacaaagcactaa

SEQ ID NO: 99778 - protein, 579 aa, Arabidopsis thaliana
  peptide (1)..(579): Ceres Seq. ID no. 13603591
CLLLISHQLPPNPTKVFILAKPPKCKRKFINFISVILRNWRKIKIFNPHSSIASIEVSPMAQVSRICNGVQNPSLISNLSKSSQRKSPLSVSLKTQQHPRAYPISSSWGLKKSGMTLIGSELRPLKVMSSVSTAEKASEIVLQPIREISGLIKLPGSKSLSNRILLLAALSEGTTVVDNLLNSDDINYMLDALKRLGLNVETDSENNRAVVEGCGGIFPASIDSKSDIELYLGNAGTAMRPLTAAVTAAGGNASYVLDGVPRMRERPIGDLVVGLKQLGADVECTLGTNCPPVRVNANGGLPGGKVKLSGSISSQYLTALLMSAPLALGDVEIEIVDKLISVPYVEMTLKLMERFGVSVEHSDSWDRFFVKGGQKYKSPGNAYVEGDASSASYFLAGAAITGETVTVEGCGTTSLQGDVKFAEVLEKMGCKVSWTENSVTVTGPPRDAFGMRHLRAIDVNMNKMPDVAMTLAVVALFADGPTTIRDVASWRVKETERMIAICTELRKLGATVEEGSDYCVITPPKKVKTAEIDTYDDHRMAMAFSLAACADVPITINDPGCTRKTFPDYFQVLERITKH

SEQ ID NO: 99779 - protein, 520 aa, Arabidopsis thaliana
  peptide (1)..(520): Ceres Seq. ID no. 13603592
MAQVSRICNGVQNPSLISNLSKSSQRKSPLSVSLKTQQHPRAYPISSSWGLKKSGMTLIGSELRPLKVMSSVSTAEKASEIVLQPIREISGLIKLPGSKSLSNRILLLAALSEGTTVVDNLLNSDDINYMLDALKRLGLNVETDSENNRAVVEGCGGIFPASIDSKSDIELYLGNAGTAMRPLTAAVTAAGGNASYVLDGVPRMRERPIGDLVVGLKQLGADVECTLGTNCPPVRVNANGGLPGGKVKLSGSISSQYLTALLMSAPLALGDVEIEIVDKLISVPYVEMTLKLMERFGVSVEHSDSWDRFFVKGGQKYKSPGNAYVEGDASSASYFLAGAAITGETVTVEGCGTTSLQGDVKFAEVLEKMGCKVSWTENSVTVTGPPRDAFGMRHLRAIDVNMNKMPDVAMTLAVVALFADGPTTIRDVASWRVKETERMIAICTELRKLGATVEEGSDYCVITPPKKVKTAEIDTYDDHRMAMAFSLAACADVPITINDPGCTRKTFPDYFQVLERITKH

SEQ ID NO: 99780 - protein, 465 aa, Arabidopsis thaliana
  peptide (1)..(465): Ceres Seq. ID no. 13603593
MTLIGSELRPLKVMSSVSTAEKASEIVLQPIREISGLIKLPGSKSLSNRILLLAALSEGTTVVDNLLNSDDINYMLDALKRLGLNVETDSENNRAVVEGCGGIFPASIDSKSDIELYLGNAGTAMRPLTAAVTAAGGNASYVLDGVPRMRERPIGDLVVGLKQLGADVECTLGTNCPPVRVNANGGLPGGKVKLSGSISSQYLTALLMSAPLALGDVEIEIVDKLISVPYVEMTLKLMERFGVSVEHSDSWDRFFVKGGQKYKSPGNAYVEGDASSASYFLAGAAITGETVTVEGCGTTSLQGDVKFAEVLEKMGCKVSWTENSVTVTGPPRDAFGMRHLRAIDVNMNKMPDVAMTLAVVALFADGPTTIRDVASWRVKETERMIAICTELRKLGATVEEGSDYCVITPPKKVKTAEIDTYDDHRMAMAFSLAACADVPITINDPGCTRKTFPDYFQVLERITKH

SEQ ID NO: 99781 - DNA, 1479 bp, Arabidopsis thaliana
  misc_feature (1)..(1479): Ceres Seq. ID no. 13603594
  misc_feature (1)..(1479): Ortholog of  Ceres SEQ ID NO 14311721 as cited in SEQ ID NO 51363
tagtttcgtcctccgtcaatctctctcgccgctttatccttgttacaaatcccatcgatcttttcggaatcttccctcattatgctcagccaccattaccagagctccattgtttcagttctccgttcaacgattatcggaattattcacaacactattagtatcaccgtcgccaaccgattttgattaccagctttggtgacgacagtcgtgattaaggaggttttggtaaatttcttcgttcctgtttgttttcaaagatggctgctttgaaaggttatggcttgtgttctatggactctgctcttcaattcccctgtcctaagctattcaatagctacaagagaaggagctcgaaatgggtctctcccaaagcagctgttgtacccaatttccatctcccaatgcgcagcttggaggttaaaaacaggacaaacacagacgacattaaagctctacgtgtgatcacagctatcaaaacaccgtatctacctgatggaagattcgaccttgaagcctacgatgacttggtcaacattcagatacaaaacggtgctgaaggtgtcattgttggtggtacaactggtgaaggacaactgatgagctgggacgaacacattatgcttataggccataccgttaactgttttggcggaagcatcaaagtcattggaaacactggaagcaattcgactagagaagcaatccacgcgactgaacaaggattcgcggttggaatgcatgctgctcttcatataaacccttactatggcaagacttctattgagggactgattgcacatttccagtctgttcttcatatgggaccgacgattatatacaatgtgcctggtcgaacagggcaagatataccgcctcgtgccatcttcaaactttctcagaatccgaatttagctggtgtgaaggaatgtgttgggaacaagcgagtcgaagagtacactgagaatggggttgttgtgtggagtgggaatgatgatgagtgtcatgattccagatgggattatggagcaacaggagttatatcagttactagtaatttagttccgggtttgatgaggaagttgatgtttgaaggtaggaattcatctttgaactcaaagcttctacctttgatggcttggctgttccacgagccaaacccgattggaatcaacactgctttggctcagcttggagtttcgaggccggtttttaggttaccatatgtaccattgccactgtctaagaggcttgagtttgtgaaactggtgaaggagattggacgagagcattttgtgggtgagaaagatgttcaggctcttgatgatgatgattttatccttatcggtcgatattagcatacttttttttttttaatttttggttcctttttgtttggtgttaatgaagaagagatggttctatcatttggttttatgtagctgatgaatgaatgaaaactcaaggaatgatttcatc

SEQ ID NO: 99782 - protein, 365 aa, Arabidopsis thaliana
  peptide (1)..(365): Ceres Seq. ID no. 13603595
MAALKGYGLCSMDSALQFPCPKLFNSYKRRSSKWVSPKAAVVPNFHLPMRSLEVKNRTNTDDIKALRVITAIKTPYLPDGRFDLEAYDDLVNIQIQNGAEGVIVGGTTGEGQLMSWDEHIMLIGHTVNCFGGSIKVIGNTGSNSTREAIHATEQGFAVGMHAALHINPYYGKTSIEGLIAHFQSVLHMGPTIIYNVPGRTGQDIPPRAIFKLSQNPNLAGVKECVGNKRVEEYTENGVVVWSGNDDECHDSRWDYGATGVISVTSNLVPGLMRKLMFEGRNSSLNSKLLPLMAWLFHEPNPIGINTALAQLGVSRPVFRLPYVPLPLSKRLEFVKLVKEIGREHFVGEKDVQALDDDDFILIGRY

SEQ ID NO: 99783 - protein, 354 aa, Arabidopsis thaliana
  peptide (1)..(354): Ceres Seq. ID no. 13603596
MDSALQFPCPKLFNSYKRRSSKWVSPKAAVVPNFHLPMRSLEVKNRTNTDDIKALRVITAIKTPYLPDGRFDLEAYDDLVNIQIQNGAEGVIVGGTTGEGQLMSWDEHIMLIGHTVNCFGGSIKVIGNTGSNSTREAIHATEQGFAVGMHAALHINPYYGKTSIEGLIAHFQSVLHMGPTIIYNVPGRTGQDIPPRAIFKLSQNPNLAGVKECVGNKRVEEYTENGVVVWSGNDDECHDSRWDYGATGVISVTSNLVPGLMRKLMFEGRNSSLNSKLLPLMAWLFHEPNPIGINTALAQLGVSRPVFRLPYVPLPLSKRLEFVKLVKEIGREHFVGEKDVQALDDDDFILIGRY

SEQ ID NO: 99784 - protein, 317 aa, Arabidopsis thaliana
  peptide (1)..(317): Ceres Seq. ID no. 13603597
MRSLEVKNRTNTDDIKALRVITAIKTPYLPDGRFDLEAYDDLVNIQIQNGAEGVIVGGTTGEGQLMSWDEHIMLIGHTVNCFGGSIKVIGNTGSNSTREAIHATEQGFAVGMHAALHINPYYGKTSIEGLIAHFQSVLHMGPTIIYNVPGRTGQDIPPRAIFKLSQNPNLAGVKECVGNKRVEEYTENGVVVWSGNDDECHDSRWDYGATGVISVTSNLVPGLMRKLMFEGRNSSLNSKLLPLMAWLFHEPNPIGINTALAQLGVSRPVFRLPYVPLPLSKRLEFVKLVKEIGREHFVGEKDVQALDDDDFILIGRY

SEQ ID NO: 99785 - DNA, 1291 bp, Arabidopsis thaliana
  misc_feature (1)..(1291): Ceres Seq. ID no. 13603604
  misc_feature (1)..(1291): Ortholog of  Ceres SEQ ID NO 13581804 as cited in SEQ ID NO 51424
  misc_feature (1)..(1291): Ortholog of  Ceres SEQ ID NO 13663874 as cited in SEQ ID NO 67003
aaaagaaaatatatatggtttcacaaacaccattaccataactacaacgagaagaggatcttttttaaggagaaaagcagagagagaagagacgagtgtgtgaagtttttttgtcttttgtttcttttattacacacaaatagatgaaacgaggaaagctacttcttttgctacttccataaaaaggttcttcctttcgcagagaatcaactttgatcatcttcttccttctctttctttcttcttctccctccagtaatgcttatatagtctcctcctatatctctacctatacatacacaaaccctttatcctcgaaagcttcctcctggttaggtttttatcaaacccttttagccaatcgggaaattaactaaagaagaagatatggtgaggggcaaaactcagatgaagagaatagagaatgcaacaagcagacaagtgactttctccaaaagaaggaatggtttgttgaagaaagcctttgagctctcagtgctttgtgatgctgaagtttctcttatcatcttctctcctaaaggcaaactttatgaattcgccagctccaatatgcaagataccatagatcgttatctgaggcatactaaggatcgagtcagcaccaaaccggtttctgaagaaaatatgcagcatttgaaatatgaagcagcaaacatgatgaagaaaattgaacaactcgaagcttctaaacgtaaactcttgggagaaggcataggaacatgctcaatcgaggagctgcaacagattgagcaacagcttgagaaaagtgtcaaatgtattcgagcaagaaagactcaagtgtttaaggaacaaattgagcagctcaagcaaaaggagaaagctctagctgcagaaaacgagaagctctctgaaaagtggggatctcatgaaagcgaagtttggtcaaataagaatcaagaaagtactggaagaggtgatgaagagagtagcccaagttctgaagtagagacgcaattgttcattgggttaccttgttcttcaagaaagtgatctccactcaacaaaaaaaacaaaaaaacaaactaagtaaaaacaggtttagcagtactgagagtgtataaggacaagtaacaaaactctaaagctgcttctctcttgttgtcttatttctctctcactctctctctctcagtcacttctttaatgattctgaactgcttgtgttatgtatctatgttcttacacttgcctctctagaatgtaattttgattatgttttgttttcatgtatcaatttagctttcttccc

SEQ ID NO: 99786 - protein, 214 aa, Arabidopsis thaliana; identical to SEQ ID NO: 27115
  peptide (1)..(214): Ceres Seq. ID no. 13603605

SEQ ID NO: 99787 - protein, 207 aa, Arabidopsis thaliana; identical to SEQ ID NO: 27116
  peptide (1)..(207): Ceres Seq. ID no. 13603606

SEQ ID NO: 99788 - protein, 153 aa, Arabidopsis thaliana; identical to SEQ ID NO: 27117
  peptide (1)..(153): Ceres Seq. ID no. 13603607

SEQ ID NO: 99789 - DNA, 1428 bp, Arabidopsis thaliana
  misc_feature (1)..(1428): Ceres Seq. ID no. 13603608
  misc_feature (1)..(1428): Ortholog of  Ceres SEQ ID NO 13586135 as cited in SEQ ID NO 1210
  misc_feature (1)..(1428): Ortholog of  Ceres SEQ ID NO 13654329 as cited in SEQ ID NO 68717
aagaaatgtctctgtcattgtgcagtagataagccactctctctctctttctctctttttgctattataaagaaaaagattcattctcccaccattgaggtttaacttatacaaacagatctttttgaaattggattcatctaagaagcagactctgttttcatggctgtttacaataccaaactctgtttggcctctgttttcttgctcttagggcttctcttggcttttgacttgaagggtatagaagcagaaagtcttaccaaacagaaactggactcgaagatacttcaggatgagattgtgaagaaagtcaacgaaaacccaaacgctggatggaaagctgctataaatgatcgattttcaaacgccactgttgcagagtttaagcgtcttctcggtgttaaaccaacaccaaagaagcatttcttaggtgttcctattgtgagccatgatccatctttgaagctacctaaagcttttgatgctagaactgcttggccacagtgcactagtattggaaacatcttagatcagggacattgtggttcttgctgggcatttggtgctgttgaatcactatcagatagattctgtatccaatttggcatgaacatttctttatcagtaaatgatctcctagcttgttgtggattccgttgtggtgatggttgtgacggtggctatccaattgctgcttggcaatacttttcgtatagcggtgttgtcacagaagagtgtgatccatactttgataataccggatgctctcacccgggttgcgaaccggcatatcctacaccgaaatgttcgaggaaatgcgttagcgacaacaaactatggagcgagtcgaagcattacagtgttagtacatacactgtgaaatctaatccacaagatatcatggcagaggtttataagaatggacctgttgaagtctcttttaccgtttatgaggattttgctcattacaaatctggagtctataagcacataacaggttctaacattggaggtcatgctgttaaacttattggttggggaactagcagtgaaggagaagattattggttgatggcaaatcaatggaacagaggctggggtgatgatggttatttcatgataaggagaggaactaatgaatgtggaattgaagatgaaccagtagctggtttgccttcaagcaagaatgtgtttagggttgataccggttcgaatgatcttccggttgcatcggtttaagatcaaagatggaaatgttgcatcggtttaatatcaaagatgaaaagttgtttgtaagatatatatgttatggttgttgtttccagtaaaagattccggtgactagaaattgttttctggttggctgtgaaaatgttatacaaataaacacttcaacttaagcaatataatatcatttctactttt

SEQ ID NO: 99790 - protein, 359 aa, Arabidopsis thaliana; identical to SEQ ID NO: 34764
  peptide (1)..(359): Ceres Seq. ID no. 13603609

SEQ ID NO: 99791 - protein, 210 aa, Arabidopsis thaliana; identical to SEQ ID NO: 34765
  peptide (1)..(210): Ceres Seq. ID no. 13603610

SEQ ID NO: 99792 - DNA, 2535 bp, Arabidopsis thaliana
  misc_feature (1)..(2535): Ceres Seq. ID no. 13603635
  misc_feature (1)..(2535): Ortholog of  Ceres SEQ ID NO 12609037 as cited in SEQ ID NO 51306
  misc_feature (1)..(2535): Ortholog of  Ceres SEQ ID NO 12610391 as cited in SEQ ID NO 55942
  misc_feature (1)..(2535): Ortholog of  Ceres SEQ ID NO 14309068 as cited in SEQ ID NO 0
atgcaattgctgacgctaaatccggcggccatttccaggacgccgccgcaagccatagacccttcctcatcctcgagtcttcttcttccttttcctcagattttgagctcccaacgcgctcttggtcttgtagctaggccttgtaatccacttcgacgaggattatctaggtttttatcaagtcgacagcttttccgacgatccaaagttgtcaaggcagtagcaaccccagaccccatcttggaagtacctttaactgaggaaaatgtagaaagcgttttggatgaaatccgaccttaccttatgtctgatggtggtaatgtggcattacatgagatcgatggaaatattgtgcgggttaagctgcagggagcatgcggatcatgtccaagttctactatgacaatgaagatgggtattgagcgtcgtctaatggaaaagatccctgaaatagtggctgtagaagctcttccagatgaagagactggccttgaactgaatgaggaaaacattgaaaaggtgctggaagaaatcaggccttacttaatcggaacagcagatggatcgcttgatctagtggagattgaagatccaatcgtgaagataagaatcacaggacctgcagctggagtcatgacagttcgtgtagcagtcactcagaaactaagagagaaaattccatcaatcgcaaaaaaaagtccttattatttacttgagagcagagacttatttgattcttccatcgttttcataatgagccgatatttctccttcttcttcttagctctcttcctccattatcgtattatcgtagcttctccattcgaaggatttgatgctgaagaagacgacgttaccgacgattcctctcaccttcttcaccactcactccctccgcctcttctcactcagtctcactcatcactctccgatcccgatccggagccggaaccttcttccgccgaatgtaaatccgatctcatcactgaatcagatctcgagcatcaatccgattcgaaaactccctcgtctacaccatttgagtactgggacgaagacgagttcgaaggactaccagttgagatagagacacttgaatctccattgattacagaaaacggaactcatgctgatccaaagacgccagatctcaagacttcatcggaagctcaaggagacactaatgatcaaacgaagaagaagaagtcgtacgcggtggagatcgcttgcgtctgtttcttaatcgcactcgcaatcaactacttcgttggtaaacgtgagaacgagagtctcgcattagcttgggcggcgaaatttgcttctaaggatacaatattccagaagaattttagtatgcttggagttagtgaattagaggattcgccattgttgttaaaagaagccttaaatgtgttcaaattctacgcgagtggtcgtaggtattgccatggattgttagctactatggagcttaagagtagacatgatttgatctctagggtgtttaatttggttgttccttgtaaagatgagatcacttttgaggtttatatgaatgaagaaactatggatcatgttgtgtttgctatgacgaagaagaaggctgcaaaaactatgcaaaaggagatgagggatttgcaaagatttgctgggattgtgtctcctcctgctggaaggaaatgggtgtcggaggagttcgccttgatctctgaatccaaggaagttgctgcggatttgatcactgacactgttcttgatcaggtttttggtgacaaggctgtggataagtatgggaagaatttcatgtcgatgcatatatctgaccaacaccctggcaagcacaagaagatgatgcttttcaagttttctttacctgatgctaaacatatggatgatattgtccggttggtggcgctaattccatattacatcgacttagtaggacgatacagactcagctcgcaggcgcggaacaaaactgagagtggtaggcaaaaggcagcagaggaagcatacaaggaacttcataacgcgaggcaagaggcattgcagaagaagaaagcagaaaagaagaaaatgatggaggaagcggaagcaaagatgagcgcagaagtgataaggaagaaagaggcaaaagagagagcaaggcaggtgaaaaaggcagtaccaaaaatgaagatgagccgtagtcactagctaaaagcttaatcaaagagagccatccagaattaatgcattaaaatcactctccagagttcaaactctaaaaagcttagaaaacatcagcacgtgttttactcgatggctgctttgcttcataatactctcccttaaagtagtaccatgtttgacttgataatggagtttttgatgttgaggtggaaagtcatgcgagagctttgtatagtatggatggcaaatggctaattgtacccatattgtctcatagaagaaagctgatctatgcacactactttgttctttgcatctatatgttgagccctgagagtttgtataacattgacggcaaatagc

SEQ ID NO: 99793 - protein, 731 aa, Arabidopsis thaliana
  peptide (1)..(731): Ceres Seq. ID no. 13603636
MQLLTLNPAAISRTPPQAIDPSSSSSLLLPFPQILSSQRALGLVARPCNPLRRGLSRFLSSRQLFRRSKVVKAVATPDPILEVPLTEENVESVLDEIRPYLMSDGGNVALHEIDGNIVRVKLQGACGSCPSSTMTMKMGIERRLMEKIPEIVAVEALPDEETGLELNEENIEKVLEEIRPYLIGTADGSLDLVEIEDPIVKIRITGPAAGVMTVRVAVTQKLREKIPSIAKKSPYYLLESRDLFDSSIVFIMSRYFSFFFLALFLHYRIIVASPFEGFDAEEDDVTDDSSHLLHHSLPPPLLTQSHSSLSDPDPEPEPSSAECKSDLITESDLEHQSDSKTPSSTPFEYWDEDEFEGLPVEIETLESPLITENGTHADPKTPDLKTSSEAQGDTNDQTKKKKSYAVEIACVCFLIALAINYFVGKRENESLALAWAAKFASKDTIFQKNFSMLGVSELEDSPLLLKEALNVFKFYASGRRYCHGLLATMELKSRHDLISRVFNLVVPCKDEITFEVYMNEETMDHVVFAMTKKKAAKTMQKEMRDLQRFAGIVSPPAGRKWVSEEFALISESKEVAADLITDTVLDQVFGDKAVDKYGKNFMSMHISDQHPGKHKKMMLFKFSLPDAKHMDDIVRLVALIPYYIDLVGRYRLSSQARNKTESGRQKAAEEAYKELHNARQEALQKKKAEKKKMMEEAEAKMSAEVIRKKEAKERARQVKKAVPKMKMSRSH

SEQ ID NO: 99794 - protein, 630 aa, Arabidopsis thaliana
  peptide (1)..(630): Ceres Seq. ID no. 13603637
MSDGGNVALHEIDGNIVRVKLQGACGSCPSSTMTMKMGIERRLMEKIPEIVAVEALPDEETGLELNEENIEKVLEEIRPYLIGTADGSLDLVEIEDPIVKIRITGPAAGVMTVRVAVTQKLREKIPSIAKKSPYYLLESRDLFDSSIVFIMSRYFSFFFLALFLHYRIIVASPFEGFDAEEDDVTDDSSHLLHHSLPPPLLTQSHSSLSDPDPEPEPSSAECKSDLITESDLEHQSDSKTPSSTPFEYWDEDEFEGLPVEIETLESPLITENGTHADPKTPDLKTSSEAQGDTNDQTKKKKSYAVEIACVCFLIALAINYFVGKRENESLALAWAAKFASKDTIFQKNFSMLGVSELEDSPLLLKEALNVFKFYASGRRYCHGLLATMELKSRHDLISRVFNLVVPCKDEITFEVYMNEETMDHVVFAMTKKKAAKTMQKEMRDLQRFAGIVSPPAGRKWVSEEFALISESKEVAADLITDTVLDQVFGDKAVDKYGKNFMSMHISDQHPGKHKKMMLFKFSLPDAKHMDDIVRLVALIPYYIDLVGRYRLSSQARNKTESGRQKAAEEAYKELHNARQEALQKKKAEKKKMMEEAEAKMSAEVIRKKEAKERARQVKKAVPKMKMSRSH

SEQ ID NO: 99795 - protein, 598 aa, Arabidopsis thaliana
  peptide (1)..(598): Ceres Seq. ID no. 13603638
MTMKMGIERRLMEKIPEIVAVEALPDEETGLELNEENIEKVLEEIRPYLIGTADGSLDLVEIEDPIVKIRITGPAAGVMTVRVAVTQKLREKIPSIAKKSPYYLLESRDLFDSSIVFIMSRYFSFFFLALFLHYRIIVASPFEGFDAEEDDVTDDSSHLLHHSLPPPLLTQSHSSLSDPDPEPEPSSAECKSDLITESDLEHQSDSKTPSSTPFEYWDEDEFEGLPVEIETLESPLITENGTHADPKTPDLKTSSEAQGDTNDQTKKKKSYAVEIACVCFLIALAINYFVGKRENESLALAWAAKFASKDTIFQKNFSMLGVSELEDSPLLLKEALNVFKFYASGRRYCHGLLATMELKSRHDLISRVFNLVVPCKDEITFEVYMNEETMDHVVFAMTKKKAAKTMQKEMRDLQRFAGIVSPPAGRKWVSEEFALISESKEVAADLITDTVLDQVFGDKAVDKYGKNFMSMHISDQHPGKHKKMMLFKFSLPDAKHMDDIVRLVALIPYYIDLVGRYRLSSQARNKTESGRQKAAEEAYKELHNARQEALQKKKAEKKKMMEEAEAKMSAEVIRKKEAKERARQVKKAVPKMKMSRSH

SEQ ID NO: 99796 - DNA, 1511 bp, Arabidopsis thaliana
  misc_feature (1)..(1511): Ceres Seq. ID no. 13603647
  misc_feature (1)..(1511): Ortholog of  Ceres SEQ ID NO 13593889 as cited in SEQ ID NO 53305
  misc_feature (1)..(1511): Ortholog of  Ceres SEQ ID NO 13581959 as cited in SEQ ID NO 56156
tttgattatctgagagagagagagaagaaacttgttgaaacaaaatcaacaacaacttatagaagaccaaaaaaagattcataggatcttttgcttgacaatgaaagaaggaaaggatgggtttgttcgagcagatcagattgatctaaaaagcttagacgagcaactagagagacacttaagcagagctttgactttagagaagaacaagaagaaagatgaagaagacacaaccgccgtcgccatcggtggctctgcttcttcttcccctgtcactctaaacggcggcggatttgttggcaagaggaaacagagacttgagtgggagatcgatccttctaaacttatcatcaagactgttcttgctcgtggcacttttggtaccgttcatcgtggtatctacgacggtcaagatgttgccgtgaagttgcttgattggggtgaagaaggtcatagatcagaagctgagattgtgtctttgagagctgattttgctcaggaggttgctgtttggcataaattggatcatcctaatgtcaccaagtttataggagcaacaatgggtgcatcagggttacagttgcaaacagagagtggtccattagctatgccaaacaatatatgttgtgttgttgttgaatatcttccaggtggtgctttaaaatcttacctgatcaagaacagaagaagaaaactaacatttaaaattgttgttcagctcgctcttgatctcgctagagggttgagttaccttcattcgcagaagattgttcaccgagatgtaaagacagagaatatgttgttagacaaaacccggactgttaaaatcgcagattttggagttgcgagagttgaagcatctaaccctaatgacatgacaggagagactggcacacttggctacatggcgcctgaggttctcaatggaaacccgtataatcgaaaatgcgatgtatacagtttcgggatctgcttatgggagatatattgctgtgacatgccataccctgaccttactttctctgaggtcacttcagccgtcgtccgccagaacctgagacccgatataccgaggtgttgcccgagcgcacttgcagctgtgatgaagcgatgttgggatgcaaatccggacaagagaccggagatggatgaggttgtaccaatgttggagagtattgacacaaccaagggaggagggatgattcctaacgaccagcaacagggttgcctatgcttccgaaggaaacgtggtccttaattcccaaagaccaatctaagatcattcaaaactcaagattcgtgtccttgcttcttttctttttctttttataatccagaaggaaaaaaaatgggaaggcttgttagggatctaatggttgctaaaatttacgtaaagagtatgatttggtttccatattcttcaacatttcttgttttgctctatttgtgagagttgcttattaaatatttatggtcacgtatatcatcatctctaatcatatatttgatat

SEQ ID NO: 99797 - protein, 385 aa, Arabidopsis thaliana
  peptide (1)..(385): Ceres Seq. ID no. 13603648
MKEGKDGFVRADQIDLKSLDEQLERHLSRALTLEKNKKKDEEDTTAVAIGGSASSSPVTLNGGGFVGKRKQRLEWEIDPSKLIIKTVLARGTFGTVHRGIYDGQDVAVKLLDWGEEGHRSEAEIVSLRADFAQEVAVWHKLDHPNVTKFIGATMGASGLQLQTESGPLAMPNNICCVVVEYLPGGALKSYLIKNRRRKLTFKIVVQLALDLARGLSYLHSQKIVHRDVKTENMLLDKTRTVKIADFGVARVEASNPNDMTGETGTLGYMAPEVLNGNPYNRKCDVYSFGICLWEIYCCDMPYPDLTFSEVTSAVVRQNLRPDIPRCCPSALAAVMKRCWDANPDKRPEMDEVVPMLESIDTTKGGGMIPNDQQQGCLCFRRKRGP

SEQ ID NO: 99798 - protein, 232 aa, Arabidopsis thaliana; identical to SEQ ID NO: 42195
  peptide (1)..(232): Ceres Seq. ID no. 13603649

SEQ ID NO: 99799 - protein, 216 aa, Arabidopsis thaliana; identical to SEQ ID NO: 42196
  peptide (1)..(216): Ceres Seq. ID no. 13603650

SEQ ID NO: 99800 - DNA, 877 bp, Arabidopsis thaliana
  misc_feature (1)..(877): Ceres Seq. ID no. 13603655
  misc_feature (1)..(877): Ortholog of  Ceres SEQ ID NO 13661890 as cited in SEQ ID NO 61482
taaaagtcagcaaaacacaaggcatattcctcttctcttcctcagccttatttttctgatattcagtttcaaggatatatccatggcgatccagaagatcctctttgcttcacttctcatatgctcactgatccaatccatccacggggcggaaaaagtaagactcttcaaagagctggacaaaggtgcacttgatgtcaccactaaacccagccgagaaggaccaggtgttgttttggatgccggcaaggatacgttgaacattacatggacgctaagctcgattgggtctaaaagagaggctgaatttaagatcatcaaagttaagctatgctacgctccacctagccaagttgaccgaccatggcgcaaaacccatgacgagctcttcaaagacaagacctgcccacacaagatcatagccaagccttatgacaaaacacttcaatcaactacttggactcttgagcgtgacatccccaccggaacctacttcgttcgtgcctacgcggttgatgccattggccatgaagttgcctatggacagagcaccgacgatgccaagaaaaccaatctcttcagcgttcaggctatcagtggccgccacgcgtccctagatattgcctccatctgtttcagtgtcttctccgtcgtggctcttgtcgtcttctttgtcaatgagaagaggaaggccaagatagagcaaagcaaatgagtcgtttactttgcgtatttgtgacgttgaacccaaaaaaagttgactttgaactttcttgtttaccaattccttttgtcttgttgcacacttcttctttcttatatgcttttatttatgtgtttgtacaattaagccattgatatggaacaaaactaatcc

SEQ ID NO: 99801 - protein, 237 aa, Arabidopsis thaliana
  peptide (1)..(237): Ceres Seq. ID no. 13603656
KSQQNTRHIPLLFLSLIFLIFSFKDISMAIQKILFASLLICSLIQSIHGAEKVRLFKELDKGALDVTTKPSREGPGVVLDAGKDTLNITWTLSSIGSKREAEFKIIKVKLCYAPPSQVDRPWRKTHDELFKDKTCPHKIIAKPYDKTLQSTTWTLERDIPTGTYFVRAYAVDAIGHEVAYGQSTDDAKKTNLFSVQAISGRHASLDIASICFSVFSVVALVVFFVNEKRKAKIEQSK

SEQ ID NO: 99802 - protein, 210 aa, Arabidopsis thaliana; identical to SEQ ID NO: 77734
  peptide (1)..(210): Ceres Seq. ID no. 13603657

SEQ ID NO: 99803 - DNA, 1275 bp, Arabidopsis thaliana
  misc_feature (1)..(1275): Ceres Seq. ID no. 13603682
  misc_feature (1)..(1275): Ortholog of  Ceres SEQ ID NO 15177270 as cited in SEQ ID NO 51703
ctctccactctctcaatctcttaacttaaacaaaaccaacaattatcaatcttcaatgacgcatctcaacaaaaaacagaggttagagaataaccataacaatactgtgaacaaccatttcgaagacttacatgacgatctcatcatctctatcctccgcaaactcgctacctccgcttcttctccttccgatttcctcaccgttctctccacatgcaagagattgaatcggttaggattacatcctctggttttatctaaagccggtactcaaaccctagccgtcacggcggagaaatggtcagattcttctcataaattcctcaaactctgtgttaatgccggaaacatcgacgcttcgtactctctcggaatgatccgattttactgtctacaaaatccagtgagcggcgcgtcattaatggctaaagcggcgattaaatcacacgcgccggcgctttattcgttatcggtgattcagtttaacggaagcggcggttcaaaaaccgataagaatctacgcgccggcgttgctctttgtgcacgctctgcttatttaggccacgtcgatgcgttacgagagcttggtcactgtcttcaagacggttacggtgttcctcgtgacgtctccgaaggtcgtcgtcttttgattcaagctaacgcgcgtgagctcgcgtgttctctacgctcttacctctctctgaaatctggggacgagaacgagaccttaactgatttaagcgtggttccggttcaggagattcatccggttaaccggtttttaaaagagtggtttagttcgggtcgggttgatttagcggaagggttaaggatgtgttcgcatggtggttgtggaaggccggagactcgggctcatgagtttcggcgatgttctgtttgtgggaaggttaattattgctcgcgtggttgtcaggcgttggattggagagcgaagcataaggttgaatgtacgccgttggatttgtgggttgcggcagcggcggagattggcgacgacggtgaagcggtggcggtggagattgatgataatcatggtgagcggtaacggctctaacgctttttttcaaggaaatgactgaaatgccaacagtttctttgactgttgagtttttttttttttgggttatttaattatgttttaaaaaatttaatgttaatttcttctcttaattaattagttttggctaatggcgtttctgaatcttctgatactaaactggcatgttattttaaataatatagttttttgccgtt

SEQ ID NO: 99804 - protein, 354 aa, Arabidopsis thaliana; identical to SEQ ID NO: 22407
  peptide (1)..(354): Ceres Seq. ID no. 13603683

SEQ ID NO: 99805 - protein, 336 aa, Arabidopsis thaliana; identical to SEQ ID NO: 22408
  peptide (1)..(336): Ceres Seq. ID no. 13603684

SEQ ID NO: 99806 - protein, 230 aa, Arabidopsis thaliana; identical to SEQ ID NO: 22409
  peptide (1)..(230): Ceres Seq. ID no. 13603685

SEQ ID NO: 99807 - DNA, 1247 bp, Arabidopsis thaliana
  misc_feature (1)..(1247): Ceres Seq. ID no. 13603686
  misc_feature (1)..(1247): Ortholog of  Ceres SEQ ID NO 13598528 as cited in SEQ ID NO 64938
aaactcagtgagtgagtcaccgaaaacctcttgtagtagattcgtgacgggtttgatcatctcttcgaggtcggttctagggtttcactacgagaatggacggagatgagctcaccgagcaggaaactgctctttatgaccgtcaaattagggtatggggagctggtgctcaaagaagattgagtaaatctcatgttttggtatctggaattaagggcactgttgctgagttttgtaagaacattgtgttggcaggagtaggtagtgtgactctgttggatgatcgattggttacaacggaagtcttcaacgcaaacttcttgattcttcctgatgaaaatgcttatgtaggcaaaaccgtagctgagatttgttgtgattcacttaaggattttaaccctatggttcatgtttcaatagagaaaggtgatttgtcaacacttggtgttgattttttcgagaagtttgatgttgtggttatcggctacagttctcgtgctactaagaaagcagttaatgaaaagtgtaggaacctagcaaaagatgtagcgttctatacagttgattgtagaggctcatgtggcgaaatatttgtcgaccttcagaattataagtacacaaagaaaaagcttgatgaaacagtggaatgtgaactaacatttccaagttttgaggaggcagtttcagtaccgtggaaaccgatgccaaggagaacagcaaagctctactttgcaatgagagtgatagaactatttgaggaaactgaaggacgtaaacctggggaatgttcgctgtctgatctcccaagagttttgaaactcaaaaaggaactatgtgaaggaaattcggtcagcgagaatcatattccagatatcctcttggagagactcgtatctaataacacagaattcccaccggcttgtgccatcattggagggattctaggacaggaggtgataaaagttatatcaggcaaaggagagccgttgaagaacttcttctactttgatgcagaggatgggaaaggtgtaatcgaggacctatcccacaagctttaacttccaaacatgaaaggtgctgtgaaacgctgctcttagtaattagttccttgttgaagattgtattggaaattagactttagagtacttagaacttggctccttgtcttttgtatctactaacttggttcgctcctaaagacaatctgtaacccactatttactttaatccatcaatttacacactcc

SEQ ID NO: 99808 - protein, 320 aa, Arabidopsis thaliana; identical to SEQ ID NO: 36234
  peptide (1)..(320): Ceres Seq. ID no. 13603687

SEQ ID NO: 99809 - protein, 218 aa, Arabidopsis thaliana; identical to SEQ ID NO: 36235
  peptide (1)..(218): Ceres Seq. ID no. 13603688

SEQ ID NO: 99810 - DNA, 983 bp, Arabidopsis thaliana
  misc_feature (1)..(983): Ceres Seq. ID no. 13603693
  misc_feature (1)..(983): Ortholog of  Ceres SEQ ID NO 14304983 as cited in SEQ ID NO 53862
  misc_feature (1)..(983): Ortholog of  Ceres SEQ ID NO 14310483 as cited in SEQ ID NO 58376
  misc_feature (1)..(983): Ortholog of  Ceres SEQ ID NO 13597528 as cited in SEQ ID NO 64802
  misc_feature (1)..(983): Ortholog of  Ceres SEQ ID NO 13654451 as cited in SEQ ID NO 67881
aggaagataagaaaatggaggagaagaaatctgaagagccacaagcgaaatcagaagataagaaaccagaagaagagaaaaagaaagaacctcaagagattgtgcttaagatttttatgcattgtgaaggttgtgctaaaaaaatccatagatgtcttaaaggctttgaaggagtggaggatgtaactactgattgtaagactagtaaagttgtggtgaaaggagagaaggcagatccattaaaagtgttgcaaagattgcagaggaagagccatcgtcaagtggagcttatctcaccgattccggagcctaaaccggtttctgatgaaccggagaaaaaggagaaggagaaacctaaacctgaggagaaaaaagaagaggtagtgacagtggtgctgagagttcacatgcattgtgaagcatgtgccatggagattcaaaagaggatcatgagaatgaaaggagtggagtctgtggaaccagattttaaagcatcacaagtgagcgtgaaaggagtttttacgccggaaaagctagttgagttcatttacaagagaatcgggaagcatgccgcggttgtcaagcaagatccgccgccaaaacctccggagaaagaaaaagaaacgaaagacaaagacgagaagaaaaaggaagagggacagcccaaagaaggaaaagaggccaaggaaaacggtggtggaggaggtgctaaaggcgatggtgctgccgcggaggaggggaacaaagtggtagacttgaagaagaacgaatatcagtaccagccaccgaggtaccccgtggagatgtttgcttatccaccgcagatattcagtgatgaaaaccccaatgcttgtaccattatataataaaatcgtcggtttaaggggttgtaggatttgttatttttttactttatttctatgcagaattttaatttaaatgtatttttggtaatttttagtttcaaccgaattgaatgatcg

SEQ ID NO: 99811 - protein, 287 aa, Arabidopsis thaliana
  peptide (1)..(287): Ceres Seq. ID no. 13603694
EDKKMEEKKSEEPQAKSEDKKPEEEKKKEPQEIVLKIFMHCEGCAKKIHRCLKGFEGVEDVTTDCKTSKVVVKGEKADPLKVLQRLQRKSHRQVELISPIPEPKPVSDEPEKKEKEKPKPEEKKEEVVTVVLRVHMHCEACAMEIQKRIMRMKGVESVEPDFKASQVSVKGVFTPEKLVEFIYKRIGKHAAVVKQDPPPKPPEKEKETKDKDEKKKEEGQPKEGKEAKENGGGGGAKGDGAAAEEGNKVVDLKKNEYQYQPPRYPVEMFAYPPQIFSDENPNACTII

SEQ ID NO: 99812 - protein, 283 aa, Arabidopsis thaliana
  peptide (1)..(283): Ceres Seq. ID no. 13603695
MEEKKSEEPQAKSEDKKPEEEKKKEPQEIVLKIFMHCEGCAKKIHRCLKGFEGVEDVTTDCKTSKVVVKGEKADPLKVLQRLQRKSHRQVELISPIPEPKPVSDEPEKKEKEKPKPEEKKEEVVTVVLRVHMHCEACAMEIQKRIMRMKGVESVEPDFKASQVSVKGVFTPEKLVEFIYKRIGKHAAVVKQDPPPKPPEKEKETKDKDEKKKEEGQPKEGKEAKENGGGGGAKGDGAAAEEGNKVVDLKKNEYQYQPPRYPVEMFAYPPQIFSDENPNACTII

SEQ ID NO: 99813 - protein, 249 aa, Arabidopsis thaliana
  peptide (1)..(249): Ceres Seq. ID no. 13603696
MHCEGCAKKIHRCLKGFEGVEDVTTDCKTSKVVVKGEKADPLKVLQRLQRKSHRQVELISPIPEPKPVSDEPEKKEKEKPKPEEKKEEVVTVVLRVHMHCEACAMEIQKRIMRMKGVESVEPDFKASQVSVKGVFTPEKLVEFIYKRIGKHAAVVKQDPPPKPPEKEKETKDKDEKKKEEGQPKEGKEAKENGGGGGAKGDGAAAEEGNKVVDLKKNEYQYQPPRYPVEMFAYPPQIFSDENPNACTII

SEQ ID NO: 99814 - DNA, 987 bp, Arabidopsis thaliana
  misc_feature (1)..(987): Ceres Seq. ID no. 13603713
  misc_feature (1)..(987): Ortholog of  Ceres SEQ ID NO 13598455 as cited in SEQ ID NO 62908
taatcggcaaaattttctgctcctgagaaacaagtagagatactaaagatggaatctttgaactaaattcgaaaccttttaatgggtaccgagtcgggttcggatccagaatcgagctcaaacgggtggagccgtgctcgtggtctagttgtcaagactctggttttaattggcggtgctcttctcatcaagcgtctcactaaatccaccactcgtagagatcacgcccgtgtcgtctctcgttctctcaccggagagaagtttacgagggagcaagcgtcaagagatcctgataattacttcaacataagaatgctgagttgtccagctgctgaaatggtggatggttcagaggttttgtatctcgaacaggcattttggaggactcctcagaaaccgtttcgacaaagattatatatggtgaaaccgtgtccaaaagagctaaaatgtgatgttgaggtaagttcatatgcgatcagagatgctgaggaatacaaaaatttctgtgaccggcctaaggaccaacgcccacttcctgaagaagttattggtgacattggagagcatttgacgactatacacctgaattgttgtgaccgtgggaaacgttgcttgtacgaaggctcaacttcacctggtggatttccaaattcatggaacggggctagctattgtacttcagatcttgcagttctgaaaaacaatgagatacacctctgggatcgcggctttgatgagaatcgaaaccaggtttggggaccaaaggaaggtccgtacgagttcaagccagcgacatcatcgagcatcaacgaaaacttgtctgctttgaacatcctttatcaatcttctatcgataaaccaatccaagggtccctcatcttgcaagactagccaatttgcacccccttttctattgtctgatcttctctgtatcacacttagcctctttattcatctcatctcagccactttcaatatagttttggt

SEQ ID NO: 99815 - protein, 269 aa, Arabidopsis thaliana; identical to SEQ ID NO: 36927
  peptide (1)..(269): Ceres Seq. ID no. 13603714

SEQ ID NO: 99816 - protein, 192 aa, Arabidopsis thaliana; identical to SEQ ID NO: 36928
  peptide (1)..(192): Ceres Seq. ID no. 13603715

SEQ ID NO: 99817 - protein, 184 aa, Arabidopsis thaliana; identical to SEQ ID NO: 36929
  peptide (1)..(184): Ceres Seq. ID no. 13603716

SEQ ID NO: 99818 - DNA, 836 bp, Arabidopsis thaliana
  misc_feature (1)..(836): Ceres Seq. ID no. 13603724
  misc_feature (1)..(836): Ortholog of  Ceres SEQ ID NO 15178836 as cited in SEQ ID NO 1142
gctctctaaaaaccaaaactcttatcttcggtacagagcaaatcacagctcccgatggccgccacgtcatcatcaccgccgtgtaacatctccgcgtcctccctcctcctccgtcaaccttctcgctcaatccttaaagtgttcggtttattaccacctgtaagtaggaataaccgtaaactcggccggttaacggtgacccggtctaatctggcgcaggattttcttggtgacttcggagctcgtgacccttacccggaggagatagcgagtcaattcggagataaagtgttgggatgccaaagcactgagcacaagattttgataccaaacgcatctgttttgtctctctcccagcttcagtgttcccctgtttcgtcttcacagcctcctttgtccggcgatgatgccagaactctcctccacaaggttttgggatggagtatagtggataatgaagcgggtggtctgaaaataaggtgtatgtggaaagtgagggattttgggtgcggtgttgaactcataaacaggatccataaggttgctgaagcttctggtcattacccttctcttcacttggaaagtcctacccaagttcgagctgaactatttacctcttctatcggagggttgagcatgaatgatttcataatggcggctaaaatagatgatatcaagacttctgatctttcccctaggaaaagagcttgggcgtgatcttcttttcattattttggaacatttttgtttgatagtatgtaatgtatgtgatgtattctaaattgtgtgtgatcggtctacatgtcgagttatatagaaagcattgtcataaccgc

SEQ ID NO: 99819 - protein, 220 aa, Arabidopsis thaliana; identical to SEQ ID NO: 28149
  peptide (1)..(220): Ceres Seq. ID no. 13603725

SEQ ID NO: 99820 - DNA, 1469 bp, Arabidopsis thaliana
  misc_feature (1)..(1469): Ceres Seq. ID no. 13603740
  misc_feature (1)..(1469): Ortholog of  Ceres SEQ ID NO 15177742 as cited in SEQ ID NO 1202
  misc_feature (1)..(1469): Ortholog of  Ceres SEQ ID NO 15226750 as cited in SEQ ID NO 58711
atcttcctcttcatcttcttctgttctctctctataaatacaagtttactcttcctcttcctcaaatctctgactcttctctgcattatctcttcgatctctccaactctccaaaaccttcctcagatgggaactaccaatggaacagactatggagcatacacatacaaggagctagaaagagagcaatattggccatctgagaatctcaagatatcaataacaggagctggaggtttcattgcatctcacattgctcgtcgtttgaagcacgaaggtcattacgtgattgcttctgactggaaaaagaatgaacacatgactgaagacatgttctgtgatgagttccatcttgttgatcttagggttatggagaattgtctcaaagttactgaaggagttgatcatgtttttaacttagctgctgatatgggtggtatgggttttatccagagtaatcactctgtgattatgtataataatactatgattagtttcaatatgattgaggctgctaggatcaatgggattaagaggttcttttatgcttcgagtgcttgtatctatccagagtttaagcagttggagactactaatgtgagcttgaaggagtcagatgcttggcctgcagagcctcaagatgcttatggtttggagaagcttgctacggaggagttgtgtaagcattacaacaaagattttggtattgagtgtcgaattggaaggttccataacatttatggtccttttggaacatggaaaggtggaagggagaaggctccagctgctttctgtaggaaggctcagacttccactgataggtttgagatgtggggagatgggcttcagacccgttcttttacctttatcgatgagtgtgttgaaggtgtactcaggttgacaaaatcagatttccgtgagccggtgaacatcggaagcgatgagatggtgagcatgaatgagatggctgagatggttctcagctttgaggaaaagaagcttccaattcaccacattcctggcccggaaggtgttcgtggtcgtaactcagacaacaatctgatcaaagaaaagcttggttgggctcctaatatgagattgaaggaggggcttagaataacctacttctggataaaggaacagatcgagaaagagaaagcaaagggaagcgatgtgtcgctttacgggtcatcaaaggtggttggaactcaagcaccggttcagctaggctcactccgcgcggctgatggaaaagagtgaagttcaccaaagtataagtcaagctcaaatatggccttttaagttcagcaaaatgtttagatatatttttaggtagcttcctattaaaaaagcaataataagtgttttggattttggttccttctattctgctaatccttgtttatgtttagttgaaaaagtttgcttgcattgttaagtctgttatcatattattgtggtcctttcat

SEQ ID NO: 99821 - protein, 419 aa, Arabidopsis thaliana
  peptide (1)..(419): Ceres Seq. ID no. 13603741
IFLFIFFCSLSINTSLLFLFLKSLTLLCIISSISPTLQNLPQMGTTNGTDYGAYTYKELEREQYWPSENLKISITGAGGFIASHIARRLKHEGHYVIASDWKKNEHMTEDMFCDEFHLVDLRVMENCLKVTEGVDHVFNLAADMGGMGFIQSNHSVIMYNNTMISFNMIEAARINGIKRFFYASSACIYPEFKQLETTNVSLKESDAWPAEPQDAYGLEKLATEELCKHYNKDFGIECRIGRFHNIYGPFGTWKGGREKAPAAFCRKAQTSTDRFEMWGDGLQTRSFTFIDECVEGVLRLTKSDFREPVNIGSDEMVSMNEMAEMVLSFEEKKLPIHHIPGPEGVRGRNSDNNLIKEKLGWAPNMRLKEGLRITYFWIKEQIEKEKAKGSDVSLYGSSKVVGTQAPVQLGSLRAADGKE

SEQ ID NO: 99822 - protein, 377 aa, Arabidopsis thaliana; identical to SEQ ID NO: 23828
  peptide (1)..(377): Ceres Seq. ID no. 13603742

SEQ ID NO: 99823 - protein, 313 aa, Arabidopsis thaliana; identical to SEQ ID NO: 23829
  peptide (1)..(313): Ceres Seq. ID no. 13603743

SEQ ID NO: 99824 - DNA, 2139 bp, Arabidopsis thaliana
  misc_feature (1)..(2139): Ceres Seq. ID no. 13603744
  misc_feature (1)..(2139): Ortholog of  Ceres SEQ ID NO 12611963 as cited in SEQ ID NO 53414
gggtatctctctaatttatttatttatttcagattgctcaaaagaataaataaataaaagaatttggctgtctcatttccttgttcggaatcggagaagaaggaagactagattcgatgtgttggtgaagaagatctcgactttgttcaaaattccaatttcgctcgcctcaaagatcattctctcatcttctcgactttgatgcgattgattaaatatggtggatacggttattcccggagatatggcttgtttggatgcagatttgttgcagcttcaggaaatgtcttcctttgttctcaattctaaacctggattcactcagaagctcttcgaccagtggctttctcttcccgaagctcagcgacaggttggatcattgcttaaggatgctgtagctggagctcctatcaatgttactggaagtgcatcgggttctaattctgccactataccatctatgtttcctgcgggaagtgctcctccgctttcaccaaggagttgtggttcaccccgtacaaccaaacagagagccccttctaacttaggttctactctcaaagtagtcaacgagcctgttaaagagcctatacctcagttttatttccaaaatggtcgccctccaccaagcgagattaaagagcaatgtatgtttagaatcaatcacttcttttatggtcacatggatggcttgcagatacaagaattcaagttagtcaccagagaaatctgcaagctcccatctttcttctccacttcccttttccggaagatcgatctcaacaatacaggttttgttactagagatgcatttattgatttttgggtaaacgggaacatgttgataatggatacaacgacccaaatcttcaagatactaaagcagaaagatcagagtttcattgttaaggatgatttcaaaccactactcaaagaactgttggcgacgcatcctgggctagagttcctgcaatccacacctgaattccaagaaagatatgctgaaactgtcacctaccgaatattttattacataaatagatctggcaatggtcgaattacatttagggagcttaaacggggaaacttaattgatgctatgctacatgctgatgaagaagaagatattaacaaagtgttgagatacttctcgtatgagcatttctatgtcatatactgcaagttctgggagctggatacggatcacgatttcctgattgacaaagaaaatcttatgcgatatggaaaccatgctcttacctaccggattgtcgacagaatattctcccaggttgctaggaagttcactaacaaagttgaagggaagatggggtatgaggactttgtctatttcattcttgcggaagaagataaatcgtcagtgcctagcctagaatattggtttaagtgcatagacttggatgcaaatgggattattacgcgaaatgagatgcaattcttttatgaagagcagttgcatagaatggagtgcatggcgcaagaggctgttcttttcgaggatatcttatgtcagatgattgatatgatcggacctgagaacgaaagccatataacgctgcatgacctgaaaggctcaaagctctctggaaacgtcttcaacatcctatttaatctcaacaaatttatggcatttgaaacccgggatccattcctcattcgtcaggagcgagagaaccctacattgacagattgggaccgttttgcacatagagagtatattaggctatcaatggaagaagatgttgaagatgcatctaatggaagtgctgaggtttgggatgagtcgtcgctggaggctcccttttgagttcataaagaagagaaatgtaaagtccctgagaagaacatttggagctttgttgaggaaggaaagtgaaaaacaaacgaaaagccggtagtatcctctgttgaataccatacttagcttggatttgttttctaacttctctttatttgttagctgattctacagttatatttattaacaatcgtctagattttacagtcttcttcacctgtattgcattcactttgctctgatgtttctatctctgggtgttacttcatcatctccagatgttgagacttgtgaatttcaatgctatagttcctttaatt

SEQ ID NO: 99825 - protein, 536 aa, Arabidopsis thaliana
  peptide (1)..(536): Ceres Seq. ID no. 13603745
MVDTVIPGDMACLDADLLQLQEMSSFVLNSKPGFTQKLFDQWLSLPEAQRQVGSLLKDAVAGAPINVTGSASGSNSATIPSMFPAGSAPPLSPRSCGSPRTTKQRAPSNLGSTLKVVNEPVKEPIPQFYFQNGRPPPSEIKEQCMFRINHFFYGHMDGLQIQEFKLVTREICKLPSFFSTSLFRKIDLNNTGFVTRDAFIDFWVNGNMLIMDTTTQIFKILKQKDQSFIVKDDFKPLLKELLATHPGLEFLQSTPEFQERYAETVTYRIFYYINRSGNGRITFRELKRGNLIDAMLHADEEEDINKVLRYFSYEHFYVIYCKFWELDTDHDFLIDKENLMRYGNHALTYRIVDRIFSQVARKFTNKVEGKMGYEDFVYFILAEEDKSSVPSLEYWFKCIDLDANGIITRNEMQFFYEEQLHRMECMAQEAVLFEDILCQMIDMIGPENESHITLHDLKGSKLSGNVFNILFNLNKFMAFETRDPFLIRQERENPTLTDWDRFAHREYIRLSMEEDVEDASNGSAEVWDESSLEAPF

SEQ ID NO: 99826 - protein, 527 aa, Arabidopsis thaliana
  peptide (1)..(527): Ceres Seq. ID no. 13603746
MACLDADLLQLQEMSSFVLNSKPGFTQKLFDQWLSLPEAQRQVGSLLKDAVAGAPINVTGSASGSNSATIPSMFPAGSAPPLSPRSCGSPRTTKQRAPSNLGSTLKVVNEPVKEPIPQFYFQNGRPPPSEIKEQCMFRINHFFYGHMDGLQIQEFKLVTREICKLPSFFSTSLFRKIDLNNTGFVTRDAFIDFWVNGNMLIMDTTTQIFKILKQKDQSFIVKDDFKPLLKELLATHPGLEFLQSTPEFQERYAETVTYRIFYYINRSGNGRITFRELKRGNLIDAMLHADEEEDINKVLRYFSYEHFYVIYCKFWELDTDHDFLIDKENLMRYGNHALTYRIVDRIFSQVARKFTNKVEGKMGYEDFVYFILAEEDKSSVPSLEYWFKCIDLDANGIITRNEMQFFYEEQLHRMECMAQEAVLFEDILCQMIDMIGPENESHITLHDLKGSKLSGNVFNILFNLNKFMAFETRDPFLIRQERENPTLTDWDRFAHREYIRLSMEEDVEDASNGSAEVWDESSLEAPF

SEQ ID NO: 99827 - protein, 514 aa, Arabidopsis thaliana
  peptide (1)..(514): Ceres Seq. ID no. 13603747
MSSFVLNSKPGFTQKLFDQWLSLPEAQRQVGSLLKDAVAGAPINVTGSASGSNSATIPSMFPAGSAPPLSPRSCGSPRTTKQRAPSNLGSTLKVVNEPVKEPIPQFYFQNGRPPPSEIKEQCMFRINHFFYGHMDGLQIQEFKLVTREICKLPSFFSTSLFRKIDLNNTGFVTRDAFIDFWVNGNMLIMDTTTQIFKILKQKDQSFIVKDDFKPLLKELLATHPGLEFLQSTPEFQERYAETVTYRIFYYINRSGNGRITFRELKRGNLIDAMLHADEEEDINKVLRYFSYEHFYVIYCKFWELDTDHDFLIDKENLMRYGNHALTYRIVDRIFSQVARKFTNKVEGKMGYEDFVYFILAEEDKSSVPSLEYWFKCIDLDANGIITRNEMQFFYEEQLHRMECMAQEAVLFEDILCQMIDMIGPENESHITLHDLKGSKLSGNVFNILFNLNKFMAFETRDPFLIRQERENPTLTDWDRFAHREYIRLSMEEDVEDASNGSAEVWDESSLEAPF

SEQ ID NO: 99828 - DNA, 1442 bp, Arabidopsis thaliana
  misc_feature (1)..(1442): Ceres Seq. ID no. 13603748
  misc_feature (1)..(1442): Ortholog of  Ceres SEQ ID NO 14311553 as cited in SEQ ID NO 51462
  misc_feature (1)..(1442): Ortholog of  Ceres SEQ ID NO 13599003 as cited in SEQ ID NO 0
ctgaattaggatactgtgtggtgttttgcaaaactgctcttgtgctatgactctggctaatgatttcggatattcgaccgctatgtcttcatcttattcagctcttcatactagtgtagaagacagataccacaagttgcctaactctttttgggtttcatcaggtcaggaactgatgaataaccctgtaccgtgtcagtcggtctctggtggcaattctggtggttatttgtttccttcttcctctggatactgcaatgtttcagctgtcttgcctcatggaaggaatttgcaaaaccagccacctgtttccaccgtgcctagagacagattggctatgcaggattgtcctttgatagctcaatcctcgttgattaatcatcaccctcaagagttcatagatccacttcatgagttctttgatttctctgatcatgttcctgttcagaatctacaagcagagagtagtggagtaagggtggactcatccgtggaacttcataagaaaagtgaatggcaagattgggcagatcagctgatttctgttgacgatggttctgagccaaattggtctgaacttcttggagattcaagttcccacaatccaaattcagagatacctacaccatttttggatgtaccaaggctagatataacagctaaccagcagcaacagatggtttcatcagaggaccagctcagcggcagaaactcatcatctagtgtagcaacatctaaacaacgtatgcgttggacaccagaacttcacgaggcattcgttgaagctgttaatcagcttggtggtagtgaacgagccacccctaaggctgttttgaagctcttgaataaccctggcttgaccatttatcatgtaaaaagccatttgcagaaatatagaacggcaaggtataaaccggagacttcggaagttacaggagaacctcaagagaagaagatgacatctattgaagatatcaaatctcttgacatgaaaacgagcgttgagatcacacaagctctacggttacaaatggaagtgcagaaacgtctccacgagcagctcgagatccaacggtcactgcagttacagattgaaaaacagggccggtacctacagatgatgttcgagaaacaacaaaagatacaagacaacaagagctcttcttcagaagcatcaccaaagcaatgcaatggttcatttgcagaagttgaagttggtcttgagacactaacaggggaccaaaatgaatctgcttcagcatcaaggaaacgtgtcagagaagattaaagcatgtttaatttgatctcgtttgacgaaacatgtttattgggaattaattgtggaaaccaactccagttttgttaaaagaatctgtttctttcttagctctgtattgttctagtttagaagcagttgatttggccttgcatggctgcaacac

SEQ ID NO: 99829 - protein, 413 aa, Arabidopsis thaliana; identical to SEQ ID NO: 29233
  peptide (1)..(413): Ceres Seq. ID no. 13603749

SEQ ID NO: 99830 - protein, 401 aa, Arabidopsis thaliana; identical to SEQ ID NO: 29234
  peptide (1)..(401): Ceres Seq. ID no. 13603750

SEQ ID NO: 99831 - protein, 370 aa, Arabidopsis thaliana; identical to SEQ ID NO: 29235
  peptide (1)..(370): Ceres Seq. ID no. 13603751

SEQ ID NO: 99832 - DNA, 1325 bp, Arabidopsis thaliana
  misc_feature (1)..(1325): Ceres Seq. ID no. 13603755
  misc_feature (1)..(1325): Ortholog of  Ceres SEQ ID NO 15168355 as cited in SEQ ID NO 57246
atagttgcctagtttcttttagcggattcgttttcatgagattcgactcattctaatagaacttttgcgtgatacaaaaggtctgttttggatgattaggtagagataatatggaagaagaagatgatgaggttatggtcagagaggggctaatggcctctcaaagagaaatcttcagcatttctggtccaatccatttaacttccattgattggaataattcttatcatagaacctcggtggcatcatgtttggtacaagcagtgtacacattggaacgagacagacaacaaaacaggattggcctaaagtcacaagccaatcattggtgggagtttttcaacttcactttagccgaaaccctaatcgacgactcagacggatctatatacggcgccgttttcgaatacaaacatttcttctcctacaattaccatcacacccctcattcgaaaccacctcctcgtcacgtgattgctttccgtggcacgatcttgaaaccgcactctcggtcacgtgaccttaagctcgacctacgttgcatccgagactctctccatgatagcactcggttcgtgcatgccattcaggttattcaaagtgcggtggctaaaactggtaatgcagccgtgtggctcgccggacattctcttggagcagccgtggctttgcttgccgggaagattatgacaaggtctggttttcctcttgagagttacttattcaatcctcctttctcgtctattccgatagagaagctagtgaagagtgagaagcttaaacatggggttcgattcgccggaagtcttgttaaagccggagttgccatcgccgttaagggtcgccaccataataagggtcaagaagacgattcgttcatgaagttagcatcatggataccatatttgtatttgaatccgttagatacaatatgctcagaatacattggttacttcaagcacagaaacaaaatgtttgagatcggagccggtaaaatcgaaagaattgctacgaggaactcacttaggagtctgttgtcaggaggaggaggaggaggttcatcttcagattcttcttcagagcctcttcatcttttaccatcggcatatatgacgataaacgctagcaaatcgccgaattttaagagagctcatgggattcatcaatggtgggatcccatgtttaatggtgaatatgttttgcatcagtttaataactaacttctacttttgttgcttcaaatgctttgaaacctttttttttattttttgttttgtttataattgtaatctgtgaaagatgaaatttgctgcaggttttgatgg

SEQ ID NO: 99833 - protein, 369 aa, Arabidopsis thaliana
  peptide (1)..(369): Ceres Seq. ID no. 13603756
MEEEDDEVMVREGLMASQREIFSISGPIHLTSIDWNNSYHRTSVASCLVQAVYTLERDRQQNRIGLKSQANHWWEFFNFTLAETLIDDSDGSIYGAVFEYKHFFSYNYHHTPHSKPPPRHVIAFRGTILKPHSRSRDLKLDLRCIRDSLHDSTRFVHAIQVIQSAVAKTGNAAVWLAGHSLGAAVALLAGKIMTRSGFPLESYLFNPPFSSIPIEKLVKSEKLKHGVRFAGSLVKAGVAIAVKGRHHNKGQEDDSFMKLASWIPYLYLNPLDTICSEYIGYFKHRNKMFEIGAGKIERIATRNSLRSLLSGGGGGGSSSDSSSEPLHLLPSAYMTINASKSPNFKRAHGIHQWWDPMFNGEYVLHQFNN

SEQ ID NO: 99834 - protein, 361 aa, Arabidopsis thaliana
  peptide (1)..(361): Ceres Seq. ID no. 13603757
MVREGLMASQREIFSISGPIHLTSIDWNNSYHRTSVASCLVQAVYTLERDRQQNRIGLKSQANHWWEFFNFTLAETLIDDSDGSIYGAVFEYKHFFSYNYHHTPHSKPPPRHVIAFRGTILKPHSRSRDLKLDLRCIRDSLHDSTRFVHAIQVIQSAVAKTGNAAVWLAGHSLGAAVALLAGKIMTRSGFPLESYLFNPPFSSIPIEKLVKSEKLKHGVRFAGSLVKAGVAIAVKGRHHNKGQEDDSFMKLASWIPYLYLNPLDTICSEYIGYFKHRNKMFEIGAGKIERIATRNSLRSLLSGGGGGGSSSDSSSEPLHLLPSAYMTINASKSPNFKRAHGIHQWWDPMFNGEYVLHQFNN

SEQ ID NO: 99835 - protein, 355 aa, Arabidopsis thaliana
  peptide (1)..(355): Ceres Seq. ID no. 13603758
MASQREIFSISGPIHLTSIDWNNSYHRTSVASCLVQAVYTLERDRQQNRIGLKSQANHWWEFFNFTLAETLIDDSDGSIYGAVFEYKHFFSYNYHHTPHSKPPPRHVIAFRGTILKPHSRSRDLKLDLRCIRDSLHDSTRFVHAIQVIQSAVAKTGNAAVWLAGHSLGAAVALLAGKIMTRSGFPLESYLFNPPFSSIPIEKLVKSEKLKHGVRFAGSLVKAGVAIAVKGRHHNKGQEDDSFMKLASWIPYLYLNPLDTICSEYIGYFKHRNKMFEIGAGKIERIATRNSLRSLLSGGGGGGSSSDSSSEPLHLLPSAYMTINASKSPNFKRAHGIHQWWDPMFNGEYVLHQFNN

SEQ ID NO: 99836 - DNA, 1911 bp, Arabidopsis thaliana
  misc_feature (1)..(1911): Ceres Seq. ID no. 13603759
  misc_feature (1)..(1911): Ortholog of  Ceres SEQ ID NO 12587870 as cited in SEQ ID NO 63523
atttaaaaaagaaaaaagaagaaaagagagagagagactcacaaatcataatatctccttcattaactcataatcactttaaagaacattggaatcagattcattacatagggattgatatggaaaagtcaaaccaaccagttcatgtaaccttgtccgaattgaaggacggagataaagaaatcgttgatgctgaatttttggttgatcttcttgagagctatagatttggtaaagataatgttcccgcccgagaatttcgatccaaggcggcagcgacggctccggcgccggtcaacaccaccgagatagagttggaagaggataatgatggatctcaagctcaaggtaacaattctgttagtgaaagtacatcatcgctattttccgattcagatccaatagtacttgagagtactgtgagcgaaaccggttcaaacgaagaatctgaaaccggttcaaacgaagaaaatggtaataattggttagagtcgagctccacaaacttgccaaatgtagagaacaaaaggcaacggaatggagaagattgtgagatagaagaggaagaagaaaataacgagagatcattatcggattcagaagagaagtcaaacctagagaagttgcttgggacacaagaaaactatgagcttggaaatgaggatgaagaaaagaacgagagatcatcgtcagattcagaagagaagtcaaacctagagaatttgcttgcgacacaagaaaactacgagctttactgtcctagctgtagcacatgtatcaccagaaatgtggttctcaagaaaagaaaacgagggaagcacgttaattcatctctggatctgaaacccgatataccggttgttgaaccggacgaaccaagcgacattgaggagatggaatcaccagttaaggtttatgtccctgagactcggattgaggatgatcaagaagataaagagggaactatctttacttgcttggtttgtgatctaaagtacttcatccggttaggaacaaagttcttacaacttgattatatcaggggaaaaccggttgagaaatcagttgaagaatatatagatgtgaggaagagtataaacaccacacaatcaccaccacaaattcaaccggacggagaaagattcgccattgagttgttaaagagcaccgtctacggcggtctcactgagaccatcaccagcctcggcgttgtatcatctgcttctgcctctggttcctccaccatgaatatattggctcttgctgtcgcaaatttggccggtgggctcatcgtcctcgctcaaaactttcaagatctaagaaacagttcagatcaagagaaagataggtacgaggaattgttagggagacgtactaaatcccggatacatatcttagtagcggtcatgtcttacattttcttcggcctaattcctccgttagtttacgcattttccttctacgaaaccggaatcaagaactacaagctcatctcggttttcttgggttctctggtttgcgtaattttgctcggttcgatcaaggtctatgtccgaaaaccaaccaattcatgtggatcgactaaagcttatctcaaatctgcggcttattatacgtctattgttgttgcttcttgcggaatctcatacgttgtcggagatattatgggagagtatatcgagaagctcagtttggttggtttagaccagatcagtataacttcaccatgttatggaattaaacccgaggagtgccggtttacttccttttaatatacagtgggactaagaaccggtctgaccaacgttgtataatttctgttctaattacttactaaatctctgtatcttttctagtaaaaaatcaaaactaatgctttcatagaataaatgtgttttgaggtttttcttt

SEQ ID NO: 99837 - protein, 589 aa, Arabidopsis thaliana
  peptide (1)..(589): Ceres Seq. ID no. 13603760
LKKKKEEKRERDSQIIISPSLTHNHFKEHWNQIHYIGIDMEKSNQPVHVTLSELKDGDKEIVDAEFLVDLLESYRFGKDNVPAREFRSKAAATAPAPVNTTEIELEEDNDGSQAQGNNSVSESTSSLFSDSDPIVLESTVSETGSNEESETGSNEENGNNWLESSSTNLPNVENKRQRNGEDCEIEEEEENNERSLSDSEEKSNLEKLLGTQENYELGNEDEEKNERSSSDSEEKSNLENLLATQENYELYCPSCSTCITRNVVLKKRKRGKHVNSSLDLKPDIPVVEPDEPSDIEEMESPVKVYVPETRIEDDQEDKEGTIFTCLVCDLKYFIRLGTKFLQLDYIRGKPVEKSVEEYIDVRKSINTTQSPPQIQPDGERFAIELLKSTVYGGLTETITSLGVVSSASASGSSTMNILALAVANLAGGLIVLAQNFQDLRNSSDQEKDRYEELLGRRTKSRIHILVAVMSYIFFGLIPPLVYAFSFYETGIKNYKLISVFLGSLVCVILLGSIKVYVRKPTNSCGSTKAYLKSAAYYTSIVVASCGISYVVGDIMGEYIEKLSLVGLDQISITSPCYGIKPEECRFTSF

SEQ ID NO: 99838 - protein, 550 aa, Arabidopsis thaliana
  peptide (1)..(550): Ceres Seq. ID no. 13603761
MEKSNQPVHVTLSELKDGDKEIVDAEFLVDLLESYRFGKDNVPAREFRSKAAATAPAPVNTTEIELEEDNDGSQAQGNNSVSESTSSLFSDSDPIVLESTVSETGSNEESETGSNEENGNNWLESSSTNLPNVENKRQRNGEDCEIEEEEENNERSLSDSEEKSNLEKLLGTQENYELGNEDEEKNERSSSDSEEKSNLENLLATQENYELYCPSCSTCITRNVVLKKRKRGKHVNSSLDLKPDIPVVEPDEPSDIEEMESPVKVYVPETRIEDDQEDKEGTIFTCLVCDLKYFIRLGTKFLQLDYIRGKPVEKSVEEYIDVRKSINTTQSPPQIQPDGERFAIELLKSTVYGGLTETITSLGVVSSASASGSSTMNILALAVANLAGGLIVLAQNFQDLRNSSDQEKDRYEELLGRRTKSRIHILVAVMSYIFFGLIPPLVYAFSFYETGIKNYKLISVFLGSLVCVILLGSIKVYVRKPTNSCGSTKAYLKSAAYYTSIVVASCGISYVVGDIMGEYIEKLSLVGLDQISITSPCYGIKPEECRFTSF

SEQ ID NO: 99839 - DNA, 1312 bp, Arabidopsis thaliana
  misc_feature (1)..(1312): Ceres Seq. ID no. 13603766
  misc_feature (1)..(1312): Ortholog of  Ceres SEQ ID NO 12609394 as cited in SEQ ID NO 52095
aacaaaacacaggtttggtcggagaaggctttattaatccacttgtcctcctctcagactctacaaagtcaaagttgttcactttacctataaaaacgctctctcactttcttttcaatggcttcttcttcttgtttccttcgctcgattctcttctcttctcctactaaccttcgttcaaatcaccatctccccactttcttccccaagaattatctcatttgctctcattccacttcttctcgcttcgaatcgctctcggtttcatcgatcggaactggatctaccaagaaatcatccgatactcggagaaaggtaaagagcatggctacgacaaatataggaaaggaggagaagaaaagagtcgagatttatgatctcgaagagaatttagtgattgatttggctaaattcacagcagatctctccgataagttttgtaaagagagaggcgctttcaccgtcgttgtctccggtggctctctcatcaaatcactccggaaattagtagaatctccttacgttgattctatagattgggcaaggtggcattttttctgggttgacgagagagttgttcccaagaatcacgatgatagcaactataaactcgcttatgatagttttctatccaaggtaccaattccgcctggaaatgtatatgcaatcaacgaagccctctccgctgaggctgcagcggatgattacgagacctgcctcaaacatttggtcaacaccaacattctccgtgtatctgaatcaactggctttcccaaatttgatctcatgcttctaggtatgggacctgatggtcatgtggcatcattattccctgggcatggtctctgcaacgagagcaagaaatgggtagtttcaatctctgactctccaaaaccaccgtctgagagaatcaccttcacgttcccggtcatcaactcatctgcacatgtagctctagttgtttgcggttctgggaaagctgaagctgtggaggcagctttaaagaagactgggaatgtaccacctgctggttctgtttctgctgaagacgagttggtttggttcctggacaaaccagcatcttccaagctctaaaaacaggtggtatgcttcccattccagtgaacttaccaatgtgactagtccggtttagtttttggattttgactctttggttctctccatttatgttgtgggaagagactgttgtgataaaagcgtgtactttacatggaaataatgaactaatcaatggtttctctgatttgttttggtgtattttggttaaaatctatcggaaccaacactctcc

SEQ ID NO: 99840 - protein, 325 aa, Arabidopsis thaliana; identical to SEQ ID NO: 35205
  peptide (1)..(325): Ceres Seq. ID no. 13603767

SEQ ID NO: 99841 - protein, 256 aa, Arabidopsis thaliana; identical to SEQ ID NO: 35206
  peptide (1)..(256): Ceres Seq. ID no. 13603768

SEQ ID NO: 99842 - DNA, 2218 bp, Arabidopsis thaliana
  misc_feature (1)..(2218): Ceres Seq. ID no. 13603773
  misc_feature (1)..(2218): Ortholog of  Ceres SEQ ID NO 13659971 as cited in SEQ ID NO 67565
  misc_feature (1)..(2218): Ortholog of  Ceres SEQ ID NO 13500385 as cited in SEQ ID NO 67583
agtggtcttcatttaacaaacgccttctctcttttttcctttaaatctctgagctcttttttcttcatttgtttttttgccaaaaaaaaatatatatattgaatcttcattcattaaaaaaacaatttttatttttccctattcatcttcggttcctcaccgtccgatgctttgactctgaccaatcagtcaatttgagcttcacaatcaacggtcatgggtcattgttacagccggaacatctccgccgtcgaggacgacgagatccccaccggtaacggcgaggtttcgaatcaaccatctcaaaatcaccggcatgcttcgattcctcagtctccggttgcttctggtactcctgaagtcaactcatataacattagccctttccaaagcccgttaccggcgggagtagctccatcaccggcgagaactccgggacggaagttcaaatggccgtttcctccaccgtcacctgcgaaaccgattatggcggctttgagacgacgacgtggcgctccgcctcagcctcgagatgagccgatcccggaggatagtgaagatgtagtagatcacggtggtgacagtggcggcggagagaggttagataagaatttcgggtttgggaagaacttcgaagggaagtatgagttagggaaagaagtagggcgagggcattttggtcatacttgttgggcaaaagcgaagaaaggcaagatgaagaaccaaaccgtggctgtcaaaatcatctctaaagctaagatgacgtcgacgttatctattgaagatgttcgtagagaagtgaaattgctgaaagctttatcagggcataggcatatggttaagttctatgatgtatatgaggatgctgataatgtctttgttgttatggagttatgcgaaggtggagagctattggatagaattttggcgagaggtggacgataccctgaagtcgatgccaaacgtattcttgtgcagattttgtctgcaacagcattttttcaccttcaaggtgtcgtgcaccgtgatctgaagccggagaattttctctttaccagcagaaatgaggatgcgatactcaaggtcatagattttggcttgtctgatttcattagatacgatcagcgtctcaatgatgttgtaggaagtgcatactatgttgcacctgaagtactccataggtcttacagcactgaagcagatatgtggagcatcggtgtcataagttacatacttctctgtggaagcagacctttctatggaagaactgagtctgcaatattccgttgtgtgcttagagcaaaccctaattttgaggatatgccttggccttctatatctcctactgccaaagacttcgtgaaaaggcttttgaacaaggaccataggaaacgaatgacagctgctcaagctctagctcatccgtggttacgtgacgaaaaccccggtttgcttcttgatttctcggtctacaagttggtcaagtcctatatccgtgcctcacctttccgacgatcagcacttaaggctctctcgaaagctatacctgatgaagaacttgtgttccttaaggcacagttcatgctcctggatcctaaagacggaggcctatcccttaactgtttcacaatggctttaacaagatatgctactgatgctatgatggaatcaaggcttcctgacattttaaatacgatgcaacctctggcgcaaaagaagcttgactttgaagagttctgtgcggctgcggtcagtgtttaccaactggaggctcttgaagaatgggaacagattgcaacttcagcatttgagcactttgaacatgaaggaaaccgaatcatatctgtccaagaactcgccggggagatgagcgtgggaccgagtgcatatcctctgctcaaggattggatccgaagttcggatggaaagctgagtttcttggggtacgctaagttcttgcatggtgtgaccgtacgaagctcaagctcgagacctaggtgacacaccatgatgtaaaaagtcttctaacatgtgaattgagtttcaagaaacatcctaaacaatgtcgtcgtcagagaccttggattcaaagattaaaaaaaaaaacttgaaatggaagtgaagtcaggtaggtatttcctttgtaaatgattctttgagcattttgttttcgaaacaaactaaaaaaggaaaaacatattatatatgttatagaagg

SEQ ID NO: 99843 - protein, 594 aa, Arabidopsis thaliana
  peptide (1)..(594): Ceres Seq. ID no. 13603774
MGHCYSRNISAVEDDEIPTGNGEVSNQPSQNHRHASIPQSPVASGTPEVNSYNISPFQSPLPAGVAPSPARTPGRKFKWPFPPPSPAKPIMAALRRRRGAPPQPRDEPIPEDSEDVVDHGGDSGGGERLDKNFGFGKNFEGKYELGKEVGRGHFGHTCWAKAKKGKMKNQTVAVKIISKAKMTSTLSIEDVRREVKLLKALSGHRHMVKFYDVYEDADNVFVVMELCEGGELLDRILARGGRYPEVDAKRILVQILSATAFFHLQGVVHRDLKPENFLFTSRNEDAILKVIDFGLSDFIRYDQRLNDVVGSAYYVAPEVLHRSYSTEADMWSIGVISYILLCGSRPFYGRTESAIFRCVLRANPNFEDMPWPSISPTAKDFVKRLLNKDHRKRMTAAQALAHPWLRDENPGLLLDFSVYKLVKSYIRASPFRRSALKALSKAIPDEELVFLKAQFMLLDPKDGGLSLNCFTMALTRYATDAMMESRLPDILNTMQPLAQKKLDFEEFCAAAVSVYQLEALEEWEQIATSAFEHFEHEGNRIISVQELAGEMSVGPSAYPLLKDWIRSSDGKLSFLGYAKFLHGVTVRSSSSRPR

SEQ ID NO: 99844 - protein, 504 aa, Arabidopsis thaliana
  peptide (1)..(504): Ceres Seq. ID no. 13603775
MAALRRRRGAPPQPRDEPIPEDSEDVVDHGGDSGGGERLDKNFGFGKNFEGKYELGKEVGRGHFGHTCWAKAKKGKMKNQTVAVKIISKAKMTSTLSIEDVRREVKLLKALSGHRHMVKFYDVYEDADNVFVVMELCEGGELLDRILARGGRYPEVDAKRILVQILSATAFFHLQGVVHRDLKPENFLFTSRNEDAILKVIDFGLSDFIRYDQRLNDVVGSAYYVAPEVLHRSYSTEADMWSIGVISYILLCGSRPFYGRTESAIFRCVLRANPNFEDMPWPSISPTAKDFVKRLLNKDHRKRMTAAQALAHPWLRDENPGLLLDFSVYKLVKSYIRASPFRRSALKALSKAIPDEELVFLKAQFMLLDPKDGGLSLNCFTMALTRYATDAMMESRLPDILNTMQPLAQKKLDFEEFCAAAVSVYQLEALEEWEQIATSAFEHFEHEGNRIISVQELAGEMSVGPSAYPLLKDWIRSSDGKLSFLGYAKFLHGVTVRSSSSRPR

SEQ ID NO: 99845 - protein, 428 aa, Arabidopsis thaliana
  peptide (1)..(428): Ceres Seq. ID no. 13603776
MKNQTVAVKIISKAKMTSTLSIEDVRREVKLLKALSGHRHMVKFYDVYEDADNVFVVMELCEGGELLDRILARGGRYPEVDAKRILVQILSATAFFHLQGVVHRDLKPENFLFTSRNEDAILKVIDFGLSDFIRYDQRLNDVVGSAYYVAPEVLHRSYSTEADMWSIGVISYILLCGSRPFYGRTESAIFRCVLRANPNFEDMPWPSISPTAKDFVKRLLNKDHRKRMTAAQALAHPWLRDENPGLLLDFSVYKLVKSYIRASPFRRSALKALSKAIPDEELVFLKAQFMLLDPKDGGLSLNCFTMALTRYATDAMMESRLPDILNTMQPLAQKKLDFEEFCAAAVSVYQLEALEEWEQIATSAFEHFEHEGNRIISVQELAGEMSVGPSAYPLLKDWIRSSDGKLSFLGYAKFLHGVTVRSSSSRPR

SEQ ID NO: 99846 - DNA, 1326 bp, Arabidopsis thaliana
  misc_feature (1)..(1326): Ceres Seq. ID no. 13603780
  misc_feature (1)..(1326): Ortholog of  Ceres SEQ ID NO 15170037 as cited in SEQ ID NO 55447
  misc_feature (1)..(1326): Ortholog of  Ceres SEQ ID NO 13582350 as cited in SEQ ID NO 56734
  misc_feature (1)..(1326): Ortholog of  Ceres SEQ ID NO 12578315 as cited in SEQ ID NO 62451
  misc_feature (1)..(1326): Ortholog of  Ceres SEQ ID NO 12615907 as cited in SEQ ID NO 62860
  misc_feature (1)..(1326): Ortholog of  Ceres SEQ ID NO 13597295 as cited in SEQ ID NO 63743
  misc_feature (1)..(1326): Ortholog of  Ceres SEQ ID NO 12617090 as cited in SEQ ID NO 64005
  misc_feature (1)..(1326): Ortholog of  Ceres SEQ ID NO 13597233 as cited in SEQ ID NO 64370
  misc_feature (1)..(1326): Ortholog of  Ceres SEQ ID NO 13600370 as cited in SEQ ID NO 0
actcaaagtcgagccttccttcctttatctcttataccctttttgattcttcttcaattttctgacatcaaatggcggcaaagctgatatccaccggtttccgtcatactactttgccggaaaactatgtccggccaatctccgaccgtccacgtctctctgaagtctctcaactcgaagatttccctctcatcgatctctcttccactgatcgatcttttctcatccaacaaatccaccaagcttgtgcccgattcggattttttcaggtcataaatcacggagttaacaaacaaataatagatgagatggtgagtgttgcgcgtgagttctttagcatgtctatggaagaaaaaatgaagctatattcagacgatccaacgaagacaacaagattatcgacgagcttcaatgtgaagaaagaagaagtcaacaattggagagactatctaagactccattgttatcctatccacaagtatgtcaatgagtggccgtcaaaccctccttctttcaaggaaatagtaagtaaatacagtagagaagtaagagaagtgggatttaaaatagaggaattaatatcagagagcttaggtttagaaaaagattacatgaagaaagtgcttggtgaacaaggtcaacacatggcagtcaactattatcctccatgtcctgaacctgagctcacttacggtttacctgctcataccgacccaaacgccctaaccattcttcttcaagacactactgtttgcggtctccagatcttgatcgacggtcagtggttcgccgttaatccacatcctgatgcttttgtcatcaacataggtgaccagttacaggcattaagtaatggagtatacaaaagtgtttggcatcgcgctgtaacaaacacagaaaatccgagactatcggtcgcatcgtttctgtgcccagctgactgtgctgtcatgagcccggccaagcccttgtgggaagctgaggacgatgaaacgaaaccagtctacaaagatttcacttatgcagagtattacaagaagttttggagtaggaatctggaccaagaacattgcctcgagaattttctaaacaactaagatacatatatctttggcctttgtgtttgtctagtaggcatatatatacaagtcaataacagcattgatgttcgattctacattcctaccaacattttgttctagacgtatgataatagtaggaatcatgatcatatgtcttgataataactatcatgggcatatttgtttgtgtgttaaataatttcttaccttttatttttctatatgcttcaaaacttttaacttt

SEQ ID NO: 99847 - protein, 341 aa, Arabidopsis thaliana; identical to SEQ ID NO: 42614
  peptide (1)..(341): Ceres Seq. ID no. 13603781

SEQ ID NO: 99848 - protein, 262 aa, Arabidopsis thaliana; identical to SEQ ID NO: 42615
  peptide (1)..(262): Ceres Seq. ID no. 13603782

SEQ ID NO: 99849 - protein, 252 aa, Arabidopsis thaliana; identical to SEQ ID NO: 42616
  peptide (1)..(252): Ceres Seq. ID no. 13603783

SEQ ID NO: 99850 - DNA, 1522 bp, Arabidopsis thaliana
  misc_feature (1)..(1522): Ceres Seq. ID no. 13603787
  misc_feature (1)..(1522): Ortholog of  Ceres SEQ ID NO 15177750 as cited in SEQ ID NO 57772
  misc_feature (1)..(1522): Ortholog of  Ceres SEQ ID NO 13596581 as cited in SEQ ID NO 62420
  misc_feature (1)..(1522): Ortholog of  Ceres SEQ ID NO 13591273 as cited in SEQ ID NO 65904
  misc_feature (1)..(1522): Ortholog of  Ceres SEQ ID NO 13623086 as cited in SEQ ID NO 0
gaagaacctctgtttcttcctcttcttcttcagggtcggtgttaggtgatgaagctccgttttttcgttttcgtcttcttcttcttcaaggtctcttcgttttgtgcttgaagtaagaaaatttgggagaacaatgtcggcttcttcttcctcctttgaacaacctcaagtcataacctgcaacgcggcggtggcatggcgtgctggtgagccattggttatggaggaagttgaagtgagtccacctcaaccacttgagatcagaattaaagttgtatgtacatctctctgtcgtagtgatctctctgcttgggaatctcagtctcttttgcctcgaatatttggccatgaagctgcaggtatagtggagagcattggagaaggtgtaactgagtttgaaaaaggagatcatgtgcttgctgtattcactggagaatgtgggtcatgtcggcattgcatatctgggaaaagtaacatgtgtcaggttcttggaatggagaggaaaggtttgatgcatagtgatcagaagacacgcttctccatcaaaggcaaacctgtttaccattactgcgcggtttcaagtttcagcgagtacactgtggttcactctggctgtgctgtcaaagtcgatccactggcacctctgcataaaatttgtcttctaagctgtggagtagctgcaggtcttggtgcagcatggaatgttgctgatgtacaaaaaggttcaagtgttgtgatatttggtcttggaactgtcggtctttctgttgctcaaggtgccaaacttagaggagcagctcaaatacttggggttgatataaatcccgctaaggctgaacaagcaaagacatttggtgtcacggatttcatcaattcaaatgacctctctgaacctataccccaggtgatcaaaagaatgacaggaggaggtgcagatttctcatttgaatgtgttggtgatacaggaatagctacaactgctttacaatcgtgctcggatggatggggaatgacggttactctaggtgtaccgaaagctaagcctgaagtttcagctcattacggacttttcctttctgggaaatctttaaaagggactctttttggtggttggaagcctaaatctgatcttccttcactcattgacaagtacatgaacaaggagattatgatcgatgaatttattacgcataacctgtcatttgatgaaatcaacaaagcttttgttcttatgagagaaggaaaatgtttgcgttgtgttcttcacatgccaaagtaatgtctcggaaaacacatgtcacagattcaagaaagattaacgagagctctgtatattctacagctgagttgttgtataaaacaaaagtgatggttttctatagagttatgagacttttttttttcttttggtttgttgtgaagtgatcgttcatacattataaagatggattctcacatgatgaatcaaacgagttcctagaaccaaggacattgatcttaaattgataacagtgtttcaagt

SEQ ID NO: 99851 - protein, 381 aa, Arabidopsis thaliana; identical to SEQ ID NO: 43109
  peptide (1)..(381): Ceres Seq. ID no. 13603788

SEQ ID NO: 99852 - protein, 352 aa, Arabidopsis thaliana; identical to SEQ ID NO: 36865
  peptide (1)..(352): Ceres Seq. ID no. 13603789

SEQ ID NO: 99853 - protein, 267 aa, Arabidopsis thaliana; identical to SEQ ID NO: 36866
  peptide (1)..(267): Ceres Seq. ID no. 13603790

SEQ ID NO: 99854 - DNA, 1035 bp, Arabidopsis thaliana
  misc_feature (1)..(1035): Ceres Seq. ID no. 13603791
  misc_feature (1)..(1035): Ortholog of  Ceres SEQ ID NO 13637842 as cited in SEQ ID NO 54650
  misc_feature (1)..(1035): Ortholog of  Ceres SEQ ID NO 12608127 as cited in SEQ ID NO 57579
  misc_feature (1)..(1035): Ortholog of  Ceres SEQ ID NO 12634558 as cited in SEQ ID NO 0
aaacatcacaaactaaacaataaaccataccataaaaaacatgaaaatcctctcactttcacttctcttgctcttggccgctacggtctcggcatccgttccagggctcatcgaactcgtcgattcgaaaaccatctttgggaacgtagccgaactcttagagaaagagaaactttccatcaactacgccaactgcagaagctggcaccttggtgttgagacctctaacatcatagacttcgacacggtgcccgcaaattgcaaagactatgttgaagactacttgatcacttccaaacagtaccaatacgactccaaaaccgtgtgcaaagaggcttatttctatgccaaaggacttgccctaaagaacgacaccgtcaatgtttggatctttgacctagatgataccctcctctctagtattccctactacgcaaaatatggatacggaacagagaagaccgacccgggggcgtactggttgtggttagggaccggagcatcaacccctggactcccggaggccttgcatctttaccaaaacatcatagagctcgggattgaacccatcatactcagtgaccgttggaagttgtggaagaatgtcactctcgacaatctcgaagctgctggcgtgacctactggaagcatctcatattgaagcctaatggttcgaacttgaggcaagtggtgtacaagtcaaaggtgaggaagagtctcgtgaagaaaggatacaacatcgttggcaatatcggagatcaatgggctgatttggttgaggatacccctgggagggtttttaagctcccaaatccactctactacgtaccttcttaagaatctatcttcatcgcattgtccccttgtatacacttcatatctatgtcgtttcgtttatctttgtagccgttttggcaccgctgcataaataaaatgtctatcctatcgtaacttaataagtacaaagacttcgtactaaatgttgtttttctttaaaggggtcattaattaagtggccatgaaatgatattcac

SEQ ID NO: 99855 - protein, 265 aa, Arabidopsis thaliana
  peptide (1)..(265): Ceres Seq. ID no. 13603792
MKILSLSLLLLLAATVSASVPGLIELVDSKTIFGNVAELLEKEKLSINYANCRSWHLGVETSNIIDFDTVPANCKDYVEDYLITSKQYQYDSKTVCKEAYFYAKGLALKNDTVNVWIFDLDDTLLSSIPYYAKYGYGTEKTDPGAYWLWLGTGASTPGLPEALHLYQNIIELGIEPIILSDRWKLWKNVTLDNLEAAGVTYWKHLILKPNGSNLRQVVYKSKVRKSLVKKGYNIVGNIGDQWADLVEDTPGRVFKLPNPLYYVPS

SEQ ID NO: 99856 - DNA, 965 bp, Arabidopsis thaliana
  misc_feature (1)..(965): Ceres Seq. ID no. 13603793
  misc_feature (1)..(965): Ortholog of  Ceres SEQ ID NO 13637842 as cited in SEQ ID NO 54650
  misc_feature (1)..(965): Ortholog of  Ceres SEQ ID NO 12608127 as cited in SEQ ID NO 57579
  misc_feature (1)..(965): Ortholog of  Ceres SEQ ID NO 12634558 as cited in SEQ ID NO 0
aaacaccataaactaaacaataaaccatacaaaaaaatatgaaaatcctctcactttcactactcttgctcttggccgctacggtctcccacgtccagtcttcggcatccgttccagggctcatcgaactcctcgaatcgaacaccatctttgggaacgaagccgaactcttagagaaagagggactgtccatcaactaccccaactgcagaagctggcaccttggtgttgagacctctaacatcataaacttcgacacggtgcccgcaaattgcaaagcctatgttgaagactacttgatcacttccaaacagtaccaatacgactccaaaactgtaaacaaagaggcatatttttacgccaaaggacttgccctaaagaacgataccgtcaatgtttggatctttgacctagacgacactctcctctctagtattccctactacgctaaatatggatatgggaccgagaacacagccccgggggcgtactggtcgtggttagagtccggagaatcaactccaggactcccggagaccttgcatctatacgaaaacctcttggaactcgggattgaacccatcataatctctgacagatggaaaaaattgtcagaagtcactgtcgagaatctcaaggctgttggtgtaacaaaatggaagcatctcatactcaagccaaacggatcgaagttgacgcaagtggtgtacaagtcaaaggttaggaatagccttgtgaagaaagggtacaacatcgttgggaatattggagaccaatgggctgatttggttgaggatactcctggaagggtttttaagctcccaaatccactctactacgtaccttcttaattaagcatctatcttcatggcattgtccccttgtatccatttcatatctatgtcgtttcgtttatctttgtagccgttttggcaccactgcttaaataaaatgccaatcctatc

SEQ ID NO: 99857 - protein, 270 aa, Arabidopsis thaliana; identical to SEQ ID NO: 86362
  peptide (1)..(270): Ceres Seq. ID no. 13603794

SEQ ID NO: 99858 - DNA, 1633 bp, Arabidopsis thaliana
  misc_feature (1)..(1633): Ceres Seq. ID no. 13603802
  misc_feature (1)..(1633): Ortholog of  Ceres SEQ ID NO 13663419 as cited in SEQ ID NO 66561
acccatcttatcattattttataaagatcctatgtctatccgtaaatggactaatctttagacacacagagaatataatgagtttgaaaataaagtttctgcttctgcttgtcttgtatcatcatgttgattctgcctctatcgtcaagtttcttcctggttttgaaggccctcttcctttcgaacttgaaaccgggtacattggtattggtgaggacgagaatgtgcaatttttctactatttcatcaaatctgaaaacaatccaaaagaagatcctcttcttatatggttaaatggaggacctggatgttcttgtcttggtggtattatttttgagaacggaccggtgggtttgaagtttgaggtgttcaacggaagtgctccttctttgttctctactacatattcatggacaaagatggcaaacattatattcttggatcagccagtaggatctggcttctcctactcaaaaactccaattgataaaactggtgacataagtgaagtaaagaggacccatgagtttcttcaaaagtggctaagcaggcatccacaatatttctccaaccctttatatgtagttggagattcttattccggtatgattgtcccggccctcgttcaagaaatctcacaaggaaattatatatgttgcgaacctcctataaatctacagggttatatgcttggaaaccctgtaacatatatggactttgaacaaaacttccgcattccatatgcttatggtatgggattaatctccgacgaaatctatgagccaatgaagagaatctgcaacggaaattattacaatgtggatccatctaacacacaatgtttgaaacttactgaagaatatcataagtgcactgccaaaataaatatccatcacatattaacaccagattgcgatgtaaccaatgtaacatctcctgattgttattattatccatatcatctcattgaatgttgggctaacgacgagagcgttcgcgaagctcttcatattgaaaagggtagtaaaggaaaatgggcgcgatgtaatcggactattccatacaatcacgacattgtaagcagcataccatatcacatgaataacagcatcagtggataccgatctcttatttacagtggtgatcacgacatcgcggtcccttttcttgcaactcaagcctggataagatctctcaattactcccccattcataactggaggccatggatgataaacaatcaaatcgctggatacacgagagcttattccaataagatgacatttgctactatcaaaggaggtggacacacggcagagtatagaccaaacgagacctttatcatgttccaaaggtggatcagtggccaacccctgtaacaaaaggcttatgaccttcacctataattatctaccaactaatatccacgttaagcgcagttgtttgtgttgaaatgtttttgttgtttgctttgttgcattcttttgtgctttatgttacaattttatgtgttttatgtactacagttcattattgtgcgttgtgcaattccttttacatttaactagggactaacccgggctagccccggtatatttcctaactatacgtgcaagaaaatgatgttctattt

SEQ ID NO: 99859 - protein, 458 aa, Arabidopsis thaliana
  peptide (1)..(458): Ceres Seq. ID no. 13603803
PSYHYFIKILCLSVNGLIFRHTENIMSLKIKFLLLLVLYHHVDSASIVKFLPGFEGPLPFELETGYIGIGEDENVQFFYYFIKSENNPKEDPLLIWLNGGPGCSCLGGIIFENGPVGLKFEVFNGSAPSLFSTTYSWTKMANIIFLDQPVGSGFSYSKTPIDKTGDISEVKRTHEFLQKWLSRHPQYFSNPLYVVGDSYSGMIVPALVQEISQGNYICCEPPINLQGYMLGNPVTYMDFEQNFRIPYAYGMGLISDEIYEPMKRICNGNYYNVDPSNTQCLKLTEEYHKCTAKINIHHILTPDCDVTNVTSPDCYYYPYHLIECWANDESVREALHIEKGSKGKWARCNRTIPYNHDIVSSIPYHMNNSISGYRSLIYSGDHDIAVPFLATQAWIRSLNYSPIHNWRPWMINNQIAGYTRAYSNKMTFATIKGGGHTAEYRPNETFIMFQRWISGQPL

SEQ ID NO: 99860 - protein, 433 aa, Arabidopsis thaliana
  peptide (1)..(433): Ceres Seq. ID no. 13603804
MSLKIKFLLLLVLYHHVDSASIVKFLPGFEGPLPFELETGYIGIGEDENVQFFYYFIKSENNPKEDPLLIWLNGGPGCSCLGGIIFENGPVGLKFEVFNGSAPSLFSTTYSWTKMANIIFLDQPVGSGFSYSKTPIDKTGDISEVKRTHEFLQKWLSRHPQYFSNPLYVVGDSYSGMIVPALVQEISQGNYICCEPPINLQGYMLGNPVTYMDFEQNFRIPYAYGMGLISDEIYEPMKRICNGNYYNVDPSNTQCLKLTEEYHKCTAKINIHHILTPDCDVTNVTSPDCYYYPYHLIECWANDESVREALHIEKGSKGKWARCNRTIPYNHDIVSSIPYHMNNSISGYRSLIYSGDHDIAVPFLATQAWIRSLNYSPIHNWRPWMINNQIAGYTRAYSNKMTFATIKGGGHTAEYRPNETFIMFQRWISGQPL

SEQ ID NO: 99861 - protein, 319 aa, Arabidopsis thaliana
  peptide (1)..(319): Ceres Seq. ID no. 13603805
MANIIFLDQPVGSGFSYSKTPIDKTGDISEVKRTHEFLQKWLSRHPQYFSNPLYVVGDSYSGMIVPALVQEISQGNYICCEPPINLQGYMLGNPVTYMDFEQNFRIPYAYGMGLISDEIYEPMKRICNGNYYNVDPSNTQCLKLTEEYHKCTAKINIHHILTPDCDVTNVTSPDCYYYPYHLIECWANDESVREALHIEKGSKGKWARCNRTIPYNHDIVSSIPYHMNNSISGYRSLIYSGDHDIAVPFLATQAWIRSLNYSPIHNWRPWMINNQIAGYTRAYSNKMTFATIKGGGHTAEYRPNETFIMFQRWISGQPL

SEQ ID NO: 99862 - DNA, 1505 bp, Arabidopsis thaliana
  misc_feature (1)..(1505): Ceres Seq. ID no. 13603806
  misc_feature (1)..(1505): Ortholog of  Ceres SEQ ID NO 13663419 as cited in SEQ ID NO 66561
aaaagggcagtctaactttccttttctaatgattataaatatcctttttccgtaaaaagaaattaaaagaaaatgggttcgacactaaagcatctgcttttgcttctacttgttttgattcgtcatgttgattctgctgctatagtcaagtctcttcctggtttagaaggccgtcttcctttcgaactcgaaaccgggtacattggtattggagaggaagaggacatacaattgttctactatttcatcaaatctgagaacaatccaaaagaagaccctcttcttctatggttagatggaggacctggatgttcttctctcggtggccttctttttgagaacggaccggtggctttgaagtctgcggtttacaatggaagtaatccttctttgttctccactacatattcatggacaaagatggcaaacataatatacttggatcagccagttggatctggtttctcttactcaagaactccaattggaaaatctagtgacacaagtgaagttaagaggatccatgagtttcttcaaaagtggctaagcaagcatccacagtttttctccaaccctttttacgtcaccggagattcttactctggtatgattgttccggccctcgttcaagaaatctctaaaggaaattatatatgttgcaaacatcttataaatctacagggttacgtgctcggaaacccgataacatatgctgaacatgagaaaaactatcgtattccattttctcatggaatgtcattaatctctgatgaactctatgagtcactgaagagaaactgcaaaggaaattatgaaaatgtggatccacgtaacacaaaatgtgtgagacttgttgaagaataccataagtgcactgacaaaataaatacgcaacatatattaataccagattgcgataaaaaaggacatggaataacatctcctgattgctattattatctgtattttcttattgaatgttgggccaacaacgagagagttcgtgaagctcttcatgttactaaggggactaaaggacaatggcagcgatgtaattggactattccatacgataacaacatcataagcagcgtaccatatcatatggataacagcatcaatggatatcgatctcttatttacagtggtgatcatgacatcacaatgcctttccaagcaactcaagcctggataaaatctctaaattactccatcgttgatgactggaggccttggatgataaacgatcaaatcgctggatacacgagaacttattccaataagatgacatttgctactgtcaaaggaggtggacacacggcagagtatctaccaaacgagagttccatcatgttccaaaggtggatcagtggccaacctttgtaatagaaggcctcttttagaggcttattgcctgtacgtattacatatattaatattcacgctacgcgcaattcttttgttttgagatgtttacagaaaataggataaaaagtttgtccttg

SEQ ID NO: 99863 - protein, 437 aa, Arabidopsis thaliana
  peptide (1)..(437): Ceres Seq. ID no. 13603807
MGSTLKHLLLLLLVLIRHVDSAAIVKSLPGLEGRLPFELETGYIGIGEEEDIQLFYYFIKSENNPKEDPLLLWLDGGPGCSSLGGLLFENGPVALKSAVYNGSNPSLFSTTYSWTKMANIIYLDQPVGSGFSYSRTPIGKSSDTSEVKRIHEFLQKWLSKHPQFFSNPFYVTGDSYSGMIVPALVQEISKGNYICCKHLINLQGYVLGNPITYAEHEKNYRIPFSHGMSLISDELYESLKRNCKGNYENVDPRNTKCVRLVEEYHKCTDKINTQHILIPDCDKKGHGITSPDCYYYLYFLIECWANNERVREALHVTKGTKGQWQRCNWTIPYDNNIISSVPYHMDNSINGYRSLIYSGDHDITMPFQATQAWIKSLNYSIVDDWRPWMINDQIAGYTRTYSNKMTFATVKGGGHTAEYLPNESSIMFQRWISGQPL

SEQ ID NO: 99864 - protein, 321 aa, Arabidopsis thaliana; identical to SEQ ID NO: 22296
  peptide (1)..(321): Ceres Seq. ID no. 13603808

SEQ ID NO: 99865 - protein, 259 aa, Arabidopsis thaliana; identical to SEQ ID NO: 22297
  peptide (1)..(259): Ceres Seq. ID no. 13603809

SEQ ID NO: 99866 - DNA, 1134 bp, Arabidopsis thaliana
  misc_feature (1)..(1134): Ceres Seq. ID no. 13603810
  misc_feature (1)..(1134): Ortholog of  Ceres SEQ ID NO 15171289 as cited in SEQ ID NO 51570
aacaaaaatcgtttcgttcttttccaaaatccccaaacaatagaaacgcgttttaaacgatttgattagttttaaattaaaaagaagatccgagcgatgtctggttcgacccggaaagaaatggatcggatcaaaggaccatggagtcctgaagaagacgatctgttacaatcgttggttcagaagcacggaccaaggaactggtctctgataagcaaatcaatccctggacgttccggtaaatcttgccgtctccgttggtgtaatcagctttctccggaggtagagcaccgtggattcacggcggaggaagatgatacgattatactagcgcacgctcggtttggtaacaagtgggcgacgattgcacggcttctcaatggtcgcactgataacgcgattaagaatcactggaactcaacgctgaagcggaaatgtagcggcggaggcggcggaggagaggaagggcagagttgtgatttcggtggtaatggagggtatgatggtaatttaactgatgaaaaaccgttaaaacggagggcgagtggtggaggaggagttgttgtggtgacggcgttaagtccaacgggatctgacgtcagcgagcaatcgcaatctagtggatctgttttaccggtttcttcttcttgtcatgtttttaaaccgacggcgagagctggtggagtggtgattgagtcatcatcgccggaggaggaggagaaagatccgatgacttgtttgaggttgtctttgccttgggtcaatgagtcaacaactccaccggagttgtttccggtgaagagagaagaagaagaagagaaggaaagagagatttctggacttggtggagattttatgacggtggtgcaggagatgattaagacggaggttaggagttacatggcggatttacagctaggaaacggcggaggagctggaggaggagcaagttcgtgtatggtgcaaggaactaatggtcgtaatgtagggtttagagagtttattggattaggtaggatcgagtagtgagtgagaaaagagaagaattgtgtagcaaatgcagagaaagagccaatttcatgatttgagatttgattcattcgaaaaaaaaactgaataaatgtattgattttg

SEQ ID NO: 99867 - protein, 309 aa, Arabidopsis thaliana
  peptide (1)..(309): Ceres Seq. ID no. 13603811
MSGSTRKEMDRIKGPWSPEEDDLLQSLVQKHGPRNWSLISKSIPGRSGKSCRLRWCNQLSPEVEHRGFTAEEDDTIILAHARFGNKWATIARLLNGRTDNAIKNHWNSTLKRKCSGGGGGGEEGQSCDFGGNGGYDGNLTDEKPLKRRASGGGGVVVVTALSPTGSDVSEQSQSSGSVLPVSSSCHVFKPTARAGGVVIESSSPEEEEKDPMTCLRLSLPWVNESTTPPELFPVKREEEEEKEREISGLGGDFMTVVQEMIKTEVRSYMADLQLGNGGGAGGGASSCMVQGTNGRNVGFREFIGLGRIE

SEQ ID NO: 99868 - protein, 301 aa, Arabidopsis thaliana
  peptide (1)..(301): Ceres Seq. ID no. 13603812
MDRIKGPWSPEEDDLLQSLVQKHGPRNWSLISKSIPGRSGKSCRLRWCNQLSPEVEHRGFTAEEDDTIILAHARFGNKWATIARLLNGRTDNAIKNHWNSTLKRKCSGGGGGGEEGQSCDFGGNGGYDGNLTDEKPLKRRASGGGGVVVVTALSPTGSDVSEQSQSSGSVLPVSSSCHVFKPTARAGGVVIESSSPEEEEKDPMTCLRLSLPWVNESTTPPELFPVKREEEEEKEREISGLGGDFMTVVQEMIKTEVRSYMADLQLGNGGGAGGGASSCMVQGTNGRNVGFREFIGLGRIE

SEQ ID NO: 99869 - DNA, 939 bp, Arabidopsis thaliana
  misc_feature (1)..(939): Ceres Seq. ID no. 13603821
  misc_feature (1)..(939): Ortholog of  Ceres SEQ ID NO 13638849 as cited in SEQ ID NO 52046
  misc_feature (1)..(939): Ortholog of  Ceres SEQ ID NO 13599613 as cited in SEQ ID NO 0
aaaaagtacgaaaggaaaatatgagtgaggagaagaggaagcaacacttcgtgctagtacatggtgcgtgccacggcgcatggtgctggtacaaggttaagcctcttctcgaggctttgggccatcgtgtaaccgccttagacctagctgcttccggtatagacacaaccaggtcaatcactgacatttctacatgtgaacaatattctgagccattgatgcagctaatgacttcattgccgaatgatgagaaggttgtactcgttggtcatagctttggaggtttgagtttagccttagccatggataagtttcccgataaaatctctgtctctgtcttcgtgactgcattcatgcccgacaccaaacactcaccatcgttcgtcgaggaaaagtttgcaagcagcatgacaccagaaggatggatgggctctgagctcgagacatatggttcagataattccggcttgtctgtgttcttcagcaccgacttcatgaagcaccgtctctaccaactttctcctgtggaggatcttgagcttggattgcttctaaagaggcctagttcattgtttattaatgaattatcgaagatggagaacttttctgagaaagggtatggatctgttcctcgagcttacattgtgtgcaaagaggacaacattatctcggaagaccatcaacgatggatgatccataattatccggcgaatttagtgattgagatggaagagactgatcatatgccaatgttttgcaaacctcaactactaagtgaccatctattggcaatcgctgacaatttctgttaaataatattttgatgaaaatgtatttggagtggatacaatcaaacgtgttctaaaatggatcttcataaaggttcaaacttatttcttagttcttactatggttgaaatgagaaacctaagtcaatct

SEQ ID NO: 99870 - protein, 269 aa, Arabidopsis thaliana; identical to SEQ ID NO: 36075
  peptide (1)..(269): Ceres Seq. ID no. 13603822

SEQ ID NO: 99871 - protein, 263 aa, Arabidopsis thaliana; identical to SEQ ID NO: 36076
  peptide (1)..(263): Ceres Seq. ID no. 13603823

SEQ ID NO: 99872 - protein, 197 aa, Arabidopsis thaliana; identical to SEQ ID NO: 36077
  peptide (1)..(197): Ceres Seq. ID no. 13603824

SEQ ID NO: 99873 - DNA, 1208 bp, Arabidopsis thaliana
  misc_feature (1)..(1208): Ceres Seq. ID no. 13603825
  misc_feature (1)..(1208): Ortholog of  Ceres SEQ ID NO 14313548 as cited in SEQ ID NO 68496
aaatctcatttttgtctccttaaaattttctcagaaacatttccgtcatttgttccttagttttgtaatcaatcttcacgattcctcaggtaccatcctccaaggtcataagagaacaggatcggtgttctcgaacgagcggtgttgtgtcttaagtggggatggcttcaacaccttgtgcagcatgtaagctcttgaggcgtaaatgcactcaagaatgtgtgtttgcgccgtattttccaccaactaatcctcaaaagtttatctttgttcaccgagtttttggagcaagcaatgtaaccaagatcctcaacgatcttccacctgatcaacgcgaagacactgttaattccctcttttatgaagcggaagcgcgtatccgtgacccaatctatggatgtgttggtctcatttcttttttacaacaatacctcaagaaaattcaacaagatcttctcactgctaaagaagagcttgttggttacttgggacccgatgctgtgattccgccgccttatcttcctcctataggtaacaatcctcctcccaatttcatgatgtctatggaaggaatgccaccaggagtgatccctcaaggagaacctttgatgatacgcgaaccaaacatgtctcagcaacatcatcatcaacaaccgcaagatgagcagttgcaattcatagcttctgatgcacagagaatggctgcaatgatgttggagagaggagatcaacaagggatgttcaatggttacggaatagacaacaatggttcggttacagccacgggttttaaccaaatggatgtgaatgatcaaggtgctggtggttcgttgtctggaccatctcttgctttaggaagctttggtgatgcttatcagatgggtcaagagacagagcatggtcatatcaaccatgatcagcttcagacacagcttatgcttcagcctccattacaagaaggtcaagaacaaacagaggaaggacagttcttgatgcaaccaatgggacaagagaatcttcatgacgaagaggaggaggaagagcttgagccaccggttaaatggaggatgtctgagaacaaggaagctagtttttaagacctaaatgcatttaggagaacaaaaaaaaattcctattttcttggatagtttacttaactcttgaggatctatttggtttttttttttaataatcaaatggtattattc

SEQ ID NO: 99874 - protein, 311 aa, Arabidopsis thaliana
  peptide (1)..(311): Ceres Seq. ID no. 13603826
MASTPCAACKLLRRKCTQECVFAPYFPPTNPQKFIFVHRVFGASNVTKILNDLPPDQREDTVNSLFYEAEARIRDPIYGCVGLISFLQQYLKKIQQDLLTAKEELVGYLGPDAVIPPPYLPPIGNNPPPNFMMSMEGMPPGVIPQGEPLMIREPNMSQQHHHQQPQDEQLQFIASDAQRMAAMMLERGDQQGMFNGYGIDNNGSVTATGFNQMDVNDQGAGGSLSGPSLALGSFGDAYQMGQETEHGHINHDQLQTQLMLQPPLQEGQEQTEEGQFLMQPMGQENLHDEEEEEELEPPVKWRMSENKEASF

SEQ ID NO: 99875 - protein, 180 aa, Arabidopsis thaliana
  peptide (1)..(180): Ceres Seq. ID no. 13603827
MMSMEGMPPGVIPQGEPLMIREPNMSQQHHHQQPQDEQLQFIASDAQRMAAMMLERGDQQGMFNGYGIDNNGSVTATGFNQMDVNDQGAGGSLSGPSLALGSFGDAYQMGQETEHGHINHDQLQTQLMLQPPLQEGQEQTEEGQFLMQPMGQENLHDEEEEEELEPPVKWRMSENKEASF

SEQ ID NO: 99876 - protein, 179 aa, Arabidopsis thaliana
  peptide (1)..(179): Ceres Seq. ID no. 13603828
MSMEGMPPGVIPQGEPLMIREPNMSQQHHHQQPQDEQLQFIASDAQRMAAMMLERGDQQGMFNGYGIDNNGSVTATGFNQMDVNDQGAGGSLSGPSLALGSFGDAYQMGQETEHGHINHDQLQTQLMLQPPLQEGQEQTEEGQFLMQPMGQENLHDEEEEEELEPPVKWRMSENKEASF

SEQ ID NO: 99877 - DNA, 690 bp, Arabidopsis thaliana
  misc_feature (1)..(690): Ceres Seq. ID no. 13603829
  misc_feature (1)..(690): Ortholog of  Ceres SEQ ID NO 12609863 as cited in SEQ ID NO 52056
  misc_feature (1)..(690): Ortholog of  Ceres SEQ ID NO 13661859 as cited in SEQ ID NO 61611
tttctatttcacatctgagagcttttttcgtttcttgtgagatcatctaaaaaatggcttcgactgtttcgctttctttactcagcggcggcagtggagctcttcaggcgcgttgcgcaagaaccgcgcatgttagcccacgagcggcgcattctaacaaacccgcgctttcttcgttctcgctgaccggcgcctctcgcaggaatctgttattttcgttgacggcagcgacggtagtgacgggacttcagcctgcatcaatggcggagaatattccgttatttggtataagaaagaaactgaagaaagcagaagaagaagcggtggagatcgtgaaagaaggctttgagacggcggagaaaggcgttgatgcggcggagaaaggattagaagcggcggagagaggtgtagagacggcagagaaggaaatcgtgacggcggttagctttaatggattgacacaagctggagccgtcgtggcggctgagttcgtcggagttcttgtcgctacgtcagtagtgaatgggattttaggaccagaagcccagaaatcttaggaataacctaatgctatgtgtacttttgtgttggagttaaagaaatatttgtctaaatttttgctgttaattatgttttgtaatatcataaaccatatacctagagatgaagaagatcagaattatgtggtct

SEQ ID NO: 99878 - protein, 167 aa, Arabidopsis thaliana; identical to SEQ ID NO: 31053
  peptide (1)..(167): Ceres Seq. ID no. 13603830

SEQ ID NO: 99879 - protein, 98 aa, Arabidopsis thaliana; identical to SEQ ID NO: 31054
  peptide (1)..(98): Ceres Seq. ID no. 13603831

SEQ ID NO: 99880 - DNA, 1066 bp, Arabidopsis thaliana
  misc_feature (1)..(1066): Ceres Seq. ID no. 13603840
  misc_feature (1)..(1066): Ortholog of  Ceres SEQ ID NO 15178847 as cited in SEQ ID NO 1145
  misc_feature (1)..(1066): Ortholog of  Ceres SEQ ID NO 14311253 as cited in SEQ ID NO 56483
  misc_feature (1)..(1066): Ortholog of  Ceres SEQ ID NO 13597435 as cited in SEQ ID NO 64073
  misc_feature (1)..(1066): Ortholog of  Ceres SEQ ID NO 13656209 as cited in SEQ ID NO 64393
aagactctgttttttcccaagatgtctggtttcctcttttgtttcgtccaaatctctactttttagggatcttgtccttctcttttctgctgattaaaaccctcgaatttgctccaattcgacgcgaaaaagggcattgagatggtgaatggagaatcatcaactagtacgtcttactctgatagtaacaatgacacaaatgatcaaggaggagactttgaatgtaacatttgtttcgaactagctcaagatccgattgtcactctctgtggccatctcttttgctggccttgcttataccgttggcttcaccaccattcacattctcaagaatgtccggtttgtaaagccgtggttcaagacgataagcttgttcctctttacggtagaggcaagaaccagactgacccgagatcaaaacgttatccgggtttacggattcctaaccgaccaacaggtcaaagacctgagactgctgctcctcctcctcagcctgaagctgcgagtaattttttcaactacggtattggtttgatgggtggaattatgccgatgatggcgactacgaggtttgggaatttcagtatggggtttggtggtttgttaccttctttgtttaactttcagtttcatggatttcatgatgctacgctttatggttcaacaccgggttatccttacggtggttatcataacggtttccgtggagttcctcctcgtggacaagagcgtcctatggctcgtggaggaaaccaaagtgatgcatttctgaagaatatcctcttttttgttggaatctgtgtggtgatatttctcatctggtgaaaacgaatcacatttggtgtatttccaggtatgatcaaacttacttacttggtgcaagttgtgtatgtaaatatggtaatagctgagtgtacttgtctgctatttcgacgttgttattgtatttttgttttgaagatgaaccgtgagtctacaagcttttttacacaactcttttgttgcttttgtgttttgtctaagcatcttgtgaaaactagttgtgaaataaatggtgcgtgttatg

SEQ ID NO: 99881 - protein, 227 aa, Arabidopsis thaliana; identical to SEQ ID NO: 30318
  peptide (1)..(227): Ceres Seq. ID no. 13603841

SEQ ID NO: 99882 - DNA, 1356 bp, Arabidopsis thaliana
  misc_feature (1)..(1356): Ceres Seq. ID no. 13603846
  misc_feature (1)..(1356): Ortholog of  Ceres SEQ ID NO 12583469 as cited in SEQ ID NO 51031
  misc_feature (1)..(1356): Ortholog of  Ceres SEQ ID NO 13597389 as cited in SEQ ID NO 63426
  misc_feature (1)..(1356): Ortholog of  Ceres SEQ ID NO 15180463 as cited in SEQ ID NO 0
atattgttttgagccatggaaactcttttccacactcttcttagattattactattcgtagccatctctcatactctgtcccctctcgccggttctttccggatttctaatgactttccggcggttttcaacttcggagactctaactctgacaccggagaacttagctcgggtcttggattccttccacaaccttcctatgaaataaccttctttagatctccaacttccggaagattctgcaatggacgtcttatcgtcgattttctaatggaagcaattgatcgaccatatttgaggccttatttagattcgataagtcgacaaacttaccgaagaggctgcaattttgctgcggctgcgtcaacgattcagaaggcaaatgctgcatcctatagcccctttggttttggtgttcaagtctctcaattcatcacctttaagtccaaagtccttcaattgatacaacaagatgaagagctccaaagatacttaccgtccgaatatttttttagtaatggattgtatatgtttgatatcggacaaaatgatattgccggagcattttacaccaagacagtagatcaagttcttgctctggttcctataatcttagatatatttcaagatggaataaagagattatatgcagagggggcaagaaactattggatacacaacacaggaccacttgggtgtttagcacaagttgtgtcaatttttggggaagacaaatcaaagcttgatgagtttggttgtgtcagtgaccataaccaagctgctaagcttttcaatttgcagcttcatggtcttttcaaaaaactccctcaacaatatcccaattcccgtttcacatacgtagatatcttctctatcaaatccgacctcatcctgaatcattccaaatatggttttgatcattcgataatggtatgttgtggaaccggaggaccaccactgaactacgatgatcaggttggttgcggtaagacagcaagatcaaatggtacgatcataaccgccaaaccttgttatgatagttccaaatatgttaactgggacggcattcattacactgaagctgcaaatcggtttgttgcactacacattctcaccggtaaatactctgagacggcgtcatctttgaatctttagcaatgtaacaaagaaagttacattatcactttctttatggattacatatatatttagttgtatgttaactggtttatttatgattatatgaataatttccataaacttaactgtttcatttccaaaaaaaggcatttttccaattttctttcacaaagatagatgctttgtcacaataaaatgaatctttcaaatttcctg

SEQ ID NO: 99883 - protein, 379 aa, Arabidopsis thaliana; identical to SEQ ID NO: 30118
  peptide (1)..(379): Ceres Seq. ID no. 13603847

SEQ ID NO: 99884 - protein, 294 aa, Arabidopsis thaliana; identical to SEQ ID NO: 30119
  peptide (1)..(294): Ceres Seq. ID no. 13603848

SEQ ID NO: 99885 - protein, 208 aa, Arabidopsis thaliana; identical to SEQ ID NO: 30120
  peptide (1)..(208): Ceres Seq. ID no. 13603849

SEQ ID NO: 99886 - DNA, 798 bp, Arabidopsis thaliana
  misc_feature (1)..(798): Ceres Seq. ID no. 13603869
  misc_feature (1)..(798): Ortholog of  Ceres SEQ ID NO 13582184 as cited in SEQ ID NO 56002
  misc_feature (1)..(798): Ortholog of  Ceres SEQ ID NO 15227042 as cited in SEQ ID NO 0
aggtcggcggttccatcaccacaacgccggacgacaatgggtattgatctgatcgccggaggtaagagtaagaagaccaaaaggacagctccaaagtctgatgatgtctacctcaagcttactgtcaagctttaccggtttctggtaaggagaactaatagcaagttcaatggtgtgatattgaagaggcttttcatgagcaaagtcaacaaagctcctctttctctatctaggcttgtggagttcatgactggcaaggaagataagattgccgtcttggttggaactataactgatgatttgagggtacacgagattccagccatgaaagtgactgccttgaggttcacagagagagcaagggctcgcattgagaaagctggaggtgaatgcttaacctttgaccagctcgctctcagagctccattgggccagaacacggttcttcttagaggacctaagaattcacgtgaagcagtgaagcatttcggacctgctcctggtgtgccacacagtcactccaagccatatgttcgggccaagggaaggaagttcgagaaggccagaggaaagaggaagagtcgtggattcaaggtttaagaaagttgttgccgccattggacttgattctggagtactgttgcttcttggttgcttttgtaatcggatttttgttagggaactctgttttttctttcctctttcagacatgctactaagtttgcttctactggattcatcgtgtggttattacacttgcagctttactatgttaaacttaattcattatctttctac

SEQ ID NO: 99887 - protein, 199 aa, Arabidopsis thaliana; identical to SEQ ID NO: 36513
  peptide (1)..(199): Ceres Seq. ID no. 13603870

SEQ ID NO: 99888 - protein, 187 aa, Arabidopsis thaliana; identical to SEQ ID NO: 36514
  peptide (1)..(187): Ceres Seq. ID no. 13603871

SEQ ID NO: 99889 - protein, 134 aa, Arabidopsis thaliana; identical to SEQ ID NO: 36515
  peptide (1)..(134): Ceres Seq. ID no. 13603872

SEQ ID NO: 99890 - DNA, 1098 bp, Arabidopsis thaliana
  misc_feature (1)..(1098): Ceres Seq. ID no. 13603873
  misc_feature (1)..(1098): Ortholog of  Ceres SEQ ID NO 15171216 as cited in SEQ ID NO 59366
ccctcccatttgtcatcttatcttctgcgattactggtaaagtgagaaatccgttaatccctagagaaactgtaatcgtcgcggtgattcggagaaattcttctgcttccgcggaaaatgtcactaacccagatcgtgaatccaatcatatatccatctcgcacaattccacggcgtttcacggcgatctcgccttttaaaaccctaagtccccaattttcccgccacccacctcacgcactgtctcgtagactcttccttccttctgtttcctctatatgggatgccataaccggcggcggagattcgaaccctcgtgaggccatcgcagcggttcgacgcggaatgcagctcttcagacagggtgatgttgctggatcggtggcagagttcgatagagcaatcattttggatcccaggcaaaaggcatatctttggcaacgcgggctttctctttactatgtagataggtttgaagaaggtgcagagcagttccggatagatgttgctcagaatcctaatgacacagaggagtccatttggtgctttatctgcgaggcgaggctccatggtgttgatgttgcacgaacacagtttctcgaggttggtagagattctcggcctgtgatgcgagaagcttataatctattcaagaatggtggtgatcctgaaaagttagtaaatgacttctctagcggtcaagcaagcgaatacttctatgcttctctgtacgcagggctctactatgaagctgagggtaaatcagaaaacgcaaagtttcatttaaccgcggcttgtggatctccatatgggcagaggtctgatgattatatggcttcacttgctaaagtccattgcctttgtagaaactggagctccggtattctttgaaccggttcatggttttgtggagccaacatattagttattaaggcccaatttttgaaatatcagcccaattaaaaattggacctgggtttgcgatttccaacctttatttatgggcatgaataaagaaagtaccattcacaaacattataacaaataggcaacattgtgccattttggagtaccattcacaaacattttaaccaaatt

SEQ ID NO: 99891 - protein, 257 aa, Arabidopsis thaliana; identical to SEQ ID NO: 40362
  peptide (1)..(257): Ceres Seq. ID no. 13603874

SEQ ID NO: 99892 - protein, 181 aa, Arabidopsis thaliana; identical to SEQ ID NO: 40363
  peptide (1)..(181): Ceres Seq. ID no. 13603875

SEQ ID NO: 99893 - DNA, 856 bp, Arabidopsis thaliana
  misc_feature (1)..(856): Ceres Seq. ID no. 13603876
  misc_feature (1)..(856): Ortholog of  Ceres SEQ ID NO 13594918 as cited in SEQ ID NO 55747
  misc_feature (1)..(856): Ortholog of  Ceres SEQ ID NO 12587066 as cited in SEQ ID NO 63204
aacaaaaacagagcaaagtttttcaaaaaaaaaaaaaaaacagagccacgaagaaatttacagaaaattcaaaaccatcgataaagatgggagatgtgattttgttcattgatgatacgaaatcgaaagtgagaatcacgcgttgcagaatttgccatgaagaagaagaagaaagtttcttcgaagttccatgtgcttgttcaggcaccgttaagttcgcacatagaaactgcatacaacgttggtgtaatgaaaaaggaaacacaacttgtgaaatctgtcttcaggtgtataaagatggatatacagcagttttaaaacaatcgaaattgattgaacaagaagtcacaatcagagtaaatggacgaagaagaagaagaagtagaagattagtgtctatagctgaatccgatatttctcagtgtaattctgttgctgatagaggagcttcgttttgcagatcattaacttttactctttcagtatttttgctgatgaaacatacattcgatgtgatttacggaaccgaagaatatccattctctgtatttacggtactaacattaaaggccattgggatactattgccaatgttcattataattcgaacaatctcaactattcagaaaactcttcgtcgtcgtcatcaatatcctgaatctgaagaagaagataggttgagctctgacgacgacgatgacttggaagaagaagatgaagagcaacaacaacatttggcttaaaccttcaaattaacgaacttaacgaaattttttctttctttctttctaattctttctttttttaaacgaaaagcatctatttgatgctcatggtcatttttactcacaaagtc

SEQ ID NO: 99894 - protein, 246 aa, Arabidopsis thaliana
  peptide (1)..(246): Ceres Seq. ID no. 13603877
QKQSKVFQKKKKNRATKKFTENSKPSIKMGDVILFIDDTKSKVRITRCRICHEEEEESFFEVPCACSGTVKFAHRNCIQRWCNEKGNTTCEICLQVYKDGYTAVLKQSKLIEQEVTIRVNGRRRRRSRRLVSIAESDISQCNSVADRGASFCRSLTFTLSVFLLMKHTFDVIYGTEEYPFSVFTVLTLKAIGILLPMFIIIRTISTIQKTLRRRHQYPESEEEDRLSSDDDDDLEEEDEEQQQHLA

SEQ ID NO: 99895 - protein, 218 aa, Arabidopsis thaliana; identical to SEQ ID NO: 42033
  peptide (1)..(218): Ceres Seq. ID no. 13603878

SEQ ID NO: 99896 - DNA, 1682 bp, Arabidopsis thaliana
  misc_feature (1)..(1682): Ceres Seq. ID no. 13603883
  misc_feature (1)..(1682): Ortholog of  Ceres SEQ ID NO 14311854 as cited in SEQ ID NO 51455
  misc_feature (1)..(1682): Ortholog of  Ceres SEQ ID NO 14313097 as cited in SEQ ID NO 58902
tcttcttcttcttcttctttttttttcgtaaaaattcttcttcttcttcttcttctccgagctccgtccgagcagagaagaagagtaaggtaagttttagagtgcacttgtgtggcactctcatttcttatcctgcgcctcttacgatttcttatggtgcgcttctccgactagtttcggtgtctaatggactcttcctcttcttctctatctctccaagaaaaaatctcttctggttatttctagggtttcgttggttcttttttcgaaatgctttggataacgagatttgctggattattctccgccgcgatggcagtgatcgtgttatctccgtcgcttcagtcatttcctccggcggcggcaatccgttcttctccatcaccgatcttcagaaaagctccagcggtgttcaacaacggcgacgaatgtctctcctccggcggcgtctgcaatccgtcgttggtccacgtggcgatcacgttagacgtagagtacctgcgtggctcaatcgcagccgttaactcgatccttcagcactcggtgtgtccagagagcgtcttcttccacttcatcgccgtctccgaggaaacaaacctgttggagtcgctggtgagatcggttttcccgagactgaaattcaatatttacgattttgcccctgagacagttcgtggtttgatttcttcttccgtgagacaagctctcgagcagcctctgaactacgctagaagctacttagcggatctgctggagccttgtgttaaccgtgtcatatacttggattcggatcttgtcgtcgtcgatgacatcgctaagctttggaaaactagcctaggctcgaggataatcggagctccggagtattgtcacgcgaatttcacgaaatacttcaccggaggattctggtcggaggagagattctccggtacctttagagggaggaagccatgttacttcaacacaggtgtgatggtgatagatcttaagaaatggagaagaggtggttacacgaaacgtatcgagaaatggatggagattcagagaagagagaggatttacgaactaggctcgcttccaccgtttcttctagttttctccggtcacgtggctcccatctctcaccggtggaaccagcatggacttggtggtgacaatgttagaggtagctgtcgtgatttgcatcctggtcctgtgagtttgctgcattggtctggtagtggcaagccctggataagactcgattccaaacggccttgtcccttagacgcattatggacgccttacgacttgtatcgacattcgcattgacgtttcagcgaatggtggtgctatatgaggagagagtagaggaaggtttcattggtcttgaccggcccagtctgaaagaaaatcaaaggtagcttttgtagtagaagatgaaaaccctttgccgataaaatgggtttggtttagccaaaccggagacacaactgagatgtgggaattttattttcaaaccggcgggttggatcatatttttttttgttttgttgggggacaaaaaaaatcaatcagagttaggttattcatgtggatgagattctgtttttttttttatcattaatttgtgtttaaaaaacattctttcttattttgtgcagatacttattctctttgaaaaataataattagaattaccc

SEQ ID NO: 99897 - protein, 346 aa, Arabidopsis thaliana; identical to SEQ ID NO: 35235
  peptide (1)..(346): Ceres Seq. ID no. 13603884

SEQ ID NO: 99898 - protein, 332 aa, Arabidopsis thaliana; identical to SEQ ID NO: 35236
  peptide (1)..(332): Ceres Seq. ID no. 13603885

SEQ ID NO: 99899 - protein, 173 aa, Arabidopsis thaliana
  peptide (1)..(173): Ceres Seq. ID no. 13603886
FFFFFFFFRKNSSSSSSSPSSVRAEKKSKVSFRVHLCGTLISYPAPLTISYGALLRLVSVSNGLFLFFSISPRKNLFWLFLGFRWFFFRNALDNEICWIILRRDGSDRVISVASVISSGGGNPFFSITDLQKSSSGVQQRRRMSLLRRRLQSVVGPRGDHVRRRVPAWLNRSR

SEQ ID NO: 99900 - DNA, 2140 bp, Arabidopsis thaliana
  misc_feature (1)..(2140): Ceres Seq. ID no. 13603887
  misc_feature (1)..(2140): Ortholog of  Ceres SEQ ID NO 12597287 as cited in SEQ ID NO 63982
atcactctctcattaatcgaacttggcgtgtttaaataatcttccgatcgttaattctcttccgatttcgattcgattttagcggcgatgtctctcagacctagcgcgaagacggaggtgcgacggaatcggtacaaagtagcggtcgatgcggaggaaggacggcggaggcgagaggataacttggttgagatcaggaagaacaagagagaggaaaatttgcagaagaagagatttacgtcttctatggcttttggctcagcaacgggacaaacggaacaggatctttcttcagcgaaccaattaaaagataatctacctgctatggttgctggaatctggtcagaggatagcaattcacaattggaggcaacaaatctcttgcggaaactgctttctattgaacaaaatcctcctatcaatgaagttgtacaatctggtgttgttcctcgtgttgtgaagtttctttccagggatgacttccccaaacttcagtttgaggcagcttgggcgctcaccaacattgcttcagggacatcagagaacacaaatgtcatcattgaaagtggagctgtcccgatattcatccaacttctcagctctgctagtgaagatgtccgcgaacaggctgtttgggcattgggaaatgttgctggagactcaccaaaatgccgggatttagtcctaagttacggtgccatgacacctcttctgtctcaattcaatgagaatacaaagctttcaatgctgagaaatgctacatggacattatcaaacttctgcagagggaagcccccacccgcatttgaacagacacaaccagctttaccagttcttgagcgccttgtgcaatcaatggatgaagaagttctcacagatgcatgctgggctctgtcatacctctcggataattcaaacgacaaaatacaagcagtcattgaagcaggagttgttcctcgcctcatccagctcttaggtcattcgtcgccatcagtgctgattcctgctcttcgtaccattggaaatattgtaaccggggatgatctacagactcagatggttctcgaccagcaagcgcttccttgtcttttgaaccttctaaaaaacaattacaagaagagtatcaagaaggaagcttgctggactatctccaacattacagctggaaatgcagatcagatacaagcagtgattgatgcaggtataatccagtctcttgtttgggtgcttcaaagtgcagagttcgaagtaaaaaaagaagctgcttggggaatatcaaatgctacttctggtggcactcatgatcaaatcaagtttatggtgagccaaggctgtatcaaacctctatgcgatctccttacttgcccagatctgaaagttgtaacggtttgcttagaagcactagagaacattctcgtggttggagaagcagagaagaacttaggtcacacaggagaagacaacctctacgctcaaatgattgacgaagcagaagggttagagaagattgagaatcttcagagtcacgacaacaatgatatctacgacaaagccgtgaagatcctcgaaacattttggactgaagacaatgaagaagaaggcaacgacgagaatcatgctccacaatctggtttccagttcggaagcaccaatgttcctcctggtcaattcaactttatttgaaagacaacaagaacaacaacatagccagatataatgctgtcttcaccagcttttgctgcagcacgttctactctcggtcgtcgtcttcatgcgaagagactatcttcttctactggtcgaaccgctgatccagagattcatgcccgtaacgatggagacgagcctagtctttttccatcagaccccgagggtttggatgatgtagcgaacccgaagactccagcggatgaggatgtaccggatattcgaccacccggttttgtaaaggaaccgctttctccgccaaaaaatcccagagatacttcacacaagcttgaatctactcccgttggtctacctgcagatctcaatttccaacagaaacgaaattaatagcagcaaacgccttagccgttatggccttctagatcattcagaaatgcttacttttgattagctttgagaataaaatttaatt

SEQ ID NO: 99901 - protein, 531 aa, Arabidopsis thaliana
  peptide (1)..(531): Ceres Seq. ID no. 13603888
MSLRPSAKTEVRRNRYKVAVDAEEGRRRREDNLVEIRKNKREENLQKKRFTSSMAFGSATGQTEQDLSSANQLKDNLPAMVAGIWSEDSNSQLEATNLLRKLLSIEQNPPINEVVQSGVVPRVVKFLSRDDFPKLQFEAAWALTNIASGTSENTNVIIESGAVPIFIQLLSSASEDVREQAVWALGNVAGDSPKCRDLVLSYGAMTPLLSQFNENTKLSMLRNATWTLSNFCRGKPPPAFEQTQPALPVLERLVQSMDEEVLTDACWALSYLSDNSNDKIQAVIEAGVVPRLIQLLGHSSPSVLIPALRTIGNIVTGDDLQTQMVLDQQALPCLLNLLKNNYKKSIKKEACWTISNITAGNADQIQAVIDAGIIQSLVWVLQSAEFEVKKEAAWGISNATSGGTHDQIKFMVSQGCIKPLCDLLTCPDLKVVTVCLEALENILVVGEAEKNLGHTGEDNLYAQMIDEAEGLEKIENLQSHDNNDIYDKAVKILETFWTEDNEEEGNDENHAPQSGFQFGSTNVPPGQFNFI

SEQ ID NO: 99902 - protein, 478 aa, Arabidopsis thaliana
  peptide (1)..(478): Ceres Seq. ID no. 13603889
MAFGSATGQTEQDLSSANQLKDNLPAMVAGIWSEDSNSQLEATNLLRKLLSIEQNPPINEVVQSGVVPRVVKFLSRDDFPKLQFEAAWALTNIASGTSENTNVIIESGAVPIFIQLLSSASEDVREQAVWALGNVAGDSPKCRDLVLSYGAMTPLLSQFNENTKLSMLRNATWTLSNFCRGKPPPAFEQTQPALPVLERLVQSMDEEVLTDACWALSYLSDNSNDKIQAVIEAGVVPRLIQLLGHSSPSVLIPALRTIGNIVTGDDLQTQMVLDQQALPCLLNLLKNNYKKSIKKEACWTISNITAGNADQIQAVIDAGIIQSLVWVLQSAEFEVKKEAAWGISNATSGGTHDQIKFMVSQGCIKPLCDLLTCPDLKVVTVCLEALENILVVGEAEKNLGHTGEDNLYAQMIDEAEGLEKIENLQSHDNNDIYDKAVKILETFWTEDNEEEGNDENHAPQSGFQFGSTNVPPGQFNFI

SEQ ID NO: 99903 - protein, 452 aa, Arabidopsis thaliana
  peptide (1)..(452): Ceres Seq. ID no. 13603890
MVAGIWSEDSNSQLEATNLLRKLLSIEQNPPINEVVQSGVVPRVVKFLSRDDFPKLQFEAAWALTNIASGTSENTNVIIESGAVPIFIQLLSSASEDVREQAVWALGNVAGDSPKCRDLVLSYGAMTPLLSQFNENTKLSMLRNATWTLSNFCRGKPPPAFEQTQPALPVLERLVQSMDEEVLTDACWALSYLSDNSNDKIQAVIEAGVVPRLIQLLGHSSPSVLIPALRTIGNIVTGDDLQTQMVLDQQALPCLLNLLKNNYKKSIKKEACWTISNITAGNADQIQAVIDAGIIQSLVWVLQSAEFEVKKEAAWGISNATSGGTHDQIKFMVSQGCIKPLCDLLTCPDLKVVTVCLEALENILVVGEAEKNLGHTGEDNLYAQMIDEAEGLEKIENLQSHDNNDIYDKAVKILETFWTEDNEEEGNDENHAPQSGFQFGSTNVPPGQFNFI

SEQ ID NO: 99904 - DNA, 1834 bp, Arabidopsis thaliana
  misc_feature (1)..(1834): Ceres Seq. ID no. 13603891
  misc_feature (1)..(1834): Ortholog of  Ceres SEQ ID NO 15171476 as cited in SEQ ID NO 55569
  misc_feature (1)..(1834): Ortholog of  Ceres SEQ ID NO 14312069 as cited in SEQ ID NO 59191
aaagcagcttctgcaacctattcgttggttggttaatagaagctctctttctctgtctgtctttctctctcagagaaatggctcttcttctagtttcttcttcctcctcctatgccctcagagtcaccattttcttgtctttcttcttctttctctgcaatggcttctcttaccctactacttcttctcttttcaacacccatcaccatcgtcaccacttggccaagcacaactacaaagatgctctcactaaatcaatcctcttctttgaaggccaaaggtcagggaaacttccttctaaccagagaatgagttggagaagagactctggtctctctgatggctctgctcttcatgtggatttggttggagggtactatgatgcaggagacaatatcaaatttggtttcccaatggcattcacaaccacaatgctttcatggagtgtaattgaattcggtggactcatgaaatctgaattacaaaacgctaaaatagcgattcgttgggctactgattatctcctcaaagccacttcacaacctgacacaatctatgttcaagttggtgatgctaataaagaccattcttgttgggaaagacctgaagacatggatactgtaagaagtgtgtttaaagttgacaagaacattcctggttctgatgtcgccgctgaaaccgccgctgctctagccgccgccgccattgtattcagaaaatctgatccttcttactccaaagtcctcctcaaacgagccatcagtgtttttgcatttgcggacaaatacagaggaacttatagtgcaggattaaaacctgatgtttgtccattttattgctcttactctggttatcaggatgaattgttgtggggagctgcttggttacaaaaagcgacaaagaatataaaatatttgaattacataaaaatcaatggacaaatccttggagctgctgaatatgataacacttttggttgggataacaagcacgctggtgccagaatccttcttactaaggcatttttggttcagaatgtgaagacacttcatgaatacaaaggtcatgctgataatttcatctgctctgttattcctggagctcctttctcttctactcagtatacaccaggtggattattgtttaaaatggcagacgccaacatgcaatacgtgacgtcaacatcgttcttgctcttaacctatgccaaatacttaacctccgccaaaaccgtcgtccattgcggtggctccgtctacactcccggtcgtcttcgctccatcgccaaaagacaggtggattatcttcttggagacaacccattaagaatgtcttacatggttggttacggtccaaaattcccacggagaatccaccaccgtggctcctcattaccttgtgttgcaagccacccggccaagatccaatgccaccaaggatttgcaatcatgaactctcaatctccaaaccctaacttccttgttggtgcagtcgttggtggtccggaccagcatgatcgcttcccagacgaacggtctgattacgagcagtccgagccggctacttacatcaattcaccactcgttggagctcttgcctacttcgcccacgcctatggtcaactctagtttagtaacgagtgtgttagtttaagtaaaaataaaaatgaaggaagttttatctttgtttttacttttatttgttagtaatgtagtggaccgaaaatcggatcacaagtggacattggtccgagggatggtttatttggttcgttataatataacgtcaagtgtaatcttattgtggttattaatgttatcatcctattaattac

SEQ ID NO: 99905 - protein, 541 aa, Arabidopsis thaliana
  peptide (1)..(541): Ceres Seq. ID no. 13603892
SSFCNLFVGWLIEALFLCLSFSLREMALLLVSSSSSYALRVTIFLSFFFFLCNGFSYPTTSSLFNTHHHRHHLAKHNYKDALTKSILFFEGQRSGKLPSNQRMSWRRDSGLSDGSALHVDLVGGYYDAGDNIKFGFPMAFTTTMLSWSVIEFGGLMKSELQNAKIAIRWATDYLLKATSQPDTIYVQVGDANKDHSCWERPEDMDTVRSVFKVDKNIPGSDVAAETAAALAAAAIVFRKSDPSYSKVLLKRAISVFAFADKYRGTYSAGLKPDVCPFYCSYSGYQDELLWGAAWLQKATKNIKYLNYIKINGQILGAAEYDNTFGWDNKHAGARILLTKAFLVQNVKTLHEYKGHADNFICSVIPGAPFSSTQYTPGGLLFKMADANMQYVTSTSFLLLTYAKYLTSAKTVVHCGGSVYTPGRLRSIAKRQVDYLLGDNPLRMSYMVGYGPKFPRRIHHRGSSLPCVASHPAKIQCHQGFAIMNSQSPNPNFLVGAVVGGPDQHDRFPDERSDYEQSEPATYINSPLVGALAYFAHAYGQL

SEQ ID NO: 99906 - protein, 516 aa, Arabidopsis thaliana; identical to SEQ ID NO: 42712
  peptide (1)..(516): Ceres Seq. ID no. 13603893

SEQ ID NO: 99907 - protein, 439 aa, Arabidopsis thaliana; identical to SEQ ID NO: 42713
  peptide (1)..(439): Ceres Seq. ID no. 13603894

SEQ ID NO: 99908 - DNA, 1176 bp, Arabidopsis thaliana
  misc_feature (1)..(1176): Ceres Seq. ID no. 13603895
  misc_feature (1)..(1176): Ortholog of  Ceres SEQ ID NO 13586635 as cited in SEQ ID NO 14217
  misc_feature (1)..(1176): Ortholog of  Ceres SEQ ID NO 15170220 as cited in SEQ ID NO 55383
  misc_feature (1)..(1176): Ortholog of  Ceres SEQ ID NO 14304198 as cited in SEQ ID NO 56479
  misc_feature (1)..(1176): Ortholog of  Ceres SEQ ID NO 14316543 as cited in SEQ ID NO 57118
  misc_feature (1)..(1176): Ortholog of  Ceres SEQ ID NO 12616285 as cited in SEQ ID NO 63483
acctgagagtaaagaagtgagaaggagaagaaagaagcaatggagaagatagagcacacgacgatatctaccaatggtattaacatgcatgtggcttcgattggttcaggtccagtgatcctattcgtccatggctttcccgatctctggtactcatggcgtcaccagcttgtctctttcgctgccttaggttaccgcgcaatcgctccagatcttcgaggatacggcgattccgatgcgccgccgtctcgtgaatcttacaccatccttcatatcgtcggagacctcgtcggattactggattcgctcggtgttgatcgggttttcctcgtcggtcacgattggggagcaattgttgcgtggtggctttgtatgatcaggcctgatcgagtcaacgcgttggtcaacactagcgttgtgtttaatccgaggaatccttctgtgaaacctgttgatgcgtttagggctttgttcggcgatgattactacatttgcaggtttcaggagcctggagagatcgaagaggactttgctcaagttgatacaaaaaagttaataaccagatttttcacttcgcgtaacccacgtccaccttgcattccaaagtcagttggtttcagaggtttacctgatccaccttctttgcccgcttggctcaccgaacaagatgtcaggttctacggagacaagtttagccaaaaaggcttcaccggtgggctaaactactatcgcgccctgaacctaagctgggaactaacagctccatggaccggtctacaaatcaaagtccctgtgaaattcatagtgggtgatctagacataacatacaatatccccggaacaaaggaatacatacatgaaggtggtttgaagaagcacgtaccttttctacaagaagtggtggtaatggaaggtgtaggtcacttcctccatcaagagaagcctgacgaggtcactgaccatatctatggcttcttcaagaaattcagaacccgcgaaaccgcatccttgtagtagttctccgtctgcacaatgtcaaattcaaggttgattaagcttgatcagggttacttactgtcttagagccctactatgtaatgttttcaaggatgctatctgtgtattgtgcttgtttaataatttagcaaaatataataatagaacaaataatttctc

SEQ ID NO: 99909 - protein, 324 aa, Arabidopsis thaliana; identical to SEQ ID NO: 29756
  peptide (1)..(324): Ceres Seq. ID no. 13603896

SEQ ID NO: 99910 - protein, 309 aa, Arabidopsis thaliana; identical to SEQ ID NO: 29757
  peptide (1)..(309): Ceres Seq. ID no. 13603897

SEQ ID NO: 99911 - protein, 213 aa, Arabidopsis thaliana; identical to SEQ ID NO: 29758
  peptide (1)..(213): Ceres Seq. ID no. 13603898
